United States Patent Application Publication US 2017/0114356 A1 - sequence listing, part 7

SEQ ID NO: 7779 - DNA, 5805 bp, Zea Mays
gtatgataggaagcaagatgtgcataccgagcgagaaccgactatcctcgaagtcgaatgatcttcgacaggggtggtccatgcgtttgagctaaacgatacaggactggctgtagcggactcctgcagcttgagccgaaaaaatggtgtctgccggctaaatccactgtcctcttgcaaatcccatctccctctcgccgccgccgctgcctccgctccgctcccctccccgtcctactcccgctcccactgtcccacccaccacccgaaccttaaacccccacgaacttcgcccaaaccctaaacctcgtcgagccgcagccccgccatgccgaaggtctttggcaccggcgtcttcgagttccggcacccccgagcggccgagtacccactacccgcggacgccgcccccgctacggctgcggcgcccgacaaagttcccgcatccaccggcggcggctccatcacgctcctcgacatccagcgggaccgcctcacccgcgtcgccaccgagcattggggcacggccgccgctgcggcggccttcgacgcggaccttgtcaggaagatctatggcactgagctccgcgtcgaggggaggggccggaaaactgtgccgctgcagcgtgttatgatcctcgaggtcagccagtaccttgagaactacctgtggccgcacttcgacccggttgacgcttccttcgagcacgtaatgtccatcatcctcatggtcaacgagaagtttcgggagaatgtggcggcttggacatgtttccatgaccggaaggatgcattcaaggggttcctgtggcgggttctcaagctcaaggaagaggaaagggctcttaatatggcagagaaaacaaattacctcctgtttatgataaattcatttcagagtttggaggacgagcttgtccgggaaacaatacttcagttagtaagcctaaagctgtggaataccctttcgtttggacgacttcagatggaactctgcctaaaccctgaattgattaagaagtggaccaaaatcagaagaagagaggcaaaggaagcgaaaaaggctgaccaacctatcaacccttctgaaatgctcgagaataagttccttaggaatttaattgaagaattcgtggagattctcaattcaaaggtcatactatccaatcaagatggtgctgaagaatctgtattgaatgagtctttcagtgggcaaattgacgattcttgcgttctatattgtgagagatttatggaatttttgattgacatgttaagccagcttcctactagacgatttttgaggcccctggttgctgatgttgctgttgttgccaagtgccacttaagtgcactctacactcatgaaaagggacggctttttgcacagttggtcgacttgctgcagttttatgaaggttttgagattaatgatcactctgggacacagctcggtgatgatgatgtcctgcaggcgcattattcccgtttccaagcttttcagttgctagcatttaaacaagtgcctaagctgcgagattttgccttgtccagtattggttcactccataagcgagctgacttaacaaaaaagttgcttgtcttgtcagatgtggagctgcaagatctggtttgtaacaagcttaagttaatctcagagaaagatccatgcagtgaaagacgcgattttcttattgaagtcctagttgctttttttgagaagcggcaatcccaaaaagatgcagtaaatgcacttcctttgtatccaaatgagcagatcatgtgggatgaaagccttgttcctagcattaattactctggagaaggctgtcttgccctcccaaaactcaatctccaattcctgacgcttcatgattatttgttaagaaatttcaatctgtttcgtcttgaatcaacctatgaaattcgtgaagacattcaggaagctgttcctcatctacatgcttatatcaataatgagggagagacagccttccgtggatggtcaagaatggctgttccgatcaagggatttaagattacagaagtgaagcagccaaacattggagaagttaagccttctgctgtaactgctgatgttactttcagcatatcaagctacaggtatcagataaaatctgaatgggatgctctgaaggagcatgatgttctatttttgctgtcaatccgcccttcatttgaacctcttagccctgaagaggctgaaaaatcaactgtgccagaaaggttaggattgcaatatgtacgtggatgtgaggttattgaaattcgtgatgaggaaggagcactcatgaatgatttcacaggaaggataaaacgagaagagtggaaaccacccaaaggtgaaattcgtactgtccgagttgccttagatacagcgcagtaccacattgatgttaccgagacagcagagaagggcacagaaaatgtgtatggaacatttaatattctaatgagaaggaaacccaaggagaataatttcaaagcaatcctggaatctatacgtgatctaatgaatgaaacatgtgtagttccagaatggttgcataacatattcttgggttatggaaatccttcggccgcacagtggatgaatatgcctgatcttctggaagttatagatttcaaggacacttttcttgatgccaaccatgttcagcaaagttttccagattaccaggttacatttatcaattctgatggtacaaaaaacctgcatccaagtcccccttttaaaatcaggctatccaagaaaatgagggaaagcagtcatgctttacctggcaacatgaactccaatttgactgttaagagcagaaataatatggctgatggggagcctcagaaagagaaactaattgttgaaacttacattccagctgatcctgggccgtatcctcaagataaacctaaacagaactcagtgaggttcacaccaactcagatcggtgctataatatctggtattcaacctgggttgacgatggttgttggtcctcctggtacgggaaaaacagatactgctgtgcagatattaaatgttctatatcacaactgtccttcacaaagaacactgattataacccactccaatcaggctttgaatgatttatttgagaagataatgcagagggatgtgcctgctaggtaccttctccgccttggtcagggtgagcaagaattggccactgatcttgattttagtcgtcaaggtcgtgtcaacgctatgctggtccggcggctagagctgctcggtgaagtttctaaattggcgagatctcttcgtcttccagaagatgtgggctacacatgtgaaactgctgcatatttttggctattacatgtttatgcccgttgggaacaattcttagctgcctgtgctcaaaatcaagacaaaccctcttttgtcaaagaccgcttccccttttcagagttcttttcagatactccgcagcctatttttaccggcgagtcatttgagatggatatgcatgcagcgaaaggttgtttcaaacatctttctacaatattccaagagttggaggagtgtagggcttttgagctacttaagtcaacagtggagcgagcaaactatctaatgactaaacaggccaagatagttgctatgacttgtactcatgcagcattgaagaggagggactttcttcaattaggtttcaaatttgacaatttgctgatggaagaaagtgcacaaatattggagatagaaacttttataccgatgctgctgcagcggcaggaagatggccatgctcgtcttaaacgttgcattttaattggtgaccaccatcagttaccccctgttgttaagaacatggcttttcagaagtatagccacatggaccagagtctctttacaaggtttgttcgacttggtgtcccttatattgagctcaatgcccagggtcgtgcaagacctagtattgctgaactttataactggagatacagggagctgggagatctgccttatgtccgtgagcaagcaatcttccataaagctaacgccggattctcttttgagtatcagttagttgatgttcctgattataagggaaaaggtgagtcagcgccttctccttggttttaccagaatgaaggggaggctgagtatattgttagtgtgtatatctatatgcgcctgattggctaccctgccaataagatttcaatattgaccacctacaatggtcagaagcttcttattcgtgatgttatcaacaaaagatgcaaaccatggaatattgagccccctaacaaggttaccactgtggacaagttccagggccagcaaaatgatttcattttactttctcttgtccgtacccgttttgtgggtcatcttcgtgatgtcagaagacttattgtagctatgtcccgtgctcgtctgggcttgtacgtgttctgccgtcgttcactgtttgaacaatgttacaaattgcaaccaacattccagctgctcctccaaagatctgataagcttgccttgaatcttgaggagtgcactccttttaccgagcgacctttggaggaaactggaaacatccattacattactggtattgaagacattaattcatctagtaaagttcaggctggaacatcttcgtcaagtgcaatacatgcagtattatgctcctccggcaaatgaactgcctcaagcagcaccagaaaatattgctgatgcaatcccttctgaaaatggcaatgctggaagggctctgaatgatggaaacgaggacatgacccgggaagaaaatggtggtgcaactgacacagtgatcagtaataggatagaggaagacagcgttgaggcaaaggatgacatgacacaggaaggggacaagggtgaagtgagtggcaagggtcacatggctacagaggataggaaaggggaagcacaaggtggcgcagatggcaagctggaggaagcaaatgtgatgtcggcggacaagatgatggaggaagcaaatgcgacgtcggcagacaagatggaggaagcaaatgccacgtcggcggataagatggaagaagcagatgccacgtcgtcggacaagatggaagaagcagatgccacattgccggacaagatggaagaagcagatgccacattgccggacaagatggaagaagcagatgccacattgccggacaagatggaggaagcaaatgccatgtcgccggacaggatggaggagaaaaattctgatccgaaggacaagatggatgaggagtgacgtggtggtgtaaccagttttgaaatagcggtagacttgttctgtcagccgcatatcttgatttggaacatcatgtattcacctgtgttaccgcagatgaagactgatacgtgctccccaagaggtgtagccttgtgggcagaatcaagatcgacatatgatgaccatgttcctgcggttaatggtggtgaaggctgttttccctaccatcttggccaggctatgctggaaaatgttccttctcttccagccaagggtatccatgtttccgcatgtgtttaatcgtgtaaactgtagaggattttttgggtagttttttctgaaacacccgttccatctatcgttgtctccgtaacataacacagctggaacgttgcttttgtatacttgactgactactataattttggcacaagcattagatttttgcagatttgataggccttatcggccattcaaaattttgatttgacagaccaactcacccagcctataaaagagaagcaaatgggagtaagaaataaat

SEQ ID NO: 7780 - DNA, 1505 bp, Zea Mays
gcaggccgcagccgcccttcccgtccttctttctcgtgaacagagcagggcaggctcaccagccagcacgcgcggccacgccacacccgcggagacgcggcacgcctccactcctcggccctcccccgactccgaggcgagcacgccgcacgctccgcctcgcagtcgcggccccgtgctctcttccttcttctccgtccaccgtcttctccttcttcgctcggagggttcgatctggtaactctggtgagaagtgaagacttagcacagtctgtgctcgtcaagtgccctggcactctggcaggatgcggtggctcggtctttcggtggcactctggtagttgtgtccatgggggacaaggttaatccctggtgccactgccattggcataatcctgcatggaaatccgacactgaaagttgtgccggcgatctccacccacctgacgctgggcatcttaccgccgattcggtcgcgttggctccaattttggaattccctccaccgtacccctcacgcaagaaaccgaggagggtatgcacgagaacagggacgagatcaacgcgctcctggacaccgacaggcagtctggtggcgcagccttgagcgtggagtcggtggccagcgctggcgctggcgctggcgctgcgccgccgccggcagccaagaagagaaggctcagctcctgcaccgacaagtccgtcgttgacacggccagttcagcagcaaggcctcctgagcgttccatggagcaggagcagagggttgaacttgcgaacgaccgcgacgcgcagtcgtgctgcgttggggaggtggaaagcgggcgcaggtttgctctgggggaggcggaagcggaagcggcagagggcgacagccccgacgagcagaggcggaggagggagaggatccaggagactgttgccgcgctcaggaacatggtccccgggggcatcgcgaaagacgccgcggctgttctggacgaagcgatctgctacttgcagtacctgaagctgaaagtgaagacgctgggagctgtctccctctagctaagcctatctagccctctctcctcgtcgtggtggctttgttgtcgaaggccgaagccactggcttctggtgagaggagagctagcctatatcacccatctgttcagttcagtcccagaggagctcggatcttctcctacccgactcactgtcggtggctgcatcacccatcttcctcatcgtgggttggtatgcaaaagctagaaacatctttccgctgagcgtgatccaaagcgaagcccccattccatgcaaagcgctgggtcgtgccgtgcgtggggtggctcctgctttatatacgcgttgtgctcctgctttggctgatgtttgctttggtagttatatatagttctgtgtactacaaagtaaagtaagtcttgtaaaacgtgcacatcctccaggcgggtttgtttctctgctgcccgtctcctatcctgctggccatgattgtttggag

SEQ ID NO: 7781 - DNA, 1423 bp, Zea Mays
cagcagatagatagagaaatgaagagatagattagagttaccatcatatccccaacaatggcatagccaacaagttggatccttcggaccctgtagctcctggtccatgaattgccaagagaacaccttttagtttctttgagcaacctcgatctcgccatggggttccgctgtggccgtgcctcctcttcgctgctgtgtgaagaggacgtggccggcatgtttggatgcaatgggcacgacgacgaagaggtggggcttctggtgttggggatggacacgacttttgctgcgctgccatcacagagcgacgaggtcgtagcatccctgatggagaaggagaaggagcagctgcatagcgttgcgacgggggattacctccagaggctgagcagtggaggactggagtcatcttgtaggattgccgccattgattggataaaaaaggcccaggcttatcacgactttggaccgttgtctgcttatcttgctgttaactaccttgatagggtcctctccacaaatcaagtcccagctgatgctgaccaccagccctggatgccacagctgctgtccgttgcttgcctaaccattgcagccaagatggaggagaccgtggttcctcgccgtctggacatccatcagaatcaggttctcagcgagaagtacagattcgatttagatgctattcagaggatggagatttacattctagactctctgaattggaggatgcaagctgtgacgccattctcttacatcaactatttcgtggacaagttcactgatgggaagccgctaagttgcggattcatttctcggtgcaccgagatcatacttggcagtcttgaagcaacgaagctcctacagttcaggccttctgagatggcagcagcagtggttctgtcagcagctgctgagtctcaagtcattgccttcagcggcgctcttttagcttctaatatccttgtcaataaggaaaatgtaaggagatgccatgaagcattgcaagaagtgggattagtgaagaagaaaacagactacagtgcgagtccatctcgcgtgctagatgcctcatgcttcagcttcaagactgacgataaccagacagccggttcatcccaatcccaagcaaacaacaatggcaactacaaccaggcttactctccagctagcaagaggacaaggctagacatctagactcaatcaggaaaaattgcatgagatcatagacgtacacatatacacacaaagttttcttagataaaggatacataaagttaaatttgattctggctacatttctgagtacgtgcttctcaactcagaagagttcatagggaacattatacatgcatgcatgctaacaggcaaaagaaggctgaattattaagagcaatcctatttatttcctcctttgttc

SEQ ID NO: 7782 - DNA, 2591 bp, Zea Mays
cgcgcctcacagcgacacccacaagaccacgcccccggtcgtgcatcatcatcatcgctcgcgtcttcgagttcgaggacatggagaggccgcgttgctactctccgcttgccctgcacctcctcctctgcctcttctcgctccgcgcctgttccgccgcgtccatcacagccggcacccccgacgagtcggagctgtgggggtacgtcgaggtccggccaaaggcgcacctgttctggtggtactacaagagcccgcagaagacgtcgacgccgtccaagccatggcccacggtcctctggctgcagggcggcccgggcgcgtccggggtcgggctcggcaacttcctggagatggggccgctggacgtggacctgaagccgcgcaactcgacgtggctccacaaggccgacctcatctttgtggacaacccggtcggcacagggtacagctacgtggaggacgacagcctgttcgtgaccagcgactggcagcaggccgcggacatgacgacggtggtcagggcgctggcgaaggaggtgcccaccctggcgagcagcccgctgttcctggtcgccgagtcctacggcggcaagtacgccgccacgctcggcgcgtccattgccagggccgtccgcgctggcgagctcaacgtcacgctcggaggtgtggcggttggagatagctggatctcgccggaggatttcacggtgaggttgaccattcctagtttcgttagtgcagaaataaaccacggacacattacagagctaatagttacctgctaaaattagctaaatacatttagtctagctaataatttaactattagctattttagtaaactagcgtatagcctgtactaatatattatctagccaaacaataatttatattgtttgtttaccctttaacttatttaagtttgattatataatctagaggatatccaaacctataaaactaatagctagaagctaaaactagctatctcaacctagctaaaaccagctaataagtgattggcgattaaattgctccgaaccatttctacctattagcttattagaaaaagggacgtggatagcttatcagaataatctagggtattagctttagatttagaacatcctcagctaataatagttagccagtaacaattagttgtagaggtttggcttcatctagactaatgctactaaccgagactaaattagaccagtgattttagtcttgttttccatctgatcgggactaaaagatgaagacttgttctgtactagtgttctcttggataaatcacaaatgatgaatacgcatgtgataattaaagtgaggcctgagtgctgctgcagctttcctacacaccgctgcttctgagcgtgtcgaggctggacgacaacgccggcgacgaagcaaacaagaaggcggagacggtgaaggagcaaatcgtggcggggcagtgggccgcctcgcagaagtcatggggcagcctgctagatttcatcgacacaaagagcggcaacgtcgtaagactagtttacttatcttcgttcttatattcaaacttcactcttcgaacaatataatctacagtgcaatctcttttttttggcaggacgtttacaatttcatgctcgactccggcatggacccggtggcactgcccgtgggttcttcatcactgatgagcagcttgcaggcgatgaagtactcgacgtacggccaggactcccagcctggctccaacaccattgacggcatcatgaatggggtcatcaagcaaaagctcaagataatccccaagaacttcacgtggggggagcaatccgactcggtctacaacgcgctggtcaacgatttcatgaaaccgaagatcgatgagattgatgagctgctgtcttatggcattaatgtgacggtgtacaatggccagctcgacgtaatctgctcgaccaacggagcagaagcatgggttcagaagctcaaatgggatggtctgaggaccttcctgagcctgccaaggcagcccctctactgtggcgccagcaagggtaccaaggcctttgtcaggtcccacaagaacctgcatttctactggatacttggagcagggcactatgtgcctgcagaccagccctgcatcgcgctaagcatgatcagcagcataacccagtcgccagcaagctagttcactgactctatgtggtgtatgccaagaacaaaggaggcgttgaagcaggtagcgcaaggtcccggaggaccattcggcgttcttgaagtgcggtataggttggatacctgaaagacgatgcagttgacaaggacattttttttacagaaaaagatccgataaaaacatatatgatctacgtattacaaaatattgtaaagaggccggaacttgtttttttaataatagaaatgtatctggcttcatcctggtccaaataacgtgccaaataacgtgaaaaatacattgccgcattctctagcttgcggaatgcctgcaacatcggctcctgctcctcagacattgtatttgggcccaagatccaagccaatgcattcgactgaaaatgacatacaag

SEQ ID NO: 7783 - DNA, 1896 bp, Zea Mays
cacctattttaaaacgggcctcggcgctcgccctcttggccacagcgcgcctcacagcgacacccacaagaccacgcccccggtcgtgcatcatcatcatcgctcgcgtcttcgagttcgaggacatggagaggccgcgttgctactctccgcttgccctgcacctcctcctctgcctcttctcgctccgcgcctgttccgccgcgtccatcacagccggcacccccgacgagtcggagctgtgggggtacgtcgaggtccggccaaggcgcgtccggggtcgggctcggcaacttcctggagatggggccgctggacgtggacctgaagccgcgcaactcgacgtggctccacaaggccgacctcatctttgtggacaacccggtcggcacagggtacagctacgtggaggacgacagcctgttcgtgaccagcgactggcagcaggccgcggacatgacgacggtggtcagggcgctggcgaaggaggtgcccaccctggcgagcagcccgctgttcctggtcgccgagtcctacggcggcaagtacgccgccacgctcggcgcgtccattgccagggccgtccgcgctggcgagctcaacgtcacgctcggaggtgtggcggttggagatagctggatctcgccggaggatttcacgctttcctacacaccgctgcttctgagcgtgtcgaggctggacgacaacgccggcgacgaagcaaacaagaaggcggagacggtgaaggagcaaatcgtggcggggcagtgggccgcctcgcagaagtcatggggcagcctgctagatttcatcgacacaaagagcggcaacgtcgtaagactagtttacttatcttcgttcttatattcaaacttcactcttcgaacaatataatctacagtgcaatctcttttttttggcaggacgtttacaatttcatgctcgactccggcatggacccggtggcactgcccgtgggttcttcatcactgatgagcagcttgcaggcgatgaagtactcgacgtacggccaggactcccagcctggctccaacaccattgacggcatcatgaatggggtcatcaagcaaaagctcaagataatccccaagaacttcacgtggggggagcaatccgactcggtctacaacgcgctggtcaacgatttcatgaaaccgaagatcgatgagattgatgagctgctgtcttatggcattaatgtgacggtgtacaatggccagctcgacgtaatctgctcgaccaacggagcagaagcatgggttcagaagctcaaatgggatggtctgaggaccttcctgagcctgccaaggcagcccctctactgtggcgccagcaagggtaccaaggcctttgtcaggtcccacaagaacctgcatttctactggatacttggagcagggcactatgtgcctgcagaccagccctgcatcgcgctaagcatgatcagcagcataacccagtcgccagcaagctagttcactgactctatgtggtgtatgccaagaacaaaggaggcgttgaagcaggtagcgcaaggtcccggaggaccattcggcgttcttgaagtgcggtataggttggatacctgaaagacgatgcagttgacaaggacattttttttacagaaaaagatccgataaaaacatatatgatctacgtattacaaaatattgtaaagaggccggaacttgtttttttaataatagaaatgtatctggcttcatcctggtccaaataacgtgccaaataacgtgaaaaatacattgccgcattctctagcttgcggaatgcctgcaacatcggctcctgctcctcagacattgtatttgggcccaagatccaagccaatgcattcgactgaaaatgacatacaag

SEQ ID NO: 7784 - DNA, 1969 bp, Zea Mays
cttggccacagcgcgcctcacagcgacacccacaagaccacgcccccggtcgtgcatcatcatcatcgctcgcgtcttcgagttcgaggacatggagaggccgcgttgctactctccgcttgccctgcacctcctcctctgcctcttctcgctccgcgcctgttccgccgcgtccatcacagccggcacccccgacgagtcggagctgtgggggtacgtcgaggtccggccaaaggcgcacctgttctggtggtactacaagagcccgcagaagacgtcgacgccgtccaagccatggcccacggtcctctggctgcagggcggcccgggcgcgtccggggtcgggctcggcaacttcctggagatggggccgctggacgtggacctgaagccgcgcaactcgacgtggctccacaaggccgacctcatctttgtggacaacccggtcggcacagggtacagctacgtggaggacgacagcctgttcgtgaccagcgactggcagcaggccgcggacatgacgacggtggtcagggcgctggcgaaggaggtgcccaccctggcgagcagcccgctgttcctggtcgccgagtcctacggcggcaagtacgccgccacgctcggcgcgtccattgccagggccgtccgcgctggcgagctcaacgtcacgctcggaggtgtggcggttggagatagctggatctcgccggaggatttcacggtgaggttgaccattcctagtttcgttagtgcagaaataaaccacggacacattacagagctaatagttacctgctaaaattagctaaatacatttagtctagctaataatttaactattagctattttagtaaactagcgtatagcctgtactaatatattatctagccaaacaataatttatattgtttgtttaccctttaacttatttaagtttgattatataatctagaggatatccaaacctataaaactaatagctagaagctaaaactagctatctcaacctagctaaaaccagctaataagtgattggcgattaaattgctccgaaccatttctacctattagcttattagaaaaagggacgtggatagcttatcagaataatctagggtattagctttagatttagaacatcctcagctaataatagttagccagtaacaattagttgtagaggtttggcttcatctagactaatgctactaaccgagactaaattagaccagtgattttagtcttgttttccatctgatcgggactaaaagatgaagacttgttctgtactagtgttctcttggataaatcacaaatgatgaatacgcatgtgataattaaagtgaggcctgagtgctgctgcagctttcctacacaccgctgcttctgagcgtgtcgaggctggacgacaacgccggcgacgaagcaaacaagaaggcggagacggtgaaggagcaaatcgtggcggggcagtgggccgcctcgcagaagtcatggggcagcctgctagatttcatcgacacaaagagcggcaacgtcgtaagactagtttacttatcttcgttcttatattcaaacttcactcttcgaacaatataatctacagtgcaatctcttttttttggcaggacgtttacaatttcatgctcgactccggcatggacccggtggcactgcccgtgggttcttcatcactgatgagcagcttgcaggcgatgaagtactcgacgtacggccaggactcccagcctggctccaacaccattgacggcatcatgaatggggtcatcaagcaaaagctcaagataatccccaagaacttcacgtggggggagcaatccgactcggtctacaacgcgctggtcaacgatttcatgaaaccgaagatcgatgagattgatgagctgctgtcttatggcattaatgtgacggtgtacaatggccaggatttcaacgatgcatctggat

SEQ ID NO: 7785 - DNA, 2397 bp, Zea Mays
aggaatctgttgttctcctgttccatttctcggtgcagtattagttgcagaacaggaatccacttgatttgtcagtttaattatgcttgtgtcacctcagatgtgtcatattgattatgactgcatttttgtcagctgtaatatgcgtgttggcttgcatttgtttctctctttattagtactaccagcattttcggtcagtattttttgtcttccttgctgaagaatgagaaggaaagctgtcatactcctcgtcgggatagcttcatttattaaggcagctgggcgacagaatatatgggaatgtacttgaacttcacaaaaaagggccttttcatcccttgccgtgtcttccatgttggtaaaaaggctagtagctgaattgaatagatgcatttgacttgaagcccccgaaaaaatcaccgatcgcgttgagaacggttgtcttcgctatgactatgttatgcgggatatctatttgctcaatgtgcatgaagcaactagggagtgatggctggtcaagagttgtcaagattgaagttgtggaacaaccatgtaataagtccattgctcctctttcggaggctcaatttgtgcgctatcctcaaccgataacttacagcagggaggaatgcaagtgcaatgctgtccggtcctttgcaattatatcatcgcagcgatctggaagtggctggtttgaaacacttcttaacagccacatgaatgttagctccaatggtgaaattttctctagaaaagaaaggaggagtaacatttcctctataatagataccctggataaagtgtacaatttggactggaacagtagcgcttccaagaatgagtgcactgcagctattggcttcaagtggatgctaaatcagggcctcgtggcaaaccatgcggacgtagtcgactacttcaaccgaagaggagtctctgcgatatttcttttcagaaggaacctgctccgccagttggtatcacaggtagcgaacaaccacgacaggttacttaagcaactaaacggaacgcacaaggcccatgtccacacgaagcgtgaggcccatatactggcaagatacaggcccaggctcaacacgacgtcactgatatggcagctgaaacgagctgacgagtacactcgcgacgctcttgagaacctaaacaacacccggcacatgagcgtctactacgaggacgtcgtccgcaacagaacaaagctcttggatgtcctggatttcctcggagtgccgaggaggaagctggtgagccggcacgtgaagatacacacgaagccgctgtcggagcagatcgagaactgggacgaggtctacagcgccctcaacggtacccagtacgagggcttcctgaatgccgctgactatctagtataacatcacgtttctggatgtagatagtgtgcgtgtgattctttcgtttcttgtttgtttctggcagaaattttgatgcggggtaggcgccttttgccgtgcatggttgcattctcggtaacctgatgctcctgtaactaaccctccagcttctctgatctttgtatttgccttgggtgtttgctgatgttctttcaaactatttgaaatcgggctgtcggagttccagatcccgggcggcaggatagttgatgtgacctagataaatgtacaagacacatcacaaatatataaaatatttctgtagtatcctcacaaatatatcaaaaatatttctgtagctcttattacatgatactctactatgcaaccaacagaagcaatatctcctcagggagcttttgctttattgccaaattaaattaagaaatgttctatgggactactacaacggaaaataagactacaagatcacctcagggagcttttgctaactacctgcaatatcaaggtgcagcagttagtcaaattgcacaacagttgtaaaaggaaaaaatacaacttaattaggcctagctgaatatgcgaccatattacagtttgataatagcaccttatactggttagctcctactgccagctagtaaaagaatcaatttgagttgagatatattcggtgttttgagtcttacaaggtctagatttcttatgcgagctccagaacaagagctgatgctccgcctccaccgttgcagacaccagcaactccgatcttgccactcttcgccctgagaacctgttaacaagaaacaatgattaggagggtcaagcacaatatattttgatgtcccaacatgatggcactatattgtgcccaacgttttgcttaaagaaaatgaagagaaaaagaaactattgatcaccagcaacaagtgaaacaagggatgagccgatatcaatgtgaaactctacatttgcagctttatacaagattctatttgca

SEQ ID NO: 7786 - DNA, 2345 bp, Zea Mays
atacacactgacacacctcacgcgagccgagacgcccagctcaccgccccaccgagtcccacagtctcagaggccacctcgagccccccctgccccgcaagccgcacccgccgctccctccgccatctgcgctgcgctgctctgctctgcggtgccaggctgccagccagtgccggcgcgcgcccgctgccgccccgacgggcccaccgttctcttctctccgcgctgcgcgccggctgggctgcaggtcagttaatgcgcccgtgacaggcggcgtcggggaggccaagggcggtgccgggttaatcccgccgtctctcgaggcggcgcccgcggaggaccaggcgggagggggagacggtgaggcgcggccatggggggcgccaaggcggaggacaaacccgccgccgccgctgcagaagattggtgctaccaatttggaaacaaggatgcatttgacttgaagcccccgaaaaaatcaccgatcgcgttgagaacggttgtcttcgctatgactatgttatgcgggatatctatttgctcaatgtgcatgaagcaactagggagtgatggctggtcaagagttgtcaagattgaagttgtggaacaaccatgtaataagtccattgctcctctttcggaggctcaatttgtgcgctatcctcaaccgataacttacagcagggaggaatgcaagtgcaatgctgtccggtcctttgcaattatatcatcgcagcgatctggaagtggctggtttgaaacacttcttaacagccacatgaatgttagctccaatggtgaaattttctctagaaaagaaaggaggagtaacatttcctctataatagataccctggataaagtgtacaatttggactggaacagtagcgcttccaagaatgagtgcactgcagctattggcttcaagtggatgctaaatcagggcctcgtggcaaaccatgcggacgtagtcgactacttcaaccgaagaggagtctctgcgatatttcttttcagaaggaacctgctccgccagttggtatcacaggtagcgaacaaccacgacaggttacttaagcaactaaacggaacgcacaaggcccatgtccacacgaagcgtgaggcccatatactggcaagatacaggcccaggctcaacacgacgtcactgatatggcagctgaaacgagctgacgagtacactcgcgacgctcttgagaacctaaacaacacccggcacatgagcgtctactacgaggacgtcgtccgcaacagaacaaagctcttggatgtcctggatttcctcggagtgccgaggaggaagctggtgagccggcacgtgaagatacacacgaagccgctgtcggagcagatcgagaactgggacgaggtctacagcgccctcaacgaaattttgatgcggggtaggcgccttttgccgtgcatggttgcattctcggtaacctgatgctcctgtaactaaccctccagcttctctgatctttgtatttgccttgggtgtttgctgatgttctttcaaactatttgaaatcgggctgtcggagttccagatcccgggcggcaggatagttgatgtgacctagataaatgtacaagacacatcacaaatatataaaatatttctgtagtatcctcacaaatatatcaaaaatatttctgtagctcttattacatgatactctactatgcaaccaacagaagcaatatctcctcagggagcttttgctttattgccaaattaaattaagaaatgttctatgggactactacaacggaaaataagactacaagatcacctcagggagcttttgctaactacctgcaatatcaaggtgcagcagttagtcaaattgcacaacagttgtaaaaggaaaaaatacaacttaattaggcctagctgaatatgcgaccatattacagtttgataatagcaccttatactggttagctcctactgccagctagtaaaagaatcaatttgagttgagatatattcggtgttttgagtcttacaaggtctagatttcttatgcgagctccagaacaagagctgatgctccgcctccaccgttgcagacaccagcaactccgatcttgccactcttcgccctgagaacctgttaacaagaaacaatgattaggagggtcaagcacaatatattttgatgtcccaacatgatggcactatattgtgcccaacgttttgcttaaagaaaatgaagagaaaaagaaactattgatcaccagcaacaagtgaaacaagggatgagccgatatcaatgtgaaactctacatttgcagctttatacaagattctatttgca

SEQ ID NO: 7787 - DNA, 2721 bp, Zea Mays
aaaactatctccgactacaaggaggtgtacggagtaaaaaacagtgaacgctaagctttgggaatggagttgacagtttctgctgaataacagaaaaaaaattactcgccttttcctgaatccatggaacttcttgatactaatggtcatgggaaaacaagagcacagaatgctgaaaatatggcaccagtttctgttaagagtccagatacatcactggaaatcaaagagaagtcgccccacaatttgacagagcaccaggaagaactggggccccctgtaggccatgacgggagtttgtcaccgaaaattctctcccacatacaaccaactcaggcatcggatgattcgtcaaaagatgagggagaccatgctgctgtaacaaataaggatggagttgaaaccatatccgaaaatggttttactggttcgaatattaggccaacagttgaaaagaaatctgaagaagacaatgtgtatagtcatgagaccgttgctgccacccccaaaaagaaagtagaaccagtaaagggatctgaaggctcatacacaggacttgttgacactagtgcaccattcgagtctgttaaagaggctgtcaccaagtttggaggaattgttgattggaaagcctacagggctcagtcattagagagacgcagggttgtgcaccttgaacttgaaaaggttcagcaggagattccacaattcaaagaagactgggaaaccgctgaggtggctaagtcagacgtcattgaggagctagagagaactaatagacttgtcgacgagctgaagcataagctggagagggcacagcttgaagtggaccaagcaaagcaagattctgagcttgccctgcttagggcacaagagatggagcaggggattgatgatgacgctagtgtaatagcccaaacacagttggcagttgccaaagaaagacatgaaaaggctgttgaggagctcaaattgctgaaagaggagctaagatcaacacatgaacaatatgctgtattagccactgaaagggatgcagccattaaacgggccgaggaagttgtttgtgctgccaaggatactgagaagcaagtagaggagctcactttagaacttattgcatccaaagagtctctcgagttagcccatgcttcacaccatgaagctgaagagcacagacttggggcagctatggccaaagagcaggatttcctggcttgggagaaagagctagaagaggcacaagcagagctaaaccagctcaacgaacaaattgcatccaaaaggaatgtggagtccaaagctcatgaaaacgagtgcaaactacttggcctgaaaagtgagctagctgcctatgtggaaaacaaattgaatgaagaggctggaatggttcaggagcaaggttccgacgaagcaaaagaaattagtaggtcaatcaagcaggctctagcttcaaagaggaaggagcttgctgaatttaaagggaaattagaaaacgcaagaattgaagccaatttagtaagagttgttgtagaatcactcagctcagagcttgatagggagaaagcttcacttgctacattgcagcagactgagggtatggcatgcatcacagttgcttctctagaagctgagctcgacaggacagagcaagagatagaattggtacataagaaagaagcagaaactcgggaaatgatggcggagcttccaaggatgttgcagcaagcagcccaggaggcagacgatgccaagatggcagctcatttggcacaagaagaactgagaaaggccaaggaagaagctgagcgaactaaggcttctgcgacaactgcagataccaggttgcgtgcagttctgaaagaaatagaggcgtctaaagcatccaaggggctagccatagcggcagttcaagcgatgcaagagagcaatgacgcaggaagcgctggtgcttctcctcgaggagtaacgcttcctataagcgagtaccatgctcttagcaagagggttcacgaagccgaggaacttgcgagcgagagggtggcagccgcgtttgcacaaatagagttggcaaaagagtccgaatcaaggaacctagagaggctgcaagaagcatccaaggagatggatgaaaagaagagtgatctccaaatcgcgctggagagggctgagagtgcaaacgaggggaagctcggtgctgagcaggagctgagaagatggagagctgaacatgtgcagcgccggaaagcccacgaggctacacaacatccagtcagtcctgtgagaactccaccgaggatgcttgtcgagcagaagggctcttaccgggaagaaaatgaacttcccacagatccgaagttgcacaagtcaaatggtagtatggatcagtttgtttccagcgagaaatcgcggaaaaagaagtcgttcttcccccagatgtccacacttttgtctagaaaggcacagacacaaacataagactataagagtgattgttctgaagaaaagagttcgttcatgtatctttgtaaaatgtaaatggtgtaaattttaatttttgcccatgctcttgtaaattgtctatttgtctcatacttgaagaagactgagtgtatgtctttgtatgatgttcttggagaggatgctgttacccagatctttctttgctttacaccctcgttctgcccttcttacatcgaaaaggaatttgtttgtccattt

SEQ ID NO: 7788 - DNA, 2760 bp, Zea Mays
aagaggtttggtggaagtgtggaacagttgccgagcagtaattgctgagctggttcgtgactccgtgtcggagtaaaaaacagtgaacgctaagctttgggaatggagttgacagtttctgctgaataacagaaaaaaaattactcgccttttcctgaatccatggaacttcttgatactaatggtcatgggaaaacaagagcacagaatgctgaaaatatggcaccagtttctgttaagagtccagatacatcactggaaatcaaagagaagtcgccccacaatttgacagagcaccaggaagaactggggccccctgtaggccatgacgggagtttgtcaccgaaaattctctcccacatacaaccaactcaggcatcggatgattcgtcaaaagatgagggagaccatgctgctgtaacaaataaggatggagttgaaaccatatccgaaaatggttttactggttcgaatattaggccaacagttgaaaagaaatctgaagaagacaatgtgtatagtcatgagaccgttgctgccacccccaaaaagaaagtagaaccagtaaagggatctgaaggctcatacacaggacttgttgacactagtgcaccattcgagtctgttaaagaggctgtcaccaagtttggaggaattgttgattggaaagcctacagggctcagtcattagagagacgcagggttgtgcaccttgaacttgaaaaggttcagcaggagattccacaattcaaagaagactgggaaaccgctgaggtggctaagtcagacgtcattgaggagctagagagaactaatagacttgtcgacgagctgaagcataagctggagagggcacagcttgaagtggaccaagcaaagcaagattctgagcttgccctgcttagggcacaagagatggagcaggggattgatgatgacgctagtgtaatagcccaaacacagttggcagttgccaaagaaagacatgaaaaggctgttgaggagctcaaattgctgaaagaggagctaagatcaacacatgaacaatatgctgtattagccactgaaagggatgcagccattaaacgggccgaggaagttgtttgtgctgccaaggatactgagaagcaagtagaggagctcactttagaacttattgcatccaaagagtctctcgagttagcccatgcttcacaccatgaagctgaagagcacagacttggggcagctatggccaaagagcaggatttcctggcttgggagaaagagctagaagaggcacaagcagagctaaaccagctcaacgaacaaattgcatccaaaaggaatgtggagtccaaagctcatgaaaacgagtgcaaactacttggcctgaaaagtgagctagctgcctatgtggaaaacaaattgaatgaagaggctggaatggttcaggagcaaggttccgacgaagcaaaagaaattagtaggtcaatcaagcaggctctagcttcaaagaggaaggagcttgctgaatttaaagggaaattagaaaacgcaagaattgaagccaatttagtaagagttgttgtagaatcactcagctcagagcttgatagggagaaagcttcacttgctacattgcagcagactgagggtatggcatgcatcacagttgcttctctagaagctgagctcgacaggacagagcaagagatagaattggtacataagaaagaagcagaaactcgggaaatgatggcggagcttccaaggatgttgcagcaagcagcccaggaggcagacgatgccaagatggcagctcatttggcacaagaagaactgagaaaggccaaggaagaagctgagcgaactaaggcttctgcgacaactgcagataccaggttgcgtgcagttctgaaagaaatagaggcgtctaaagcatccaaggggctagccatagcggcagttcaagcgatgcaagagagcaatgacgcaggaagcgctggtgcttctcctcgaggagtaacgcttcctataagcgagtaccatgctcttagcaagagggttcacgaagccgaggaacttgcgagcgagagggtggcagccgcgtttgcacaaatagagttggcaaaagagtccgaatcaaggaacctagagaggctgcaagaagcatccaaggagatggatgaaaagaagagtgatctccaaatcgcgctggagagggctgagagtgcaaacgaggggaagctcggtgctgagcaggagctgagaagatggagagctgaacatgtgcagcgccggaaagcccacgaggctacacaacatccagtcagtcctgtgagaactccaccgaggatgcttgtcgagcagaagggctcttaccgggaagaaaatgaacttcccacagatccgaagttgcacaagtcaaatggtagtatggatcagtttgtttccagcgagaaatcgcggaaaaagaagtcgttcttcccccagatgtccacacttttgtctagaaaggcacagacacaaacataagactataagagtgattgttctgaagaaaagagttcgttcatgtatctttgtaaaatgtaaatggtgtaaattttaatttttgcccatgctcttgtaaattgtctatttgtctcatacttgaagaagactgagtgtatgtctttgtatgatgttcttggagaggatgctgttacccagatctttctttgctttacaccctcgttctgcccttcttacatcgaaaaggaatttgtttgtccattt

SEQ ID NO: 7789 - DNA, 570 bp, Zea Mays
gttccgacaaagtagcatatgaggcatttattaacatacccccccacgttacatttcctcgcctgtccagacgttgagccagccaacaaatagtaacaataaacaatagtaatccttacatcacaccagtgacttacacgggcagccgattccatcggctgcaaaatttatcatgcatgatatggtatcgcttcgaatgtctttttgcagtgcaacagcacactctattttcttctatgcaacaaaatgaaccaaaaacatacacaaccagcaccatgccacaatcaccaaaacaaaccagaatagacagacatggagcgaaaatatgtttcacatgtgtctgatgccaaggatgctctgagctgtgtaccagcgtggagcaggctcagtgaagtcagcaccaccactctctagcctgacgaggcatggccacttgttgcagagggcttcgcaacgtagatctgcttcatcctaccagtgcctgaactcctgtcggaaccagaaccttgattcctaccctggtaccctgatcgtcgctgccactcgttaccagtaccagccttctgagtc

SEQ ID NO: 7790 - DNA, 1165 bp, Zea Mays
agcaattctggctacctggttcatatatattacctaacgatggctgatttattagtgatggttgctacttgctacctcaggatacgtcgaatgcaggttcatcgtctggatggaccgatgagaagcacatgctctacattacctttttggaggaatcatttgttaaccaattgtacagtagtaagggggaaatgaattcggcagaatcattctatgcaactccaggtgcatggcaaaaatcttcttatagtggaaatggtagaaacacaaaatatgatgagggacatggatattgggggactgtcgaggttgacggagatggagctgattatatggatgatgatgcatcaactaatggtccaagacaagagagagatactagttaccatgcaaggcaaaggaattccagggggtcagctgctttccgtttgcgccagcatgggcattcgttttcttggagagaatcatcagaccagaacttcttggatggggagactcaaggtagcaaggaacaaggaagagggtctagcaaaaaccagcaaaagcatgctgatacgaccaaggagatcagtcatcctcatggggaagcttaggggccaatgggattggttcatgcaagctaataagtttgtaagaatagcagtgatggaggtgggcagatgtatataaatctgttcattcatctccagatagccaaaagataggtgtttcctgttggtagtgtatctattaggaatgtcgtagattgctaatgacttcctgtaaaatcgtccaggaaggtttcagatattgaggtggaccagctgggtaactgttgttgtgtcccgtaatgtacaagtacagatgtctgcaatgttcatttgacttgttgacaaaatggaattttatgatatttgaaaccccgtgcctttgaacaggttgccaaattctctatttccctctcagtcagcatgtcgtgattgcttcagatgccatctacgatcgcatcaagtctagaaagaaacaggtgcgcttttcaaagccatcttagaggctgtttgacatggttccgcttcaatagaagaactctgtaaggccttgttcgtttgtgtcggattgcacctgcaatcgttccagctaatcaaagtttatataaattagagaagcaatccggttaggaatcgtt

SEQ ID NO: 7791 - DNA, 1286 bp, Zea Mays
cagtaacggcccgcttggcgtgcgtcgccgtccaccgccgcgacctcgaggtgtagggccgggttgctgaccgcatcgcccggcgtgtcgctcggcgtcggttcgggcaggccgcggccgcgcgcgtgatcgatggggaagagaccgccgaccgatccgaagcgcttcggggatacgtcgaatgcaggttcatcgtctggatggaccgatgagaagcacatgctctacattacctttttggaggaatcatttgttaaccaattgtacagtagtaagggggaaatgaattcggcagaatcattctatgcaactccaggtgcatggcaaaaatcttcttatagtggaaatggtagaaacacaaaatatgatgagggacatggatattgggggactgtcgaggttgacggagatggagctgattatatggatgatgatgcatcaactaatggtccaagacaagagagagatactagttaccatgcaaggcaaaggaattccagggggtcagctgctttccgtttgcgccagcatgggcattcgttttcttggagagaatcatcagaccagaacttcttggatggggagactcaaggtagcaaggaacaaggaagagggtctagcaaaaaccagcaaaagcatgctgatacgaccaaggtttacgctagcagctcttttgtgattcaggagatcagtcatcctcatggggaagcttaggggccaatgggattggttcatgcaagctaataagtttgtaagaatagcagtgatggaggtgggcagatgtatataaatctgttcattcatctccagatagccaaaagataggtgtttcctgttggtagtgtatctattaggaatgtcgtagattgctaatgacttcctgtaaaatcgtccaggaaggtttcagatattgaggtggaccagctgggtaactgttgttgtgtcccgtaatgtacaagtacagatgtctgcaatgttcatttgacttgttgacaaaatggaattttatgatatttgaaaccccgtgcctttgaacaggttgccaaattctctatttccctctcagtcagcatgtcgtgattgcttcagatgccatctacgatcgcatcaagtctagaaagaaacaggtgcgcttttcaaagccatcttagaggctgtttgacatggttccgcttcaatagaagaactctgtaaggccttgttcgtttgtgtcggattgcacctgcaatcgttccagctaatcaaagtttatataaattagagaagcaatccggttaggaatcgtt

SEQ ID NO: 7792 - DNA, 1310 bp, Zea Mays
cagtaacggcccgcttggcgtgcgtcgccgtccaccgccgcgacctcgaggggccgggttgctgaccgcatcgcccggcgtgtcgctcggcgtcggttcgggcaggccgcggccgcgcgcgtgatcgatggggaagagaccgccgaccgatccgaagcgcttcggggatacgtcgaatgcaggttcatcgtctggatggaccgatgagaagcacatgctctacattacctttttggaggaatcatttgttaaccaattgtacagtagtaagggggaaatgaattcggcagaatcattctatgcaactccaggtgcatggcaaaaatcttcttatagtggaaatggtagaaacacaaaatatgatgagggacatggatattgggggactgtcgaggttgacggagatggagctgattatatggatgatgatgcatcaactaatggtccaagacaagagagagatactagttaccatgcaaggcaaaggaattccagggggtcagctgctttccgtttgcgccagcatgggcattcgttttcttggagagaatcatcagaccagaacttcttggatggggagactcaaggtagcaaggaacaaggaagagggtctagcaaaaaccagcaaaagcatgctgatacgaccaaggtcggcccacatgattcatgaaatcacaggtttacgctagcagctcttttgtgattcaggagatcagtcatcctcatggggaagcttaggggccaatgggattggttcatgcaagctaataagtttgtaagaatagcagtgatggaggtgggcagatgtatataaatctgttcattcatctccagatagccaaaagataggtgtttcctgttggtagtgtatctattaggaatgtcgtagattgctaatgacttcctgtaaaatcgtccaggaaggtttcagatattgaggtggaccagctgggtaactgttgttgtgtcccgtaatgtacaagtacagatgtctgcaatgttcatttgacttgttgacaaaatggaattttatgatatttgaaaccccgtgcctttgaacaggttgccaaattctctatttccctctcagtcagcatgtcgtgattgcttcagatgccatctacgatcgcatcaagtctagaaagaaacaggtgcgcttttcaaagccatcttagaggctgtttgacatggttccgcttcaatagaagaactctgtaaggccttgttcgtttgtgtcggattgcacctgcaatcgttccagctaatcaaagtttatataaattagagaagcaatccggttaggaatcgtt

SEQ ID NO: 7793 - DNA, 910 bp, Zea Mays
cgccaacccagtaacggcccgcttggcgtgcgtcgccgtccaccgccgcgacctcgaggtgtagggccgggttgctgaccgcatcgcccggcgtgtcgctcggcgtcggttcgggcaggccgcggccgcgcgcgtgatcgatggggaagagaccgccgaccgatccgaagcgcttcggggatacgtcgaatgcaggttcatcgtctggatggaccgatgagaagcacatgctctacattacctttttggaggaatcatttgttaaccaattgtacagtagtaagggggaaatgaattcggcagaatcattctatgcaactccaggtgcatggcaaaaatcttcttatagtggaaatggtagaaacacaaaatatgatgagggacatggatattgggggactgtcgaggttgacggagatggagctgattatatggatgatgatgcatcaactaatggtccaagacaagagagagatactagttaccatgcaaggcaaaggaattccagggggtcagctgctttccgtttgcgccagcatgggcattcgttttcttggagagaatcatcagaccagaacttcttggatggggagactcaaggtagcaaggaacaaggaagagggtctagcaaaaaccagcaaaagcatgctgatacgaccaaggttgccaaattctctatttccctctcagtcagcatgtcgtgattgcttcagatgccatctacgatcgcatcaagtctagaaagaaacaggtgcgcttttcaaagccatcttagaggctgtttgacatggttccgcttcaatagaagaactctgtaaggccttgttcgtttgtgtcggattgcacctgcaatcgttccagctaatcaaagtttatataaattagagaagcaatccggttaggaatcgtt

SEQ ID NO: 7794 - DNA, 1275 bp, Zea Mays
cccctctccgtcgccaacccagtaacggcccgcttggcgtgcgtcgccgtccaccgccgcgacctcgaggtgtagggccgggttgctgaccgcatcgcccggcgtgtcgctcggcgtcggttcgggcaggccgcggccgcgcgcgtgatcgatggggaagagaccgccgaccgatccgaagcgcttcggggatacgtcgaatgcaggttcatcgtctggatggaccgatgagaagcacatgctctacattacctttttggaggaatcatttgttaaccaattgtacagtagtaagggggaaatgaattcggcagaatcattctatgcaactccaggtgcatggcaaaaatcttcttatagtggaaatggtagaaacacaaaatatgatgagggacatggatattgggggactgtcgaggttgacggagatggagctgattatatggatgatgatgcatcaactaatggtccaagacaagagagagatactagttaccatgcaaggcaaaggaattccagggggtcagctgctttccgtttgcgccagcatgggcattcgttttcttggagagaatcatcagaccagaacttcttggatggggagactcaaggtagcaaggaacaaggaagagggtctagcaaaaaccagcaaaagcatgctgatacgaccaaggagatcagtcatcctcatggggaagcttaggggccaatgggattggttcatgcaagctaataagtttgtaagaatagcagtgatggaggtgggcagatgtatataaatctgttcattcatctccagatagccaaaagataggtgtttcctgttggtagtgtatctattaggaatgtcgtagattgctaatgacttcctgtaaaatcgtccaggaaggtttcagatattgaggtggaccagctgggtaactgttgttgtgtcccgtaatgtacaagtacagatgtctgcaatgttcatttgacttgttgacaaaatggaattttatgatatttgaaaccccgtgcctttgaacaggttgccaaattctctatttccctctcagtcagcatgtcgtgattgcttcagatgccatctacgatcgcatcaagtctagaaagaaacaggtgcgcttttcaaagccatcttagaggctgtttgacatggttccgcttcaatagaagaactctgtaaggccttgttcgtttgtgtcggattgcacctgcaatcgttccagctaatcaaagtttatataaattagagaagcaatccggttaggaatcgtt

SEQ ID NO: 7795 - DNA, 496 bp, Zea Mays
caaacaataagccaggaggggccttagacttagtactgttgaaacatgaatgagcagacttcccttacacgttgacaccttcaggaatcagatgacagccccggatacagagttccggaggtggaaatgtccggccagtactctcaaaagagcgagctcctgactggccggaaagcgttcgacaggtgagcaagtacagcgctgcgacacttgaccctgcaacaaacaaagacgatgactgttgcagctctcaagcaaggtcccagctatcgttggtccagtgggcgtcgccccagctgcacgacatcgaccagatgacgctggaggggctgtgccacgcgaagtcctctgcgtccagattggtcggtttccggttgcgcaacctgagccagaattcaggccgcccatgtcggaggtcgtccagtcactggtccgtcttgtgcagcgagcgagcatggggacgacgacagcgctgagtggggaccacgcgtcctag

SEQ ID NO: 7796 - DNA, 1382 bp, Zea Mays
agaggaaccagtagtaaaacacaagatacatagatgctacgactgtgctagtgagctgtgagatcgagagaacacactctccagcagcacggcaacatgtcttgcataggttcctcttgcaccgcaaccaacaagggaaaggagactgtggtggaggtgcatggagcggtggcggaggagaagcagcaggtgaggaacggagaggagactgcagcggaggacgactccggtgggtcggatccggattcggactctgaatcggatttagattcggagtcggactgggactcgtattcggaagaggaagaggagcgacagcagcagagaaagaaaaaggagaaacccaaaaacaagaagaagaagaagaagcagcggcggcggcaacagcagcagcagccggcatggctgatcacactgctgagaaccaggttctgggagccatgcaaggagcacgtgtcgaagaacagggcggagcagtgcatgttctgcctcaagtgctgcaaggtgacctgcccccgctgcacccacgacctgcctggccaccgcctcctcaagatccgccgctacgtctaccgctccgtcgtccacgcttccgatatgcaggcgctcggcgtcgacgtctccaggatccaggcatatgttgtcaatgcaaagaaggtgctgcacctgaggcccatgagcaggtccaagcatttcaggcctcaggcagggacgccgcgctgcgtgacctgcagaacctggctccgtagcgcgcccaacctgttctgctctcttgcctgccaggggaatgttgatgtagcgcaagacgacttctcggggcccgaagctgaggtccgctacaggagcctccaagtgcagatggctgaaccatcaggggctgcagccgatgagctgcctggccctgaagctgcgcacgaggtgcctgcgcaggttccgccgccgccgccgccggccgcaaatcagaacgcgtcgctccgcaggcggccgcgcaagcaggcggcgccggagagggcgccgttcttctgaagacgtgcctgctcgctgctggatgagagaggtgcgcatgcccccaataaaagatgtcgagcctgcatgcgtagaacctagctagaggtagccgtggagactggctggctaggtgcgatccgactcagtttcaataattgtcattctggttgttgtttggcataaaacttcatggctagactttttttaaaaaaaattcgcagacacctttcttttgaattcccaagtctactcttgctgtttgcaagtctagacgaaccgtgcatggagcttattacaattttctttatctgatgtaatgtttcctatacccccgccagtgttctgtgtcttttttttagaaaaatagaaaattt

SEQ ID NO: 7797 - DNA, 1414 bp, Zea Mays
cttggccccatcgcgcggctcagctttccagatttcctccggcgagagagaggaaccagtagtaaaacacaagatacatagatgctacgactgtgctagtgagctgtgagatcgagagaacacactctccagcagcacggcaacatgtcttgcataggttcctcttgcaccgcaaccaacaagggaaaggagactgtggtggaggtgcatggagcggtggcggaggagaagcagcaggtgaggaacggagaggagactgcagcggaggacgactccggtgggtcggatccggattcggactctgaatcggatttagattcggagtcggactgggactcgtattcggaagaggaagaggagcgacagcagcagagaaagaaaaaggagaaacccaaaaacaagaagaagaagaagaagcagcggcggcggcaacagcagcagcagccggcatggctgatcacactgctgagaaccaggttctgggagccatgcaaggagcacgtgtcgaagaacagggcggagcagtgcatgttctgcctcaagtgctgcaaggtgacctgcccccgctgcacccacgacctgcctggccaccgcctcctcaagatccgccgctacgtctaccgctccgtcgtccacgcttccgatatgcaggcgctcggcgtcgacgtctccaggatccaggcatatgttgtcaatgcaaagaaggtgctgcacctgaggcccatgagcaggtccaagcatttcaggcctcaggcagggacgccgcgctgcgtgacctgcagaacctggctccgtagcgcgcccaacctgttctgctctcttgcctgccagcgcaagacgacttctcggggcccgaagctgaggtccgctacaggagcctccaagtgcagatggctgaaccatcaggggctgcagccgatgagctgcctggccctgaagctgcgcacgaggtgcctgcgcaggttccgccgccgccgccgccggccgcaaatcagaacgcgtcgctccgcaggcggccgcgcaagcaggcggcgccggagagggcgccgttcttctgaagacgtgcctgctcgctgctggatgagagaggtgcgcatgcccccaataaaagatgtcgagcctgcatgcgtagaacctagctagaggtagccgtggagactggctggctaggtgcgatccgactcagtttcaataattgtcattctggttgttgtttggcataaaacttcatggctagactttttttaaaaaaaattcgcagacacctttcttttgaattcccaagtctactcttgctgtttgcaagtctagacgaaccgtgcatggagcttattacaattttctttatctgatgtaatgtttcctatacccccgccagtgttctgtgtcttttttttagaaaaatagaaaattt

SEQ ID NO: 7798 - DNA, 4047 bp, Zea Mays
  misc_feature (4046)..(4047): n is a, c, g, or t
caaaaactcaaaatcttatttcatgtcaagggatgcttgaataaagtcttgagaagggatatgcagaaaggccaaccggacattcttgagatcaataggctgcgaagacagttactcttccattcatacttgtgggataaaagactggtatttggcgcaagatcagatagatgtcgtcatgagaagacccattccatagatagtgtcgctgagcaaaatgtaatactaaagcctcaaagtgaatgcagcgggaataggtctgccaacaaagatgctaaatatgttgagtgccttcaggaaagtatttatggagggaatcacactggagttgatgtgggtactgtcaattcgaatcatgtccatcaaatggctacaggcgaattggattcgcttcagagagacatcaaagctcctctatacagcagtgttagtgtaaatggtgagtcgattcccttggaaccagatcttgttgctcgacgcaccctttcagaaggtcagtttcctagtgtattggatgtgactaatgcacttgaagcgaaatggaccggtaaagatgatcctgtttctagcaaggtaaccatgccagaatctacagcatcttcagaggactcagaagaacatatgggtgataatacaccttcatacgcctctatattgctgagcaagctaggggacagtgcagcagatcattctaattggatagagatgcctttcttactattttaccgttccctcaataagcaatggaatcgatcaaaccgatttgatgcactcaacgaatatagtcccgaatatgttcctttcttaagggaagtggagcgtcatattggacctaaatttttctttcctataggaatcagtgatactgttgttggagtttatgatgacgaacctactagcattatctcttatgcgctggcctcccatgaatatcatcttcagatgtcagatgaactggaacgagaaatgacagacacttcactcccactatgtgactcaagaagtgtctcgttaactgaactggatgaatgtacttctgaacttctaagaagtgttgtctctacagaggacattatcctctccatgtctggaagaaagaacccacttgcttcagattcacttgtgcctcgaaaagtaagtcacataaaagtgaattttggggatgaaggtcctctaggacaggtgaagtacactgtgatttgttactatgccaaacaatttgatgctctgaggagattatgctgtccatcagagcgtgattttgtcaggtcccttagtcgttgcaagaaatggggtgctcaaggaggcaagagcaatgtattctttgcaaaaacaatggatgatcggttcataattaaacaggttaccaaaactgaattggagtctttcatgaagtttgctccagattacttcaaatatgtatcagagtcgatttgtactggaagtcctacttgcatcgcaaaaattcttggtatttatcaggttaagagcctcaaaggaggtaaggagatgaggatggatgttcttctgatggaaaatcttttgtttgagcgcgatgtgacaacattgtatgatttaaagggctctgccagatcaagatataacccagactcaaatggtagcgataaagtacttcttgatcagaacttaattgaagcgatgcctacatcacctatatttgtcggaaacaaggcaaagaggctgctggagagagctgtttggaatgacacgtcctttcttgcttccatcgatgtaatggattactctttacttgttggtgttgatgagaaaaggcatgaacttgtaatgggtattatagatttcataaggcaatatacgtgggacaaacacctagagacatgggtgaaagcttcagggatactaggtggaccaaagaatgtgtcgccaacagtaatttcaccaaagcaatacaagaagcggtttaggaaagccatgtcggcctactttcttgtcgtcccagaccagtggtcgcctccagtggtcatccccagcaagcaagctgagagtggtcaagacagggacgaacaggttgtcttgacagaattgtgagatgcatgcattacttttaggaacattcagggaataactcctcttttttgcaacatctatagattttgattttatttaaattttgttcattgttttttcttgtagctgtattttctgggtattcctaccctttcctttttttggggaggatctatagaaagttttagcccaagtctttgaaactggtcattgtaaataccatccttcttctaatgaaatgatacacagctctcctgcgtgtttaagaaaaaaaagtctttgaaacttaagtatgtgtctcccgccccctcccctccccggcgctccagcccccccccccccccccccccccagcctcacgtcggtgtccactctaggctcggcggccacccatattcctccctcggcaccggcaaactcctctgtttctgccccgctggtcgctcaaaggctcagcggtggagcgatgatggagattcctcctttggtgtctcgccggagcctcttcaggtgcaagcttcctacaaggacgtcctaatctcatcaggggagcttgttcatcccgcttcttctcgggaagaggaaggcagctgggttaaggttctcggtcgtcgtgatcgtaggcggcgctcccagtcctcccccctagtttggctcttgtggacttgcgtgggaggtgcttcaactgcttctcgccatctcatcgggttgctgagtgtcggcggcaggtgcggtgcttccattgccggctgcctgggcactgtgcctagcgtgcccgcgacggtcgacggctactcatcatccgcgtcgagtccaggtgtggcgccccgtcgtccaagtggcagcgccgatggaagcccctagaggccgtatggaggatcatgcaaggtgtgccgggggaggctctgctgatggcggacgaaggcgtactcgccgtgggccgaggaagaggcggggacggagctctggtggtcatggtgatcgtgatgccgccgatgccccctctccctctttcgcattcagataccagtataccaccatcccgtctgtttcctccggatgacatgtgagttacatcaaacactcatggaaaatttggcaggctgagcaagatcttcaccgcactcttcttatctcagctgttgatctggagggttctggtggcgccacggaggtcttgatcgcactaagcttgagttttaaccttgatgctgatgtgatcgacctacgcatggtcgcaccaaattcctccatcgctctatttccgaatgttgggatggatgatcaggttctatctggaggacaatctttgtatgtgccccccattcggttgatcatcaagcgctggtctcgtcaggcaatggtatccggtggtggcgctgctggatattaatctttagggtattcttgctcatctatgggggatggagacggcggagcacattctgcgaggattctgtctgctgagccgtcagccgtagtaaagtctccaagtttgaatctggcgggaagggtggtgactgttactccagttgatggccttgctctcccaacttgggatgttgagctggaggcgcctgggtcccatcttgtctcttcgtctgctgctgcttctctggtaataatgtctccaactttgattcaagtggagggcttcgcaaaggatgctaataatgatgttctggtctcagcgatccaacagatggatggttttctcacagttgtgaaaatgtaccagattctatggctattgtgcagcttccacctgttttaccccagacaccttgcaaagtaacccaagttcatactagaagaaagcacctattgcaaactcaggaagctacggacgatggtggtgtggctaaggaattcatgaataagattttgcaatccctttcaggcgttctacctgtttctccttcgtcgaagctaaaaaaacagaaggtctattgcgcccaattttgttccaagaagatccaggagggtagctaagcttnn

SEQ ID NO: 7799 - DNA, 7876 bp, Zea Mays
  misc_feature (7875)..(7876): n is a, c, g, or t
aacaaactcgcctttttttctctctcctcccaccccggcgctccctccctcccgctcctccgccgaggtctgtgatcttctgccgctcctccgattggattcctcctcctccggcgttgcccggccccgcgccaccgggctcctctcctctcccgatcggaccggaccgcaccgcgccgggcgtgccctttggcgctgccgccaaatgcccggcgcgcgcggcgctgccgccccgcccccgctgcctcgctgcgacacgggtgcggggcgcgacgtaggattctgacaccggggatctttgcgcggtggagttctgggcccctcctccgtggaccgtggcggtgcctcgattagcaagcggcgcgcgcctgtcgctcgaccgatcctgctcgcgcttcctcggattccgatgcaatgcgcaccgcgggccgcgcggctcctcttctgaccgatctcggaggagctctgaggaaattcatgctgcaaatggaacacggccattctttctggtgcgagaatccaaaggaaaattatttctgtcgcatcagatgaggatgcaagtatgaaggtttctttgagataatgtctcccgggacttctggatgcccgatcacagctgtcgagtttgctatgactgtgattcacaattcaccatattcaaccgcagacatcattgtcgtcgctgtgggcgaattttctgtggatacgtgtctgcaacttctgcttcaagcaatgggagcaagaaagagtcacttccctcaaaccggtgctgccggtgctcaccccttccctgtctgagacgagtttgttcagcaccaagtcagctatcaccatcaatagtgttaccacaacggcaggctcttactctaatgggaattatcagcatgtgagctgtgttaccagcactagtcctccaaagtgttgccatgacaagacctcccataatatgcaagacactcatgctcctgagaaatgtatgtccactgtttcaaacaaagatgactcttcagttcagtttggctactacacaaacaggagtgatgacgaagatgaagaataccctgcttactgctctgataggcaggtacaacatcaacaacagagtggacaatattatggcccagatgagttttatgagcttgatacaccctacaattcaaaaatgtcgatcgttgaagaatctatgacctctaaagaactatccccacatgtgcttgatcaaggatttccgagtgcaccgaccattacaaaatcagacaatgaaccagaacattattatagttctgaatgtggtgctgcttcatccatttatgctttagaaagtaatgatacgaaccctgttgattttgaaaaggatgaacttttctggcttcctcctgaaccagaagatgaagaagatgagttgcaagctgaattgtttaatgatgatgacggtgacgatgacgatgacaaatctgtagctgatggtgaatggtgtcgaattcggtcgtcaagtagttttggcagtggagagttccgaagtagagatcggtcgggcgaagaacataagaaagtaatgaagaatgttgttgatggacatttcagggctttgatctctcagctactagaggtggagaatattccgttgcatgaaggtgatgacatgggctggttggagattgttacttctgtatcatgggaagctgccaacttcctcaggccagacacaagccagggtggtggcatggatcctggtggatatgtcaaggttaagtgcttagcatgtgggcaccgcaatgaaagtactgttgtaaaaggagtagtttgtaagaagaatgttgcacataggcgcatgacaactagaatagagaagccccgtctcctactacttgcaggagctcttgagtaccatcgagtcacaaatcagctgtcaagtattgatacattgctccagcaggaaacagatcaccttaaaatggcagtcgcaaagattgtagctcaaagacccaacttgcttttggttgagaattcagtttctcgatatgctcaagatttgcttctagaaaagaacatatcgttggttttaaatatcaagcagcccctcttgcaacgtattgctcgttgcacaggtgctcagatagttccttctattgatctcctaccatctcagaagcttggttactgtgagttatttcatgtagataaatacgatgaacagtctgttagctcggttaacgtgtcaaagaaaatggtgaagaccatgatgttctttgaaggatgcccaaaaccattgggttgcactgttctgctaaagggtggtagcatggatgagctcaagaaaattaagcatgtggtccagtatggtatttttgcagcatatcacttggcgttggaaacatctttccttgcagatgaaggtgcaaccctaccagaacttccattgttgtctccattgactgtagccttgccagataaacgatctactgcagacagctccatttcagcagtgccaggcttcacaattaatgtttcaattagccagcaaactgatagttttgaccacattggtaccgactacatcatgtcaacccaaccaggtgaaaatgctgtggctgaagcaccagtatccagcgaatgctttagttctcagaatacctactctcattctcttggaccttggtgtgctaataacagcaatttcaataacggcactggtgatggagatggattagctaatgtcactgcaactccaaattctgtttccatatcttctttgtctacatctggtgcactcacaaaccatacttctagatattctagtgtagagaaaaacagtatgcattttggtgattatcatgatggttcaatgaggttacatggtaagacggtgacaatagattcaaccagcacagcaagccattatcaccagagcacagtcaaagctagcactaatatcaatgtcaatgagtcattagaaggtccatatgctttggctaatgtgaaaaccatcaacgagaacaattctattgtagtccaaccagtgtctactgctgctgtacaataccaagagaccagtcaaggagatgatagcacatcaaataaggatgaagtggtgccttctgatcatcaaagcatcttagtctcattgtccacacgttgcgtatggaaaggtactatttgtgagcgttcccagctgttacgcatcaagtattatggtaactttgataagccccttggaagatttttgcgggattacttgtttgatcagggctatcagtgtcgttcctgtgataagccacctgaagcccatgtccattgctatactcatcgccagggaagtctaaccatttcagttagaaaacttaccgaatttgttttaacgggtgaaagggatgggaaaatttggatgtggcacagatgtctgaaatgtccttggagtaatggatttcctccagcaactcagaggattgtcatgtctgatgctgcctggggtttgtcacttggtaaatttttggagcttagcttttcaaaccatgcagctgcaagtagggtagccagttgtggtcattctctccacagggactgcctccggttctatgggtttggcaaaatggttgcatgcttccgatatgctcctattagtgttcactctgttcatttaccacctcataaacttgattttggccaccagcccttggattggatacaaaaggaagcaaatgaggttattgagcgagcaaaacatctatttgatgaagtattgcatgctttacacatgatatctgacaaaaaggttcaaggcagttcgattaacatggaatttagcaattacattgctgatcttgaaatcatgcttcgaaaggaaaagtcagaatttgagggatgcttgaataaagtcttgagaagggatatgcagaaaggccaaccggacattcttgagatcaataggctgcgaagacagttactcttccattcatacttgtgggataaaagactggtatttggcgcaagatcagatagatgtcgtcatgagaagacccattccatagatagtgtcgctgagcaaaatgtaatactaaagcctcaaagtgaatgcagcgggaataggtctgccaacaaagatgctaaatatgttgagtgccttcaggaaagtatttatggagggaatcacactggagttgatgtgggtactgtcaattcgaatcatgtccatcaaatggctacaggcgaattggattcgcttcagagagacatcaaagctcctctatacagcagtgttagtgtaaatggtgagtcgattcccttggaaccagatcttgttgctcgacgcaccctttcagaaggtcagtttcctagtgtattggatgtgactaatgcacttgaagcgaaatggaccggtaaagatgatcctgtttctagcaaggtaaccatgccagaatctacagcatcttcagaggactcagaagaacatatgggtgataatacaccttcatacgcctctatattgctgagcaagctaggggacagtgcagcagatcattctaattggatagagatgcctttcttactattttaccgttccctcaataagcaatggaatcgatcaaaccgatttgatgcactcaacgaatatagtcccgaatatgttcctttcttaagggaagtggagcgtcatattggacctaaatttttctttcctataggaatcagtgatactgttgttggagtttatgatgacgaacctactagcattatctcttatgcgctggcctcccatgaatatcatcttcagatgtcagatgaactggaacgagaaatgacagacacttcactcccactatgtgactcaagaagtgtctcgttaactgaactggatgaatgtacttctgaacttctaagaagtgttgtctctacagaggacattatcctctccatgtctggaagaaagaacccacttgcttcagattcacttgtgcctcgaaaagtaagtcacataaaagtgaattttggggatgaaggtcctctaggacaggtgaagtacactgtgatttgttactatgccaaacaatttgatgctctgaggagattatgctgtccatcagagcgtgattttgtcaggtcccttagtcgttgcaagaaatggggtgctcaaggaggcaagagcaatgtattctttgcaaaaacaatggatgatcggttcataattaaacaggttaccaaaactgaattggagtctttcatgaagtttgctccagattacttcaaatatgtatcagagtcgatttgtactggaagtcctacttgcatcgcaaaaattcttggtatttatcaggttaagagcctcaaaggaggtaaggagatgaggatggatgttcttctgatggaaaatcttttgtttgagcgcgatgtgacaacattgtatgatttaaagggctctgccagatcaagatataacccagactcaaatggtagcgataaagtacttcttgatcagaacttaattgaagcgatgcctacatcacctatatttgtcggaaacaaggcaaagaggctgctggagagagctgtttggaatgacacgtcctttcttgcttccatcgatgtaatggattactctttacttgttggtgttgatgagaaaaggcatgaacttgtaatgggtattatagatttcataaggcaatatacgtgggacaaacacctagagacatgggtgaaagcttcagggatactaggtggaccaaagaatgtgtcgccaacagtaatttcaccaaagcaatacaagaagcggtttaggaaagccatgtcggcctactttcttgtcgtcccagaccagtggtcgcctccagtggtcatccccagcaagcaagctgagagtggtcaagacagggacgaacaggttgtcttgacagaattgtgagatgcatgcattacttttaggaacattcagggaataactcctcttttttgcaacatctatagattttgattttatttaaattttgttcattgttttttcttgtagctgtattttctgggtattcctaccctttcctttttttggggaggatctatagaaagttttagcccaagtctttgaaactggtcattgtaaataccatccttcttctaatgaaatgatacacagctctcctgcgtgtttaagaaaaaaaagtctttgaaacttaagtatgtgtctcccgccccctcccctccccggcgctccagcccccccccccccccccccccccagcctcacgtcggtgtccactctaggctcggcggccacccatattcctccctcggcaccggcaaactcctctgtttctgccccgctggtcgctcaaaggctcagcggtggagcgatgatggagattcctcctttggtgtctcgccggagcctcttcaggtgcaagcttcctacaaggacgtcctaatctcatcaggggagcttgttcatcccgcttcttctcgggaagaggaaggcagctgggttaaggttctcggtcgtcgtgatcgtaggcggcgctcccagtcctcccccctagtttggctcttgtggacttgcgtgggaggtgcttcaactgcttctcgccatctcatcgggttgctgagtgtcggcggcaggtgcggtgcttccattgccggctgcctgggcactgtgcctagcgtgcccgcgacggtcgacggctactcatcatccgcgtcgagtccaggtgtggcgccccgtcgtccaagtggcagcgccgatggaagcccctagaggccgtatggaggatcatgcaaggtgtgccgggggaggctctgctgatggcggacgaaggcgtactcgccgtgggccgaggaagaggcggggacggagctctggtggtcatggtgatcgtgatgccgccgatgccccctctccctctttcgcattcagataccagtataccaccatcccgtctgtttcctccggatgacatgtgagttacatcaaacactcatggaaaatttggcaggctgagcaagatcttcaccgcactcttcttatctcagctgttgatctggagggttctggtggcgccacggaggtcttgatcgcactaagcttgagttttaaccttgatgctgatgtgatcgacctacgcatggtcgcaccaaattcctccatcgctctatttccgaatgttgggatggatgatcaggttctatctggaggacaatctttgtatgtgccccccattcggttgatcatcaagcgctggtctcgtcaggcaatggtatccggtggtggcgctgctggatattaatctttagggtattcttgctcatctatgggggatggagacggcggagcacattctgcgaggattctgtctgctgagccgtcagccgtagtaaagtctccaagtttgaatctggcgggaagggtggtgactgttactccagttgatggccttgctctcccaacttgggatgttgagctggaggcgcctgggtcccatcttgtctcttcgtctgctgctgcttctctggtaataatgtctccaactttgattcaagtggagggcttcgcaaaggatgctaataatgatgttctggtctcagcgatccaacagatggatggttttctcacagttgtgaaaatgtaccagattctatggctattgtgcagcttccacctgttttaccccagacaccttgcaaagtaacccaagttcatactagaagaaagcacctattgcaaactcaggaagctacggacgatggtggtgtggctaaggaattcatgaataagattttgcaatccctttcaggcgttctacctgtttctccttcgtcgaagctaaaaaaacagaaggtctattgcgcccaattttgttccaagaagatccaggagggtagctaagcttnn

SEQ ID NO: 7800 - DNA, 7708 bp, Zea Mays
  misc_feature (7707)..(7708): n is a, c, g, or t
aacaaactcgcctttttttctctctcctcccaccccggcgctccctccctcccgctcctccgccgaggtctgtgatcttctgccgctcctccgattggattcctcctcctccggcgttgcccggccccgcgccaccgggctcctctcctctcccgatcggaccggaccgcaccgcgccgggcgtgccctttggcgctgccgccaaatgcccggcgcgcgcggcgctgccgccccgcccccgctgcctcgctgcgacacgggtgcggggcgcgacgtaggattctgacaccggggatctttgcgcggtggagttctgggcccctcctccgtggaccgtggcggtgcctcgattagcaagcggcgcgcgcctgtcgctcgaccgatcctgctcgcgcttcctcggattccgatgcaatgcgcaccgcgggccgcgcggctcctcttctgaccgatctcggaggagctctgaggaaattcatgctgcaaatggaacacggccattctttctggtgcgagaatccaaaggaaaattatttctgtcgcatcagatgaggatgcaagtatgaaggtttctttgaggtggtacagttttagctgccaatggaggacccaaataaaacgttttctgacgtagttaagcttttgacatcatggctgccgcgacgctccaacccagataatgtctcccgggacttctggatgcccgatcacagctgtcgagtttgctatgactgtgattcacaattcaccatattcaaccgcagacatcattgtcgtcgctgtgggcgaattttctgtggtaagtgcactgcaaactccatcccagtttcaagtggccctgacagaaatgtcgatgagggggacaggatacgtgtctgcaacttctgcttcaagcaatgggagcaagaaagagtcacttccctcaaaccggtgctgccggtgctcaccccttccctgtctgagacgagtttgttcagcaccaagtcagctatcaccatcaatagtgttaccacaacggcaggctcttactctaatgggaattatcagcatgtgagctgtgttaccagcactagtcctccaaagtgttgccatgacaagacctcccataatatgcaagacactcatgctcctgagaaatgtatgtccactgtttcaaacaaagatgactcttcagttcagtttggctactacacaaacaggagtgatgacgaagatgaagaataccctgcttactgctctgataggcaggtacaacatcaacaacagagtggacaatattatggcccagatgagttttatgagcttgatacaccctacaattcaaaaatgtcgatcgttgaagaatctatgacctctaaagaactatccccacatgtgcttgatcaaggatttccgagtgcaccgaccattacaaaatcagacaatgaaccagaacattattatagttctgaatgtggtgctgcttcatccatttatgctttagaaagtaatgatacgaaccctgttgattttgaaaaggatgaacttttctggcttcctcctgaaccagaagatgaagaagatgagttgcaagctgaattgtttaatgatgatgacggtgacgatgacgatgacaaatctgtagctgatggtgaatggtgtcgaattcggtcgtcaagtagttttggcagtggagagttccgaagtagagatcggtcgggcgaagaacataagaaagtaatgaagaatgttgttgatggacatttcagggctttgatctctcagctactagaggtggagaatattccgttgcatgaaggtgatgacatgggctggttggagattgttacttctgtatcatgggaagctgccaacttcctcaggccagacacaagccagggtggtggcatggatcctggtggatatgtcaaggttaagtgcttagcatgtgggcaccgcaatgaaagtactgttgtaaaaggagtagtttgtaagaagaatgttgcacataggcgcatgacaactagaatagagaagccccgtctcctactacttgcaggagctcttgagtaccatcgagtcacaaatcagctgtcaagtattgatacattgctccagcaggaaacagatcaccttaaaatggcagtcgcaaagattgtagctcaaagacccaacttgcttttggttgagaattcagtttctcgatatgctcaagatttgcttctagaaaagaacatatcgttggttttaaatatcaagcagcccctcttgcaacgtattgctcgttgcacaggtgctcagatagttccttctattgatctcctaccatctcagaagcttggttactgtgagttatttcatgtagataaatacgatgaacagtctgttagctcggttaacgtgtcaaagaaaatggtgaagaccatgatgttctttgaaggatgcccaaaaccattgggttgcactgttctgctaaagggtggtagcatggatgagctcaagaaaattaagcatgtggtccagtatggtatttttgcagcatatcacttggcgttggaaacatctttccttgcagatgaaggtgcaaccctaccagaacttccattgttgtctccattgactgtagccttgccagataaacgatctactgcagacagctccatttcagcagtgccaggcttcacaattaatgtttcaattagccagcaaactgatagttttgaccacattggtaccgactacatcatgtcaacccaaccaggtgaaaatgctgtggctgaagcaccagtatccagcgaatgctttagttctcagaatacctactctcattctcttggaccttggtgtgctaataacagcaatttcaataacggcactggtgatggagatggattagctaatgtcactgcaactccaaattctgtttccatatcttctttgtctacatctggtgcactcacaaaccatacttctagatattctagtgtagagaaaaacagtatgcattttggtgattatcatgatggttcaatgaggttacatggtaagacggtgacaatagattcaaccagcacagcaagccattatcaccagagcacagtcaaagctagcactaatatcaatgtcaatgagtcattagaaggtccatatgctttggctaatgtgaaaaccatcaacgagaacaattctattgtagtccaaccagtgtctactgctgctgtacaataccaagagaccagtcaaggagatgatagcacatcaaataaggatgaagtggtgccttctgatcatcaaagcatcttagtctcattgtccacacgttgcgtatggaaaggtactatttgtgagcgttcccagctgttacgcatcaagtattatggtaactttgataagccccttggaagatttttgcgggattacttgtttgatcaggtttggcaaaatggttgcatgcttccgatatgctcctattagtgttcactctgttcatttaccacctcataaacttgattttggccaccagcccttggattggatacaaaaggaagcaaatgaggttattgagcgagcaaaacatctatttgatgaagtattgcatgctttacacatgatatctgacaaaaaggttcaaggcagttcgattaacatggaatttagcaattacattgctgatcttgaaatcatgcttcgaaaggaaaagtcagaatttgagggatgcttgaataaagtcttgagaagggatatgcagaaaggccaaccggacattcttgagatcaataggctgcgaagacagttactcttccattcatacttgtgggataaaagactggtatttggcgcaagatcagatagatgtcgtcatgagaagacccattccatagatagtgtcgctgagcaaaatgtaatactaaagcctcaaagtgaatgcagcgggaataggtctgccaacaaagatgctaaatatgttgagtgccttcaggaaagtatttatggagggaatcacactggagttgatgtgggtactgtcaattcgaatcatgtccatcaaatggctacaggcgaattggattcgcttcagagagacatcaaagctcctctatacagcagtgttagtgtaaatggtgagtcgattcccttggaaccagatcttgttgctcgacgcaccctttcagaaggtcagtttcctagtgtattggatgtgactaatgcacttgaagcgaaatggaccggtaaagatgatcctgtttctagcaaggtaaccatgccagaatctacagcatcttcagaggactcagaagaacatatgggtgataatacaccttcatacgcctctatattgctgagcaagctaggggacagtgcagcagatcattctaattggatagagatgcctttcttactattttaccgttccctcaataagcaatggaatcgatcaaaccgatttgatgcactcaacgaatatagtcccgaatatgttcctttcttaagggaagtggagcgtcatattggacctaaatttttctttcctataggaatcagtgatactgttgttggagtttatgatgacgaacctactagcattatctcttatgcgctggcctcccatgaatatcatcttcagatgtcagatgaactggaacgagaaatgacagacacttcactcccactatgtgactcaagaagtgtctcgttaactgaactggatgaatgtacttctgaacttctaagaagtgttgtctctacagaggacattatcctctccatgtctggaagaaagaacccacttgcttcagattcacttgtgcctcgaaaagtaagtcacataaaagtgaattttggggatgaaggtcctctaggacaggtgaagtacactgtgatttgttactatgccaaacaatttgatgctctgaggagattatgctgtccatcagagcgtgattttgtcaggtcccttagtcgttgcaagaaatggggtgctcaaggaggcaagagcaatgtattctttgcaaaaacaatggatgatcggttcataattaaacaggttaccaaaactgaattggagtctttcatgaagtttgctccagattacttcaaatatgtatcagagtcgatttgtactggaagtcctacttgcatcgcaaaaattcttggtatttatcaggttaagagcctcaaaggaggtaaggagatgaggatggatgttcttctgatggaaaatcttttgtttgagcgcgatgtgacaacattgtatgatttaaagggctctgccagatcaagatataacccagactcaaatggtagcgataaagtacttcttgatcagaacttaattgaagcgatgcctacatcacctatatttgtcggaaacaaggcaaagaggctgctggagagagctgtttggaatgacacgtcctttcttgcttccatcgatgtaatggattactctttacttgttggtgttgatgagaaaaggcatgaacttgtaatgggtattatagatttcataaggcaatatacgtgggacaaacacctagagacatgggtgaaagcttcagggatactaggtggaccaaagaatgtgtcgccaacagtaatttcaccaaagcaatacaagaagcggtttaggaaagccatgtcggcctactttcttgtcgtcccagaccagtggtcgcctccagtggtcatccccagcaagcaagctgagagtggtcaagacagggacgaacaggttgtcttgacagaattgtgagatgcatgcattacttttaggaacattcagggaataactcctcttttttgcaacatctatagattttgattttatttaaattttgttcattgttttttcttgtagctgtattttctgggtattcctaccctttcctttttttggggaggatctatagaaagttttagcccaagtctttgaaactggtcattgtaaataccatccttcttctaatgaaatgatacacagctctcctgcgtgtttaagaaaaaaaagtctttgaaacttaagtatgtgtctcccgccccctcccctccccggcgctccagcccccccccccccccccccccccagcctcacgtcggtgtccactctaggctcggcggccacccatattcctccctcggcaccggcaaactcctctgtttctgccccgctggtcgctcaaaggctcagcggtggagcgatgatggagattcctcctttggtgtctcgccggagcctcttcaggtgcaagcttcctacaaggacgtcctaatctcatcaggggagcttgttcatcccgcttcttctcgggaagaggaaggcagctgggttaaggttctcggtcgtcgtgatcgtaggcggcgctcccagtcctcccccctagtttggctcttgtggacttgcgtgggaggtgcttcaactgcttctcgccatctcatcgggttgctgagtgtcggcggcaggtgcggtgcttccattgccggctgcctgggcactgtgcctagcgtgcccgcgacggtcgacggctactcatcatccgcgtcgagtccaggtgtggcgccccgtcgtccaagtggcagcgccgatggaagcccctagaggccgtatggaggatcatgcaaggtgtgccgggggaggctctgctgatggcggacgaaggcgtactcgccgtgggccgaggaagaggcggggacggagctctggtggtcatggtgatcgtgatgccgccgatgccccctctccctctttcgcattcagataccagtataccaccatcccgtctgtttcctccggatgacatgtgagttacatcaaacactcatggaaaatttggcaggctgagcaagatcttcaccgcactcttcttatctcagctgttgatctggagggttctggtggcgccacggaggtcttgatcgcactaagcttgagttttaaccttgatgctgatgtgatcgacctacgcatggtcgcaccaaattcctccatcgctctatttccgaatgttgggatggatgatcaggttctatctggaggacaatctttgtatgtgccccccattcggttgatcatcaagcgctggtctcgtcaggcaatggtatccggtggtggcgctgctggatattaatctttagggtattcttgctcatctatgggggatggagacggcggagcacattctgcgaggattctgtctgctgagccgtcagccgtagtaaagtctccaagtttgaatctggcgggaagggtggtgactgttactccagttgatggccttgctctcccaacttgggatgttgagctggaggcgcctgggtcccatcttgtctcttcgtctgctgctgcttctctggtaataatgtctccaactttgattcaagtggagggcttcgcaaaggatgctaataatgatgttctggtctcagcgatccaacagatggatggttttctcacagttgtgaaaatgtaccagattctatggctattgtgcagcttccacctgttttaccccagacaccttgcaaagtaacccaagttcatactagaagaaagcacctattgcaaactcaggaagctacggacgatggtggtgtggctaaggaattcatgaataagattttgcaatccctttcaggcgttctacctgtttctccttcgtcgaagctaaaaaaacagaaggtctattgcgcccaattttgttccaagaagatccaggagggtagctaagcttnn

SEQ ID NO: 7801 - DNA, 7646 bp, Zea Mays
  misc_feature (7645)..(7646): n is a, c, g, or t
aacaaactcgcctttttttctctctcctcccaccccggcgctccctccctcccgctcctccgccgaggtctgtgatcttctgccgctcctccgattggattcctcctcctccggcgttgcccggccccgcgccaccgggctcctctcctctcccgatcggaccggaccgcaccgcgccgggcgtgccctttggcgctgccgccaaatgcccggcgcgcgcggcgctgccgccccgcccccgctgcctcgctgcgacacgggtgcggggcgcgacgtaggattctgacaccggggatctttgcgcggtggagttctgggcccctcctccgtggaccgtggcggtgcctcgattagcaagcggcgcgcgcctgtcgctcgaccgatcctgctcgcgcttcctcggattccgatgcaatgcgcaccgcgggccgcgcggctcctcttctgaccgatctcggaggagctctgagatttctgtcgcatcagatgaggatgcaagtatgaaggtttctttgaggtggtacagttttagctgccaatggaggacccaaataaaacgttttctgacgtagttaagcttttgacatcatggctgccgcgacgctccaacccagataatgtctcccgggacttctggatgcccgatcacagctgtcgagtttgctatgactgtgattcacaattcaccatattcaaccgcagacatcattgtcgtcgctgtgggcgaattttctgtggtaagtgcactgcaaactccatcccagtttcaagtggccctgacagaaatgtcgatgagggggacaggatacgtgtctgcaacttctgcttcaagcaatgggagcaagaaagagtcacttccctcaaaccggtgctgccggtgctcaccccttccctgtctgagacgagtttgttcagcaccaagtcagctatcaccatcaatagtgttaccacaacggcaggctcttactctaatgggaattatcagcatgtgagctgtgttaccagcactagtcctccaaagtgttgccatgacaagacctcccataatatgcaagacactcatgctcctgagaaatgtatgtccactgtttcaaacaaagatgactcttcagttcagtttggctactacacaaacaggagtgatgacgaagatgaagaataccctgcttactgctctgataggcaggtacaacatcaacaacagagtggacaatattatggcccagatgagttttatgagcttgatacaccctacaattcaaaaatgtcgatcgttgaagaatctatgacctctaaagaactatccccacatgtgcttgatcaaggatttccgagtgcaccgaccattacaaaatcagacaatgaaccagaacattattatagttctgaatgtggtgctgcttcatccatttatgctttagaaagtaatgatacgaaccctgttgattttgaaaaggatgaacttttctggcttcctcctgaaccagaagatgaagaagatgagttgcaagctgaattgtttaatgatgatgacggtgacgatgacgatgacaaatctgtagctgatggtgaatggtgtcgaattcggtcgtcaagtagttttggcagtggagagttccgaagtagagatcggtcgggcgaagaacataagaaagtaatgaagaatgttgttgatggacatttcagggctttgatctctcagctactagaggtggagaatattccgttgcatgaaggtgatgacatgggctggttggagattgttacttctgtatcatgggaagctgccaacttcctcaggccagacacaagccagggtggtggcatggatcctggtggatatgtcaaggttaagtgcttagcatgtgggcaccgcaatgaaagtactgttgtaaaaggagtagtttgtaagaagaatgttgcacataggcgcatgacaactagaatagagaagccccgtctcctactacttgcaggagctcttgagtaccatcgagtcacaaatcagctgtcaagtattgatacattgctccagcaggaaacagatcaccttaaaatggcagtcgcaaagattgtagctcaaagacccaacttgcttttggttgagaattcagtttctcgatatgctcaagatttgcttctagaaaagaacatatcgttggttttaaatatcaagcagcccctcttgcaacgtattgctcgttgcacaggtgctcagatagttccttctattgatctcctaccatctcagaagcttggttactgtgagttatttcatgtagataaatacgatgaacagtctgttagctcggttaacgtgtcaaagaaaatggtgaagaccatgatgttctttgaaggatgcccaaaaccattgggttgcactgttctgctaaagggtggtagcatggatgagctcaagaaaattaagcatgtggtccagtatggtatttttgcagcatatcacttggcgttggaaacatctttccttgcagatgaaggtgcaaccctaccagaacttccattgttgtctccattgactgtagccttgccagataaacgatctactgcagacagctccatttcagcagtgccaggcttcacaattaatgtttcaattagccagcaaactgatagttttgaccacattggtaccgactacatcatgtcaacccaaccaggtgaaaatgctgtggctgaagcaccagtatccagcgaatgctttagttctcagaatacctactctcattctcttggaccttggtgtgctaataacagcaatttcaataacggcactggtgatggagatggattagctaatgtcactgcaactccaaattctgtttccatatcttctttgtctacatctggtgcactcacaaaccatacttctagatattctagtgtagagaaaaacagtatgcattttggtgattatcatgatggttcaatgaggttacatggtaagacggtgacaatagattcaaccagcacagcaagccattatcaccagagcacagtcaaagctagcactaatatcaatgtcaatgagtcattagaaggtccatatgctttggctaatgtgaaaaccatcaacgagaacaattctattgtagtccaaccagtgtctactgctgctgtacaataccaagagaccagtcaaggagatgatagcacatcaaataaggatgaagtggtgccttctgatcatcaaagcatcttagtctcattgtccacacgttgcgtatggaaaggtactatttgtgagcgttcccagctgttacgcatcaagtattatggtaactttgataagccccttggaagatttttgcgggattacttgtttgatcaggtttggcaaaatggttgcatgcttccgatatgctcctattagtgttcactctgttcatttaccacctcataaacttgattttggccaccagcccttggattggatacaaaaggaagcaaatgaggttattgagcgagcaaaacatctatttgatgaagtattgcatgctttacacatgatatctgacaaaaaggttcaaggcagttcgattaacatggaatttagcaattacattgctgatcttgaaatcatgcttcgaaaggaaaagtcagaatttgagggatgcttgaataaagtcttgagaagggatatgcagaaaggccaaccggacattcttgagatcaataggctgcgaagacagttactcttccattcatacttgtgggataaaagactggtatttggcgcaagatcagatagatgtcgtcatgagaagacccattccatagatagtgtcgctgagcaaaatgtaatactaaagcctcaaagtgaatgcagcgggaataggtctgccaacaaagatgctaaatatgttgagtgccttcaggaaagtatttatggagggaatcacactggagttgatgtgggtactgtcaattcgaatcatgtccatcaaatggctacaggcgaattggattcgcttcagagagacatcaaagctcctctatacagcagtgttagtgtaaatggtgagtcgattcccttggaaccagatcttgttgctcgacgcaccctttcagaaggtcagtttcctagtgtattggatgtgactaatgcacttgaagcgaaatggaccggtaaagatgatcctgtttctagcaaggtaaccatgccagaatctacagcatcttcagaggactcagaagaacatatgggtgataatacaccttcatacgcctctatattgctgagcaagctaggggacagtgcagcagatcattctaattggatagagatgcctttcttactattttaccgttccctcaataagcaatggaatcgatcaaaccgatttgatgcactcaacgaatatagtcccgaatatgttcctttcttaagggaagtggagcgtcatattggacctaaatttttctttcctataggaatcagtgatactgttgttggagtttatgatgacgaacctactagcattatctcttatgcgctggcctcccatgaatatcatcttcagatgtcagatgaactggaacgagaaatgacagacacttcactcccactatgtgactcaagaagtgtctcgttaactgaactggatgaatgtacttctgaacttctaagaagtgttgtctctacagaggacattatcctctccatgtctggaagaaagaacccacttgcttcagattcacttgtgcctcgaaaagtaagtcacataaaagtgaattttggggatgaaggtcctctaggacaggtgaagtacactgtgatttgttactatgccaaacaatttgatgctctgaggagattatgctgtccatcagagcgtgattttgtcaggtcccttagtcgttgcaagaaatggggtgctcaaggaggcaagagcaatgtattctttgcaaaaacaatggatgatcggttcataattaaacaggttaccaaaactgaattggagtctttcatgaagtttgctccagattacttcaaatatgtatcagagtcgatttgtactggaagtcctacttgcatcgcaaaaattcttggtatttatcaggttaagagcctcaaaggaggtaaggagatgaggatggatgttcttctgatggaaaatcttttgtttgagcgcgatgtgacaacattgtatgatttaaagggctctgccagatcaagatataacccagactcaaatggtagcgataaagtacttcttgatcagaacttaattgaagcgatgcctacatcacctatatttgtcggaaacaaggcaaagaggctgctggagagagctgtttggaatgacacgtcctttcttgcttccatcgatgtaatggattactctttacttgttggtgttgatgagaaaaggcatgaacttgtaatgggtattatagatttcataaggcaatatacgtgggacaaacacctagagacatgggtgaaagcttcagggatactaggtggaccaaagaatgtgtcgccaacagtaatttcaccaaagcaatacaagaagcggtttaggaaagccatgtcggcctactttcttgtcgtcccagaccagtggtcgcctccagtggtcatccccagcaagcaagctgagagtggtcaagacagggacgaacaggttgtcttgacagaattgtgagatgcatgcattacttttaggaacattcagggaataactcctcttttttgcaacatctatagattttgattttatttaaattttgttcattgttttttcttgtagctgtattttctgggtattcctaccctttcctttttttggggaggatctatagaaagttttagcccaagtctttgaaactggtcattgtaaataccatccttcttctaatgaaatgatacacagctctcctgcgtgtttaagaaaaaaaagtctttgaaacttaagtatgtgtctcccgccccctcccctccccggcgctccagcccccccccccccccccccccccagcctcacgtcggtgtccactctaggctcggcggccacccatattcctccctcggcaccggcaaactcctctgtttctgccccgctggtcgctcaaaggctcagcggtggagcgatgatggagattcctcctttggtgtctcgccggagcctcttcaggtgcaagcttcctacaaggacgtcctaatctcatcaggggagcttgttcatcccgcttcttctcgggaagaggaaggcagctgggttaaggttctcggtcgtcgtgatcgtaggcggcgctcccagtcctcccccctagtttggctcttgtggacttgcgtgggaggtgcttcaactgcttctcgccatctcatcgggttgctgagtgtcggcggcaggtgcggtgcttccattgccggctgcctgggcactgtgcctagcgtgcccgcgacggtcgacggctactcatcatccgcgtcgagtccaggtgtggcgccccgtcgtccaagtggcagcgccgatggaagcccctagaggccgtatggaggatcatgcaaggtgtgccgggggaggctctgctgatggcggacgaaggcgtactcgccgtgggccgaggaagaggcggggacggagctctggtggtcatggtgatcgtgatgccgccgatgccccctctccctctttcgcattcagataccagtataccaccatcccgtctgtttcctccggatgacatgtgagttacatcaaacactcatggaaaatttggcaggctgagcaagatcttcaccgcactcttcttatctcagctgttgatctggagggttctggtggcgccacggaggtcttgatcgcactaagcttgagttttaaccttgatgctgatgtgatcgacctacgcatggtcgcaccaaattcctccatcgctctatttccgaatgttgggatggatgatcaggttctatctggaggacaatctttgtatgtgccccccattcggttgatcatcaagcgctggtctcgtcaggcaatggtatccggtggtggcgctgctggatattaatctttagggtattcttgctcatctatgggggatggagacggcggagcacattctgcgaggattctgtctgctgagccgtcagccgtagtaaagtctccaagtttgaatctggcgggaagggtggtgactgttactccagttgatggccttgctctcccaacttgggatgttgagctggaggcgcctgggtcccatcttgtctcttcgtctgctgctgcttctctggtaataatgtctccaactttgattcaagtggagggcttcgcaaaggatgctaataatgatgttctggtctcagcgatccaacagatggatggttttctcacagttgtgaaaatgtaccagattctatggctattgtgcagcttccacctgttttaccccagacaccttgcaaagtaacccaagttcatactagaagaaagcacctattgcaaactcaggaagctacggacgatggtggtgtggctaaggaattcatgaataagattttgcaatccctttcaggcgttctacctgtttctccttcgtcgaagctaaaaaaacagaaggtctattgcgcccaattttgttccaagaagatccaggagggtagctaagcttnn

SEQ ID NO: 7802 - DNA, 4007 bp, Zea Mays
aacaaactcgcctttttttctctctcctcccaccccggcgctccctccctcccgctcctccgccgaggtctgtgatcttctgccgctcctccgattggattcctcctcctccggcgttgcccggccccgcgccaccgggctcctctcctctcccgatcggaccggaccgcaccgcgccgggcgtgccctttggcgctgccgccaaatgcccggcgcgcgcggcgctgccgccccgcccccgctgcctcgctgcgacacgggtgcggggcgcgacgtaggattctgacaccggggatctttgcgcggtggagttctgggcccctcctccgtggaccgtggcggtgcctcgattagcaagcggcgcgcgcctgtcgctcgaccgatcctgctcgcgcttcctcggattccgatgcaatgcgcaccgcgggccgcgcggctcctcttctgaccgatctcggaggagctctgagatttctgtcgcatcagatgaggatgcaagtatgaaggtttctttgaggtggtacagttttagctgccaatggaggacccaaataaaacgttttctgacgtagttaagcttttgacatcatggctgccgcgacgctccaacccagataatgtctcccgggacttctggatgcccgatcacagctgtcgagtttgctatgactgtgattcacaattcaccatattcaaccgcagacatcattgtcgtcgctgtgggcgaattttctgtggtaagtgcactgcaaactccatcccagtttcaagtggccctgacagaaatgtcgatgagggggacaggatacgtgtctgcaacttctgcttcaagcaatgggagcaagaaagagtcacttccctcaaaccggtgctgccggtgctcaccccttccctgtctgagacgagtttgttcagcaccaagtcagctatcaccatcaatagtgttaccacaacggcaggctcttactctaatgggaattatcagcatgtgagctgtgttaccagcactagtcctccaaagtgttgccatgacaagacctcccataatatgcaagacactcatgctcctgagaaatgtatgtccactgtttcaaacaaagatgactcttcagttcagtttggctactacacaaacaggagtgatgacgaagatgaagaataccctgcttactgctctgataggcaggtacaacatcaacaacagagtggacaatattatggcccagatgagttttatgagcttgatacaccctacaattcaaaaatgtcgatcgttgaagaatctatgacctctaaagaactatccccacatgtgcttgatcaaggatttccgagtgcaccgaccattacaaaatcagacaatgaaccagaacattattatagttctgaatgtggtgctgcttcatccatttatgctttagaaagtaatgatacgaaccctgttgattttgaaaaggatgaacttttctggcttcctcctgaaccagaagatgaagaagatgagttgcaagctgaattgtttaatgatgatgacggtgacgatgacgatgacaaatctgtagctgatggtgaatggtgtcgaattcggtcgtcaagtagttttggcagtggagagttccgaagtagagatcggtcgggcgaagaacataagaaagtaatgaagaatgttgttgatggacatttcagggctttgatctctcagctactagaggtggagaatattccgttgcatgaaggtgatgacatgggctggttggagattgttacttctgtatcatgggaagctgccaacttcctcaggccagacacaagccagggtggtggcatggatcctggtggatatgtcaaggttaagtgcttagcatgtgggcaccgcaatgaaagtactgttgtaaaaggagtagtttgtaagaagaatgttgcacataggcgcatgacaactagaatagagaagccccgtctcctactacttgcaggagctcttgagtaccatcgagtcacaaatcagctgtcaagtattgatacattgctccagcaggaaacagatcaccttaaaatggcagtcgcaaagattgtagctcaaagacccaacttgcttttggttgagaattcagtttctcgatatgctcaagatttgcttctagaaaagaacatatcgttggttttaaatatcaagcagcccctcttgcaacgtattgctcgttgcacaggtgctcagatagttccttctattgatctcctaccatctcagaagcttggttactgtgagttatttcatgtagataaatacgatgaacagtctgttagctcggttaacgtgtcaaagaaaatggtgaagaccatgatgttctttgaaggatgcccaaaaccattgggttgcactgttctgctaaagggtggtagcatggatgagctcaagaaaattaagcatgtggtccagtatggtatttttgcagcatatcacttggcgttggaaacatctttccttgcagatgaaggtgcaaccctaccagaacttccattgttgtctccattgactgtagccttgccagataaacgatctactgcagacagctccatttcagcagtgccaggcttcacaattaatgtttcaattagccagcaaactgatagttttgaccacattggtaccgactacatcatgtcaacccaaccaggtgaaaatgctgtggctgaagcaccagtatccagcgaatgctttagttctcagaatacctactctcattctcttggaccttggtgtgctaataacagcaatttcaataacggcactggtgatggagatggattagctaatgtcactgcaactccaaattctgtttccatatcttctttgtctacatctggtgcactcacaaaccatacttctagatattctagtgtagagaaaaacagtatgcattttggtgattatcatgatggttcaatgaggttacatggtaagacggtgacaatagattcaaccagcacagcaagccattatcaccagagcacagtcaaagctagcactaatatcaatgtcaatgagtcattagaaggtccatatgctttggctaatgtgaaaaccatcaacgagaacaattctattgtagtccaaccagtgtctactgctgctgtacaataccaagagaccagtcaaggagatgatagcacatcaaataaggatgaagtggtgccttctgatcatcaaagcatcttagtctcattgtccacacgttgcgtatggaaaggtactatttgtgagcgttcccagctgttacgcatcaagtattatggtaactttgataagccccttggaagatttttgcgggattacttgtttgatcagggctatcagtgtcgttcctgtgataagccacctgaagcccatgtccattgctatactcatcgccagggaagtctaaccatttcagttagaaaacttaccgaatttgttttaacgggtgaaagggatgggaaaatttggatgtggcacagatgtctgaaatgtccttggagtaatggatttcctccagcaactcagaggattgtcatgtctgatgctgcctggggtttgtcacttggtaaatttttggagcttagcttttcaaaccatgcagctgcaagtagggtagccagttgtggtcattctctccacagggactgcctccggttctatgggtttggcaaaatggttgcatgcttccgatatgctcctattagtgttcactctgttcatttaccacctcataaacttgattttggccaccagcccttggattggatacaaaaggaagcaaatgaggttattgagcgagcaaaacatctatttgatgaagtattgcatgctttacacatgatatctgacaaaaaggttcaaggcagttcgattaacatggaatttagcaattacattgctgatcttgaaatcatgcttcgaaaggaaaagtcagaatttgaggaatcgaagccaggagaggggaagatgagggcaaatagactatttg

SEQ ID NO: 7803 - DNA, 1987 bp, Zea Mays
ctccaaccgtttcttccacccacgatgccagtatctcgacaactgtagcctgcacgtcccatattcaagcttggcgtccacttgtctagccctgctccttccctatgccgacgctgctcactgcctctccctcatctccccacgccagcaacaaggaggcaaggacgtcgtacctttcctggtggccgccatccctctcctctcctgtttctggtggtcgatgccccttgttccagcagcaagcagctcccttcccttgccgtggatgtcaactacctccccctgcttcctactcctcctcccatggataagctcgcccttttgctgcccgccctcaatccctagccgcttccgcttcctcctgcacgtggtcagcgcagcgtgcgtggcttgcctgcagcagcgtggtcagcgcaagctcggcgtggctgacgcagcgtggttggtccggccatggcgcggccaggccaatgcctcggcatggtcgtgcgtgtgtccccggcacggcatcgcgctcgcgtccggcacagcctgcgcagccccgactcgacctttgtgcgatcccagcgcagcagcagcatcgccgtccacgtgcctcgccgcgagctcgtctacccatccgtcgtcgctgcgagattgcgatctgtttccgagcttcaagggatcaaagatcgagcgttggcgaccaagagatcaagctttttgaggtctacaacattgaacaccctgagcatctgtttggtgaaggcaagtgtcctctgacccattatgtcccatttattttataatacactgtctcgcatactatgaacaacctaaggatttactagctttctatttaccttatccttgtttacctttcgggttatcatggttagctctaagctagtgctttactctaatcaatgaacatgatgagaattactttatgatacgatgaggatgagcttgtggcactaaagggggctcaggctgttttcctgagtgcctctccataaggacctgttcggggagtgacaacccgggataacagtgcaaccatgagggtggaatgggacgcccttagctgattaattagaggaaccagaggagtagttggcttcgccgtagggccgtcaatggggtccaggcacagtacttgctctgccgaggctggctgcagaggttctttgatttggttttgttagtcacccttcctctggggagatgtactgtgtttatcaaactggagaaacctaacgagcggctatgacctctgggaaatctttgtaaaggctacgtagtgagaccctgctaggtcaccttggtagtgatcaatggagagtcatgatctccgggcagaatgggaatcacgacttgtgggtaaagtgtgcgacctctgcagagggttagaaactgatatatcagccgtgctcacggttatgagcgaccttgggatcctctttgattagagatacatatgatatgagatacaatggttctattgatagttttgacttgatgatgataatgatgttttctcgatgaggaaatggttcacgggttggttatatgataaaacttggcttccactaataataaatacctgaccaactaaaagcaatctgctttgaccttaacctcacataaagctagtccactacagccaaacgggacatttgctgagtacgttgatgtgtactcacccttgctttcacaaaacactaggttgcctttggtgcaatctatgctcaggtaaagaagaaggcgtcgaggcggatctccaggagttctagggcttcgatgagttcgaggattaggctagcgacctcccccagtcagctgcctgtggtgggtttatttacgttggctacatttctattctgtgtactttgattttactatgtaaatgactctagtctttcatattattacttatcctttattgttattcgaagcattgtgccatgatgagtcatttatgtaatcgctatgtacgtgagttctg

SEQ ID NO: 7804 - DNA, 2611 bp, Zea Mays
cgtgcctccccgggcaggtaacctcaccgcccccgcctgtcgctggcctcgtctcgtccccgtcaccctccacacgcatgactctcccacctcattcgcttgacctcccttccacttaaaccacgccaaaaaccagctcgcgattcctcccactggcctgaatctgacccgcatcgcccgccatccccaccgccgcgcctcttccgggcagccatggacgaggccttcgcgcgcgcggtggaggacggcctcaagctcaccaagcgcctcgtcctgcccagcgggggcgggatgccgccgccgccgcgcccgcacctggcgatggaccgcgacgaccccgccgcggcgctgcagcagctcatgccggcggcgcccatggcgtacgccgtcgtcgtcgacccggccgccgtcgacagccccgacgtgcccagctaccagccccacgtctacggccgcctcgacccgcccgcgctcatcccgctccagatgcgggaggtcgagctccgcgtcgactgcgccgccggctgcgccaccgccgaggtcgccctgcgcgcgcgctggtggctgcactgcatcacgcgcagccgcgcgtgccactgccgcatcgtcgtgcccatggctcaccagggttcaattctaggcgctgaggttactgttgggaaaagatcatacaatactcatgtaattgatacagaggataactgttcagtgaagattgcaatgcccgagagtgggggtcttttaaaacaggaatttttttccttgacaataccacaggttggaggtggagaagatatatttgccacaatcagatggtcacaaaaattgctatacgacaacggacaattttctgtcgaagtaccatttcgtttcccgcagtttgtgaaccctttgccaaaggttttcatgaaaaaggagaaaatacagttgattgtgaatagtggtgtgactaaggagattttattgcagggaacaagccatcccttgaaggaaaaaagtagacaaggtgagaagttgtctttcctgcatgaagcagttgttgagaattggtcaaccaaagattttaccttcgcatatactgtttattctggtgatttgtctggtggagttcttgtgcagccctcaaccttgcgtgactatgatgacagagatatgttctgtctttttcttttacctggaaataacgagaacagaaaggtcttcagaaaggctgttgtttatatcattgatacaagtggaagcatgcaaggaaagcctcttgagagtgttaagaatgccctgtccactactctctctgatcttattccaggagattacttcaacataataacatttaatgatgagcttcactcattctcatcgcatttggagcaagtaaatgaaaaaacaattggaaacgctattgaatggatgaacttaaactttgtcgctcagggtggcactaacatcatgcatcctttgagtgaggcaatgactttgctgtcaacttctcacgatgcgcttccacaaatctattttgttactgatgggtcagttgatgatgaacggaatatctgccatacattgaaaactcaacttattaaaagtggatctaagtctcctcggatttctacttttgggctaggttcatattgcaaccactatttcttgaggatgttggcatcaattggtaagggtcactatgctgctgcatttgatacaggatcaattgagggtcgaatgcttcaatggttccagaaagcttcaagcacaatagtgtcaaatgtttccattgatgccataaagcatattcaagattttgaagtggattctgtatatattccagacatttcagcaaaatatccattgtgtgtttctggaaggtacaatggcaagcttccggagacacttatcgccaagggtcacttggctgacatgagtgaaatatctattgaattgaaagtccaacatataaaggatatacctcttgataaagtattggcaaagcaacagatggatcttctcacagcaaaagcatggcttatggagaacaaggagcttgagcgaaaggttgtgaaattaagcatacaaaatagccttccttctgagtacacacgcatggtactacttcaaaccagtctggacaaaatagatccagcacaacaggcgaagaataaaccaacgaaacaaagcagtagcccagatgagctgccagcgatgccgctaggtggcctagcggtcggatttggcgacgtagcggcaacaacagagaacctgacaacaggattcggagacatgaaagcagccgagaagtttgtgatgttggagaaggccgctggctgctgcagccgcatggcggactgctgctgctgcatgtgcttcatcaaggcgtgcagcaagatgaacgaccagtgcgccatcgtcatggcgcaggcctgcgccgccatcgcgtgcctgggatgcttcgagtgctgctcagagctgtgctgcggcgggtccaactgagtgaggccacagcaaccgagcaagttggtgagaatgtgttgttgtatagtgatgtaaatgctcccagtaatgtatagaatttggcatcacgtacgtgtttatctaacttggcttgatcaaaaaaaaa

SEQ ID NO: 7805 - DNA, 2191 bp, Zea Mays
gtttcaatgattacaacattcacttgcatccgccggcagtctggttcgtgttaggtggatgggcccccaattagctgtcgctttggactatgctctccgggttccgcaaatcaggacataacccggtgtcattactccggttcaattctaggcgctgaggttactgttgggaaaagatcatacaatactcatgtaattgatacagaggataactgttcagtgaagattgcaatgcccgagagtgggggtcttttaaaacaggaatttttttccttgacaataccacaggttggaggtggagaagatatatttgccacaatcagatggtcacaaaaattgctatacgacaacggacaattttctgtcgaagtaccatttcgtttcccgcagtttgtgaaccctttgccaaaggttttcatgaaaaaggagaaaatacagttgattgtgaatagtggtgtgactaaggagattttattgcagggaacaagccatcccttgaaggaaaaaagtagacaaggtgagaagttgtctttcctgcatgaagcagttgttgagaattggtcaaccaaagattttaccttcgcatatactgtttattctggtgatttgtctggtggagttcttgtgcagccctcaaccttgcgtgactatgatgacagagatatgttctgtctttttcttttacctggaaataacgagaacagaaaggtcttcagaaaggctgttgtttatatcattgatacaagtggaagcatgcaaggaaagcctcttgagagtgttaagaatgccctgtccactactctctctgatcttattccaggagattacttcaacataataacatttaatgatgagcttcactcattctcatcgcatttggagcaagtaaatgaaaaaacaattggaaacgctattgaatggatgaacttaaactttgtcgctcagggtggcactaacatcatgcatcctttgagtgaggcaatgactttgctgtcaacttctcacgatgcgcttccacaaatctattttgttactgatgggtcagttgatgatgaacggaatatctgccatacattgaaaactcaacttattaaaagtggatctaagtctcctcggatttctacttttgggctaggttcatattgcaaccactatttcttgaggatgttggcatcaattggtaagggtcactatgctgctgcatttgatacaggatcaattgagggtcgaatgcttcaatggttccagaaagcttcaagcacaatagtgtcaaatgtttccattgatgccataaagcatattcaagattttgaagtggattctgtatatattccagacatttcagcaaaatatccattgtgtgtttctggaaggtacaatggcaagcttccggagacacttatcgccaagggtcacttggctgacatgagtgaaatatctattgaattgaaagtccaacatataaaggatatacctcttgataaagtattggcaaagcaacagatggatcttctcacagcaaaagcatggcttatggagaacaaggagcttgagcgaaaggttgtgaaattaagcatacaaaatagccttccttctgagtacacacgcatggtactacttcaaaccagtctggacaaaatagatccagcacaacaggcgaagaataaaccaacgaaacaaagcagtagcccagatgagctgccagcgatgccgctaggtggcctagcggtcggatttggcgacgtagcggcaacaacagagaacctgacaacaggattcggagacatgaaagcagccgagaagtttgtgatgttggagaaggccgctggctgctgcagccgcatggcggactgctgctgctgcatgtgcttcatcaaggcgtgcagcaagatgaacgaccagtgcgccatcgtcatggcgcaggcctgcgccgccatcgcgtgcctgggatgcttcgagtgctgctcagagctgtgctgcggcgggtccaactgagtgaggccacagcaaccgagcaagttggtgagaatgtgttgttgtatagtgatgtaaatgctcccagtaatgtatagaatttggcatcacgtacgtgtttatctaacttggcttgatcagtaagagcgtcacgtgtgttaatcactgtattaagggacagaacagaagcgcacacgttccgttagctttgtgcaaa

SEQ ID NO: 7806 - DNA, 1579 bp, Zea Mays
ctccacacgcatgactctcccacctcattcgcttgacctcccttccacttaaaccacgccaaaaaccagctcgcgattcctcccactggcctgaatctgacccgcatcgcccgccatccccaccgccgcgcctcttccgggcagccatggacgaggccttcgcgcgcgcggtggaggacggcctcaagctcaccaagcgcctcgtcctgcccagcgggggcgggatgccgccgccgccgcgcccgcacctggcgatggaccgcgacgaccccgccgcggcgctgcagcagctcatgccggcggcgcccatggcgtacgccgtcgtcgtcgacccggccgccgtcgacagccccgacgtgcccagctaccagccccacgtctacggccgcctcgacccgcccgcgctcatcccgctccagatgcgggaggtcgagctccgcgtcgactgcgccgccggctgcgccaccgccgaggtcgccctgcgcgcgcgctggtggctgcactgcatcacgcgcagccgcgcgtgccactgccgcatcgtcgtgcccatggctcaccagggttcaattctaggcgctgaggttactgttgggaaaagatcatacaatactcatgtaattgatacagaggataactgttcagtgaagattgcaatgcccgagagtgggggtcttttaaaacaggaatttttttccttgacaataccacaggttggaggtggagaagatatatttgccacaatcagatggtcacaaaaattgctatacgacaacggacaattttctgtcgaagtaccatttcgtttcccgcagtttgtgaaccctttgccaaaggttttcatgaaaaaggagaaaatacagttgattgtgaatagtggtgtgactaaggagattttattgcagggaacaagccatcccttgaaggaaaaaagtagacaaggtgagaagttgtctttcctgcatgaagcagttgttgagaattggtcaaccaaagattttaccttcgcatatactgtttattctggtgatttgtctggtggagttcttgtgcagccctcaaccttgcgtgactatgatgacagagatatgttctgtctttttcttttacctggaaataacgagaacagaaaggtcttcagaaaggctgttgtttatatcattgatacaagtggaagcatgcaaggaaagcctcttgagagtgttaagaatgccctgtccactactctctctgatcttattccaggagattacttcaacataataacatttaatgatgagcttcactcattctcatcgcatttggagcaagtaaatgaaaaaacaattggaaacgctattgaatggatgaacttaaactttgtcgctcagggtggcactaacatcatgcatcctttgagtgaggcaatgactttgctgtcaacttctcacgatgcgcttccacaaatctattttgttactgatgggtcagttgatgatgaacggaatatctgccatacattgaaaactcaacttattaaaagtggatctaagtctcctcggatttctacttttgggctagataaattttctaattgttttcc

SEQ ID NO: 7807 - DNA, 1605 bp, Zea Mays
ctcgtctcgtccccgtcaccctccacacgcatgactctcccacctcattcgcttgacctcccttccacttaaaccacgccaaaaaccagctcgcgattcctcccactggcctgaatctgacccgcatcgcccgccatccccaccgccgcgcctcttccgggcagccatggacgaggccttcgcgcgcgcggtggaggacggcctcaagctcaccaagcgcctcgtcctgcccagcgggggcgggatgccgccgccgccgcgcccgcacctggcgatggaccgcgacgaccccgccgcggcgctgcagcagctcatgccggcggcgcccatggcgtacgccgtcgtcgtcgacccggccgccgtcgacagccccgacgtgcccagctaccagccccacgtctacggccgcctcgacccgcccgcgctcatcccgctccagatgcgggaggtcgagctccgcgtcgactgcgccgccggctgcgccaccgccgaggtcgccctgcgcgcgcgctggtggctgcactgcatcacgcgcagccgcgcgtgccactgccgcatcgtcgtgcccatggctcaccagggttcaattctaggcgctgaggttactgttgggaaaagatcatacaatactcatgtaattgatacagaggataactgttcagtgaagattgcaatgcccgagagtgggggtcttttaaaacaggaatttttttccttgacaataccacaggttggaggtggagaagatatatttgccacaatcagatggtcacaaaaattgctatacgacaacggacaattttctgtcgaagtaccatttcgtttcccgcagtttgtgaaccctttgccaaaggttttcatgaaaaaggagaaaatacagttgattgtgaatagtggtgtgactaaggagattttattgcagggaacaagccatcccttgaaggaaaaaagtagacaaggtgagaagttgtctttcctgcatgaagcagttgttgagaattggtcaaccaaagattttaccttcgcatatactgtttattctggtgatttgtctggtggagttcttgtgcagccctcaaccttgcgtgactatgatgacagagatatgttctgtctttttcttttacctggaaataacgagaacagaaaggtcttcagaaaggctgttgtttatatcattgatacaagtggaagcatgcaaggaaagcctcttgagagtgttaagaatgccctgtccactactctctctgatcttattccaggagattacttcaacataataacatttaatgatgagcttcactcattctcatcgcatttggagcaagtaaatgaaaaaacaattggaaacgctattgaatggatgaacttaaactttgtcgctcagggtggcactaacatcatgcatcctttgagtgaggcaatgactttgctgtcaacttctcacgatgcgcttccacaaatctattttgttactgatgggtcagttgatgatgaacggaatatctgccatacattgaaaactcaacttattaaaagtggatctaagtctcctcggatttctacttttgggctaggcaaattctctgttggttttttagagtc

SEQ ID NO: 7808 - DNA, 4127 bp, Zea Mays
tatccacgtgtattaagatgaatcgagatgtgaattaatttaatttatacccccgcccccaatccacccccaatacatatggattggggtgaacactatagtacccaaacaaagctgtaggcgtaagtgcacaccttgcattgctggctacaccggcgcacactacactatagtagcaggcgcgtgtagtatatgctaaaacatattcccttcattttttattttgtcatggcttagttcaaaaataaactagcttacgataaatattcaagaacggagctagtatatatttaaacagcctaaatcaaggcttcctttagctcatcaatgaaaaactccgtgcaacctgccctttgctaactttattgttttaatgtattattattattgttgttgttgttgttgttattattattattattattattattattattattattattattattattattattattattattattactactattatttattattatctgaaacatagtcagcagggcatacgcgacataaagttgcttctgatctgatggtatagggaacgctccacatttgcaactactcatgctgtccagcagcctgctcactagctcagagctatgtcagctacccaagcaataaaatactcctgaaaacatacgttaattaaacactatttactgcccgatgagcatgcagaaacacagctagccctgcgttgccatcggtgtactgcatatatggcagagttattaattaatctaaaccgacaaattcatttagctctccgcaacgtactgatgatgttctacaacatactcatgcatgaccttactggctactgcaccagcagcttgcagcctatatgcatgtctttcttccttgatgcatacatagtcgtactccgcatggccgcatatataacgtacgagttcctttaggctattactagcagcttatccatcttcatctttttatatttaaacttcactcttccaacactacacagtctaccttgtaaaacagttttttagacgaccatacaagtgaattgttaaagactgtttaattttggcggtctattattaggacattagaatttttttgacgtgtcttcccttcgccttcggacgtactccctccgtttctttttatttgtcgctggatagtgcaattttacactattcagcgacaaataaaaagaaacggagggagtaccaccgtcgacgcctcaccaatcaccatggcatggcatgcaccacgtacgagacggtagaactttggtatgtagagcttcgttcacggtcacgcggtggtggagctccatcctgcagactttaaccatgcatgcccgtgagtccgtgacgaccttcttttccctctctctctctccccctactgctatcatggtcatggccatgggctcatggctaacctgcttcggctgtcttcttcaccgctctccccgtccccacaccgtctgacctgtccgttttttttaaaaaaataattaattaattaaagccgccaaatttgaagaagagaagaaggagaagatgagaagagagaaaaactgagtgccgaaagattcgatcggagtgagatgtagactttcggcagcatatagttataaccttaatgattaatctatcacgagattattgatatgccactatatatatgccggcgtacgtacggccgtctgtatataactatatagttgcactatctcgttacattagaataataatactgcaggaaaggccccaatgcaagctgggtttttttttcttcttcagcgagactccaaacttcgaaggtgccgcgtgtgttttaaaaatatcccagacaatgcctgaaaagttgacagctgaacacatggctttttacttgaccagtatacagtggtatttactatttaccaacatagtattactatatcattaccccctgaaacgctcggtttggtttccgttgctgcatgcagggcgaaataagttccatcgagggggtccacgctgcctccagatgctgcaaagaggttgatgagttcgttggaaggaacccggatccgttcctaacgattcagcaagagagaggaagccacgatcaatctcagcagtttctgaagaagttccggtacttccgttgctcacagctcttaataattattatagtaatcgccggttcttgcccattagtaaactacacgtctttattaatgttattttgttgtcaattgtgtattaccctagcactagctagcagatcgatcacatgaaaaaagactaatttgtacgagagaaaaaaaaatcctactatcatcacccaaatcatttttaggtaggatgggagaagcaacataaacaactagcctctgcaaatcgtcatatataagacagaaaactatcacccagagctaataaaccccgaaatgaatgagacatagatatctcaattattactgtctactgagaccacaacctgtccattttctgaaaaagtatgaaaagggggcatattcattcagtgcaagctgtatgaaagcttggtgatcatccgcgaacgagctgagcctcagtcccactccctcccaccagcgcgcgtacgtacgtgtacgtcctagcagcttcaacggcttgtatcagatctctgctgctttttttttacccctttgcagcctgcaacccgtactgcactactccctccgttcctttttatttgtcgctggatagtgtaattttgcactatccagcgacaaataaaaagaaacggagggagtacaaactttcagagtaatcagcatgtcgtctactttaaactgccatgccgtcaacatcacacgttgtcagcccagccctgcagagcaatcagtttgtcgttgtctgcgctaacacttaatcgagcatctatagtgctgcttttcagaaccgtcacctcattgttactataattgtttcaactatttcctcatcaccacgtcgtcagaaaaaccatcgtcgtctgctgctggctagctgaataggagtgcatcagtaaaacctgaaaataatgctgctgctactgtttgttgctaatgctagctagctactgcatagcttgcattgagttgggtgaattaatgattggcaatcagatgaatgaagttgagttttgtgcatgcatgcatgcagaggaaagagctgcctgagctactacctctcgtggatctgcggtggcgggtggtggtgcccgccgccgttgcagctcaagaggccaccggcgccgagctgctcctgcgcgccgcggctggggaagctctgctcctccaccgcctcctcctgctgcagctgttgctgctgccggttccgcgtcgtgtacgccgccgccggctgcgggtgctgcgcgccgtgcccgcgctgctcgtgcgactgcacctgcgcctgcccgcgctgctgctcctgcgcctgccccatgtgcagcgccgcgtgctgcgccccgcgctgctgcctgtgcctatgatggccatgagaaattttgcgtgcatgctagtagtagtagtacccggagatgatgatggatgactggcattttgcagcatggttttttttttggtttagtttcggcgacacgagtactgttgtaactggctgtacgtggctgatctggttagtgctggtgaatggtgtcgattccacattttccgctgagagttgccatgacatgcagccctactagtcttacgtacagcacaaaagatgcttagattccactcagtccttcggttattgcaatttaatgtggacgggagtgtattgaaatgtattgggatagattttgacttgctattaatttaaaccgacccaatatcactcaatccatatggattaacagtgcgaacaaaccctaatggcctgttcgtttatgccggatttcactaaaaatcgttccagctgatcaaaccttatgcggctgattggttggactgctgcccgtggcctgcctcaggcgagcatgccccgtgggaaacagaagtttctagcgtacccgcgcatgcagctttaagagatatttttttgctagcgttgcatctgccagtacaacttgatctcgttttatgcacttaaccaaacaaaggctagtgttgggtcaac

SEQ ID NO: 7809 - DNA, 3111 bp, Zea Mays
ctagtatccacgtgtattaagatgaatcgagatgtgaattaatttaatttatacccccgcccccaatccacccccaatacatatggattggggtgaacactatagtacccaaacaaagctgtaggcgtaagtgcacaccttgcattgctggctacaccggcgcacactacactatagtagcaggcgcgtgtagtatatgctaaaacatattcccttcattttttattttgtcatggcttagttcaaaaataaactagcttacgataaatattcaagaacggagctagtatatatttaaacagcctaaatcaaggcttcctttagctcatcaatgaaaaactccgtgcaacctgccctttgctaactttattgttttaatgtattattattattgttgttgttgttgttgttattattattattattattattattattattattattattattattattattattattattattattactactattatttattattatctgaaacatagtcagcagggcatacgcgacataaagttgcttctgatctgatggtatagggaacgctccacatttgcaactactcatgctgtccagcagcctgctcactagctcagagctatgtcagctacccaagcaataaaatactcctgaaaacatacgttaattaaacactatttactgcccgatgagcatgcagaaacacagctagccctgcgttgccatcggtgtactgcatatatggcagagttattaattaatctaaaccgacaaattcatttagctctccgcaacgtactgatgatgttctacaacatactcatgcatgaccttactggctactgcaccagcagcttgcagcctatatgcatgtctttcttccttgatgcatacatagtcgtactccgcatggccgcatatataacgtacgagttcctttaggctattactagcagcttatccatcttcatctttttatatttaaacttcactcttccaacactacacagtctaccttgtaaaacagttttttagacgaccatacaagtgaattgttaaagactgtttaattttggcggtctattattaggacattagaatttttttgacgtgtcttcccttcgccttcggacgtactccctccgtttctttttatttgtcgctggatagtgcaattttacactattcagcgacaaataaaaagaaacggagggagtaccaccgtcgacgcctcaccaatcaccatggcatggcatgcaccacgtacgagacggtagaactttggtatgtagagcttcgttcacggtcacgcggtggtggagctccatcctgcagactttaaccatgcatgcccgtgagtccgtgacgaccttcttttccctctctctctctccccctactgctatcatggtcatggccatgggctcatggctaacctgcttcggctgtcttcttcaccgctctccccgtccccacaccgtctgacctgtccgttttttttaaaaaaataattaattaattaaagccgccaaatttgaagaagagaagaaggagaagatgagaagagagaaaaactgagtgccgaaagattcgatcggagtgagatgtagactttcggcagcatatagttataaccttaatgattaatctatcacgagattattgatatgccactatatatatgccggcgtacgtacggccgtctgtatataactatatagttgcactatctcgttacattagaataataatactgcaggaaaggccccaatgcaagctgggtttttttttcttcttcagcgagactccaaacttcgaaggtgccgcgtgtgttttaaaaatatcccagacaatgcctgaaaagttgacagctgaacacatggctttttacttgaccagtatacagtggtatttactatttaccaacatagtattactatatcattaccccctgaaacgctcggtttggtttccgttgctgcatgcagggcgaaataagttccatcgagggggtccacgctgcctccagatgctgcaaagaggttgatgagttcgttggaaggaacccggatccgttcctaacgatgtatggattttcagtcagcaagagagaggaagccacgatcaatctcagcagtttctgaagaagttccgaggaaagagctgcctgagctactacctctcgtggatctgcggtggcgggtggtggtgcccgccgccgttgcagctcaagaggccaccggcgccgagctgctcctgcgcgccgcggctggggaagctctgctcctccaccgcctcctcctgctgcagctgttgctgctgccggttccgcgtcgtgtacgccgccgccggctgcgggtgctgcgcgccgtgcccgcgctgctcgtgcgactgcacctgcgcctgcccgcgctgctgctcctgcgcctgccccatgtgcagcgccgcgtgctgcgccccgcgctgctgcctgtgcctatgatggccatgagaaattttgcgtgcatgctagtagtagtagtacccggagatgatgatggatgactggcattttgcagcatggttttttttttggtttagtttcggcgacacgagtactgttgtaactggctgtacgtggctgatctggttagtgctggtgaatggtgtcgattccacattttccgctgagagttgccatgacatgcagccctactagtcttacgtacagcacaaaagatgcttagattccactcagtccttcggttattgcaatttaatgtggacgggagtgtattgaaatgtattgggatagattttgacttgctattaatttaaaccgacccaatatcactcaatccatatggattaacagtgcgaacaaaccctaatggcctgttcgtttatgccggatttcactaaaaatcgttccagctgatcaaaccttatgcggctgattggttggactgctgcccgtggcctgcctcaggcgagcatgccccgtgggaaacagaagtttctagcgtacccgcgcatgcagctttaagagatatttttttgctagcgttgcatctgccagtacaacttgatctcgttttatgcacttaaccaaacaaaggctagtgttgggtcaac

SEQ ID NO: 7810 - DNA, 2279 bp, Zea Mays
atttgcagcagaaataaattctttattgcaaaatgattacatgttacaataagtttacattatacaattatcggagtgattacaaaagaaagtgattcaaaagaattacactttaaaatgtataaaatatttataagttttaaaatacatgctagcttaagtgacaatcctcaataaagaagctaaagatgaaatatacttatataagaaggccgagcccaccggcacttagcaccatccacaacagaacaaacttataacctgaaaaacaacagggaataaaaccctgagtacgcaattactcagcaagacttacccgactaaagaaaagactctcaagggtatgctggatttaaaaagattcaaggtaaggctcatcaagtttcaagactcatttttgcagaaaagcttactagtagtgtatccttatgccaaaattttacttcacaagttaagtactttgccttaatctagatttgcctaatctagagcattcacttgtcctactctagcttcattttaacagctttagtttcgcttgttaactacgatgcagggcagtgatccagtcttcatatccgagaagtaacggcgatccgaatccattaatactcagctgaggatctccaaccacacgacatatgtagcacttaacccttgcatatgtcaactcgcccacgggtttctcaagaccagaacgggtccccgccaaccgagagctcagtaccccaccatccagcctcttgccaggtggatacacgatactctcgccatctctccactcccattgcaggccagcctttctggtattggtccagccgaggctaagcttacccatgacgaggcatgtggccagttaaagggtcctagatcagcaagcctactttcggtgcggtccttaatcgacacagacgggcgacctttcctgctcaacgtctggtctcatcttattatttatcacccaaaaccatgtacctgacagaggtacaacacttgaatgatgaattcatcactgcagatgatgctctcaccattacaagtcctttttcataaaacaaacccatacccagtgttacacaacattcttttaaacagaaacaagttttaattctctaggcagggctaagcctcattagttctctttataaaacaggtagcaaggaggataatcaaattccaaggaatggtaatgcatcaattgtttcatcactcaactcctataacctaatgcagcatataagtgataaaagttttaaaacaacaaggaggtggcaaatgcaccggggcttgcctgggataacactaggttagtgtttgttagacgagacttgcttgccgatcctctctctcaggtgggcacttgcttgatttatccatcttcaggttggcccgactgacgacatcatcttgcagagtagcccacgcttaacagcatcttgtggtcgactcatctttggtcctccacatcacgtagttcactagcgtacctaatgagatgcataatgcacatgtataaacataaggaagaataacacaacatattacacacaataaagaaataagcacaatgacgaggcactataacacttgtgagaaaatactagacgccaacaaatgactaagtacaacaaggacgaccacgggttctaacccaaacatcgagaaactttaaacgaatacgagtcctatcgtacttaggtagagtataatataaaagattcatccgattaaattcactataactggcttctaggactaacgtatggggagaaacaaactaacacatttaacacaattagcctaaacagacttatcaactaattattgaaatgctacatttatctctcgcgttattatttataccacacatcgctcatgaagaactaatttaattttacttcgtattactgatttcaccatacttacacaaatctaaatagtcacaactcatttacattcaccaaagtatttacctccttcttaattcaatcaagtctaaagcaaacatttagaaagaatgaattgaccatatataacaaggaatttggataaacacttcatatgcaacaagttgttatcaatcaaagatcaaggattgactaatccttcctaggcaaacaaaaatgacaccaagaaatcagtttaacacatgcagattttctagacagcagcacagtggttaactgttttattcataactcacaaaatatgcattcaaacatagtaaactaggactttctggaaagcttaggaaatcctctataactcttatattatca

SEQ ID NO: 7811 - DNA, 637 bp, Zea Mays
agctagggcaccaccctcttgatgtttcccatggccgcctccagctgctcctatggcgagctcgccctccctctgtgccctgccctctcacgacgtgcctgcgcagccccggcagcgacgtcgtccatcccattcggcgtgctctaggtgttcgacgaaatgggagaaccaaggaattgtcgtcgtttcttatccgcgaccccgccagtcttgtgcgcagtccacatattgtgttcctcatcgggttgggtgatgaagagaaggtctatgcgcatcgctcgccagatgttcgatagaagacttcaatcaaaggctgtcgtcgttcttgcaaaaaaaaaatcaagtcggatcatgatgtggtgagctaagtcgtttctacggttattttgttaataaatggtttggttagataattattattgtagctgtgtttgatgtatgatgaaataattgggttgtgtgccatgatttttattgacgtcatgattggatagtagaagtgttgttttaggggaagtttaggtattaggtgcaaattttatgaggagtgcttagagagtacatatgtcgagtataattaaatggatgttataaaacacagaggatggtgttgattaggcgaggaattctttgatag

SEQ ID NO: 7812 - DNA, 1512 bp, Zea Mays
tatagattattattattatcataggggtcggatcctcctctgctcttatccactcgcctactacctcctctttctccgcccacctccacccccttccctgctctctcccactactgccccctttcgccgtctcccttctcccatcccttccgccgtttctgcctgctgcgaacccggcggcaaccgacctcgatcgtcgccgttcgtccgccgaccaccgccaagagttgatatggccctcaagaccccgcacctcccatccaatttcgcgaggcggccaagcagccaccacagcttcagccagtggcactcgcctccgcaccacccaaagcttcctccaaggcccgacccgcagacaagagttgccattgccacgaagccgccgccgccgccgcatgtcgtccgcaagaggagcacgacgtcgacgttgatgaggtgcagggacggcctaggcctacacggcttcacggacgacgaggctgttcatcagaccccggaaccggaagaccaccagaccaccgagctccccgtcgtgacgcacccgtcggtcgtcttccccggcgccacgctgcagctgcacgcgttcgagttccggagccgcatcatggcgcacaccctgctgcagcagggcctcagcttcggggtcgtctgccgcgggggggtagcggacgtggggtgcgtcgtgcacgtcgtggagtgcgagaggctcaccgacggccgcttcttcctcacctgcgtgggcagggaccggttccgggtcgtcgagaccgtcaggacgaagccctacgcggtcgcacgggtccaggtctttcgggaccgtgaccacagccaccaccaccaccaccacgacctgatgcagcaggtggagcggcacctcgggaacgtggccgcgctcgcggacaagctgggccagaagccgccgccgccgctgccgtaccgccagggcgaccggcggctgcacaccgccgcctcgctctcgttcctcgtcgcgcgcctgttcgtcgacgaccgccgggagcagcaggcgctgctgcggatggacgacgccgcgcagcggctggcgcgggagggggagtacctggagcgcaggagcaagtacctggcggccttggcggcgatcaaggacgcgttccagcactcgtcctgcaacgagaagtagatcgcggacctgtacattttcaagggtagaagaactgtacaagttccctggtgaggtctgaccgtctgttaatacctaagggtttgattagtgagttggtctgtttttgtatgttggtttagtccttggtgtttcctggaaaagattgggacgatgatctaaagctctaaaaaaataataagaagggcaataagcaaccagactatatgcttgctgttggtattgcttcagctacgaccagctcctgctgctgcctgtacattcttgcatggcctttctgtgctgccacttctgctgctatttctaataaactgatgtactcattcgtgtgtatatatgctatttctagatgt

SEQ ID NO: 7813 - DNA, 479 bp, Zea Mays
ctcagcttctgctcatcgtcaggttaggtacggtccttcgttcgttccggagctagctaggtggaccaagatgagcttcttctccggcggcggcagcaagaaccaccagaggaccttcagggcgaagaagagcctgtcgtcgcccgggaacaaggaattcaagctggtcgagagcgcagagctggctcctctcagggatctgatcgagcccctgataagtcagtgctaaaccagagagagacttcgattaggaggccaattaagtgcggagaccatctttcttcttctattagttttggcctctcccggcgttcagtttagtgtcggtttggttccggatggaacatcttacgcatttcgtatcagccgttggtaactcggatggtctctgtatcagtcgttgatcactacttgttctgttattttatcccttctcatttttgaaacgcacacacaaaaaaaagtgttggatccaaagt

SEQ ID NO: 7814 - DNA, 2588 bp, Zea Mays
atggccgaactcgcccatgatggctttcccctgtcgatgctgttctctagccgccatggcagtgcctccctgcagcagtccggtgaccgggccctccccttcccacgtcatgttggtgccatgtcttctccctcaccggccaacctcgccagccaccaggaaggtgtctccctctcggcagctcccatggccaccatcagccctagctgcggttgccctggttccagcagctcgacgccagcccctctcaatcttccatcgttgccgctcagcttgtcccagatatattgatgttgacaattggaaatccatgtagcaaataaatgattttggaactgggggcagacattggaggtggattttcctcaattggagatattgacaaattggaaaaaaatgtgacttgacctgtgctgcaacaaccttaagggcttctttggattacaggaattttgaaggaataatgctggaataggaaagtttcctatcctatagtttggctggcatgatgcaccaattatattccataggattttatctctttatgtgttgattccataggatttctaacatccactcagagctcttggaaaaattcctacacgcgaagcacgagaagtggaatgctaatgctagcaactaatggcccattatggcttgtcctacccaaatttaaatagagaaaaacacatataaagcacccatttgatattgtttttatccaagcttgacattcatgcaaaatgaacccttcgttttttccttgccccaaccaaacaaccttccactcaatattactacgttttacaatcctctgatttgcacatacaatcctacgtttttcctattcctatgtttttcaattcctacatttcaaaggagccctaaactaggaggggcttctaattcttcatctctaccaacagtcctctcctgttactttttaaaccaataactttttcaagtttgtgcagatgcacacatccttgagccaaaatagaaaaaaaatcatagaagagttctttgggatgtgcagtggtggtctcttaaaagaattttgtgttccagcgtagctatttccactgcaaactatcaaatcattacaaactgctgggaacatgctccatcttattatcgaagcctgtatctcgagaaagttgatcgatacatctgcttatttatggcctggttatgttgtaccatctgggactttaaaagatacagctttgccccaagaatccccttggttaaactttatgaaagggtctcgacattcaggaccccttattgatgctctggtcgcatctcctgcttcaagttcaagctctgcaagatgaggtctgttcagtttggccaaaaaggcatcccctacctgaacacctacgacggctgcaccatcctctaccccgacccgctcatcaaggccaacgacaccatcaagatcgatctagagaccaacaagatcatggacttcttcaagtttgacgtcagcaacgtggtcatggtgaccggcgggaggaacaccgggcgtgtaggagtgatcaagaactgggagaagcacaagggcagcttcgagcagctggctggccccgacgcagcgcagcacgcaagagctagcggcgccggcgcggccggtgaaactgaaatccagacgcaccgctcacgcagctttgccaggcaaggcccagcagcgcagccagcagaaccaccagaggaccttcagggcgaagaagagcctgtcgtcgcccgggaacaagggtacgcaactgaggaggcacattgacgccactctcggcagcggcaacctgcgagaggctgtccgtctacccgtcggggaggacctcaacgagtggctggctgtcaacactgttgacttcttcaaccacataaacgttctgtacagcacgctggcggagttctgcactccacatacctgcccggtcatggcagccggaccaaagtacgagtacaggtgggccgacggagagccaaggtcaaggtgcccatcaaggtgtccgcgcccaagtacgtggactacctcatggactggatagagatccagctggacgacgaggccattttccctcaacagcttggggctcctttccctaccaacttccgcgacgtcgtcgtcaagacgatcttcaggcgcctcttcagggtgtacgcgcacatataccactcccacttccagatgatcgtcaagctcaaggaggaggcgcatctcaacacttgcttcaagcactttgcgctcttcacgctggaattcaagctggtcgagagcgcagagctggctcctctcagggatctgatcgagcccctgataagtcagtgctaaaccagagagagacttcgattaggaggccaattaagtgcggagaccatctttcttcttctattagttttggcctctcccggcgttcagtttagtgtcggtttggttccggatggaacatcttacgcatttcgtatcagccgttggtaactcggatggtctctgtatcagtcgttgatcactacttgttctgttattttatcccttctcatttttgaaacgcacacacaaaaaaaagtgttggatccaaagt

SEQ ID NO: 7815 - DNA, 1915 bp, Zea Mays
atggccgaactcgcccatgatggctttcccctgtcgatgctgttctctagccgccatggcagtgcctccctgcagcagtccggtgaccgggccctccccttcccacgtcatgttggtgccatgtcttctccctcaccggccaacctcgccagccaccaggaaggtgtctccctctcggcagctcccatggccaccatcagccctagctgcggttgccctggttccagcagctcgacgccagcccctctcaatcttccatcgttgccgctcagcttgtcccagatatattatcatttagctcaaatccgaatggctgacattctgtctccatcgatatttaatagtaaagcaagggatgtgcagtggtggtctcttaaaagaattttgtgttccagcgtagctatttccactgcaaactatcaaatcattacaaactgctgggaacatgctccatcttattatcgaagcctgtatctcgagaaagttgatcgatacatctgcttatttatggcctggttatgttgtaccatctgggactttaaaagatacagctttgccccaagaatccccttggttaaactttatgaaagggtctcgacattcaggaccccttattgatgctctggtcgcatctcctgcttcaagttcaagctctgcaagatgaggtctgttcagtttggccaaaaaggcatcccctacctgaacacctacgacggctgcaccatcctctaccccgacccgctcatcaaggccaacgacaccatcaagatcgatctagagaccaacaagatcatggacttcttcaagtttgacgtcagcaacgtggtcatggtgaccggcgggaggaacaccgggcgtgtaggagtgatcaagaactgggagaagcacaagggcagcttcgagcagctggctggccccgacgcagcgcagcacgcaagagctagcggcgccggcgcggccggtgaaactgaaatccagacgcaccgctcacgcagctttgccaggcaaggcccagcagcgcagccagcagaaccaccagaggaccttcagggcgaagaagagcctgtcgtcgcccgggaacaagggtacgcaactgaggaggcacattgacgccactctcggcagcggcaacctgcgagaggctgtccgtctacccgtcggggaggacctcaacgagtggctggctgtcaacactgttgacttcttcaaccacataaacgttctgtacagcacgctggcggagttctgcactccacatacctgcccggtcatggcagccggaccaaagtacgagtacaggtgggccgacggagagccaaggtcaaggtgcccatcaaggtgtccgcgcccaagtacgtggactacctcatggactggatagagatccagctggacgacgaggccattttccctcaacagcttggggctcctttccctaccaacttccgcgacgtcgtcgtcaagacgatcttcaggcgcctcttcagggtgtacgcgcacatataccactcccacttccagatgatcgtcaagctcaaggaggaggcgcatctcaacacttgcttcaagcactttgcgctcttcacgctggaattcaagctggtcgagagcgcagagctggctcctctcagggatctgatcgagcccctgataagtcagtgctaaaccagagagagacttcgattaggaggccaattaagtgcggagaccatctttcttcttctattagttttggcctctcccggcgttcagtttagtgtcggtttggttccggatggaacatcttacgcatttcgtatcagccgttggtaactcggatggtctctgtatcagtcgttgatcactacttgttctgttattttatcccttctcatttttgaaacgcacacacaaaaaaaagtgttggatccaaagt

SEQ ID NO: 7816 - DNA, 1444 bp, Zea Mays
gggatgtgcagtggtggtctcttaaaagaattttgtgttccagcgtagctatttccactgcaaactatcaaatcattacaaactgctgggaacatgctccatcttattatcgaagcctgtatctcgagaaagttgatcgatacatctgcttatttatggcctggttatgttgtaccatctgggactttaaaagatacagctttgccccaagaatccccttggttaaactttatgaaagggtctcgacattcaggaccccttattgatgctctggtcgcatctcctgcttcaaggtgtttcaagctctgcaagatgaggtctgttcagtttggccaaaaaggcatcccctacctgaacacctacgacggctgcaccatcctctaccccgacccgctcatcaaggccaacgacaccatcaagatcgatctagagaccaacaagatcatggacttcttcaagtttgacgtcagcaacgtggtcatggtgaccggcgggaggaacaccgggcgtgtaggagtgatcaagaactgggagaagcacaagggcagcttcgagcagctggctggccccgacgcagcgcagcacgcaagagctagcggcgccggcgcggccggtgaaactgaaatccagacgcaccgctcacgcagctttgccaggcaaggcccagcagcgcagccagcagaaccaccagaggaccttcagggcgaagaagagcctgtcgtcgcccgggaacaaggcaggaacggtacgcaactgaggaggcacattgacgccactctcggcagcggcaacctgcgagaggctgtccgtctacccgtcggggaggacctcaacgagtggctggctgtcaacactgttgacttcttcaaccacataaacgttctgtacagcacgctggcggagttctgcactccacatacctgcccggtacgagtacaggtgggccgacggagagccaaggtcaaggtgcccatcaaggtgtccgcgcccaagtacgtggactacctcatggactggatagagatccagctggacgacgaggccattttccctcaacagcttggggctcctttccctaccaacttccgcgacgtcgtcgtcaagacgatcttcaggcgcctcttcagggtgtacgcgcacatataccactcccacttccagatgatcgtcaagctcaaggaggaggcgcatctcaacacttgcttcaagcactttgcgctcttcacgctgtttttcaagcctgacaagcgccccggatgaaaatacacacggacgggttgtaggaaaaacatccatgtcacgatctcaaagaactgtttgcgtccctaaagagcgatagtgtcggcgttttgagaccgggggtccctaagccgacgagtgaatgtcgccgcgtgccccagcccagatgggtcgacgcgaggccgagcgcgaagggggaagtgag

SEQ ID NO: 7817 - DNA, 1796 bp, Zea Mays
atggccgaactcgcccatgatggctttcccctgtcgatgctgttctctagccgccatggcagtgcctccctgcagcagtccggtgaccgggccctccccttcccacgtcatgttggtgccatgtcttctccctcaccggccaacctcgccagccaccaggaaggtgtctccctctcggcagctcccatggccaccatcagccctagctgcggttgccctggttccagcagctcgacgccagcccctctcaatcttccatcgttgccgctcagcttgtcccagatatattatcatttagctcaaatccgaatggctgacattctgtctccatcgatatttaatagtaaagcaagggatgtgcagtggtggtctcttaaaagaattttgtgttccagcgtagctatttccactgcaaactatcaaatcattacaaactgctgggaacatgctccatcttattatcgaagcctgtatctcgagaaagttgatcgatacatctgcttatttatggcctggttatgttgtaccatctgggactttaaaagatacagctttgccccaagaatccccttggttaaactttatgaaagggtctcgacattcaggaccccttattgatgctctggtcgcatctcctgcttcaaggtgtttcaagctctgcaagatgaggtctgttcagtttggccaaaaaggcatcccctacctgaacacctacgacggctgcaccatcctctaccccgacccgctcatcaaggccaacgacaccatcaagatcgatctagagaccaacaagatcatggacttcttcaagtttgacgtcagcaacgtggtcatggtgaccggcgggaggaacaccgggcgtgtaggagtgatcaagaactgggagaagcacaagggcagcttcgagcagctggctggccccgacgcagcgcagcacgcaagagctagcggcgccggcgcggccggtgaaactgaaatccagacgcaccgctcacgcagctttgccaggcaaggcccagcagcgcagccagcagaaccaccagaggaccttcagggcgaagaagagcctgtcgtcgcccgggaacaaggcaggaacggtacgcaactgaggaggcacattgacgccactctcggcagcggcaacctgcgagaggctgtccgtctacccgtcggggaggacctcaacgagtggctggctgtcaacactgttgacttcttcaaccacataaacgttctgtacagcacgctggcggagttctgcactccacatacctgcccggtacgagtacaggtgggccgacggagagccaaggtcaaggtgcccatcaaggtgtccgcgcccaagtacgtggactacctcatggactggatagagatccagctggacgacgaggccattttccctcaacagcttggggctcctttccctaccaacttccgcgacgtcgtcgtcaagacgatcttcaggcgcctcttcagggtgtacgcgcacatataccactcccacttccagatgatcgtcaagctcaaggaggaggcgcatctcaacacttgcttcaagcactttgcgctcttcacgctgtttttcaagcctgacaagcgccccggatgaaaatacacacggacgggttgtaggaaaaacatccatgtcacgatctcaaagaactgtttgcgtccctaaagagcgatagtgtcggcgttttgagaccgggggtccctaagccgacgagtgaatgtcgccgcgtgccccagcccagatgggtcgacgcgaggccgagcgcgaagggggaagtgag

SEQ ID NO: 7818 - DNA, 1925 bp, Zea Mays
ctgcaggagctgttcctcccctgcgctcgcctaagatggccgaactcgcccatgatggctttcccctgtcgatgctgttctctagccgccatggcagtgcctccctgcagcagtccggtgaccgggccctccccttcccacgtcatgttggtgccatgtcttctccctcaccggccaacctcgccagccaccaggaaggtgtctccctctcggcagctcccatggccaccatcagccctagctgcggttgccctggttccagcagctcgacgccagcccctctcaatcttccatcgttgccgctcagcttgtcccagatatattatcatttagctcaaatccgaatggctgacattctgtctccatcgatatttaatagtaaagcaaggttgtcacgtgattcaagagtattaatgatatacaaaagtttgctttatggcaagtcaggtaaccacaaattttgggcaatgacagggatgtgcagtggtggtctcttaaaagaattttgtgttccagcgtagctatttccactgcaaactatcaaatcattacaaactgctgggaacatgctccatcttattatcgaagcctgtatctcgagaaagttgatcgatacatctgcttatttatggcctggttatgttgtaccatctgggactttaaaagatacagctttgccccaagaatccccttggttaaactttatgaaagggtctcgacattcaggaccccttattgatgctctggtcgcatctcctgcttcaagttcaagctctgcaagatgaggtctgttcagtttggccaaaaaggcatcccctacctgaacacctacgacggctgcaccatcctctaccccgacccgctcatcaaggccaacgacaccatcaagatcgatctagagaccaacaagatcatggacttcttcaagtttgacgtcagcaacgtggtcatggtgaccggcgggaggaacaccgggcgtgtaggagtgatcaagaactgggagaagcacaagggcagcttcgagcagctggctggccccgacgcagcgcagcacgcaagagctagcggcgccggcgcggccggtgaaactgaaatccagacgcaccgctcacgcagctttgccaggcaaggcccagcagcgcagccagcagaaccaccagaggaccttcagggcgaagaagagcctgtcgtcgcccgggaacaagggtacgcaactgaggaggcacattgacgccactctcggcagcggcaacctgcgagaggctgtccgtctacccgtcggggaggacctcaacgagtggctggctgtcaacactgttgacttcttcaaccacataaacgttctgtacagcacgctggcggagttctgcactccacatacctgcccggtcatggcagccggaccaaagtacgagtacaggtgggccgacggagagccaaggtcaaggtgcccatcaaggtgtccgcgcccaagtacgtggactacctcatggactggatagagatccagctggacgacgaggccattttccctcaacagcttggggctcctttccctaccaacttccgcgacgtcgtcgtcaagacgatcttcaggcgcctcttcagggtgtacgcgcacatataccactcccacttccagatgatcgtcaagctcaaggaggaggcgcatctcaacacttgcttcaagcactttgcgctcttcacgctgtttttcaagcctgacaagcgccccggatgaaaatacacacggacgggttgtaggaaaaacatccatgtcacgatctcaaagaactgtttgcgtccctaaagagcgatagtgtcggcgttttgagaccgggggtccctaagccgacgagtgaatgtcgccgcgtgccccagcccagatgggtcgacgcgaggccgagcgcgaagggggaagtgag

SEQ ID NO: 7819 - DNA, 2246 bp, Zea Mays
ggccctccccgccatggacgccgctcttccttcctacagatgttgacaattggaaatccatgtagcaaataaatgattttggaactgggggcaggtcagagtctagagcatgttcattccacacattggaggtggattttcctcaattggagatattgacaaattggaaaaaaatgtgacttgacctgtgctgcaacaaccttaagggcttctttggattacaggaattttgaaggaataatgctggaataggaaagtttcctatcctatagtttggctggcatgatgcaccaattatattccataggattttatctctttatgtgttgattccataggatttctaacatccactcagagctcttggaaaaattcctacacgcgaagcacgagaagtggaatgctaatgctagcaactaatggcccattatggcttgtcctacccaaatttaaatagagaaaaacacatataaagcacccatttgatattgtttttatccaagcttgacattcatgcaaaatgaacccttcgttttttccttgccccaaccaaacaaccttccactcaatattactacgttttacaatcctctgatttgcacatacaatcctacgtttttcctattcctatgtttttcaattcctacatttcaaaggagccctaaactaggaggggcttctaattcttcatctctaccaacagtcctctcctgttactttttaaaccaataactttttcaagtttgtgcagatgcacacatccttgagccaaaatagaaaaaaaatcatagaagagttctttgggatgtgcagtggtggtctcttaaaagaattttgtgttccagcgtagctatttccactgcaaactatcaaatcattacaaactgctgggaacatgctccatcttattatcgaagcctgtatctcgagaaagttgatcgatacatctgcttatttatggcctggttatgttgtaccatctgggactttaaaagatacagctttgccccaagaatccccttggttaaactttatgaaagggtctcgacattcaggaccccttattgatgctctggtcgcatctcctgcttcaaggtgtttcaagctctgcaagatgaggtctgttcagtttggccaaaaaggcatcccctacctgaacacctacgacggctgcaccatcctctaccccgacccgctcatcaaggccaacgacaccatcaagatcgatctagagaccaacaagatcatggacttcttcaagtttgacgtcagcaacgtggtcatggtgaccggcgggaggaacaccgggcgtgtaggagtgatcaagaactgggagaagcacaagggcagcttcgagcagctggctggccccgacgcagcgcagcacgcaagagctagcggcgccggcgcggccggtgaaactgaaatccagacgcaccgctcacgcagctttgccaggcaaggcccagcagcgcagccagcagaaccaccagaggaccttcagggcgaagaagagcctgtcgtcgcccgggaacaaggcaggaacggtacgcaactgaggaggcacattgacgccactctcggcagcggcaacctgcgagaggctgtccgtctacccgtcggggaggacctcaacgagtggctggctgtcaacactgttgacttcttcaaccacataaacgttctgtacagcacgctggcggagttctgcactccacatacctgcccggtacgagtacaggtgggccgacggagagccaaggtcaaggtgcccatcaaggtgtccgcgcccaagtacgtggactacctcatggactggatagagatccagctggacgacgaggccattttccctcaacagcttggggctcctttccctaccaacttccgcgacgtcgtcgtcaagacgatcttcaggcgcctcttcagggtgtacgcgcacatataccactcccacttccagatgatcgtcaagctcaaggaggaggcgcatctcaacacttgcttcaagcactttgcgctcttcacgctgtttttcaagcctgacaagcgccccggatgaaaatacacacggacgggttgtaggaaaaacatccatgtcacgatctcaaagaactgtttgcgtccctaaagagcgatagtgtcggcgttttgagaccgggggtccctaagccgacgagtgaatgtcgccgcgtgccccagcccagatgggtcgacgcgaggccgagcgcgaagggggaagtgag

SEQ ID NO: 7820 - DNA, 2299 bp, Zea Mays
ccttatcctatctccatagccccatttcctatcctcctagccgatcccctctccctcacggcgccctctcccatggccgtcggccctccccgccatggacgccgctcttccttcctacagatgttgacaattggaaatccatgtagcaaataaatgattttggaactgggggcagacattggaggtggattttcctcaattggagatattgacaaattggaaaaaaatgtgacttgacctgtgctgcaacaaccttaagggcttctttggattacaggaattttgaaggaataatgctggaataggaaagtttcctatcctatagtttggctggcatgatgcaccaattatattccataggattttatctctttatgtgttgattccataggatttctaacatccactcagagctcttggaaaaattcctacacgcgaagcacgagaagtggaatgctaatgctagcaactaatggcccattatggcttgtcctacccaaatttaaatagagaaaaacacatataaagcacccatttgatattgtttttatccaagcttgacattcatgcaaaatgaacccttcgttttttccttgccccaaccaaacaaccttccactcaatattactacgttttacaatcctctgatttgcacatacaatcctacgtttttcctattcctatgtttttcaattcctacatttcaaaggagccctaaactaggaggggcttctaattcttcatctctaccaacagtcctctcctgttactttttaaaccaataactttttcaagtttgtgcagatgcacacatccttgagccaaaatagaaaaaaaatcatagaagagttctttgggatgtgcagtggtggtctcttaaaagaattttgtgttccagcgtagctatttccactgcaaactatcaaatcattacaaactgctgggaacatgctccatcttattatcgaagcctgtatctcgagaaagttgatcgatacatctgcttatttatggcctggttatgttgtaccatctgggactttaaaagatacagctttgccccaagaatccccttggttaaactttatgaaagggtctcgacattcaggaccccttattgatgctctggtcgcatctcctgcttcaaggtgtttcaagctctgcaagatgaggtctgttcagtttggccaaaaaggcatcccctacctgaacacctacgacggctgcaccatcctctaccccgacccgctcatcaaggccaacgacaccatcaagatcgatctagagaccaacaagatcatggacttcttcaagtttgacgtcagcaacgtggtcatggtgaccggcgggaggaacaccgggcgtgtaggagtgatcaagaactgggagaagcacaagggcagcttcgagcagctggctggccccgacgcagcgcagcacgcaagagctagcggcgccggcgcggccggtgaaactgaaatccagacgcaccgctcacgcagctttgccaggcaaggcccagcagcgcagccagcagaaccaccagaggaccttcagggcgaagaagagcctgtcgtcgcccgggaacaaggcaggaacggtacgcaactgaggaggcacattgacgccactctcggcagcggcaacctgcgagaggctgtccgtctacccgtcggggaggacctcaacgagtggctggctgtcaacactgttgacttcttcaaccacataaacgttctgtacagcacgctggcggagttctgcactccacatacctgcccggtacgagtacaggtgggccgacggagagccaaggtcaaggtgcccatcaaggtgtccgcgcccaagtacgtggactacctcatggactggatagagatccagctggacgacgaggccattttccctcaacagcttggggctcctttccctaccaacttccgcgacgtcgtcgtcaagacgatcttcaggcgcctcttcagggtgtacgcgcacatataccactcccacttccagatgatcgtcaagctcaaggaggaggcgcatctcaacacttgcttcaagcactttgcgctcttcacgctgtttttcaagcctgacaagcgccccggatgaaaatacacacggacgggttgtaggaaaaacatccatgtcacgatctcaaagaactgtttgcgtccctaaagagcgatagtgtcggcgttttgagaccgggggtccctaagccgacgagtgaatgtcgccgcgtgccccagcccagatgggtcgacgcgaggccgagcgcgaagggggaagtgag

SEQ ID NO: 7821 - DNA, 1378 bp, Zea Mays
aaaagaattttgtgttccagcgtagctatttccactgcaaactatcaaatcattacaaactgctgggaacatgctccatcttattatcgaagcctgtatctcgagaaagttgatcgatacatctgcttatttatggcctggttatgttgtaccatctgggactttaaaagatacagctttgccccaagaatccccttggttaaactttatgaaagggtctcgacattcaggaccccttattgatgctctggtcgcatctcctgcttcaagttcaagctctgcaagatgaggtctgttcagtttggccaaaaaggcatcccctacctgaacacctacgacggctgcaccatcctctaccccgacccgctcatcaaggccaacgacaccatcaagatcgatctagagaccaacaagatcatggacttcttcaagtttgacgtcagcaacgtggtcatggtgaccggcgggaggaacaccgggcgtgtaggagtgatcaagaactgggagaagcacaagggcagcttcgagcagctggctggccccgacgcagcgcagcacgcaagagctagcggcgccggcgcggccggtgaaactgaaatccagacgcaccgctcacgcagctttgccaggcaaggcccagcagcgcagccagcagaaccaccagaggaccttcagggcgaagaagagcctgtcgtcgcccgggaacaaggtaagctagctagctgtgcctaatgcatggcgtgtcgacatgtgaggtgttaacattctctggcgtggttcggttgcccccgtatatatatatatatagagagagagagacgacttgattagctttgctttgctgaacgacgatgatccattaattcttgatgatgttgtctgtcatgagttcgttcgatgcatgcatgcattaagggcagcgtttaaaatagcgggataatgggtttatccccgcacacttgtaaaaaatgcaaatatcatggatataccggactaaacagtgtaacttttcgcttctatataaaaatgcttatatcaggatatatatatgtatcggctgctataaccgaatattttaaaaccttgattaagagcctagccttccttcctgatcgttcgatttcggagttgtcagagagattcaaacgcttaaatctttgtttgggtactctaatattgatcttaatccgtatatgtgttaaggtggattgagatgtaacttactttttaagttacattctaattcacctcaacacatgtgaactgaggtcaatattatagtacacaaactaggccaatccgaatgacgtctatgtatataggtagtcttcaaattaaaacacggcctatagattgtaatgagtgtgttggtttgtta

SEQ ID NO: 7822 - DNA, 1728 bp, Zea Mays
atggccgaactcgcccatgatggctttcccctgtcgatgctgttctctagccgccatggcagtgcctccctgcagcagtccggtgaccgggccctccccttcccacgtcatgttggtgccatgtcttctccctcaccggccaacctcgccagccaccaggaaggtgtctccctctcggcagctcccatggccaccatcagccctagctgcggttgccctggttccagcagctcgacgccagcccctctcaatcttccatcgttgccgctcagcttgtcccagatatattatcatttagctcaaatccgaatggctgacattctgtctccatcgatatttaatagtaaagcaaggttgtcacgtgattcaagagtattaatgatatacaaaagtttgctttatggcaagtcagctgggaacatgctccatcttattatcgaagcctgtatctcgagaaagttgatcgatacatctgcttatttatggcctggttatgttgtaccatctgggactttaaaagatacagctttgccccaagaatccccttggttaaactttatgaaagggtctcgacattcaggaccccttattgatgctctggtcgcatctcctgcttcaagttcaagctctgcaagatgaggtctgttcagtttggccaaaaaggcatcccctacctgaacacctacgacggctgcaccatcctctaccccgacccgctcatcaaggccaacgacaccatcaagatcgatctagagaccaacaagatcatggacttcttcaagtttgacgtcagcaacgtggtcatggtgaccggcgggaggaacaccgggcgtgtaggagtgatcaagaactgggagaagcacaagggcagcttcgagcagctggctggccccgacgcagcgcagcacgcaagagctagcggcgccggcgcggccggtgaaactgaaatccagacgcaccgctcacgcagctttgccaggcaaggcccagcagcgcagccagcagaaccaccagaggaccttcagggcgaagaagagcctgtcgtcgcccgggaacaaggtaagctagctagctgtgcctaatgcatggcgtgtcgacatgtgaggtgttaacattctctggcgtggttcggttgcccccgtatatatatatatatagagagagagagacgacttgattagctttgctttgctgaacgacgatgatccattaattcttgatgatgttgtctgtcatgagttcgttcgatgcatgcatgcattaagggcagcgtttaaaatagcgggataatgggtttatccccgcacacttgtaaaaaatgcaaatatcatggatataccggactaaacagtgtaacttttcgcttctatataaaaatgcttatatcaggatatatatatgtatcggctgctataaccgaatattttaaaaccttgattaagagcctagccttccttcctgatcgttcgatttcggagttgtcagagagattcaaacgcttaaatctttgtttgggtactctaatattgatcttaatccgtatatgtgttaaggtggattgagatgtaacttactttttaagttacattctaattcacctcaacacatgtgaactgaggtcaatattatagtacacaaactaggccaatccgaatgacgtctatgtatataggtagtcttcaaattaaaacacggcctatagattgtaatgagtgtgttggtttgtta

SEQ ID NO: 7823 - DNA, 2259 bp, Zea Mays
cccgcacccgtcgcgctccatcaccgccagcctggccttggcctgccgctctctctctctctctctctctctctctctctttctccctgcttctctctctccagctcgctgtcgatggtgatgactgatgaccatatccgtgcacggcgccagatacgcatacacgcacatatatatacccggccgccagggtttgggggctcagaagaaccgaccgcgcgtcaattaacccagcagaaggtccgtcgtctcgtcgccgacgactcggcttctgctcatcaccaccagccactagctgtcgtcgccgacatcgacgcacgcggaggagatcgatcggcccggccgccggccgcaggagaagatgagcttctttggccgcggcagcagaaaccagagaaccttcaggccgaagaagagcgcgccgtccgggaacaaggggatgcagctgaaaaggcacatcgacgccaccctcggcagcggtaacctgcgagaggcggtgcgtctgcccatcggggaggacctcaacgagtggctcgctgtcaacaccgtcgacttcttcaaccaagtgaacattctctacggcaccctgatggagttctgcacgccagcgacatgcccgaccatgtcagccggaccaagctacgagtacagatgggctgacggagccaagatcaagaggccaatcgaggtgtctgcgcccaagtacgtggagtacctgatggactgggtggaggcccagctcgacgaagagaccatattcccccaaaagctcggggctccgttccctcccaacttccgcgacgtcgtcaagacgatcttcaagcgcctcttcagggtgtacgcgcacatataccactcgcacttccaggtgatcgtcaggctcaaggaagaggcgcatctcaacacctgcttcaagcacttcacgctcttcacactggtattctcgatccagcgtgcacgcatccagctcagttttcatagacacagctagcctgggggggttctatattacaaacaggtgatctttcacctgccgatgtcgctctcatcctagctaaaagatcttcagcgctccagcttgccagcaaaccaagccctgcatggctgccgccggcaccactggaacagtatgttggagtaggaaccctcccactcccatctcccatacgaaagaagaggcgggttgcctttggtgcaatgattcagacgcctttgccctgttgtttcagctggttgctttagcagttgggaatgggatacatcattcagcacgcaaagacttgcttggggccatacaatcgtttgtttttaaagtgtgtgtgtatcgatctgtcccatgccttccttataacgaccatgttctgtcaaacactagctaggatgaactgagtgtttaatagttgtaacaccacgtccactcctggatcgacagtattagaccatccccgagtcttttatttatactttatcctacttatacgataagactttctggacagtcacccatctcaatactctattaaacatttgaccaggatatcacacagtagcgcacaatcagcctcaccctgattagcagatattgccatgctgcaattatggagtagttgaaaacgtagttactgccaattaatctagttttttttcctgtggtgcaggaattccggctgatcgacagggcagagctggctcccctcaacgagttgatcgagcccataatacttggttattgactggagaggctttgtttaggccgactgtgccgagagaattttcccccctctccttttaattttgatcatttcgggtggaatatctccatctgcattttggaagcgtaggctagtggtttcgctactctgtcccggatgtatgtgttcccttccctagcagtagcagccagcggttggtctcaactttttcagtcaaatggagtgctgtttgatccgactcagctgggtgctttgtttctgttctgttctgttcttttttttttgtctaagatgggcgcctccgttctgtttattattttttagtttaaccttttcagctggagtttgaacttttctctacttctaaaaagcacgagtttggtgaccatctttctcctcttcctcactgttgaggacgtatatagtttttttattagttgttgccagagaaattgtgaaatattaaggtcgatgataatatttgtattgctcgctataatataatcgttatgcattaatattttatcgaatatttatgtgactttgc

SEQ ID NO: 7824 - DNA, 2290 bp, Zea Mays
ccggtcaatgcacgggcagagaaatatcagcagacagccgcgtagtacaccgaatccagccagcgggcgccgcacacagacgagagacgagacggctgcgagagcagaggcaagacgtgtctcaaatctcgccgtctctcgccgctgcctcctctcttctcctctagagaaaccggccgaacattctcggcaataattaaaaaaaaaaacagtccagcctgcctgtgcctgtttcgtgtgtctgaggatctcctgatctcctcctcccccctcccctgctccctccccatcgtcatccacctcctccacccatcccctcctcgctcgctctctcgcggcttccctctcctcctctgacctgcgcatctgaagcatagatagcaagcaaggaccctgctcagtgctcacctcgccggaggtgctgctgctacggcggcggcggcgtactactactactacgacgaggggatgctgcgtccgatccgcccgcgcctgaattcctccacccctgccctgccctgcagtcactgacaggttcgctgcgatttcgcctcgacccggctccacggtccgtgctccgtcgcccccggcgggcggacccgattcccgggtctccgccgccctcttcgcctcgctcccgaggtcgtctccacgtgctctcgggaactctgcgcgcagctccggatctcaaccgcagcaaggggggaaggaaatcgcggcagttaattccgagatctgtgccgatttttagggcccaagctggaaagattcgactctgcgcgcgcacaagcccacaggagtgcagaattgaccgcgcgcacgacgacgacgaccaccaacagcaacaggagagaggaggagatcgataagggatggagggcggcgagacgacgctgtccgggttcggcggtgccggggcccccggcgtggacaccaaggtgctgcacgcgttccagaccagcttcgtgcaggtgcagacgctgctggaccagaaccgcctcctgatcaacgagatcaaccacaaccacgagtccaaggtgcccggcgacctctcccgcaacgtgggcctcatcagggagctcaacaacaacatccgccgcgtcgtcgacctctacgccgacctctcctcgctcttcgccgcggccgacggcggcggcggccgcgccgcgtccgagggcgggtccgtgggcaccgtccgccaccaggcgggcgccggccacaagaggatcaggtccggcctcgactgatttgttgccaggcatttcttcttcgcagagaaaaggagtagcagtactaagtacagtagctagccacgtaccaccagccgcagcgaaaccacctcccttttgtcttctgacttgagctcttcttgtatctatcgacatacgctatatatctatctatctatttatatgtctccattacgactgttaccatattcttgttgctaagagctactactacttagtatgcgattagtctgtattttcgatgcaatgcaattcatggacgatgcacgcaacatacagggtgaacttgtctgaattcccagagaaacatatactacactgaagtttgctgtgctaactgatttgtcgatggcagaccactttcttttttactctgcatcattcaccagggaacacaacaaagcttaggtcctttcgataacctaattcaggaagcgatgccatggctgaccatgatggccccccagaaaaatccaagggaactcatgagatgtcagacgcaaacaggtgaacccccccccccccccccccccccccccactgatttcatctgtgctttacactgtcagagaagagaaatccgaaatccaagagcaaagtcatgatcttttggcgagctcatgctgtcctcctgctttccttttctttcgtcatgctcgcttcacttgcggagaagggtgcattcccccctgcctgcgacgccaccgtcgcttctttccagcggtcccgacgactctctcgcagcggcggcggcggcggcactttctgcgagaatctgttaaacgctggccgttccatccggcattggatgatgatgatgactgcaccagctgttgaaatgaacgggggaaaaaatgcagctgcgagaatctgttaaagcgcttttgccacgagagcacgtttgtcggcgtggggttttccgcaagattctcttgcgaaaagactcttttatgcacaggcatcaagtactagtacaactttggaattgccagaattcctaggtgcgtgttcggttgtgggactaggcgggtttggttgac

SEQ ID NO: 7825 - DNA, 2062 bp, Zea Mays
ccggtcaatgcacgggcagagaaatatcagcagacagccgcgtagtacaccgaatccagccagcgggcgccgcacacagacgagagacgagacggctgcgagagcagaggcaagacgtgtctcaaatctcgccgtctctcgccgctgcctcctctcttctcctctagagaaaccggccgaacattctcggcaataattaaaaaaaaaaacagtccagcctgcctgtgcctgtttcgtgtgtctgaggatctcctgatctcctcctcccccctcccctgctccctccccatcgtcatccacctcctccacccatcccctcctcgctcgctctctcgcggcttccctctcctcctctgacctgcgcatctgaagcatagatagcaagcaaggaccctgctcagtgctcacctcgccggaggtgctgctgctacggcggcggcggcgtactactactactacgacgagtcactgacaggttcgctgcgatttcgcctcgacccggctccacggtccgtgctccgtcgcccccggcgggcggacccgattcccgggtctccgccgccctcttcgcctcgctcccgaggtcgtctccacgtgctctcgggaactctgcgcgcagctccggatctcaaccgcagcaaggggggaaggaaatcgcggcagttaattccgagatctgtgccgatttttagggcccaagctggaaagattcgactctgcgcgcgcacaagcccacaggagtgcagaattgaccgcgcgcacgacgacgacgaccaccaacagcaacaggagagaggaggagatcgataagggatggagggcggcgagacgacgctgtccgggttcggcggtgccggggcccccggcgtggacaccaaggtgctgcacgcgttccagaccagcttcgtgcaggtgcagacgctgctggaccagaaccgcctcctgatcaacgagatcaaccacaaccacgagtccaaggtgcccggcgacctctcccgcaacgtgggcctcatcagggagctcaacaacaacatccgccgcgtcgtcgacctctacgccgacctctcctcgctcttcgccgcggccgacggcggcggcggccgcgccgcgtccgagggcgggtccgtgggcaccgtccgccaccaggcgggcgccggccacaagaggatcaggtccggcctcgactgatttgttgccaggcatttcttcttcgcagagaaaaggagtagcagtactaagtacagtagctagccacgtaccaccagccgcagcgaaaccacctcccttttgtcttctgacttgagctcttcttgtatctatcgacatacgctatatatctatctatctatttatatgtctccattacgactgttaccatattcttgttgctaagagctactactacttagtatgcgattagtctgtattttcgatgcaatgcaattcatggacgatgcacgcaacatacagggtgaacttgtctgaattcccagagaaacatatactacactgaagtttgctgtgctaactgatttgtcgatggcagaccactttcttttttactctgcatcattcaccagggaacacaacaaagcttaggtcctttcgataacctaattcaggaagcgatgccatggctgaccatgatggccccccagaaaaatccaagggaactcatgagatgtcagacgcaaacagggtgcattcccccctgcctgcgacgccaccgtcgcttctttccagcggtcccgacgactctctcgcagcggcggcggcggcggcactttctgcgagaatctgttaaacgctggccgttccatccggcattggatgatgatgatgactgcaccagctgttgaaatgaacgggggaaaaaatgcagctgcgagaatctgttaaagcgcttttgccacgagagcacgtttgtcggcgtggggttttccgcaagattctcttgcgaaaagactcttttatgcacaggcatcaagtactagtacaactttggaattgccagaattcctaggtgcgtgttcggttgtgggactaggcgggtttggttgac

SEQ ID NO: 7826 - DNA, 1814 bp, Zea Mays
ccggtcaatgcacgggcagagaaatatcagcagacagccgcgtagtacaccgaatccagccagcgggcgccgcacacagacgagagacgagacggctgcgagagcagaggcaagacgtgtctcaaatctcgccgtctctcgccgctgcctcctctcttctcctctagagaaaccggccgaacattctcggcaataattaaaaaaaaaaacagtccagcctgcctgtgcctgtttcgtgtgtctgaggatctcctgatctcctcctcccccctcccctgctccctccccatcgtcatccacctcctccacccatcccctcctcgctcgctctctcgcggcttccctctcctcctctgacctgcgcatctgaagcatagatagcaagcaaggaccctgctcagtgctcacctcgccggaggtgctgctgctacggcggcggcggcgtactactactactacgacgagactctgcgcgcgcacaagcccacaggagtgcagaattgaccgcgcgcacgacgacgacgaccaccaacagcaacaggagagaggaggagatcgataagggatggagggcggcgagacgacgctgtccgggttcggcggtgccggggcccccggcgtggacaccaaggtgctgcacgcgttccagaccagcttcgtgcaggtgcagacgctgctggaccagaaccgcctcctgatcaacgagatcaaccacaaccacgagtccaaggtgcccggcgacctctcccgcaacgtgggcctcatcagggagctcaacaacaacatccgccgcgtcgtcgacctctacgccgacctctcctcgctcttcgccgcggccgacggcggcggcggccgcgccgcgtccgagggcgggtccgtgggcaccgtccgccaccaggcgggcgccggccacaagaggatcaggtccggcctcgactgatttgttgccaggcatttcttcttcgcagagaaaaggagtagcagtactaagtacagtagctagccacgtaccaccagccgcagcgaaaccacctcccttttgtcttctgacttgagctcttcttgtatctatcgacatacgctatatatctatctatctatttatatgtctccattacgactgttaccatattcttgttgctaagagctactactacttagtatgcgattagtctgtattttcgatgcaatgcaattcatggacgatgcacgcaacatacagggtgaacttgtctgaattcccagagaaacatatactacactgaagtttgctgtgctaactgatttgtcgatggcagaccactttcttttttactctgcatcattcaccagggaacacaacaaagcttaggtcctttcgataacctaattcaggaagcgatgccatggctgaccatgatggccccccagaaaaatccaagggaactcatgagatgtcagacgcaaacagggtgcattcccccctgcctgcgacgccaccgtcgcttctttccagcggtcccgacgactctctcgcagcggcggcggcggcggcactttctgcgagaatctgttaaacgctggccgttccatccggcattggatgatgatgatgactgcaccagctgttgaaatgaacgggggaaaaaatgcagctgcgagaatctgttaaagcgcttttgccacgagagcacgtttgtcggcgtggggttttccgcaagattctcttgcgaaaagactcttttatgcacaggcatcaagtactagtacaactttggaattgccagaattcctaggtgcgtgttcggttgtgggactaggcgggtttggttgac

SEQ ID NO: 7827 - DNA, 1932 bp, Zea Mays
ccgccgccgcctcaaaaccctagctcgatggagacattgagggaggccacagcctgcaggtaggttcgttcgactagtcatgggccgcgaaccatctactgcaatttgcagcccatgagagacgatcgggctctccaagtgggcatggtgcagggtagctgggctccctgggctccaacaaggaacgaggcccatctataatgacggttagacaaagaagtggcgcagcggcactaggccatccgttgaagcgttatcccgcagcgggcaaccacggtcacgtacgcgaaatctctctctctcgtggtcgtgcgcttccttcccgagactccaatgcccctgcctcccctgctcccgcgcctttaccccacgccgcctccacttcgcgccggggacaggggtaacgccgtccctctctctcctggaagaagaaggccggcgcttctcgctgtcgtccgcgcaaagagaaaggacgaggcaagcttcaccgaccgcatccttgactacatcgagggagggccaaagttaaggagatggtatggagcacccgatttgcttcccaaggatggggctgcggaggatgaggaggacgagtctcaagatattgaggagtctcgggacgctgtgctagtcaccaatggcgacagtgagattggacagatggtgatattagcactaattctgaaaagggctagaacaaaagcacttgttaaggataaacgaaccactgaagaagcttttggaacttatgtggagtgcatggttggtgatatcggagataagtccttcacaaagagagcactaaggggcgttcgtgctataatttgtccagctgatgatggttttttctctgaaccgatcgacctcaagggtgttcaacacattgttctgctatcacagaaatagtggtggtttgcaagctattatgaacagcaagctgaagacgctagcagagaaggatgaagaagtggttcttgcatctggcatcccatgtacaataatcagaacaggttctctgcaaagcactcctggtcgcgagagaggttttgattttactgagggcatagcaagcaagggaagaataagcaaagaggatgctgctaccatatgtgtggaagctctgaatagcattcccctaaagacacacatttttgaggttgcaaatggtaaggagaaggtgatagactggaaagcatggtttgaagagcagaccaaaagagaagaagaaatacagtaaaaaacaaattggaagtgtttttcgcttgttggtccatgagaaaggaaaatagaaaagagcaaaaaaaggagaggatttataaaaacttgatggctagtttggaaactcaaatgctcttcggaattgaaggggatgggagaggaaattagttcatttctacctcaatcctctccaattccgaacgagatttgaggttcccaaatagcctaaaggaaatgagctgaaggttacgtttgatcctctagccttgctggcaattgaatcatactagtatatccgatgaagaaacaaaagtgcgtggagaagtggaggcacgtctatgaactctacactctgcagttgggctgaagcccctgatccctcattgtttatcaactcattcattatcttatataaaatgcagttcaaattatttgattaaagactttaaccatccacgagtatttctgtacacatgtatctagcgtttctgccagtattgtttgttgttcaatttgaagattaggccatcaagttattacttcagggcaacagaagcctcaagtcaatgtcacatggtactggatttctgcagcaaacatgttaacatgctgccgtctttaagggtttgttcgctttcctctcaatccatatggattggttgggattgaattggtttaaatcccaaacaaatcaaaatcgttcatatttttttc

SEQ ID NO: 7828 - DNA, 1953 bp, Zea Mays
ccgccgccgcctcaaaaccctagctcgatggagacattgagggaggccacagcctgcaggtaggttcgttcgactagtcatgggccgcgaaccatctactgcaatttgcagcccatgagagacgatcgggctctccaagtgggcatggtgcagggtagctgggctccctgggctccaacaaggaacgaggcccatctataatgacggttagacaaagaagtggcgcagcggcactaggccatccgttgaagcgttatcccgcagcgggcaaccacggtcacgtacgcgaaatctctctctctcgtggtcgtgcgcttccttcccgagactccaatgcccctgcctcccctgctcccgcgcctttaccccacgccgcctccacttcgcgccggggacaggggtaacgccgtccctctctctcctggaagaagaaggccggcgcttctcgctgtcgtccgcgcaaagagaaaggacgaggcaagcttcaccgaccgcatccttgactacatcgagggagggccaaagttaaggagatggtatggagcacccgatttgcttcccaaggatggggctgcggaggatgaggaggacgagtctcaagatctggggtgacaaatagatattgaggagtctcgggacgctgtgctagtcaccaatggcgacagtgagattggacagtgcatggttggtgatatcggagataagtccttcacaaagagagcactaaggggcgttcgtgctataatttgtccagctgatgatggttttttctctgaaccgatcgacctcaagggtgttcaacacattgttctgctatcacaggtttgcaatgctcttgtaattccttattatccagctagctctagcatcagtcatttacccctatgagatcttgatgaggttgcagctggctgtctacagaaatagtggtggtttgcaagctattatgaacagcaagctgaagacgctagcagagaaggatgaagaagtggttcttgcatctggcatcccatgtacaataatcagaacaggttctctgcaaagcactcctggtcgcgagagaggttttgattttactgagggcatagcaagcaagggaagaataagcaaagaggatgctgctaccatatgtgtggaagctctgaatagcattcccctaaagacacacatttttgaggttgcaaatggtaaggagaaggtgatagactggaaagcatggtttgaagagcagaccaaaagagaagaagaaatacagtaaaaaacaaattggaagtgtttttcgcttgttggtccatgagaaaggaaaatagaaaagagcaaaaaaaggagaggatttataaaaacttgatggctagtttggaaactcaaatgctcttcggaattgaaggggatgggagaggaaattagttcatttctacctcaatcctctccaattccgaacgagatttgaggttcccaaatagcctaaaggaaatgagctgaaggttacgtttgatcctctagccttgctggcaattgaatcatactagtatatccgatgaagaaacaaaagtgcgtggagaagtggaggcacgtctatgaactctacactctgcagttgggctgaagcccctgatccctcattgtttatcaactcattcattatcttatataaaatgcagttcaaattatttgattaaagactttaaccatccacgagtatttctgtacacatgtatctagcgtttctgccagtattgtttgttgttcaatttgaagattaggccatcaagttattacttcagggcaacagaagcctcaagtcaatgtcacatggtactggatttctgcagcaaacatgttaacatgctgccgtctttaagggtttgttcgctttcctctcaatccatatggattggttgggattgaattggtttaaatcccaaacaaatcaaaatcgttcatatttttttc

SEQ ID NO: 7829 - DNA, 2034 bp, Zea Mays
ccgccgccgcctcaaaaccctagctcgatggagacattgagggaggccacagcctgcaggtaggttcgttcgactagtcatgggccgcgaaccatctactgcaatttgcagcccatgagagacgatcgggctctccaagtgggcatggtgcagggtagctgggctccctgggctccaacaaggaacgaggcccatctataatgacggttagacaaagaagtggcgcagcggcactaggccatccgttgaagcgttatcccgcagcgggcaaccacggtcacgtacgcgaaatctctctctctcgtggtcgtgcgcttccttcccgagactccaatgcccctgcctcccctgctcccgcgcctttaccccacgccgcctccacttcgcgccggggacaggggtaacgccgtccctctctctcctggaagaagaaggccggcgcttctcgctgtcgtccgcgcaaagagaaaggacgaggcaagcttcaccgaccgcatccttgactacatcgagggagggccaaagttaaggagatggtatggagcacccgatttgcttcccaaggatggggctgcggaggatgaggaggacgagtctcaaggtacatagagaaagcactctgtaaatttgaactccttggcggctgtgtcttcttatttgttggcagatctggggtgacaaatagatattgaggagtctcgggacgctgtgctagtcaccaatggcgacagtgagattggacagatggtgatattagcactaattctgaaaagggctagaacaaaagcacttgttaaggataaacgaaccactgaagaagcttttggaacttatgtggaggatggttttttctctgaaccgatcgacctcaagggtgttcaacacattgttctgctatcacaggtttgcaatgctcttgtaattccttattatccagctagctctagcatcagtcatttacccctatgagatcttgatgaggttgcagctggctgtctacagaaatagtggtggtttgcaagctattatgaacagcaagctgaagacgctagcagagaaggatgaagaagtggttcttgcatctggcatcccatgtacaataatcagaacaggttctctgcaaagcactcctggtcgcgagagaggttttgattttactgagggcatagcaagcaagggaagaataagcaaagaggatgctgctaccatatgtgtggaagctctgaatagcattcccctaaagacacacatttttgaggttgcaaatggtaaggagaaggtgatagactggaaagcatggtttgaagagcagaccaaaagagaagaagaaatacagtaaaaaacaaattggaagtgtttttcgcttgttggtccatgagaaaggaaaatagaaaagagcaaaaaaaggagaggatttataaaaacttgatggctagtttggaaactcaaatgctcttcggaattgaaggggatgggagaggaaattagttcatttctacctcaatcctctccaattccgaacgagatttgaggttcccaaatagcctaaaggaaatgagctgaaggttacgtttgatcctctagccttgctggcaattgaatcatactagtatatccgatgaagaaacaaaagtgcgtggagaagtggaggcacgtctatgaactctacactctgcagttgggctgaagcccctgatccctcattgtttatcaactcattcattatcttatataaaatgcagttcaaattatttgattaaagactttaaccatccacgagtatttctgtacacatgtatctagcgtttctgccagtattgtttgttgttcaatttgaagattaggccatcaagttattacttcagggcaacagaagcctcaagtcaatgtcacatggtactggatttctgcagcaaacatgttaacatgctgccgtctttaagggtttgttcgctttcctctcaatccatatggattggttgggattgaattggtttaaatcccaaacaaatcaaaatcgttcatatttttttc

SEQ ID NO: 7830 - DNA, 1896 bp, Zea Mays
ccgccgccgcctcaaaaccctagctcgatggagacattgagggaggccacagcctgcaggtaggttcgttcgactagtcatgggccgcgaaccatctactgcaatttgcagcccatgagagacgatcgggctctccaagtgggcatggtgcagggtagctgggctccctgggctccaacaaggaacgaggcccatctataatgacggttagacaaagaagtggcgcagcggcactaggccatccgttgaagcgttatcccgcagcgggcaaccacggtcacgtacgcgaaatctctctctctcgtggtcgtgcgcttccttcccgagactccaatgcccctgcctcccctgctcccgcgcctttaccccacgccgcctccacttcgcgccggggacaggggtaacgccgtccctctctctcctggaagaagaaggccggcgcttctcgctgtcgtccgcgcaaagagaaaggacgaggcaagcttcaccgaccgcatccttgactacatcgagggagggccaaagttaaggagatggtatggagcacccgatttgcttcccaaggatggggctgcggaggatgaggaggacgagtctcaagatattgaggagtctcgggacgctgtgctagtcaccaatggcgacagtgagattggacagatggtgatattagcactaattctgaaaagggctagaacaaaagcacttgttaaggataaacgaaccactgaagaagcttttggaacttatgtggagtgcatggttggtgatatcggagataagtccttcacaaagagagcactaaggggcgttcgtgctataatttgtccagctgatgatggttttttctctgaaccgatcgacctcaagggtgttcaacacattgttctgctatcacagctggctgtctacagaaatagtggtggtttgcaagctattatgaacagcaagctgaagacgctagcagagaaggatgaagaagtggttcttgcatctggcatcccatgtacaataatcagaacagggcatagcaagcaagggaagaataagcaaagaggatgctgctaccatatgtgtggaagctctgaatagcattcccctaaagacacacatttttgaggttgcaaatggtaaggagaaggtgatagactggaaagcatggtttgaagagcagaccaaaagagaagaagaaatacagtaaaaaacaaattggaagtgtttttcgcttgttggtccatgagaaaggaaaatagaaaagagcaaaaaaaggagaggatttataaaaacttgatggctagtttggaaactcaaatgctcttcggaattgaaggggatgggagaggaaattagttcatttctacctcaatcctctccaattccgaacgagatttgaggttcccaaatagcctaaaggaaatgagctgaaggttacgtttgatcctctagccttgctggcaattgaatcatactagtatatccgatgaagaaacaaaagtgcgtggagaagtggaggcacgtctatgaactctacactctgcagttgggctgaagcccctgatccctcattgtttatcaactcattcattatcttatataaaatgcagttcaaattatttgattaaagactttaaccatccacgagtatttctgtacacatgtatctagcgtttctgccagtattgtttgttgttcaatttgaagattaggccatcaagttattacttcagggcaacagaagcctcaagtcaatgtcacatggtactggatttctgcagcaaacatgttaacatgctgccgtctttaagggtttgttcgctttcctctcaatccatatggattggttgggattgaattggtttaaatcccaaacaaatcaaaatcgttcatatttttttc

SEQ ID NO: 7831 - DNA, 1891 bp, Zea Mays
ccgccgccgcctcaaaaccctagctcgatggagacattgagggaggccacagcctgcaggtaggttcgttcgactagtcatgggccgcgaaccatctactgcaatttgcagcccatgagagacgatcgggctctccaagtgggcatggtgcagggtagctgggctccctgggctccaacaaggaacgaggcccatctataatgacggttagacaaagaagtggcgcagcggcactaggccatccgttgaagcgttatcccgcagcgggcaaccacggtcacgtacgcgaaatctctctctctcgtggtcgtgcgcttccttcccgagactccaatgcccctgcctcccctgctcccgcgcctttaccccacgccgcctccacttcgcgccggggacaggggtaacgccgtccctctctctcctggaagaagaaggccggcgcttctcgctgtcgtccgcgcaaagagaaaggacgaggcaagcttcaccgaccgcatccttgactacatcgagggagggccaaagttaaggagatggtatggagcacccgatttgcttcccaaggatggggctgcggaggatgaggaggacgagtctcaagatggtgatattagcactaattctgaaaagggctagaacaaaagcacttgttaaggataaacgaaccactgaagaagcttttggaacttatgtggaggatggttttttctctgaaccgatcgacctcaagggtgttcaacacattgttctgctatcacaggtttgcaatgctcttgtaattccttattatccagctagctctagcatcagtcatttacccctatgagatcttgatgaggttgcagctggctgtctacagaaatagtggtggtttgcaagctattatgaacagcaagctgaagacgctagcagagaaggatgaagaagtggttcttgcatctggcatcccatgtacaataatcagaacaggttctctgcaaagcactcctggtcgcgagagaggttttgattttactgagggcatagcaagcaagggaagaataagcaaagaggatgctgctaccatatgtgtggaagctctgaatagcattcccctaaagacacacatttttgaggttgcaaatggtaaggagaaggtgatagactggaaagcatggtttgaagagcagaccaaaagagaagaagaaatacagtaaaaaacaaattggaagtgtttttcgcttgttggtccatgagaaaggaaaatagaaaagagcaaaaaaaggagaggatttataaaaacttgatggctagtttggaaactcaaatgctcttcggaattgaaggggatgggagaggaaattagttcatttctacctcaatcctctccaattccgaacgagatttgaggttcccaaatagcctaaaggaaatgagctgaaggttacgtttgatcctctagccttgctggcaattgaatcatactagtatatccgatgaagaaacaaaagtgcgtggagaagtggaggcacgtctatgaactctacactctgcagttgggctgaagcccctgatccctcattgtttatcaactcattcattatcttatataaaatgcagttcaaattatttgattaaagactttaaccatccacgagtatttctgtacacatgtatctagcgtttctgccagtattgtttgttgttcaatttgaagattaggccatcaagttattacttcagggcaacagaagcctcaagtcaatgtcacatggtactggatttctgcagcaaacatgttaacatgctgccgtctttaagggtttgttcgctttcctctcaatccatatggattggttgggattgaattggtttaaatcccaaacaaatcaaaatcgttcatatttttttc

SEQ ID NO: 7832 - DNA, 1641 bp, Zea Mays
cccctgcgcttcttcctttgctcgcctgcctgtgcttcttcctccccctgcagttgcgcttccacctccctccacgccagctatgcgcctctgcctttgttgcatgtggtagtcgcaactcgccagtgctctttacaactacaagtcaggttgaggagttggagcaggaaaagcaggagctggagtttattgcagatatgtacgtgaaagaaagttctgagtctaggacaattgctgatattgaagaatcagaaacccgagctcgcaatcaggctgaatatttgaggagcaatctagaggagcatagtcttgagcttcgggttaaagcagcaaatgaagctgaagctgcatgccagcaaaggctttcctttgctgaagtggaactagaagagttaaggaccaaagtagatgcatctgaaagagatgttgtggaacttaaggaggcaataagaattaaagaggctgaaggagacgcctatatttctgatatcgagacagttggtcaagcatatgaagacatgcaaacgcaaaatcagcatcttcttcaacagcttactgatagagatgactttaacataaagctagtatcagatagtgtgaagatgaaacaagcttgtagttcccttctctctgacaagcttatgctagagaagcaactccagcaagttaacacttcactggagtcatctaaactgaaaattgcccgtggcgaagagcagatgaagacttgtgtagcgcaagctataaaaacttcagctgaaaacagacatcttactattagcctggaaaggattgcgctggagttatccaacacagataaggaactcaagtggcttcggtcctccgttggatcctctgagaaagaatacgagcaaactcagcaaaagatatctgagctgagagcgttactggagcacgagaggagtgagaggcggcggcttgaagaacaatatgaagaggtgaaaaatgaagttatggagctgacctctgagactgaagagactactgtccggaaacttgaggatgaaataaaagaatgcaagggtattctcaagtgtggtgtatgctttgaccggcctaaagaggttgtgatcaccaaatgtttccacctattctgctcgctatgcatccagagaaacctcgagattcgccaccgaaaatgtcctggctgtggaaccccattcggacaaaacgacgttagggaggtgaagatatgaacctcaccaaagtgacagtgacaaaaccgacttgcgtgtgaacagcagcaacaaactcccttgtgaatatcgtctgttatgttggcgaacatctagatctaacttgctttattactgggattaaaattaggataagaactggaagaagtgaagttcctaatttatttgctatcgtgtgtgctatgtatgattacccttggcagcgagtggtgtatctgctgggtgtcaatatgctcgaattctagctcctccctgctagcgggtgcatgccagttttattaaggctattccatgtacatggtgtcacactctttaatacataccacataggatgaaaatctgatgtgacatgtgattgaaacatagggagacaccactcatgcaccagattatagacattgaaatctgaaccatctaaatgaac

SEQ ID NO: 7833 - DNA, 1542 bp, Zea Mays
cacccgccgacctgcatctccgagctccggcctgcgcttcttcctcccccgttgaggagttggagcaggaaaagcaggagctggagtttattgcagatatgtacgtgaaagaaagttctgagtctaggacaattgctgatattgaagaatcagaaacccgagctcgcaatcaggctgaatatttgaggagcaatctagaggagcatagtcttgagcttcgggttaaagcagcaaatgaagctgaagctgcatgccagcaaaggctttcctttgctgaagtggaactagaagagttaaggaccaaagtagatgcatctgaaagagatgttgtggaacttaaggaggcaataagaattaaagaggctgaaggagacgcctatatttctgatatcgagacagttggtcaagcatatgaagacatgcaaacgcaaaatcagcatcttcttcaacagcttactgatagagatgactttaacataaagctagtatcagatagtgtgaagatgaaacaagcttgtagttcccttctctctgacaagcttatgctagagaagcaactccagcaagttaacacttcactggagtcatctaaactgaaaattgcccgtggcgaagagcagatgaagacttgtgtagcgcaagctataaaaacttcagctgaaaacagacatcttactattagcctggaaaggattgcgctggagttatccaacacagataaggaactcaagtggcttcggtcctccgttggatcctctgagaaagaatacgagcaaactcagcaaaagatatctgagctgagagcgttactggagcacgagaggagtgagaggcggcggcttgaagaacaatatgaagaggtgaaaaatgaagttatggagctgacctctgagactgaagagactactgtccggaaacttgaggatgaaataaaagaatgcaagggtattctcaagtgtggtgtatgctttgaccggcctaaagaggttgtgatcaccaaatgtttccacctattctgctcgctatgcatccagagaaacctcgagattcgccaccgaaaatgtcctggctgtggaaccccattcggacaaaacgacgttagggaggtgaagatatgaacctcaccaaagtgacagtgacaaaaccgacttgcgtgtgaacagcagcaacaaactcccttgtgaatatcgtctgttatgttggcgaacatctagatctaacttgctttattactgggattaaaattaggataagaactggaagaagtgaagttcctaatttatttgctatcgtgtgtgctatgtatgattacccttggcagcgagtggtgtatctgctgggtgtcaatatgctcgaattctagctcctccctgctagcgggtgcatgccagttttattaaggctattccatgtacatggtgtcacactctttaatacataccacataggatgaaaatctgatgtgacatgtgattgaaacatagggagacaccactcatgcaccagattatagacattgaaatctgaaccatctaaatgaac

SEQ ID NO: 7834 - DNA, 3227 bp, Zea Mays
gagcacgtgcagcaggcgccgaacccgcctcctgtgccaccccatcggagctcgccggccacgtggagggattccttttcctcgcagcattcctcgtcgccgacggcttcgtcgtgctccaggggttggattggcgtggagcggagagcagtgcaaacctgggattgaattctggtgtagctcttcaatatgaaaaccaaaaattggtgcaacaactggaggtacagaagtccgaaatgcatgcattggagcgcaagttcaaggagcttagtgatgatcaatgttcttatgacaagactctgatttctttgaataaactgtggaatcagctgattgatgatttggttctgcttggagtacgggctggtggggatttggataatttgcaagcacttgaccatgaagagttatcagaagaatctttggagtcgtgtccttccgaggagatatttctcttaaggctcttgaagacaaacaacatcagagataatagtgacactagcttgttgaaatttgttgaagaagctcttgcttttcggtcttcagcaactgttactttgatgaagtccctgcaagagactatttcttcgcagcaagctagaagtgagtctttgtctttagctttgaatggacaaaagtcaaatgaagatgttattgttgcccttcgaaatcataatgattgcttgaaagaggtggcagagaatgcgagtcaagccatctctattatcaacgagaagcacaaaaggtatcttgatgagattgaggcttttaaaagcaaccattcaagggagctacaggaaatcaagcgtatttcaggtgagctagaggaaagcattgcagagcttgaggaaagtcaaaggaagttggttgtgctccagttgcagaggcatggttctgtaatggatgcatctggggcaaatgctgtgaatggtggtatttctactcataaatcttcagataaaagtatgagctggcaagacctcaaagatgctgttgacgcagctaagaccctcgcaggaaaccgtctattagaactccatcagactcaagaggataatctgatactatccaaggagctgggagatcttgaggggcaattgaaagatgagaagtatgtcttggtatccaaaccgtacatgattcttaatgataaactacaacatttgaatgctgagatagagcgttatagagggttggttgaagttttacagaatgacaaggaccagctcatgcaaagggagaaagaaatttctgcaaaagcagaatcgctcgacagtgttaaacaaaccattatcacatatgagaaaaaaattgaagaactggaaactcaaattcagatactcttttctgaaaagaatgatctcgaaaccaaggttgaggagactttgcaagattcaggtaagaaagacttcaagaatgagattcatgttatggctgcagcactctccaatgaactgggtatgatggagaatcagttgagtcgatcaaaggatgcagcttctgaagcacttgcattgcgtgagcaagctgaatcattaagatcattggtagctaaaaagagttatctgtcgcgtacttctatatgctgcaatcctcttctgcagactttgcaaagagctaggaaaatgactagtacatatgatgaaatatgttgaattttcagattgaggaacacaagaagatttcggataaatacaactcacaagtaattgagatcaagtccctcaaggcattggttgaggagttggagcaggaaaagcaggagctggagtttattgcagatatgtacgtgaaagaaagttctgagtctaggacaattgctgatattgaagaatcagaaacccgagctcgcaatcaggctgaatatttgaggagcaatctagaggagcatagtcttgagcttcgggttaaagcagcaaatgaagctgaagctgcatgccagcaaaggctttcctttgctgaagtggaactagaagagttaaggaccaaagtagatgcatctgaaagagatgttgtggaacttaaggaggcaataagaattaaagaggctgaaggagacgcctatatttctgatatcgagacagttggtcaagcatatgaagacatgcaaacgcaaaatcagcatcttcttcaacagcttactgatagagatgactttaacataaagctagtatcagatagtgtgaagatgaaacaagcttgtagttcccttctctctgacaagcttatgctagagaagcaactccagcaagttaacacttcactggagtcatctaaactgaaaattgcccgtggcgaagagcagatgaagacttgtgtagcgcaagctataaaaacttcagctgaaaacagacatcttactattagcctggaaaggattgcgctggagttatccaacacagataaggaactcaagtggcttcggtcctccgttggatcctctgagaaagaatacgagcaaactcagcaaaagatatctgagctgagagcgttactggagcacgagaggagtgagaggcggcggcttgaagaacaatatgaagaggtgaaaaatgaagttatggagctgacctctgagactgaagagactactgtccggaaacttgaggatgaaataaaagaatgcaagggtattctcaagtgtggtgtatgctttgaccggcctaaagaggttgtgatcaccaaatgtttccacctattctgctcgctatgcatccagagaaacctcgagattcgccaccgaaaatgtcctggctgtggaaccccattcggacaaaacgacgttagggaggtgaagatatgaacctcaccaaagtgacagtgacaaaaccgacttgcgtgtgaacagcagcaacaaactcccttgtgaatatcgtctgttatgttggcgaacatctagatctaacttgctttattactgggattaaaattaggataagaactggaagaagtgaagttcctaatttatttgctatcgtgtgtgctatgtatgattacccttggcagcgagtggtgtatctgctgggtgtcaatatgctcgaattctagctcctccctgctagcgggtgcatgccagttttattaaggctattccatgtacatggtgtcacactctttaatacataccacataggatgaaaatctgatgtgacatgtgattgaaacatagggagacaccactcatgcaccagattatagacattgaaatctgaaccatctaaatgaac

SEQ ID NO: 7835 - DNA, 3313 bp, Zea Mays
ggaacacattccgcttgtcctctctcgccgctgctccgacgagctcgccggcgccgactcccctcccgtcggaccagcccgccgaaagcggccggacgaacgagaggcttccctcccctcgcacttgcctgcctcgtcgccttcctgagcctctttctgcgcccggccacgggctcgcggccccacgcccgagcacgtgcagcaggcgccgaacccgcctcctgtgccaccccatcggagctcgccggccacgtggagggattccttttcctcgcagcattcctcgtcgccgacggcttcgtcgtgctccaggggttggattggcgtggagcggagagcagtgcaaacctgggattgaattctggtgtagctcttcaatatgaaaaccaaaaattggtgcaacaactggaggtacagaagtccgaaatgcatgcattggagcgcaagttcaaggagcttagtgatgatcaatgttcttatgacaagactctgatttctttgaataaactgtggaatcagctgattgatgatttggttctgcttggagtacgggctggtggggatttggataatttgcaagcacttgaccatgaagagttatcagaagaatctttggagtcgtgtccttccgaggagatatttctcttaaggctcttgaagacaaacaacatcagagataatagtgacactagcttgttgaaatttgttgaagaagctcttgcttttcggtcttcagcaactgttactttgatgaagtccctgcaagagactatttcttcgcagcaagctagaagtgagtctttgtctttagctttgaatggacaaaagtcaaatgaagatgttattgttgcccttcgaaatcataatgattgcttgaaagaggtggcagagaatgcgagtcaagccatctctattatcaacgagaagcacaaaaggtatcttgatgagattgaggcttttaaaagcaaccattcaagggagctacaggaaatcaagcgtatttcaggtgagctagaggaaagcattgcagagcttgaggaaagtcaaaggaagttggttgtgctccagttgcagaggcatggttctgtaatggatgcatctggggcaaatgctgtgaatggtggtatttctactcataaatcttcagataaaagtatgagctggcaagacctcaaagatgctgttgacgcagctaagaccctcgcaggaaaccgtctattagaactccatcagactcaagaggataatctgatactatccaaggagctgggagatcttgaggggcaattgaaagatgagaagtatgtcttggtatccaaaccgtacatgattcttaatgataaactacaacatttgaatgctgagatagagcgttatagagggttggttgaagttttacagaatgacaaggaccagctcatgcaaagggagaaagaaatttctgcaaaagcagaatcgctcgacagtgttaaacaaaccattatcacatatgagaaaaaaattgaagaactggaaactcaaattcagatactcttttctgaaaagaatgatctcgaaaccaaggttgaggagactttgcaagattcaggtaagaaagacttcaagaatgagattcatgttatggctgcagcactctccaatgaactgggtatgatggagaatcagttgagtcgatcaaaggatgcagcttctgaagcacttgcattgcgtgagcaagctgaatcattaagatcattggtagctaaaaagattgaggaacacaagaagatttcggataaatacaactcacaagtaattgagatcaagtccctcaaggcattggttgaggagttggagcaggaaaagcaggagctggagtttattgcagatatgtacgtgaaagaaagttctgagtctaggacaattgctgatattgaagaatcagaaacccgagctcgcaatcaggctgaatatttgaggagcaatctagaggagcatagtcttgagcttcgggttaaagcagcaaatgaagctgaagctgcatgccagcaaaggctttcctttgctgaagtggaactagaagagttaaggaccaaagtagatgcatctgaaagagatgttgtggaacttaaggaggcaataagaattaaagaggctgaaggagacgcctatatttctgatatcgagacagttggtcaagcatatgaagacatgcaaacgcaaaatcagcatcttcttcaacagcttactgatagagatgactttaacataaagctagtatcagatagtgtgaagatgaaacaagcttgtagttcccttctctctgacaagcttatgctagagaagcaactccagcaagttaacacttcactggagtcatctaaactgaaaattgcccgtggcgaagagcagatgaagacttgtgtagcgcaagctataaaaacttcagctgaaaacagacatcttactattagcctggaaaggattgcgctggagttatccaacacagataaggaactcaagtggcttcggtcctccgttggatcctctgagaaagaatacgagcaaactcagcaaaagatatctgagctgagagcgttactggagcacgagaggagtgagaggcggcggcttgaagaacaatatgaagaggtgaaaaatgaagttatggagctgacctctgagactgaagagactactgtccggaaacttgaggatgaaataaaagaatgcaagggtattctcaagtgtggtgtatgctttgaccggcctaaagaggttgtgatcaccaaatgtttccacctattctgctcgctatgcatccagagaaacctcgagattcgccaccgaaaatgtcctggctgtggaaccccattcggacaaaacgacgttagggaggtgaagatatgaacctcaccaaagtgacagtgacaaaaccgacttgcgtgtgaacagcagcaacaaactcccttgtgaatatcgtctgttatgttggcgaacatctagatctaacttgctttattactgggattaaaattaggataagaactggaagaagtgaagttcctaatttatttgctatcgtgtgtgctatgtatgattacccttggcagcgagtggtgtatctgctgggtgtcaatatgctcgaattctagctcctccctgctagcgggtgcatgccagttttattaaggctattccatgtacatggtgtcacactctttaatacataccacataggatgaaaatctgatgtgacatgtgattgaaacatagggagacaccactcatgcaccagattatagacattgaaatctgaaccatctaaatgaac

SEQ ID NO: 7836 - DNA, 3345 bp, Zea Mays
ctttactacccgtctcgcgcgagcggaacacattccgcttgtcctctctcgccgctgctccgacgagctcgccggcgccgactcccctcccgtcggaccagcccgccgaaagcggccggacgaacgagaggcttccctcccctcgcacttgcctgcctcgtcgccttcctgagcctctttctgcgcccggccacgggctcgcggccccacgcccgagcacgtgcagcaggcgccgaacccgcctcctgtgccaccccatcggagctcgccggccacgtggagggattccttttcctcgcagcattcctcgtcgccgacggcttcgtcgtgctccaggggttggattggcgtggagcggagagcagtgcaaacctgggattgaattctggtgtagtttatttttacagatggattccacagctcttcaatatgaaaaccaaaaattggtgcaacaactggaggtacagaagtccgaaatgcatgcattggagcgcaagttcaaggagcttagtgatgatcaatgttcttatgacaagactctgatttctttgaataaactgtggaatcagctgattgatgatttggttctgcttggagtacgggctggtggggatttggataatttgcaagcacttgaccatgaagagttatcagaagaatctttggagtcgtgtccttccgaggagatatttctcttaaggctcttgaagacaaacaacatcagagataatagtgacactagcttgttgaaatttgttgaagaagctcttgcttttcggtcttcagcaactgttactttgatgaagtccctgcaagagactatttcttcgcagcaagctagaagtgagtctttgtctttagctttgaatggacaaaagtcaaatgaagatgttattgttgcccttcgaaatcataatgattgcttgaaagaggtggcagagaatgcgagtcaagccatctctattatcaacgagaagcacaaaaggtatcttgatgagattgaggcttttaaaagcaaccattcaagggagctacaggaaatcaagcgtatttcaggtgagctagaggaaagcattgcagagcttgaggaaagtcaaaggaagttggttgtgctccagttgcagaggcatggttctgtaatggatgcatctggggcaaatgctgtgaatggtggtatttctactcataaatcttcagataaaagtatgagctggcaagacctcaaagatgctgttgacgcagctaagaccctcgcaggaaaccgtctattagaactccatcagactcaagaggataatctgatactatccaaggagctgggagatcttgaggggcaattgaaagatgagaagtatgtcttggtatccaaaccgtacatgattcttaatgataaactacaacatttgaatgctgagatagagcgttatagagggttggttgaagttttacagaatgacaaggaccagctcatgcaaagggagaaagaaatttctgcaaaagcagaatcgctcgacagtgttaaacaaaccattatcacatatgagaaaaaaattgaagaactggaaactcaaattcagatactcttttctgaaaagaatgatctcgaaaccaaggttgaggagactttgcaagattcaggtaagaaagacttcaagaatgagattcatgttatggctgcagcactctccaatgaactgggtatgatggagaatcagttgagtcgatcaaaggatgcagcttctgaagcacttgcattgcgtgagcaagctgaatcattaagatcattggtagctaaaaagattgaggaacacaagaagatttcggataaatacaactcacaagtaattgagatcaagtccctcaaggcattggaaaagcaggagctggagtttattgcagatatgtacgtgaaagaaagttctgagtctaggacaattgctgatattgaagaatcagaaacccgagctcgcaatcaggctgaatatttgaggagcaatctagaggagcatagtcttgagcttcgggttaaagcagcaaatgaagctgaagctgcatgccagcaaaggctttcctttgctgaagtggaactagaagagttaaggaccaaagtagatgcatctgaaagagatgttgtggaacttaaggaggcaataagaattaaagaggctgaaggagacgcctatatttctgatatcgagacagttggtcaagcatatgaagacatgcaaacgcaaaatcagcatcttcttcaacagcttactgatagagatgactttaacataaagctagtatcagatagtgtgaagatgaaacaagcttgtagttcccttctctctgacaagcttatgctagagaagcaactccagcaagttaacacttcactggagtcatctaaactgaaaattgcccgtggcgaagagcagatgaagacttgtgtagcgcaagctataaaaacttcagctgaaaacagacatcttactattagcctggaaaggattgcgctggagttatccaacacagataaggaactcaagtggcttcggtcctccgttggatcctctgagaaagaatacgagcaaactcagcaaaagatatctgagctgagagcgttactggagcacgagaggagtgagaggcggcggcttgaagaacaatatgaagaggtgaaaaatgaagttatggagctgacctctgagactgaagagactactgtccggaaacttgaggatgaaataaaagaatgcaagggtattctcaagtgtggtgtatgctttgaccggcctaaagaggttgtgatcaccaaatgtttccacctattctgctcgctatgcatccagagaaacctcgagattcgccaccgaaaatgtcctggctgtggaaccccattcggacaaaacgacgttagggaggtgaagatatgaacctcaccaaagtgacagtgacaaaaccgacttgcgtgtgaacagcagcaacaaactcccttgtgaatatcgtctgttatgttggcgaacatctagatctaacttgctttattactgggattaaaattaggataagaactggaagaagtgaagttcctaatttatttgctatcgtgtgtgctatgtatgattacccttggcagcgagtggtgtatctgctgggtgtcaatatgctcgaattctagctcctccctgctagcgggtgcatgccagttttattaaggctattccatgtacatggtgtcacactctttaatacataccacataggatgaaaatctgatgtgacatgtgattgaaacatagggagacaccactcatgcaccagattatagacattgaaatctgaaccatctaaatgaac

SEQ ID NO: 7837 - DNA, 3357 bp, Zea Mays
ctgacaactttactacccgtctcgcgcgagcggaacacattccgcttgtcctctctcgccgctgctccgacgagctcgccggcgccgactcccctcccgtcggaccagcccgccgaaagcggccggacgaacgagaggcttccctcccctcgcacttgcctgcctcgtcgccttcctgagcctctttctgcgcccggccacgggctcgcggccccacgcccgagcacgtgcagcaggcgccgaacccgcctcctgtgccaccccatcggagctcgccggccacgtggagggattccttttcctcgcagcattcctcgtcgccgacggcttcgtcgtgctccaggggttggattggcgtggagcggagagcagtgcaaacctgggattgaattctggtgtagatggattccacagctcttcaatatgaaaaccaaaaattggtgcaacaactggaggtacagaagtccgaaatgcatgcattggagcgcaagttcaaggagcttagtgatgatcaatgttcttatgacaagactctgatttctttgaataaactgtggaatcagctgattgatgatttggttctgcttggagtacgggctggtggggatttggataatttgcaagcacttgaccatgaagagttatcagaagaatctttggagtcgtgtccttccgaggagatatttctcttaaggctcttgaagacaaacaacatcagagataatagtgacactagcttgttgaaatttgttgaagaagctcttgcttttcggtcttcagcaactgttactttgatgaagtccctgcaagagactatttcttcgcagcaagctagaagtgagtctttgtctttagctttgaatggacaaaagtcaaatgaagatgttattgttgcccttcgaaatcataatgattgcttgaaagaggtggcagagaatgcgagtcaagccatctctattatcaacgagaagcacaaaaggtatcttgatgagattgaggcttttaaaagcaaccattcaagggagctacaggaaatcaagcgtatttcaggtgagctagaggaaagcattgcagagcttgaggaaagtcaaaggaagttggttgtgctccagttgcagaggcatggttctgtaatggatgcatctggggcaaatgctgtgaatggtggtatttctactcataaatcttcagataaaagtatgagctggcaagacctcaaagatgctgttgacgcagctaagaccctcgcaggaaaccgtctattagaactccatcagactcaagaggataatctgatactatccaaggagctgggagatcttgaggggcaattgaaagatgagaagtatgtcttggtatccaaaccgtacatgattcttaatgataaactacaacatttgaatgctgagatagagcgttatagagggttggttgaagttttacagaatgacaaggaccagctcatgcaaagggagaaagaaatttctgcaaaagcagaatcgctcgacagtgttaaacaaaccattatcacatatgagaaaaaaattgaagaactggaaactcaaattcagatactcttttctgaaaagaatgatctcgaaaccaaggttgaggagactttgcaagattcaggtaagaaagacttcaagaatgagattcatgttatggctgcagcactctccaatgaactgggtatgatggagaatcagttgagtcgatcaaaggatgcagcttctgaagcacttgcattgcgtgagcaagctgaatcattaagatcattggtagctaaaaagattgaggaacacaagaagatttcggataaatacaactcacaagtaattgagatcaagtccctcaaggcattggttgaggagttggagcaggaaaagcaggagctggagtttattgcagatatgtacgtgaaagaaagttctgagtctaggacaattgctgatattgaagaatcagaaacccgagctcgcaatcaggctgaatatttgaggagcaatctagaggagcatagtcttgagcttcgggttaaagcagcaaatgaagctgaagctgcatgccagcaaaggctttcctttgctgaagtggaactagaagagttaaggaccaaagtagatgcatctgaaagagatgttgtggaacttaaggaggcaataagaattaaagaggctgaaggagacgcctatatttctgatatcgagacagttggtcaagcatatgaagacatgcaaacgcaaaatcagcatcttcttcaacagcttactgatagagatgactttaacataaagctagtatcagatagtgtgaagatgaaacaagcttgtagttcccttctctctgacaagcttatgctagagaagcaactccagcaagttaacacttcactggagtcatctaaactgaaaattgcccgtggcgaagagcagatgaagacttgtgtagcgcaagctataaaaacttcagctgaaaacagacatcttactattagcctggaaaggattgcgctggagttatccaacacagataaggaactcaagtggcttcggtcctccgttggatcctctgagaaagaatacgagcaaactcagcaaaagatatctgagctgagagcgttactggagcacgagaggagtgagaggcggcggcttgaagaacaatatgaagaggtgaaaaatgaagttatggagctgacctctgagactgaagagactactgtccggaaacttgaggatgaaataaaagaatgcaagggtattctcaagtgtggtgtatgctttgaccggcctaaagaggttgtgatcaccaaatgtttccacctattctgctcgctatgcatccagagaaacctcgagattcgccaccgaaaatgtcctggctgtggaaccccattcggacaaaacgacgttagggaggtgaagatatgaacctcaccaaagtgacagtgacaaaaccgacttgcgtgtgaacagcagcaacaaactcccttgtgaatatcgtctgttatgttggcgaacatctagatctaacttgctttattactgggattaaaattaggataagaactggaagaagtgaagttcctaatttatttgctatcgtgtgtgctatgtatgattacccttggcagcgagtggtgtatctgctgggtgtcaatatgctcgaattctagctcctccctgctagcgggtgcatgccagttttattaaggctattccatgtacatggtgtcacactctttaatacataccacataggatgaaaatctgatgtgacatgtgattgaaacatagggagacaccactcatgcaccagattatagacattgaaatctgaaccatctaaatgaac

SEQ ID NO: 7838 - DNA, 3282 bp, Zea Mays
tactgacaactttactacccgtctcgcgcgagcggaacacattccgcttgtcctctctcgccgctgctccgacgagctcgccggcgccgactcccctcccgtcggaccagcccgccgaaagcggccggacgaacgagaggcttccctcccctcgcacttgcctgcctcgtcgccttcctgagcctctttctgcgcccggccacgggctcgcggccccacgcccgagcacgtgcagcaggcgccgaacccgcctcctgtgccaccccatcggagctcgccggccacgtggagggattccttttcctcgcagcattcctcgtcgccgacggcttcgtcgtgctccaggggttggattggcgtggagcggagagcagtgcaaacctgggattgaattctggtgtagatggattccacagctcttcaatatgaaaaccaaaaattggtgcaacaactggaggtacagaagtccgaaatgcatgcattggagcgcaagttcaaggagcttagtgatgatcaatgttcttatgacaagactctgatttctttgaataaactgtggaatcagctgattgatgatttggttctgcttggagtacgggctggtggggatttggataatttgcaagcacttgaccatgaagagttatcagaagaatctttggagtcgtgtccttccgaggagatatttctcttaaggctcttgaagacaaacaacatcagagataatagtgacactagcttgttgaaatttgttgaagaagctcttgcttttcggtcttcagcaactgttactttgatgaagtccctgcaagagactatttcttcgcagcaagctagaagtgagtctttgtctttagctttgaatggacaaaagtcaaatgaagatgttattgttgcccttcgaaatcataatgattgcttgaaagaggtggcagagaatgcgagtcaagccatctctattatcaacgagaagcacaaaaggtatcttgatgagattgaggcttttaaaagcaaccattcaagggagctacaggaaatcaagcgtatttcaggtgagctagaggaaagcattgcagagcttgaggaaagtcaaaggaagttggttgtgctccagttgcagaggcatggttctgtaatggatgcatctggggcaaatgctgtgaatggtggtatttctactcataaatcttcagataaaagtatgagctggcaagacctcaaagatgctgttgacgcagctaagaccctcgcaggaaaccgtctattagaactccatcagactcaagaggataatctgatactatccaaggagctgggagatcttgaggggcaattgaaagatgagaagtatgtcttggtatccaaaccgtacatgattcttaatgataaactacaacatttgaatgctgagatagagcgttatagagggttggttgaagttttacagaatgacaaggaccagctcatgcaaagggagaaagaaatttctgcaaaagcagaatcgctcgacagtgttaaacaaaccattatcacatatgagaaaaaaattgaagaactggaaactcaaattcagatactcttttctgaaaagaatgatctcgaaaccaaggttgaggagactttgcaagattcaggtaagaaagacttcaagaatgagattcatgttatggctgcagcactctccaatgaactgggtatgatggagaatcagttgagtcgatcaaaggatgcagcttctgaagcacttgcattgcgtgagcaagctgaatcattaagatcattggtagctaaaaagattgaggaacacaagaagatttcggataaatacaactcacaagtaattgagatcaagtccctcaaggcattggacaattgctgatattgaagaatcagaaacccgagctcgcaatcaggctgaatatttgaggagcaatctagaggagcatagtcttgagcttcgggttaaagcagcaaatgaagctgaagctgcatgccagcaaaggctttcctttgctgaagtggaactagaagagttaaggaccaaagtagatgcatctgaaagagatgttgtggaacttaaggaggcaataagaattaaagaggctgaaggagacgcctatatttctgatatcgagacagttggtcaagcatatgaagacatgcaaacgcaaaatcagcatcttcttcaacagcttactgatagagatgactttaacataaagctagtatcagatagtgtgaagatgaaacaagcttgtagttcccttctctctgacaagcttatgctagagaagcaactccagcaagttaacacttcactggagtcatctaaactgaaaattgcccgtggcgaagagcagatgaagacttgtgtagcgcaagctataaaaacttcagctgaaaacagacatcttactattagcctggaaaggattgcgctggagttatccaacacagataaggaactcaagtggcttcggtcctccgttggatcctctgagaaagaatacgagcaaactcagcaaaagatatctgagctgagagcgttactggagcacgagaggagtgagaggcggcggcttgaagaacaatatgaagaggtgaaaaatgaagttatggagctgacctctgagactgaagagactactgtccggaaacttgaggatgaaataaaagaatgcaagggtattctcaagtgtggtgtatgctttgaccggcctaaagaggttgtgatcaccaaatgtttccacctattctgctcgctatgcatccagagaaacctcgagattcgccaccgaaaatgtcctggctgtggaaccccattcggacaaaacgacgttagggaggtgaagatatgaacctcaccaaagtgacagtgacaaaaccgacttgcgtgtgaacagcagcaacaaactcccttgtgaatatcgtctgttatgttggcgaacatctagatctaacttgctttattactgggattaaaattaggataagaactggaagaagtgaagttcctaatttatttgctatcgtgtgtgctatgtatgattacccttggcagcgagtggtgtatctgctgggtgtcaatatgctcgaattctagctcctccctgctagcgggtgcatgccagttttattaaggctattccatgtacatggtgtcacactctttaatacataccacataggatgaaaatctgatgtgacatgtgattgaaacatagggagacaccactcatgcaccagattatagacattgaaatctgaaccatctaaatgaac

SEQ ID NO: 7839 - DNA, 3126 bp, Zea Mays
atgagctcagatagagtcaatgcatatggtggttcaagacgagacgtatatggtttcattccaatgcagaagctgaggcgcaataacagtacctggagatttggtaacatacttatagtcttagctatgaatatggattccacagctcttcaatatgaaaaccaaaaattggtgcaacaactggaggtacagaagtccgaaatgcatgcattggagcgcaagttcaaggagcttagtgatgatcaatgttcttatgacaagactctgatttctttgaataaactgtggaatcagctgattgatgatttggttctgcttggagtacgggctggtggggatttggataatttgcaagcacttgaccatgaagagttatcagaagaatctttggagtcgtgtccttccgaggagatatttctcttaaggctcttgaagacaaacaacatcagagataatagtgacactagcttgttgaaatttgttgaagaagctcttgcttttcggtcttcagcaactgttactttgatgaagtccctgcaagagactatttcttcgcagcaagctagaaatgttattgttgcccttcgaaatcataatgattgcttgaaagaggtggcagagaatgcgagtcaagccatctctattatcaacgagaagcacaaaaggtatcttgatgagattgaggcttttaaaagcaaccattcaagggagctacaggaaatcaagcgtatttcaggtgagctagaggaaagcattgcagagcttgaggaaagtcaaaggaagttggttgtgctccagttgcagaggcatggttctgtaatggatgcatctggggcaaatgctgtgaatggtggtatttctactcataaatcttcagataaaagtatgagctggcaagacctcaaagatgctgttgacgcagctaagaccctcgcaggaaaccgtctattagaactccatcagactcaagaggataatctgatactatccaaggagctgggagatcttgaggggcaattgaaagatgagaagtatgtcttggtatccaaaccgtacatgattcttaatgataaactacaacatttgaatgctgagatagagcgttatagagggttggttgaagttttacaggtttggtttctgtcttctgttatactgctttgtattgcatttgctttggtttttccgagcttttcttcattgtgtgaatttagaatgacaaggaccagctcatgcaaagggagaaagaaatttctgcaaaagcagaatcgctcgacagtgttaaacaaaccattatcacatatgagaaaaaaattgaagaactggaaactcaaattcagatactcttttctgaaaagaatgatctcgaaaccaaggttgaggagactttgcaagattcaggtaagaaagacttcaagaatgagattcatgttatggctgcagcactctccaatgaactgggtatgatggagaatcagttgagtcgatcaaaggatgcagcttctgaagcacttgcattgcgtgagcaagctgaatcattaagatcattggtagctaaaaagattgaggaacacaagaagatttcggataaatacaactcacaagtaattgagatcaagtccctcaaggcattggttgaggagttggagcaggaaaagcaggagctggagtttattgcagatatgtacgtgaaagaaagttctgagtctaggacaattgctgatattgaagaatcagaaacccgagctcgcaatcaggctgaatatttgaggagcaatctagaggagcatagtcttgagcttcgggttaaagcagcaaatgaagctgaagctgcatgccagcaaaggctttcctttgctgaagtggaactagaagagttaaggaccaaagtagatgcatctgaaagagatgttgtggaacttaaggaggcaataagaattaaagaggctgaaggagacgcctatatttctgatatcgagacagttggtcaagcatatgaagacatgcaaacgcaaaatcagcatcttcttcaacagcttactgatagagatgactttaacataaagctagtatcagatagtgtgaagatgaaacaagcttgtagttcccttctctctgacaagcttatgctagagaagcaactccagcaagttaacacttcactggagtcatctaaactgaaaattgcccgtggcgaagagcagatgaagacttgtgtagcgcaagctataaaaacttcagctgaaaacagacatcttactattagcctggaaaggattgcgctggagttatccaacacagataaggaactcaagtggcttcggtcctccgttggatcctctgagaaagaatacgagcaaactcagcaaaagatatctgagctgagagcgttactggagcacgagaggagtgagaggcggcggcttgaagaacaatatgaagaggtgaaaaatgaagttatggagctgacctctgagactgaagagactactgtccggaaacttgaggatgaaataaaagaatgcaagggtattctcaagtgtggtgtatgctttgaccggcctaaagaggttgtgatcaccaaatgtttccacctattctgctcgctatgcatccagagaaacctcgagattcgccaccgaaaatgtcctggctgtggaaccccattcggacaaaacgacgttagggaggtgaagatatgaacctcaccaaagtgacagtgacaaaaccgacttgcgtgtgaacagcagcaacaaactcccttgtgaatatcgtctgttatgttggcgaacatctagatctaacttgctttattactgggattaaaattaggataagaactggaagaagtgaagttcctaatttatttgctatcgtgtgtgctatgtatgattacccttggcagcgagtggtgtatctgctgggtgtcaatatgctcgaattctagctcctccctgctagcgggtgcatgccagttttattaaggctattccatgtacatggtgtcacactctttaatacataccacataggatgaaaatctgatgtgacatgtgattgaaacatagggagacaccactcatgcaccagattatagacattgaaatctgaaccatctaaatgaac

SEQ ID NO: 7840 - DNA, 3516 bp, Zea Mays
gtgaaaattgtgttttcggtatttgaaacctaggggatatcatgactatcgcaaccggccaacaggaaatttcagccgggcatccccaattcatcttccccacgccgcgtccgcgtccggaccggacaccggcggcacctcctcctgcctccacttcaccagttcatcgggcgccggaagtgggagccatccgccgccgccacatatctgtcctcttcggcgctgactggggctcagccgctcgaagctccatcccgcctcccgtcttcgccgccgctcgtcagatccctcgacgcgacggtcgtgtcttgactctccaccacgcgactccacccagctcttctccacgcgactgcagagcgacgatcggaggcgccgccatcgcacaatccaccgtcgctgcctgctcctgtgatactctcacaagatccgctgctacatccatttcttcttcttccacgttgctgggaggagacgggcgcaaggatttgtgcgagggagaaagaaagggaaggaaaggggataggacgggaggaggagcacgactgcttaccacttattcttcccagcccgctcttcaatatgaaaaccaaaaattggtgcaacaactggaggtacagaagtccgaaatgcatgcattggagcgcaagttcaaggagcttagtgatgatcaatgttcttatgacaagactctgatttctttgaataaactgtggaatcagctgattgatgatttggttctgcttggagtacgggctggtggggatttggataatttgcaagcacttgaccatgaagagttatcagaagaatctttggagtcgtgtccttccgaggagatatttctcttaaggctcttgaagacaaacaacatcagagataatagtgacactagcttgttgaaatttgttgaagaagctcttgcttttcggtcttcagcaactgttactttgatgaagtccctgcaagagactatttcttcgcagcaagctagaagtgagtctttgtctttagctttgaatggacaaaagtcaaatgaagatgttattgttgcccttcgaaatcataatgattgcttgaaagaggtggcagagaatgcgagtcaagccatctctattatcaacgagaagcacaaaaggtatcttgatgagattgaggcttttaaaagcaaccattcaagggagctacaggaaatcaagcgtatttcaggtgagctagaggaaagcattgcagagcttgaggaaagtcaaaggaagttggttgtgctccagttgcagaggcatggttctgtaatggatgcatctggggcaaatgctgtgaatggtggtatttctactcataaatcttcagataaaagtatgagctggcaagacctcaaagatgctgttgacgcagctaagaccctcgcaggaaaccgtctattagaactccatcagactcaagaggataatctgatactatccaaggagctgggagatcttgaggggcaattgaaagatgagaagtatgtcttggtatccaaaccgtacatgattcttaatgataaactacaacatttgaatgctgagatagagcgttatagagggttggttgaagttttacagaatgacaaggaccagctcatgcaaagggagaaagaaatttctgcaaaagcagaatcgctcgacagtgttaaacaaaccattatcacatatgagaaaaaaattgaagaactggaaactcaaattcagatactcttttctgaaaagaatgatctcgaaaccaaggttgaggagactttgcaagattcaggtaagaaagacttcaagaatgagattcatgttatggctgcagcactctccaatgaactgggtatgatggagaatcagttgagtcgatcaaaggatgcagcttctgaagcacttgcattgcgtgagcaagctgaatcattaagatcattggtagctaaaaagattgaggaacacaagaagatttcggataaatacaactcacaagtaattgagatcaagtccctcaaggcattggttgaggagttggagcaggaaaagcaggagctggagtttattgcagatatgtacgtgaaagaaagttctgagtctaggacaattgctgatattgaagaatcagaaacccgagctcgcaatcaggctgaatatttgaggagcaatctagaggagcatagtcttgagcttcgggttaaagcagcaaatgaagctgaagctgcatgccagcaaaggctttcctttgctgaagtggaactagaagagttaaggaccaaagtagatgcatctgaaagagatgttgtggaacttaaggaggcaataagaattaaagaggctgaaggagacgcctatatttctgatatcgagacagttggtcaagcatatgaagacatgcaaacgcaaaatcagcatcttcttcaacagcttactgatagagatgactttaacataaagctagtatcagatagtgtgaagatgaaacaagcttgtagttcccttctctctgacaagcttatgctagagaagcaactccagcaagttaacacttcactggagtcatctaaactgaaaattgcccgtggcgaagagcagatgaagacttgtgtagcgcaagctataaaaacttcagctgaaaacagacatcttactattagcctggaaaggattgcgctggagttatccaacacagataaggaactcaagtggcttcggtcctccgttggatcctctgagaaagaatacgagcaaactcagcaaaagatatctgagctgagagcgttactggagcacgagaggagtgagaggcggcggcttgaagaacaatatgaagaggtgaaaaatgaagttatggagctgacctctgagactgaagagactactgtccggaaacttgaggatgaaataaaagaatgcaagggtattctcaagtgtggtgtatgctttgaccggcctaaagaggttgtgatcaccaaatgtttccacctattctgctcgctatgcatccagagaaacctcgagattcgccaccgaaaatgtcctggctgtggaaccccattcggacaaaacgacgttagggaggtgaagatatgaacctcaccaaagtgacagtgacaaaaccgacttgcgtgtgaacagcagcaacaaactcccttgtgaatatcgtctgttatgttggcgaacatctagatctaacttgctttattactgggattaaaattaggataagaactggaagaagtgaagttcctaatttatttgctatcgtgtgtgctatgtatgattacccttggcagcgagtggtgtatctgctgggtgtcaatatgctcgaattctagctcctccctgctagcgggtgcatgccagttttattaaggctattccatgtacatggtgtcacactctttaatacataccacataggatgaaaatctgatgtgacatgtgattgaaacatagggagacaccactcatgcaccagattatagacattgaaatctgaaccatctaaatgaac

SEQ ID NO: 7841 - DNA, 3507 bp, Zea Mays
gtgaaaattgtgttttcggtatttgaaacctaggggatatcatgactatcgcaaccggccaacaggaaatttcagccgggcatccccaattcatcttccccacgccgcgtccgcgtccggaccggacaccggcggcacctcctcctgcctccacttcaccagttcatcgggcgccggaagtgggagccatccgccgccgccacatatctgtcctcttcggcgctgactggggctcagccgctcgaagctccatcccgcctcccgtcttcgccgccgctcgatccctcgacgcgacggtcgtgtcttgactctccaccacgcgactccacccagctcttctccacgcgactgcagagcgacgatcggaggcgccgccatcgcacaatccaccgtcgctgcctgctcctgtgatactctcacaagatccgctgctacatccatttcttcttcttccacgttgctgggaggagacgggcgcaaggatttgtgcgagggagaaagaaagggaaggaaaggggataggacgggaggaggagcacgactgcttaccacttattcttcccagcccgatggattccacagctcttcaatatgaaaaccaaaaattggtgcaacaactggaggtacagaagtccgaaatgcatgcattggagcgcaagttcaaggagcttagtgatgatcaatgttcttatgacaagactctgatttctttgaataaactgtggaatcagctgattgatgatttggttctgcttggagtacgggctggtggggatttggataatttgcaagcacttgaccatgaagagttatcagaagaatctttggagtcgtgtccttccgaggagatatttctcttaaggctcttgaagacaaacaacatcagagataatagtgacactagcttgttgaaatttgttgaagaagctcttgcttttcggtcttcagcaactgttactttgatgaagtccctgcaagagactatttcttcgcagcaagctagaagtgagtctttgtctttagctttgaatggacaaaagtcaaatgaagatgttattgttgcccttcgaaatcataatgattgcttgaaagaggtggcagagaatgcgagtcaagccatctctattatcaacgagaagcacaaaaggtatcttgatgagattgaggcttttaaaagcaaccattcaagggagctacaggaaatcaagcgtatttcaggtgagctagaggaaagcattgcagagcttgaggaaagtcaaaggaagttggttgtgctccagttgcagaggcatggttctgtaatggatgcatctggggcaaatgctgtgaatggtggtatttctactcataaatcttcagataaaagtatgagctggcaagacctcaaagatgctgttgacgcagctaagaccctcgcaggaaaccgtctattagaactccatcagactcaagaggataatctgatactatccaaggagctgggagatcttgaggggcaattgaaagatgagaagtatgtcttggtatccaaaccgtacatgattcttaatgataaactacaacatttgaatgctgagatagagcgttatagagggttggttgaagttttacagaatgacaaggaccagctcatgcaaagggagaaagaaatttctgcaaaagcagaatcgctcgacagtgttaaacaaaccattatcacatatgagaaaaaaattgaagaactggaaactcaaattcagatactcttttctgaaaagaatgatctcgaaaccaaggttgaggagactttgcaagattcaggtaagaaagacttcaagaatgagattcatgttatggctgcagcactctccaatgaactgggtatgatggagaatcagttgagtcgatcaaaggatgcagcttctgaagcacttgcattgcgtgagcaagctgaatcattaagatcattggtagctaaaaagattgaggaacacaagaagatttcggataaatacaactcacaagtaattgagatcaagtccctcaaggcattggaaaagcaggagctggagtttattgcagatatgtacgtgaaagaaagttctgagtctaggacaattgctgatattgaagaatcagaaacccgagctcgcaatcaggctgaatatttgaggagcaatctagaggagcatagtcttgagcttcgggttaaagcagcaaatgaagctgaagctgcatgccagcaaaggctttcctttgctgaagtggaactagaagagttaaggaccaaagtagatgcatctgaaagagatgttgtggaacttaaggaggcaataagaattaaagaggctgaaggagacgcctatatttctgatatcgagacagttggtcaagcatatgaagacatgcaaacgcaaaatcagcatcttcttcaacagcttactgatagagatgactttaacataaagctagtatcagatagtgtgaagatgaaacaagcttgtagttcccttctctctgacaagcttatgctagagaagcaactccagcaagttaacacttcactggagtcatctaaactgaaaattgcccgtggcgaagagcagatgaagacttgtgtagcgcaagctataaaaacttcagctgaaaacagacatcttactattagcctggaaaggattgcgctggagttatccaacacagataaggaactcaagtggcttcggtcctccgttggatcctctgagaaagaatacgagcaaactcagcaaaagatatctgagctgagagcgttactggagcacgagaggagtgagaggcggcggcttgaagaacaatatgaagaggtgaaaaatgaagttatggagctgacctctgagactgaagagactactgtccggaaacttgaggatgaaataaaagaatgcaagggtattctcaagtgtggtgtatgctttgaccggcctaaagaggttgtgatcaccaaatgtttccacctattctgctcgctatgcatccagagaaacctcgagattcgccaccgaaaatgtcctggctgtggaaccccattcggacaaaacgacgttagggaggtgaagatatgaacctcaccaaagtgacagtgacaaaaccgacttgcgtgtgaacagcagcaacaaactcccttgtgaatatcgtctgttatgttggcgaacatctagatctaacttgctttattactgggattaaaattaggataagaactggaagaagtgaagttcctaatttatttgctatcgtgtgtgctatgtatgattacccttggcagcgagtggtgtatctgctgggtgtcaatatgctcgaattctagctcctccctgctagcgggtgcatgccagttttattaaggctattccatgtacatggtgtcacactctttaatacataccacataggatgaaaatctgatgtgacatgtgattgaaacatagggagacaccactcatgcaccagattatagacattgaaatctgaaccatctaaatgaac

SEQ ID NO: 7842 - DNA, 3525 bp, Zea Mays
gtgaaaattgtgttttcggtatttgaaacctaggggatatcatgactatcgcaaccggccaacaggaaatttcagccgggcatccccaattcatcttccccacgccgcgtccgcgtccggaccggacaccggcggcacctcctcctgcctccacttcaccagttcatcgggcgccggaagtgggagccatccgccgccgccacatatctgtcctcttcggcgctgactggggctcagccgctcgaagctccatcccgcctcccgtcttcgccgccgctcgatccctcgacgcgacggtcgtgtcttgactctccaccacgcgactccacccagctcttctccacgcgactgcagagcgacgatcggaggcgccgccatcgcacaatccaccgtcgctgcctgctcctgtgatactctcacaagatccgctgctacatccatttcttcttcttccacgttgctgggaggagacgggcgcaaggatttgtgcgagggagaaagaaagggaaggaaaggggataggacgggaggaggagcacgactgcttaccacttattcttcccagcccgatggattccacagctcttcaatatgaaaaccaaaaattggtgcaacaactggaggtacagaagtccgaaatgcatgcattggagcgcaagttcaaggagcttagtgatgatcaatgttcttatgacaagactctgatttctttgaataaactgtggaatcagctgattgatgatttggttctgcttggagtacgggctggtggggatttggataatttgcaagcacttgaccatgaagagttatcagaagaatctttggagtcgtgtccttccgaggagatatttctcttaaggctcttgaagacaaacaacatcagagataatagtgacactagcttgttgaaatttgttgaagaagctcttgcttttcggtcttcagcaactgttactttgatgaagtccctgcaagagactatttcttcgcagcaagctagaagtgagtctttgtctttagctttgaatggacaaaagtcaaatgaagatgttattgttgcccttcgaaatcataatgattgcttgaaagaggtggcagagaatgcgagtcaagccatctctattatcaacgagaagcacaaaaggtatcttgatgagattgaggcttttaaaagcaaccattcaagggagctacaggaaatcaagcgtatttcaggtgagctagaggaaagcattgcagagcttgaggaaagtcaaaggaagttggttgtgctccagttgcagaggcatggttctgtaatggatgcatctggggcaaatgctgtgaatggtggtatttctactcataaatcttcagataaaagtatgagctggcaagacctcaaagatgctgttgacgcagctaagaccctcgcaggaaaccgtctattagaactccatcagactcaagaggataatctgatactatccaaggagctgggagatcttgaggggcaattgaaagatgagaagtatgtcttggtatccaaaccgtacatgattcttaatgataaactacaacatttgaatgctgagatagagcgttatagagggttggttgaagttttacagaatgacaaggaccagctcatgcaaagggagaaagaaatttctgcaaaagcagaatcgctcgacagtgttaaacaaaccattatcacatatgagaaaaaaattgaagaactggaaactcaaattcagatactcttttctgaaaagaatgatctcgaaaccaaggttgaggagactttgcaagattcaggtaagaaagacttcaagaatgagattcatgttatggctgcagcactctccaatgaactgggtatgatggagaatcagttgagtcgatcaaaggatgcagcttctgaagcacttgcattgcgtgagcaagctgaatcattaagatcattggtagctaaaaagattgaggaacacaagaagatttcggataaatacaactcacaagtaattgagatcaagtccctcaaggcattggttgaggagttggagcaggaaaagcaggagctggagtttattgcagatatgtacgtgaaagaaagttctgagtctaggacaattgctgatattgaagaatcagaaacccgagctcgcaatcaggctgaatatttgaggagcaatctagaggagcatagtcttgagcttcgggttaaagcagcaaatgaagctgaagctgcatgccagcaaaggctttcctttgctgaagtggaactagaagagttaaggaccaaagtagatgcatctgaaagagatgttgtggaacttaaggaggcaataagaattaaagaggctgaaggagacgcctatatttctgatatcgagacagttggtcaagcatatgaagacatgcaaacgcaaaatcagcatcttcttcaacagcttactgatagagatgactttaacataaagctagtatcagatagtgtgaagatgaaacaagcttgtagttcccttctctctgacaagcttatgctagagaagcaactccagcaagttaacacttcactggagtcatctaaactgaaaattgcccgtggcgaagagcagatgaagacttgtgtagcgcaagctataaaaacttcagctgaaaacagacatcttactattagcctggaaaggattgcgctggagttatccaacacagataaggaactcaagtggcttcggtcctccgttggatcctctgagaaagaatacgagcaaactcagcaaaagatatctgagctgagagcgttactggagcacgagaggagtgagaggcggcggcttgaagaacaatatgaagaggtgaaaaatgaagttatggagctgacctctgagactgaagagactactgtccggaaacttgaggatgaaataaaagaatgcaagggtattctcaagtgtggtgtatgctttgaccggcctaaagaggttgtgatcaccaaatgtttccacctattctgctcgctatgcatccagagaaacctcgagattcgccaccgaaaatgtcctggctgtggaaccccattcggacaaaacgacgttagggaggtgaagatatgaacctcaccaaagtgacagtgacaaaaccgacttgcgtgtgaacagcagcaacaaactcccttgtgaatatcgtctgttatgttggcgaacatctagatctaacttgctttattactgggattaaaattaggataagaactggaagaagtgaagttcctaatttatttgctatcgtgtgtgctatgtatgattacccttggcagcgagtggtgtatctgctgggtgtcaatatgctcgaattctagctcctccctgctagcgggtgcatgccagttttattaaggctattccatgtacatggtgtcacactctttaatacataccacataggatgaaaatctgatgtgacatgtgattgaaacatagggagacaccactcatgcaccagattatagacattgaaatctgaaccatctaaatgaac

SEQ ID NO: 7843 - DNA, 3760 bp, Zea Mays
gtgaaaattgtgttttcggtatttgaaacctaggggatatcatgactatcgcaaccggccaacaggaaatttcagccgggcatccccaattcatcttccccacgccgcgtccgcgtccggaccggacaccggcggcacctcctcctgcctccacttcaccagttcatcgggcgccggaagtgggagccatccgccgccgccacatatctgtcctcttcggcgctgactggggctcagccgctcgaagctccatcccgcctcccgtcttcgccgccgctcgtcagatccctcgacgcgacggtcgtgtcttgactctccaccacgcgactccacccagctcttctccacgcgactgcagagcgacgatcggaggcgccgccatcgcacaatccaccgtcgctgcctgctcctgtgatactctcacaagatccgctgctacatccatttcttcttcttccacgttgctgggaggagacgggcgcaaggatttgtgcgagggagaaagaaagggaaggaaaggggataggacgggaggaggagcacgactgcttaccacttattcttcccagcccggctaccatcactattcgcctgattggatgactgtatccagacgcgcaggctcgggtggccctggctgacccgatacggcaattttctgcgcaaccaaacatgagctcagatagagtcaatgcatatggtggttcaagacgagacgtatatggtttcattccaatgcagaagctgaggcgcaataacagtacctggagatttggtaacatacttatagtcttagctatgaatatggattccacagctcttcaatatgaaaaccaaaaattggtgcaacaactggaggtacagaagtccgaaatgcatgcattggagcgcaagttcaaggagcttagtgatgatcaatgttcttatgacaagactctgatttctttgaataaactgtggaatcagctgattgatgatttggttctgcttggagtacgggctggtggggatttggataatttgcaagcacttgaccatgaagagttatcagaagaatctttggagtcgtgtccttccgaggagatatttctcttaaggctcttgaagacaaacaacatcagagataatagtgacactagcttgttgaaatttgttgaagaagctcttgcttttcggtcttcagcaactgttactttgatgaagtccctgcaagagactatttcttcgcagcaagctagaagtgagtctttgtctttagctttgaatggacaaaagtcaaatgaagatgttattgttgcccttcgaaatcataatgattgcttgaaagaggtggcagagaatgcgagtcaagccatctctattatcaacgagaagcacaaaaggtatcttgatgagattgaggcttttaaaagcaaccattcaagggagctacaggaaatcaagcgtatttcaggtgagctagaggaaagcattgcagagcttgaggaaagtcaaaggaagttggttgtgctccagttgcagaggcatggttctgtaatggatgcatctggggcaaatgctgtgaatggtggtatttctactcataaatcttcagataaaagtatgagctggcaagacctcaaagatgctgttgacgcagctaagaccctcgcaggaaaccgtctattagaactccatcagactcaagaggataatctgatactatccaaggagctgggagatcttgaggggcaattgaaagatgagaagtatgtcttggtatccaaaccgtacatgattcttaatgataaactacaacatttgaatgctgagatagagcgttatagagggttggttgaagttttacagaatgacaaggaccagctcatgcaaagggagaaagaaatttctgcaaaagcagaatcgctcgacagtgttaaacaaaccattatcacatatgagaaaaaaattgaagaactggaaactcaaattcagatactcttttctgaaaagaatgatctcgaaaccaaggttgaggagactttgcaagattcaggtaagaaagacttcaagaatgagattcatgttatggctgcagcactctccaatgaactgggtatgatggagaatcagttgagtcgatcaaaggatgcagcttctgaagcacttgcattgcgtgagcaagctgaatcattaagatcattggtagctaaaaagattgaggaacacaagaagatttcggataaatacaactcacaagtaattgagatcaagtccctcaaggcattggttgaggagttggagcaggaaaagcaggagctggagtttattgcagatatgtacgtgaaagaaagttctgagtctaggacaattgctgatattgaagaatcagaaacccgagctcgcaatcaggctgaatatttgaggagcaatctagaggagcatagtcttgagcttcgggttaaagcagcaaatgaagctgaagctgcatgccagcaaaggctttcctttgctgaagtggaactagaagagttaaggaccaaagtagatgcatctgaaagagatgttgtggaacttaaggaggcaataagaattaaagaggctgaaggagacgcctatatttctgatatcgagacagttggtcaagcatatgaagacatgcaaacgcaaaatcagcatcttcttcaacagcttactgatagagatgactttaacataaagctagtatcagatagtgtgaagatgaaacaagcttgtagttcccttctctctgacaagcttatgctagagaagcaactccagcaagttaacacttcactggagtcatctaaactgaaaattgcccgtggcgaagagcagatgaagacttgtgtagcgcaagctataaaaacttcagctgaaaacagacatcttactattagcctggaaaggattgcgctggagttatccaacacagataaggaactcaagtggcttcggtcctccgttggatcctctgagaaagaatacgagcaaactcagcaaaagatatctgagctgagagcgttactggagcacgagaggagtgagaggcggcggcttgaagaacaatatgaagaggtgaaaaatgaagttatggagctgacctctgagactgaagagactactgtccggaaacttgaggatgaaataaaagaatgcaagggtattctcaagtgtggtgtatgctttgaccggcctaaagaggttgtgatcaccaaatgtttccacctattctgctcgctatgcatccagagaaacctcgagattcgccaccgaaaatgtcctggctgtggaaccccattcggacaaaacgacgttagggaggtgaagatatgaacctcaccaaagtgacagtgacaaaaccgacttgcgtgtgaacagcagcaacaaactcccttgtgaatatcgtctgttatgttggcgaacatctagatctaacttgctttattactgggattaaaattaggataagaactggaagaagtgaagttcctaatttatttgctatcgtgtgtgctatgtatgattacccttggcagcgagtggtgtatctgctgggtgtcaatatgctcgaattctagctcctccctgctagcgggtgcatgccagttttattaaggctattccatgtacatggtgtcacactctttaatacataccacataggatgaaaatctgatgtgacatgtgattgaaacatagggagacaccactcatgcaccagattatagacattgaaatctgaaccatctaaatgaac

SEQ ID NO: 7844 - DNA, 3511 bp, Zea Mays
gtgaaaattgtgttttcggtatttgaaacctaggggatatcatgactatcgcaaccggccaacaggaaatttcagccgggcatccccaattcatcttccccacgccgcgtccgcgtccggaccggacaccggcggcacctcctcctgcctccacttcaccagttcatcgggcgccggaagtgggagccatccgccgccgccacatatctgtcctcttcggcgctgactggggctcagccgctcgaagctccatcccgcctcccgtcttcgccgccgctcgtcagatccctcgacgcgacggtcgtgtcttgactctccaccacgcgactccacccagctcttctccacgcgactgcagagcgacgatcggaggcgccgccatcgcacaatccaccgtcgctgcctgctcctgtgatactctcacaagatccgctgctacatccatttcttcttcttccacgttgctgggaggagacgggcgcaaggatttgtgcgagggagaaagaaagggaaggaaaggggataggacgggaggaggagcacgactgcttaccacttattcttcccagcccgatggattccacagctcttcaatatgaaaaccaaaaattggtgcaacaactggaggtacagaagtccgaaatgcatgcattggagcgcaagttcaaggagcttagtgatgatcaatgttcttatgacaagactctgatttctttgaataaactgtggaatcagctgattgatgatttggttctgcttggagtacgggctggtggggatttggataatttgcaagcacttgaccatgaagagttatcagaagaatctttggagtcgtgtccttccgaggagatatttctcttaaggctcttgaagacaaacaacatcagagataatagtgacactagcttgttgaaatttgttgaagaagctcttgcttttcggtcttcagcaactgttactttgatgaagtccctgcaagagactatttcttcgcagcaagctagaagtgagtctttgtctttagctttgaatggacaaaagtcaaatgaagatgttattgttgcccttcgaaatcataatgattgcttgaaagaggtggcagagaatgcgagtcaagccatctctattatcaacgagaagcacaaaaggtatcttgatgagattgaggcttttaaaagcaaccattcaagggagctacaggaaatcaagcgtatttcaggtgagctagaggaaagcattgcagagcttgaggaaagtcaaaggaagttggttgtgctccagttgcagaggcatggttctgtaatggatgcatctggggcaaatgctgtgaatggtggtatttctactcataaatcttcagataaaagtatgagctggcaagacctcaaagatgctgttgacgcagctaagaccctcgcaggaaaccgtctattagaactccatcagactcaagaggataatctgatactatccaaggagctgggagatcttgaggggcaattgaaagatgagaagtatgtcttggtatccaaaccgtacatgattcttaatgataaactacaacatttgaatgctgagatagagcgttatagagggttggttgaagttttacagaatgacaaggaccagctcatgcaaagggagaaagaaatttctgcaaaagcagaatcgctcgacagtgttaaacaaaccattatcacatatgagaaaaaaattgaagaactggaaactcaaattcagatactcttttctgaaaagaatgatctcgaaaccaaggttgaggagactttgcaagattcaggtaagaaagacttcaagaatgagattcatgttatggctgcagcactctccaatgaactgggtatgatggagaatcagttgagtcgatcaaaggatgcagcttctgaagcacttgcattgcgtgagcaagctgaatcattaagatcattggtagctaaaaagattgaggaacacaagaagatttcggataaatacaactcacaagtaattgagatcaagtccctcaaggcattggaaaagcaggagctggagtttattgcagatatgtacgtgaaagaaagttctgagtctaggacaattgctgatattgaagaatcagaaacccgagctcgcaatcaggctgaatatttgaggagcaatctagaggagcatagtcttgagcttcgggttaaagcagcaaatgaagctgaagctgcatgccagcaaaggctttcctttgctgaagtggaactagaagagttaaggaccaaagtagatgcatctgaaagagatgttgtggaacttaaggaggcaataagaattaaagaggctgaaggagacgcctatatttctgatatcgagacagttggtcaagcatatgaagacatgcaaacgcaaaatcagcatcttcttcaacagcttactgatagagatgactttaacataaagctagtatcagatagtgtgaagatgaaacaagcttgtagttcccttctctctgacaagcttatgctagagaagcaactccagcaagttaacacttcactggagtcatctaaactgaaaattgcccgtggcgaagagcagatgaagacttgtgtagcgcaagctataaaaacttcagctgaaaacagacatcttactattagcctggaaaggattgcgctggagttatccaacacagataaggaactcaagtggcttcggtcctccgttggatcctctgagaaagaatacgagcaaactcagcaaaagatatctgagctgagagcgttactggagcacgagaggagtgagaggcggcggcttgaagaacaatatgaagaggtgaaaaatgaagttatggagctgacctctgagactgaagagactactgtccggaaacttgaggatgaaataaaagaatgcaagggtattctcaagtgtggtgtatgctttgaccggcctaaagaggttgtgatcaccaaatgtttccacctattctgctcgctatgcatccagagaaacctcgagattcgccaccgaaaatgtcctggctgtggaaccccattcggacaaaacgacgttagggaggtgaagatatgaacctcaccaaagtgacagtgacaaaaccgacttgcgtgtgaacagcagcaacaaactcccttgtgaatatcgtctgttatgttggcgaacatctagatctaacttgctttattactgggattaaaattaggataagaactggaagaagtgaagttcctaatttatttgctatcgtgtgtgctatgtatgattacccttggcagcgagtggtgtatctgctgggtgtcaatatgctcgaattctagctcctccctgctagcgggtgcatgccagttttattaaggctattccatgtacatggtgtcacactctttaatacataccacataggatgaaaatctgatgtgacatgtgattgaaacatagggagacaccactcatgcaccagattatagacattgaaatctgaaccatctaaatgaac

SEQ ID NO: 7845 - DNA, 3695 bp, Zea Mays
gtgaaaattgtgttttcggtatttgaaacctaggggatatcatgactatcgcaaccggccaacaggaaatttcagccgggcatccccaattcatcttccccacgccgcgtccgcgtccggaccggacaccggcggcacctcctcctgcctccacttcaccagttcatcgggcgccggaagtgggagccatccgccgccgccacatatctgtcctcttcggcgctgactggggctcagccgctcgaagctccatcccgcctcccgtcttcgccgccgctcgatccctcgacgcgacggtcgtgtcttgactctccaccacgcgactccacccagctcttctccacgcgactgcagagcgacgatcggaggcgccgccatcgcacaatccaccgtcgctgcctgctcctggtgtgtcctctctcctctctcctctccctctccatctccgtctcaaatcttttacccaaaccctaaccccgactgctatctattcttgtaagtgatactctcacaagatccgctgctacatccatttcttcttcttccacgttgctgggaggagacgggcgcaaggatttgtgcgagggagaaagaaagggaaggaaaggggataggacgggaggaggagcacgactgcttaccacttattcttcccagcccgtttatttttacagatggattccacagctcttcaatatgaaaaccaaaaattggtgcaacaactggaggtacagaagtccgaaatgcatgcattggagcgcaagttcaaggagcttagtgatgatcaatgttcttatgacaagactctgatttctttgaataaactgtggaatcagctgattgatgatttggttctgcttggagtacgggctggtggggatttggataatttgcaagcacttgaccatgaagagttatcagaagaatctttggagtcgtgtccttccgaggagatatttctcttaaggctcttgaagacaaacaacatcagagataatagtgacactagcttgttgaaatttgttgaagaagctcttgcttttcggtcttcagcaactgttactttgatgaagtccctgcaagagactatttcttcgcagcaagctagaagtgagtctttgtctttagctttgaatggacaaaagtcaaatgaagatgttattgttgcccttcgaaatcataatgattgcttgaaagaggtggcagagaatgcgagtcaagccatctctattatcaacgagaagcacaaaaggtatcttgatgagattgaggcttttaaaagcaaccattcaagggagctacaggaaatcaagcgtatttcaggtgagctagaggaaagcattgcagagcttgaggaaagtcaaaggaagttggttgtgctccagttgcagaggcatggttctgtaatggatgcatctggggcaaatgctgtgaatggtggtatttctactcataaatcttcagataaaagtatgagctggcaagacctcaaagatgctgttgacgcagctaagaccctcgcaggaaaccgtctattagaactccatcagactcaagaggataatctgatactatccaaggagctgggagatcttgaggggcaattgaaagatgagaagtatgtcttggtatccaaaccgtacatgattcttaatgataaactacaacatttgaatgctgagatagagcgttatagagggttggttgaagttttacaggtttggtttctgtcttctgttatactgctttgtattgcatttgctttggtttttccgagcttttcttcattgtgtgaatttagaatgacaaggaccagctcatgcaaagggagaaagaaatttctgcaaaagcagaatcgctcgacagtgttaaacaaaccattatcacatatgagaaaaaaattgaagaactggaaactcaaattcagatactcttttctgaaaagaatgatctcgaaaccaaggttgaggagactttgcaagattcaggtaagaaagacttcaagaatgagattcatgttatggctgcagcactctccaatgaactgggtatgatggagaatcagttgagtcgatcaaaggatgcagcttctgaagcacttgcattgcgtgagcaagctgaatcattaagatcattggtagctaaaaagattgaggaacacaagaagatttcggataaatacaactcacaagtaattgagatcaagtccctcaaggcattggaaaagcaggagctggagtttattgcagatatgtacgtgaaagaaagttctgagtctaggacaattgctgatattgaagaatcagaaacccgagctcgcaatcaggctgaatatttgaggagcaatctagaggagcatagtcttgagcttcgggttaaagcagcaaatgaagctgaagctgcatgccagcaaaggctttcctttgctgaagtggaactagaagagttaaggaccaaagtagatgcatctgaaagagatgttgtggaacttaaggaggcaataagaattaaagaggctgaaggagacgcctatatttctgatatcgagacagttggtcaagcatatgaagacatgcaaacgcaaaatcagcatcttcttcaacagcttactgatagagatgactttaacataaagctagtatcagatagtgtgaagatgaaacaagcttgtagttcccttctctctgacaagcttatgctagagaagcaactccagcaagttaacacttcactggagtcatctaaactgaaaattgcccgtggcgaagagcagatgaagacttgtgtagcgcaagctataaaaacttcagctgaaaacagacatcttactattagcctggaaaggattgcgctggagttatccaacacagataaggaactcaagtggcttcggtcctccgttggatcctctgagaaagaatacgagcaaactcagcaaaagatatctgagctgagagcgttactggagcacgagaggagtgagaggcggcggcttgaagaacaatatgaagaggtgaaaaatgaagttatggagctgacctctgagactgaagagactactgtccggaaacttgaggatgaaataaaagaatgcaagggtattctcaagtgtggtgtatgctttgaccggcctaaagaggttgtgatcaccaaatgtttccacctattctgctcgctatgcatccagagaaacctcgagattcgccaccgaaaatgtcctggctgtggaaccccattcggacaaaacgacgttagggaggtgaagatatgaacctcaccaaagtgacagtgacaaaaccgacttgcgtgtgaacagcagcaacaaactcccttgtgaatatcgtctgttatgttggcgaacatctagatctaacttgctttattactgggattaaaattaggataagaactggaagaagtgaagttcctaatttatttgctatcgtgtgtgctatgtatgattacccttggcagcgagtggtgtatctgctgggtgtcaatatgctcgaattctagctcctccctgctagcgggtgcatgccagttttattaaggctattccatgtacatggtgtcacactctttaatacataccacataggatgaaaatctgatgtgacatgtgattgaaacatagggagacaccactcatgcaccagattatagacattgaaatctgaaccatctaaatgaac

SEQ ID NO: 7846 - DNA, 3781 bp, Zea Mays
tttcagacatgtttggtttgtggctaactatgccatactttgcctaaggttagtcatttgaattgaagaactaaccttaggcacaaaagtgtggcaaaatgtggcaaattagtcaacgaaccaaacaagcctttcatccacagagaatggtgccgtgaaaattgtgttttcggtatttgaaacctaggggatatcatgactatcgcaaccggccaacaggaaatttcagccgggcatccccaattcatcttccccacgccgcgtccgcgtccggaccggacaccggcggcacctcctcctgcctccacttcaccagttcatcgggcgccggaagtgggagccatccgccgccgccacatatctgtcctcttcggcgctgactggggctcagccgctcgaagctccatcccgcctcccgtcttcgccgccgctcgtcagatccctcgacgcgacggtcgtgtcttgactctccaccacgcgactccacccagctcttctccacgcgactgcagagcgacgatcggaggcgccgccatcgcacaatccaccgtcgctgcctgctcctggtgtgtcctctctcctctctcctctccctctccatctccgtctcaaatcttttacccaaaccctaaccccgactgctatctattcttgtaagtgatactctcacaagatccgctgctacatccatttcttcttcttccacgttgctgggaggagacgggcgcaaggatttgtgcgagggagaaagaaagggaaggaaaggggataggacgggaggaggagcacgactgcttaccacttattcttcccagcccgatggattccacagctcttcaatatgaaaaccaaaaattggtgcaacaactggaggtacagaagtccgaaatgcatgcattggagcgcaagttcaaggagcttagtgatgatcaatgttcttatgacaagactctgatttctttgaataaactgtggaatcagctgattgatgatttggttctgcttggagtacgggctggtggggatttggataatttgcaagcacttgaccatgaagagttatcagaagaatctttggagtcgtgtccttccgaggagatatttctcttaaggctcttgaagacaaacaacatcagagataatagtgacactagcttgttgaaatttgttgaagaagctcttgcttttcggtcttcagcaactgttactttgatgaagtccctgcaagagactatttcttcgcagcaagctagaagtgagtctttgtctttagctttgaatggacaaaagtcaaatgaagatgttattgttgcccttcgaaatcataatgattgcttgaaagaggtggcagagaatgcgagtcaagccatctctattatcaacgagaagcacaaaaggtatcttgatgagattgaggcttttaaaagcaaccattcaagggagctacaggaaatcaagcgtatttcaggtgagctagaggaaagcattgcagagcttgaggaaagtcaaaggaagttggttgtgctccagttgcagaggcatggttctgtaatggatgcatctggggcaaatgctgtgaatggtggtatttctactcataaatcttcagataaaagtatgagctggcaagacctcaaagatgctgttgacgcagctaagaccctcgcaggaaaccgtctattagaactccatcagactcaagaggataatctgatactatccaaggagctgggagatcttgaggggcaattgaaagatgagaagtatgtcttggtatccaaaccgtacatgattcttaatgataaactacaacatttgaatgctgagatagagcgttatagagggttggttgaagttttacaggtttggtttctgtcttctgttatactgctttgtattgcatttgctttggtttttccgagcttttcttcattgtgtgaatttagaatgacaaggaccagctcatgcaaagggagaaagaaatttctgcaaaagcagaatcgctcgacagtgttaaacaaaccattatcacatatgagaaaaaaattgaagaactggaaactcaaattcagatactcttttctgaaaagaatgatctcgaaaccaaggttgaggagactttgcaagattcaggtaagaaagacttcaagaatgagattcatgttatggctgcagcactctccaatgaactgggtatgatggagaatcagttgagtcgatcaaaggatgcagcttctgaagcacttgcattgcgtgagcaagctgaatcattaagatcattggtagctaaaaagattgaggaacacaagaagatttcggataaatacaactcacaagtaattgagatcaagtccctcaaggcattggacaattgctgatattgaagaatcagaaacccgagctcgcaatcaggctgaatatttgaggagcaatctagaggagcatagtcttgagcttcgggttaaagcagcaaatgaagctgaagctgcatgccagcaaaggctttcctttgctgaagtggaactagaagagttaaggaccaaagtagatgcatctgaaagagatgttgtggaacttaaggaggcaataagaattaaagaggctgaaggagacgcctatatttctgatatcgagacagttggtcaagcatatgaagacatgcaaacgcaaaatcagcatcttcttcaacagcttactgatagagatgactttaacataaagctagtatcagatagtgtgaagatgaaacaagcttgtagttcccttctctctgacaagcttatgctagagaagcaactccagcaagttaacacttcactggagtcatctaaactgaaaattgcccgtggcgaagagcagatgaagacttgtgtagcgcaagctataaaaacttcagctgaaaacagacatcttactattagcctggaaaggattgcgctggagttatccaacacagataaggaactcaagtggcttcggtcctccgttggatcctctgagaaagaatacgagcaaactcagcaaaagatatctgagctgagagcgttactggagcacgagaggagtgagaggcggcggcttgaagaacaatatgaagaggtgaaaaatgaagttatggagctgacctctgagactgaagagactactgtccggaaacttgaggatgaaataaaagaatgcaagggtattctcaagtgtggtgtatgctttgaccggcctaaagaggttgtgatcaccaaatgtttccacctattctgctcgctatgcatccagagaaacctcgagattcgccaccgaaaatgtcctggctgtggaaccccattcggacaaaacgacgttagggaggtgaagatatgaacctcaccaaagtgacagtgacaaaaccgacttgcgtgtgaacagcagcaacaaactcccttgtgaatatcgtctgttatgttggcgaacatctagatctaacttgctttattactgggattaaaattaggataagaactggaagaagtgaagttcctaatttatttgctatcgtgtgtgctatgtatgattacccttggcagcgagtggtgtatctgctgggtgtcaatatgctcgaattctagctcctccctgctagcgggtgcatgccagttttattaaggctattccatgtacatggtgtcacactctttaatacataccacataggatgaaaatctgatgtgacatgtgattgaaacatagggagacaccactcatgcaccagattatagacattgaaatctgaaccatctaaatgaac

SEQ ID NO: 7847 - DNA, 3706 bp, Zea Mays
catccgcaaaactgccttgcggatttcagacatgtttggtttgtggctaactatgccatactttgcctaaggttagtcatttgaattgaagaactaaccttaggcacaaaagtgtggcaaaatgtggcaaattagtcaacgaaccaaacaagcctttcatccacagagaatggtgccgtgaaaattgtgttttcggtatttgaaacctaggggatatcatgactatcgcaaccggccaacaggaaatttcagccgggcatccccaattcatcttccccacgccgcgtccgcgtccggaccggacaccggcggcacctcctcctgcctccacttcaccagttcatcgggcgccggaagtgggagccatccgccgccgccacatatctgtcctcttcggcgctgactggggctcagccgctcgaagctccatcccgcctcccgtcttcgccgccgctcgtcagatccctcgacgcgacggtcgtgtcttgactctccaccacgcgactccacccagctcttctccacgcgactgcagagcgacgatcggaggcgccgccatcgcacaatccaccgtcgctgcctgctcctgtgatactctcacaagatccgctgctacatccatttcttcttcttccacgttgctgggaggagacgggcgcaaggatttgtgcgagggagaaagaaagggaaggaaaggggataggacgggaggaggagcacgactgcttaccacttattcttcccagcccgatggattccacagctcttcaatatgaaaaccaaaaattggtgcaacaactggaggtacagaagtccgaaatgcatgcattggagcgcaagttcaaggagcttagtgatgatcaatgttcttatgacaagactctgatttctttgaataaactgtggaatcagctgattgatgatttggttctgcttggagtacgggctggtggggatttggataatttgcaagcacttgaccatgaagagttatcagaagaatctttggagtcgtgtccttccgaggagatatttctcttaaggctcttgaagacaaacaacatcagagataatagtgacactagcttgttgaaatttgttgaagaagctcttgcttttcggtcttcagcaactgttactttgatgaagtccctgcaagagactatttcttcgcagcaagctagaagtgagtctttgtctttagctttgaatggacaaaagtcaaatgaagatgttattgttgcccttcgaaatcataatgattgcttgaaagaggtggcagagaatgcgagtcaagccatctctattatcaacgagaagcacaaaaggtatcttgatgagattgaggcttttaaaagcaaccattcaagggagctacaggaaatcaagcgtatttcaggtgagctagaggaaagcattgcagagcttgaggaaagtcaaaggaagttggttgtgctccagttgcagaggcatggttctgtaatggatgcatctggggcaaatgctgtgaatggtggtatttctactcataaatcttcagataaaagtatgagctggcaagacctcaaagatgctgttgacgcagctaagaccctcgcaggaaaccgtctattagaactccatcagactcaagaggataatctgatactatccaaggagctgggagatcttgaggggcaattgaaagatgagaagtatgtcttggtatccaaaccgtacatgattcttaatgataaactacaacatttgaatgctgagatagagcgttatagagggttggttgaagttttacagaatgacaaggaccagctcatgcaaagggagaaagaaatttctgcaaaagcagaatcgctcgacagtgttaaacaaaccattatcacatatgagaaaaaaattgaagaactggaaactcaaattcagatactcttttctgaaaagaatgatctcgaaaccaaggttgaggagactttgcaagattcaggtaagaaagacttcaagaatgagattcatgttatggctgcagcactctccaatgaactgggtatgatggagaatcagttgagtcgatcaaaggatgcagcttctgaagcacttgcattgcgtgagcaagctgaatcattaagatcattggtagctaaaaagattgaggaacacaagaagatttcggataaatacaactcacaagtaattgagatcaagtccctcaaggcattggttgaggagttggagcaggaaaagcaggagctggagtttattgcagatatgtacgtgaaagaaagttctgagtctaggacaattgctgatattgaagaatcagaaacccgagctcgcaatcaggctgaatatttgaggagcaatctagaggagcatagtcttgagcttcgggttaaagcagcaaatgaagctgaagctgcatgccagcaaaggctttcctttgctgaagtggaactagaagagttaaggaccaaagtagatgcatctgaaagagatgttgtggaacttaaggaggcaataagaattaaagaggctgaaggagacgcctatatttctgatatcgagacagttggtcaagcatatgaagacatgcaaacgcaaaatcagcatcttcttcaacagcttactgatagagatgactttaacataaagctagtatcagatagtgtgaagatgaaacaagcttgtagttcccttctctctgacaagcttatgctagagaagcaactccagcaagttaacacttcactggagtcatctaaactgaaaattgcccgtggcgaagagcagatgaagacttgtgtagcgcaagctataaaaacttcagctgaaaacagacatcttactattagcctggaaaggattgcgctggagttatccaacacagataaggaactcaagtggcttcggtcctccgttggatcctctgagaaagaatacgagcaaactcagcaaaagatatctgagctgagagcgttactggagcacgagaggagtgagaggcggcggcttgaagaacaatatgaagaggtgaaaaatgaagttatggagctgacctctgagactgaagagactactgtccggaaacttgaggatgaaataaaagaatgcaagggtattctcaagtgtggtgtatgctttgaccggcctaaagaggttgtgatcaccaaatgtttccacctattctgctcgctatgcatccagagaaacctcgagattcgccaccgaaaatgtcctggctgtggaaccccattcggacaaaacgacgttagggaggtgaagatatgaacctcaccaaagtgacagtgacaaaaccgacttgcgtgtgaacagcagcaacaaactcccttgtgaatatcgtctgttatgttggcgaacatctagatctaacttgctttattactgggattaaaattaggataagaactggaagaagtgaagttcctaatttatttgctatcgtgtgtgctatgtatgattacccttggcagcgagtggtgtatctgctgggtgtcaatatgctcgaattctagctcctccctgctagcgggtgcatgccagttttattaaggctattccatgtacatggtgtcacactctttaatacataccacataggatgaaaatctgatgtgacatgtgattgaaacatagggagacaccactcatgcaccagattatagacattgaaatctgaaccatctaaatgaac

SEQ ID NO: 7848 - DNA, 1132 bp, Zea Mays
gtgaaaattgtgttttcggtatttgaaacctaggggatatcatgactatcgcaaccggccaacaggaaatttcagccgggcatccccaattcatcttccccacgccgcgtccgcgtccggaccggacaccggcggcacctcctcctgcctccacttcaccagttcatcgggcgccggaagtgggagccatccgccgccgccacatatctgtcctcttcggcgctgactggggctcagccgctcgaagctccatcccgcctcccgtcttcgccgccgctcgatccctcgacgcgacggtcgtgtcttgactctccaccacgcgactccacccagctcttctccacgcgactgcagagcgacgatcggaggcgccgccatcgcacaatccaccgtcgctgcctgctcctgtgatactctcacaagatccgctgctacatccatttcttcttcttccacgttgctgggaggagacgggcgcaaggatttgtgcgagggagaaagaaagggaaggaaaggggataggacgggaggaggagcacgactgcttaccacttattcttcccagcccggtaccgtagatttctcttgttctgtgtagtgtgctttctaatttgtcgtatatatataaatatgtggaaatatattataaataatttcctttgaatttgacttgtacaagtttctataatttttacatgtaatgcatcagttatatgttttccatatctgcatgtgcacaggagtagcgccatttgccaacagcaacaatacgcgcttgtagcaatttcggtcggtagtgaacgcaataaacaaacaccgttaggggatctaatggcgctgttcaaataaaacaaacaaatccaggtaatcattacactgtaaaccgatagcacctgcagcccattccattaccattcctattaactagagtgaaccaaacactaccttgatgtattcatcttgatgtattcatgggcatggtaacaaaatttcagaacctacaagtctgtctataagcgtctacagttcattacgacctgactcggccaccgctcgtatctccatctcaggatgtatgatgggcattttatcaataatgttccagtagcgtctttcaaaaagagaaaaaaaa

SEQ ID NO: 7849 - DNA, 1725 bp, Zea Mays
ttgaccagtcccagccgaactcccttccagtccaaccgctgctcctggctcgcccgtccgtgcggcacttcgtctatagccgctgtccgccgtcgagtctagctacccatcgcgaagtccctgctgtcagcctccgcacatgtcctaaactgtcatagccagtttgcctccatctcgtggaggcgttgcgctgccgtcgagtcctgatatcgatctggttgtcatcgaagtgaagcttagtttaatgctcgccaaggtttcgatcaaagattttattcggagactgtcgacgttctcgcaagttttaaatcggatttaatggacggtaagtggcttcgttattccagtcgactaaatatgatatttattagactacctgaatcgtttacggtgatttgatcggtagtcgtacatgttgctgatcccttgcgttataatagttattacgttctaggtagtttgtttgggttattagtttcgagtaatttaatattagtacggtatttaacatgtaatcgacgaaaaatccggatccgtattcgttaatcaaagtagcgaatctaagctaaatttattactggcgcgcaagttgttagccgaattgttagatagattaaataaatatgtgtgatgcgaaataaaattaaattagtttttgtaagcaaagtgatataatttataaagcaagagataaatttagcatttaattaagtagttgatgagttatgtttaggctaattatgtttacaagtctatggtttgttgttcgtgatgtttgtgttagattcgtataatttagagaagcgtaattattacgcgtagtcgtatatcgataactagtatttccgtatgaacttgtacaacgcctcgccgctaggtgtttcgctatcgcatagcactatttaggtgtgtgatattcttgtcgatatgcattcatgtgcataatgcatttcattcaggtacgttaattaatcgcgtgatacggaagacgacccaagtcgacaccaagcgtgggctaatccgcaggatgaagctaatggaccaacctgaagatggttaaatcaagcaagtgctcggtcgagagatactcgtcaagtggacatcgcctaacaaacactaacctttggttactcaggcaaaccccggtgcatttgccacctcccttgatattttaaaatctttctcacttgattgctgcattaggtaataggagttgattgataaaacaattcctgcattaccttccttgaatttgattaccttccttgatcacctgttttacaaaagatttttgatgcttagcctttctttagaaaaacaaaatgttttgtttttacaaaatatgatgtggcaaaagtgggtgggatgttttcgaaaataaaacttgatggtggatctgtcaaaggccttgatgggttcaacatcggaaaagatgtacctctgccaggtaccaaactttgggttgaaatgattaagctgagaccggacgggtgacttgcacgagaaaggagtctcggtgtagtgtctccgtctgagtcgattaaggaccttgtcgatgtaggcctgctgaccgaggaccctttaactgatcacatgcctcgtcatgggtaagccttgcctcgggcaggctaaggccagaataagataacacgaaatgggcgtggagcggtggcgagagtagcgtgtaccctccgtggcaagaggctggacggtggtgtatctgtg

SEQ ID NO: 7850 - DNA, 976 bp, Zea Mays
cccgtccgtgcggcacttcgtctatagccgctgtccgccgtcgagtctagctacccatcgcgaagtccctgctgtcagcctccgcacatgtcctaaactgtcatagccagtttgcctccatctcgtggaggcgttgcgctgccgtcgagtcctgatatcgatctggttgtcatcgaagtgaagcttagtttaatgctcgccaaggtttcgatcaaagattttattcggagactgtcgacgttctcgcaagttttaaatcggatttaatggacggtacgttaattaatcgcgtgatacggaagacgacccaagtcgacaccaagcgtgggctaatccgcaggatgaagctaatggaccaacctgaagatggttaaatcaagcaagtgctcggtcgagagatactcgtcaagtggacatcgcctaacaaacactaacctttggttactcaggcaaaccccggtgcatttgccacctcccttgatattttaaaatctttctcacttgattgctgcattaggtaataggagttgattgataaaacaattcctgcattaccttccttgaatttgattaccttccttgatcacctgttttacaaaagatttttgatgcttagcctttctttagaaaaacaaaatgttttgtttttacaaaatatgatgtggcaaaagtgggtgggatgttttcgaaaataaaacttgatggtggatctgtcaaaggccttgatgggttcaacatcggaaaagatgtacctctgccaggtaccaaactttgggttgaaatgattaagctgagaccggacgggtgacttgcacgagaaaggagtctcggtgtagtgtctccgtctgagtcgattaaggaccttgtcgatgtaggcctgctgaccgaggaccctttaactgatcacatgcctcgtcatgggtaagccttgcctcgggcaggctaaggccagaataagataacacgaaatgggcgt

SEQ ID NO: 7851 - DNA, 2076 bp, Zea Mays
cagagtacaattttttgccctagatctttattgccatatttcagtattggatcctttgaaggttcttgggatcgcacaattgagatttgaagatgccgaagtgagatcagatgaaatcatcaaatagaataggatactgttgaggataatggttcagcgatccaggaagtccctcgtgaaaaagtgaatttctcagaagaacttttgagcagcacatcatttgctcgccaattagtggatcagatgactctagcaaaggcatatgtcatccttgcaaaagagcaaggtaatcttcagcttgcatgggagcttagttcacagataaggaattgtcaaagattgctatctgaaggggcagttaatggaagagcaatcactaaagatgaagcccatcctataataagccggctagcacggttaatatacaaggctcaggactctcactatgatatcagcacaacaatagtgacattgaagaaccatgccttggcactagaggagcgtgcaaaggcagcaattgttcagagtgctgagtttggccagttagcagcagaatccttccccaaaaatctgcactgtctaactgtgaaactgacagaggagtggcttcggaacccgaagcataggagtcactcagaggagaaccggaattccacacgattggtggataataatctgtaccatttctgtatattctctgataatgtgctggccacttcagttgttgtcaattctacggtctccaatgcaaatcatcctcaacagcttgtgtttcatgtggtcaccgacagaatccattttggcgcaatgtcaacttggttcctcataaatgacttcaaaggttgtactgttgaagtccgctgcatagatgagttctcgtggttgaatgcttcttcatctcctcttgtcaggcagctatctgaggcggaaactcagggttactattactcagctggttccaagaatcctgaaagagaaacaaaattccataatccaaagtttgtttctctactgaaccatttacgtttctacattcctcagatacttcccaacttggagaaggtggtgtttcttgatgatgatgttgtggtgcaaaaggacctgactcagctgttctccattgagttgcatggcaatgtcattggagcagtggaaacctgtttggagtcgtttcatcgatacagcaagtatctaaatttttcgcaccctaccatcagctccaagattgatccacatacttgtggatgggcttttggaatgaacatttttgacttgatagcctggaggaaggcgaacgccacatcgttgtaccattattggcaagagcaaaattcagatctattgctctggagaacgggaattcttcctgcaggccttttgacattttacggcctggtggagcccctagaccgcagatggcatgtcttgggtcttgggtatgatgtagacatagatgaccgtttgattgagagtgctgctgttgtgcactataacggaaacatgaaaccgtggctgaagctggctattcgccgttacaagtatatatgggagcggtatgtgaatatctcacatccgtatgttagagagtgtatgttgcaatagaaagcctgcaaatctctgtatgttcttggatggtgttgaagctgtttcctcacacgaggctgctttcgagcacattgtatgagggaaaggttcagaggtagtagaatatataccagtcatcaaagaagtcaactgttaagtttctttttctttttgggttgggggaagattcattttgagatgaaaataattcctttgcagagtttacatacaaatctggactgggaattttagcagtctaaccagatacatctggatagatattgtaaaagagatacagttggatcaatgagcattttttctttgagatttaggaagtgcaaactgtgagctcaactgtgcagggtcagtggtgctgcattcttttagtactatcttgttttatactggcgaagaaggttctgcctccctacttgtataagtaactgttttagtttgtgctctccatacttaaaggctctgtttggaagcgac

SEQ ID NO: 7852 - DNA, 2119 bp, Zea Mays
cttgagtatcagagtacaattttttgccctagatctttattgccatatttcagtattggatcctttgaagcaatgagtcctacatgtgatacctgcttaataaggttcttgggatcgcacaattgagatttgaagatgccgaagtgagatcagatgaaatcatcaaatagaataggatactgttgaggataatggttcagcgatccaggaagtccctcgtgaaaaagtgaatttctcagaagaacttttgagcagcacatcatttgctcgccaattagtggatcagatgactctagcaaaggcatatgtcatccttgcaaaagagcaaggtaatcttcagcttgcatgggagcttagttcacagataaggaattgtcaaagattgctatctgaaggggcagttaatggaagagcaatcactaaagatgaagcccatcctataataagccggctagcacggttaatatacaaggctcaggactctcactatgatatcagcacaacaatagtgacattgaagaaccatgccttggcactagaggagcgtgcaaaggcagcaattgttcagagtgctgagtttggccagttagcagcagaatccttccccaaaaatctgcactgtctaactgtgaaactgacagaggagtggcttcggaacccgaagcataggagtcactcagaggagaaccggaattccacacgattggtggataataatctgtaccatttctgtatattctctgataatgtgctggccacttcagttgttgtcaattctacggtctccaatgcaaatcatcctcaacagcttgtgtttcatgtggtcaccgacagaatccattttggcgcaatgtcaacttggttcctcataaatgacttcaaaggttgtactgttgaagtccgctgcatagatgagttctcgtggttgaatgcttcttcatctcctcttgtcaggcagctatctgaggcggaaactcagggttactattactcagctggttccaagaatcctgaaagagaaacaaaattccataatccaaagtttgtttctctactgaaccatttacgtttctacattcctcagatacttcccaacttggagaaggtggtgtttcttgatgatgatgttgtggtgcaaaaggacctgactcagctgttctccattgagttgcatggcaatgtcattggagcagtggaaacctgtttggagtcgtttcatcgatacagcaagtatctaaatttttcgcaccctaccatcagctccaagattgatccacatacttgtggatgggcttttggaatgaacatttttgacttgatagcctggaggaaggcgaacgccacatcgttgtaccattattggcaagagcaaaattcagatctattgctctggagaacgggaattcttcctgcaggccttttgacattttacggcctggtggagcccctagaccgcagatggcatgtcttgggtcttgggtatgatgtagacatagatgaccgtttgattgagagtgctgctgttgtgcactataacggaaacatgaaaccgtggctgaagctggctattcgccgttacaagtatatatgggagcggtatgtgaatatctcacatccgtatgttagagagtgtatgttgcaatagaaagcctgcaaatctctgtatgttcttggatggtgttgaagctgtttcctcacacgaggctgctttcgagcacattgtatgagggaaaggttcagaggtagtagaatatataccagtcatcaaagaagtcaactgttaagtttctttttctttttgggttgggggaagattcattttgagatgaaaataattcctttgcagagtttacatacaaatctggactgggaattttagcagtctaaccagatacatctggatagatattgtaaaagagatacagttggatcaatgagcattttttctttgagatttaggaagtgcaaactgtgagctcaactgtgcagggtcagtggtgctgcattcttttagtactatcttgttttatactggcgaagaaggttctgcctccctacttgtataagtaactgttttagtttgtgctctccatacttaaaggctctgtttggaagcgac

SEQ ID NO: 7853 - DNA, 2684 bp, Zea Mays
gaaagggtggcttttgctgactttcgttttacgccagcgagtgaagaactacttcctccctcccttctgccttctcccctgccccctctctcatcactctcagatctctccctccccctccctccttcccttcatctctctgaattctgcacacctcgccgtccacgcattccgcgctcgccctcgcggatccggcagccctttcttcgccgtcgttcttgcctccgctgtcctgctctcctggaggctgctgttgggtcaccagtggctggactcgaccccgcggcctccggggggtgggttcgctggatggttatcgcctcctgatccatccggaccccggatcctctgcaaaggcaccgcctttgtgggttgggttctctgcgcccatgcagaagggtttggcgcgtcggcggtgaggcagggctctggtttagttcttgcgttggactagtccggagatgcttcgtggaacggggtacgggggcggcgatgcgcggaggcgggcactgcgctcgtcgcggcggcatctgccggggtggatctggtggcttctcgggatcttcctcctcgtcgggctcatgctcttcgtcctgcaccacaaccaaaaggagcagttccggccgcccgtcgtgcaatgagtcctacatgtgatacctgcttaataaggttcttgggatcgcacaattgagatttgaagatgccgaagtgagatcagatgaaatcatcaaatagaataggatactgttgaggataatggttcagcgatccaggaagtccctcgtgaaaaagtgaatttctcagaagaacttttgagcagcacatcatttgctcgccaattagtggatcagatgactctagcaaaggcatatgtcatccttgcaaaagagcaaggtaatcttcagcttgcatgggagcttagttcacagataaggaattgtcaaagattgctatctgaaggggcagttaatggaagagcaatcactaaagatgaagcccatcctataataagccggctagcacggttaatatacaaggctcaggactctcactatgatatcagcacaacaatagtgacattgaagaaccatgccttggcactagaggagcgtgcaaaggcagcaattgttcagagtgctgagtttggccagttagcagcagaatccttccccaaaaatctgcactgtctaactgtgaaactgacagaggagtggcttcggaacccgaagcataggagtcactcagaggagaaccggaattccacacgattggtggataataatctgtaccatttctgtatattctctgataatgtgctggccacttcagttgttgtcaattctacggtctccaatgcaaatcatcctcaacagcttgtgtttcatgtggtcaccgacagaatccattttggcgcaatgtcaacttggttcctcataaatgacttcaaaggttgtactgttgaagtccgctgcatagatgagttctcgtggttgaatgcttcttcatctcctcttgtcaggcagctatctgaggcggaaactcagggttactattactcagctggttccaagaatcctgaaagagaaacaaaattccataatccaaagtttgtttctctactgaaccatttacgtttctacattcctcagatacttcccaacttggagaaggtggtgtttcttgatgatgatgttgtggtgcaaaaggacctgactcagctgttctccattgagttgcatggcaatgtcattggagcagtggaaacctgtttggagtcgtttcatcgatacagcaagtatctaaatttttcgcaccctaccatcagctccaagattgatccacatacttgtggatgggcttttggaatgaacatttttgacttgatagcctggaggaaggcgaacgccacatcgttgtaccattattggcaagagcaaaattcagatctattgctctggagaacgggaattcttcctgcaggccttttgacattttacggcctggtggagcccctagaccgcagatggcatgtcttgggtcttgggtatgatgtagacatagatgaccgtttgattgagagtgctgctgttgtgcactataacggaaacatgaaaccgtggctgaagctggctattcgccgttacaagtatatatgggagcggtatgtgaatatctcacatccgtatgttagagagtgtatgttgcaatagaaagcctgcaaatctctgtatgttcttggatggtgttgaagctgtttcctcacacgaggctgctttcgagcacattgtatgagggaaaggttcagaggtagtagaatatataccagtcatcaaagaagtcaactgttaagtttctttttctttttgggttgggggaagattcattttgagatgaaaataattcctttgcagagtttacatacaaatctggactgggaattttagcagtctaaccagatacatctggatagatattgtaaaagagatacagttggatcaatgagcattttttctttgagatttaggaagtgcaaactgtgagctcaactgtgcagggtcagtggtgctgcattcttttagtactatcttgttttatactggcgaagaaggttctgcctccctacttgtataagtaactgttttagtttgtgctctccatacttaaaggctctgtttggaagcgac

SEQ ID NO: 7854 - DNA, 2712 bp, Zea Mays
gtgaaaatgaacagagacgcatgactggaaagggtggcttttgctgactttcgttttacgccagcgagtgaagaactacttcctccctcccttctgccttctcccctgccccctctctcatcactctcagatctctccctccccctccctccttcccttcatctctctgaattctgcacacctcgccgtccacgcattccgcgctcgccctcgcggatccggcagccctttcttcgccgtcgttcttgcctccgctgtcctgctctcctggaggctgctgttgggtcaccagtggctggactcgaccccgcggcctccggggggtgggttcgctggatggttatcgcctcctgatccatccggaccccggatcctctgcaaaggcaccgcctttgtgggttgggttctctgcgcccatgcagaagggtttggcgcgtcggcggtgaggcagggctctggtttagttcttgcgttggactagtccggagatgcttcgtggaacggggtacgggggcggcgatgcgcggaggcgggcactgcgctcgtcgcggcggcatctgccggggtggatctggtggcttctcgggatcttcctcctcgtcgggctcatgctcttcgtcctgcaccacaaccaaaaggagcagttccggccgcccgtcgtgagcacgaggttttgacattatgtgcagagtatggctgggtggtaggctcttgagtatcagagtacaattttttgccctagatctttattgccatatttcagtattggatcctttgaaggataatggttcagcgatccaggaagtccctcgtgaaaaagtgaatttctcagaagaacttttgagcagcacatcatttgctcgccaattagtggatcagatgactctagcaaaggcatatgtcatccttgcaaaagagcaaggtaatcttcagcttgcatgggagcttagttcacagataaggaattgtcaaagattgctatctgaaggggcagttaatggaagagcaatcactaaagatgaagcccatcctataataagccggctagcacggttaatatacaaggctcaggactctcactatgatatcagcacaacaatagtgacattgaagaaccatgccttggcactagaggagcgtgcaaaggcagcaattgttcagagtgctgagtttggccagttagcagcagaatccttccccaaaaatctgcactgtctaactgtgaaactgacagaggagtggcttcggaacccgaagcataggagtcactcagaggagaaccggaattccacacgattggtggataataatctgtaccatttctgtatattctctgataatgtgctggccacttcagttgttgtcaattctacggtctccaatgcaaatcatcctcaacagcttgtgtttcatgtggtcaccgacagaatccattttggcgcaatgtcaacttggttcctcataaatgacttcaaaggttgtactgttgaagtccgctgcatagatgagttctcgtggttgaatgcttcttcatctcctcttgtcaggcagctatctgaggcggaaactcagggttactattactcagctggttccaagaatcctgaaagagaaacaaaattccataatccaaagtttgtttctctactgaaccatttacgtttctacattcctcagatacttcccaacttggagaaggtggtgtttcttgatgatgatgttgtggtgcaaaaggacctgactcagctgttctccattgagttgcatggcaatgtcattggagcagtggaaacctgtttggagtcgtttcatcgatacagcaagtatctaaatttttcgcaccctaccatcagctccaagattgatccacatacttgtggatgggcttttggaatgaacatttttgacttgatagcctggaggaaggcgaacgccacatcgttgtaccattattggcaagagcaaaattcagatctattgctctggagaacgggaattcttcctgcaggccttttgacattttacggcctggtggagcccctagaccgcagatggcatgtcttgggtcttgggtatgatgtagacatagatgaccgtttgattgagagtgctgctgttgtgcactataacggaaacatgaaaccgtggctgaagctggctattcgccgttacaagtatatatgggagcggtatgtgaatatctcacatccgtatgttagagagtgtatgttgcaatagaaagcctgcaaatctctgtatgttcttggatggtgttgaagctgtttcctcacacgaggctgctttcgagcacattgtatgagggaaaggttcagaggtagtagaatatataccagtcatcaaagaagtcaactgttaagtttctttttctttttgggttgggggaagattcattttgagatgaaaataattcctttgcagagtttacatacaaatctggactgggaattttagcagtctaaccagatacatctggatagatattgtaaaagagatacagttggatcaatgagcattttttctttgagatttaggaagtgcaaactgtgagctcaactgtgcagggtcagtggtgctgcattcttttagtactatcttgttttatactggcgaagaaggttctgcctccctacttgtataagtaactgttttagtttgtgctctccatacttaaaggctctgtttggaagcgac

SEQ ID NO: 7855 - DNA, 3087 bp, Zea Mays
cacgcccggccgcccgcgacctgtgctcgcctgcaccaccaattatttgaagccaacattgaagaacggcaccaacatcagaggaatcttgcaacatatgtgctaagtgctcagtgcttattttttgttctagcagatttgattagtagaaacaagtcttggtcacgcaacaagcatatgtgcagtaacacaacaaacatagaactagcgcaattagcactacctttgcttgtcatttagtatctaattttcctactgagtatgacaacagataaaaaacagctcgggcacaatgaatatgtgcagtatccaacaatgaagattattatttctttaataataattttcctacctttgttctagcagatttcttactatgtgtttcctttttaatactcccttcgtcccagtatataaggcgtaaccacctctggttcaaagaccaagaaatgcatttaattgtctctatatcactgcatcgatatacgtatgcatagagagagcacgccttatattgtgggacaagaataaaaagtggttacgccttatatcctgagacggagggagtagatgcctgaacctgaagacatattggacaagggcatggaatcagtgggcactggcactctagaaaatgatgagacacaaacacaaccatcacaatcacaaggggctactgatcaagaggtggttgaccttgacaagaattgtgcacaacatgaaaggaagaagatggcaccaagatcagatgtgtggaaccatttcaccaagatcaaagatgataaaggcattatgatagctgcaaaatgcaagtattgccatcgcaacatgaaatcggactccaagggacatagtacatctgccttgaagagacaccttcaaagttgcaagcacaatcctaacaagtttgaaaaagatggaaagcaaggatatttacaagcaatacaaggggaaggtgtttctacttggaggtttgatcaagatgcgcttagggaggccttcgctgagatgattattgaagataagctgccttttgcttttggtgaaaagcctggcttcaagaaattcatgtctaaagcttgcccacgtttccaagcaccatctagaagaacatgcactagggacatagtgtcccaattctttcgatagaaaaccaaagtaaagtctttttgtagagactcatgtcaaagaatttgcttgaccacagattgttggacttcccaacaacaagatggttatatggtagtgactgcaactttttatagatgagggttggaatttgcataagaaaatcattggatttttaaggttaagggacacaagggagaagatattgaaaaagtttattgaaatgcctgactgaatggggattggagagagttatgatgataacagttgataatgcatcaacaaatgatactggtattgcttatttgaagaggcacctaggaagaacccacatagcaaaagacaactttctgcacatgaggtgtgctgcccatattattaaccttattgtgtgagatggtttgaaagaagtggacatctcagtgaagcgtgttagaggtgctattagatatatcaaagatgggacttcaagattggttaagttcaaagaaattgctgaggaagaggggttgaacaccaaggcatttctaaagcttgatgtcccaactagatggaactacacctatctcatgcattggggagtttggcacacaaacaataaggagaacgagtatgtgcaagagatggagttggagaaggagaggggaaaggcgaggggaaagggaaaggagaaggataaagagaacattaatctactcatttttgttgcagcttttcttgatccaagatacaaattatctatgtatatgaagattattgttgaggagatatttggtgaggataggggccaattagtttgggcagctattaactcttgtgttcgtgagctgtttgaagaatacaaaaatatttatgctccaactgaagtaactgatcctagtgaagcaaagggtggtagaggaggcaaacttagagaagtaattgccaagaggatgaaaatgaccaactattctagtagcacaacaaagtcagaacttgaaaagtatctaactgaagagactgaagacactgatacaaagattgacacacttttttggtggaaggtaaatgcacacaggtttcctgttttagctcacatgtcccgtgatgtgcttgctattcctatctcaacagtggctgcagagtctgcttttagcatgagtggatgtatcttagatgacttccatacatcactaactcctttcatgctggaggcacttgtatgtacccaagactggttgagaaggactactccaatcaacatccaagagaatatggaggatttagccatgattgaagcagatttaattgaagaatttggtgagaaaggaaaagggaaagaaaatcctaccacttctaagtctcaagcaacgccaagcagcagtagatgccctccctctaaatctatgaaagagctactacttaaggtttgaaagcacttatgttttacttgatccttaatttctttgtgtgctagtgtgctactgcttacttctatgagcaaaatggttattggctacaaatattggaggattggagccaagtagtctatggaggattggagcctggaggttgcagtgcagcactttctttgcttgaaattttaattttgcatgtcgcatcgacaaataatggcactcacatgataacgacagtcgtgctgtcaagtgtcaacagtcaactgatgctcggaggttgtagcttacaagttacaaggtctatggaggattggctacagttattggcttattagttattacttgagagttgtgtgagctgtgtgacttgacagttgagaacttgagagttgagactgtatgtgtgatttgtgaacatgtttgtgaatctgtcctagctgtctgtagcattttattgcttgtatgttgatttgtgaacatgtttgtgaatctgtcctagctgtctatagcattttattccctgtacctgtgttttattgctactgtcttagctgtgttaaat

SEQ ID NO: 7856 - DNA, 1548 bp, Zea Mays
ggactttaagcagcctgatctgctttttttagtggacttggccttctggaatcccccgctaaaccataggcgtgttctattggaagttggaacaaaaccatggagagtgaaatcatggcctcctatgaaacaaagcagaattgcgaaattagggtatttgagagttcagacgagatggcaacagatctggcagagtttatttcacaagcttcagaaatttcagttaaggaaagaggatgctttgctattgccctttctggaggtcctcttgttagacatatgcggaagctctgtgaagcaccatacaacaagacccttgattggtctaaatggtacatcttctgggctgaagaacgtgcagttgcaaagaaccatgcagagagtaactacaaattaacaaaggaagaatttctctccaaggtgcctatccttaacggccacgtctactccatcaacgacaacgcgacggtggaagaggcagcgagcgactacgagttcgtgatgcggcagctggtgaaggtccggacggtgggagtctcggagagcaacgactgccccagattcgacctggtccttctgaacatcgggcctgacgggcacgtagcctcgctgttccccaaccacccagcgctggagctgaaaggcgactgggtgacctacatcaccgactccccggagcctccgcccgagaggatcaccttcacccttcccgtcataaactcggcgtccagcgtcgccattgttgccaccggagaggacagggcgagagccgtgtccttctccgtctctgcctgccaggaccaggaggaggaaggcccagcagacgacgacgctggaacgacgatgataccgccggctagcatggttcagccaaccgatgggaagttggtatggttcctggacgaggcggctgcttcgtctcttgaggcttcgaatggcgcttgcgagcatcaagaagggtactgagaacagactggatgctacctctgcgaacgccgcctacagtactctctggtttcttcagagtcgaaagtttgcatgcagttggatgtgggcaattaagagtgaagcggtttgtgtgtttttatgtcaagacctcacgcatatcgcgcggagtagctaagctcgaccgtatattggttgcgacgtatgatccttgttttatttaagtgtgttggcggttttatcctacctgaaactagattccttcttgtgaggctggctattttggtattcataggccctgttcgtttacatcggattgcacccggaattattccggctaatcaaattttatataaattatagaagcaatccggctcggaatcgttccgacccaccaatccgacacaaacgaacaaggccttattctttatggacacgcccggaccggacccgggatccctgagagaaatattatttcgattaaggtctcgttcgtttcggcctgatccggccgttccaggcctctttctagctggaaaaaattatctagtttggaattcggccctcagctgttcgtttcaacctgaaataaaaacaaaagcg

SEQ ID NO: 7857 - DNA, 559 bp, Zea Mays
cgccggcgtacatcgtcgggccgagaggctagcggtttggagcctcggaagaatctctgttgttacaactcttttttctcaacgaccgctgctagtccacttcttgtagagactggacctgaactagctacgaagagtccaggccatcatgccatgtgtataggtgatttggtggtagtggcaccatcggcgattggtggcagctgttggttcttgatggagacgactggtatagctagcagctaggtgtttagttattcagttcttcgaaggtgtatgttcatgttcaggcctcgaagacaaaactagcaagatggtgcttctaccttgtggacttttacagaacaatactacgagtcaaatttcctttttttggatgaaacttgcaagatcaacggagaggtgtatggacacttgtttggcgagtcatccagatatgtaatatctttatcatattatttgatttttcccccggggggataagcgtgcaattcattttctcttttcacagtgtggtagtgttaaaaaaaaacatgcatgccttggttacaaagagaat

SEQ ID NO: 7858 - DNA, 798 bp, Zea Mays
tgctggcgcgcccctgtgccggcctggctgcccgcgcccgccgctcgccccgcgtgacgtgagtgaccggagttggccatggccgggcacgccgcggaggccgacgtggatggactgggtgcgaccgaggggacgacatcgacggatgagattgagacgcagcgacgtcggccacgagggcgcgcgtcctgagcaacccctgctcgtgtggtggccagaggagtgcgacgtgccgcccacagcgtgttcgacagattgctttcatgaattacggtttggagcctcggaagaatctctgttgttacaactcttttttctcaacgaccgctgctagtccacttcttgtagagactggacctgaactagctacgaagagtccaggccatcatgccatgtgtataggtgatttggtggtagtggcaccatcggcgattggtggcagctgttggttcttgatggagacgactggtatagctagcagctaggtgtttagttattcagttcttcgaaggtgtatgttcatgttcaggcctcgaagacaaaactagcaagatggtgcttctaccttgtggacttttacagaacaatactacgagtcaaatttcctttttttggatgaaacttgcaagatcaacggagaggtgtatggacacttgtttggcgagtcatccagatatgtaatatctttatcatattatttgatttttcccccggggggataagcgtgcaattcattttctcttttcacagtgtggtagtgttaaaaaaaaacatgcatgccttggttacaaagagaat

SEQ ID NO: 7859 - DNA, 849 bp, Zea Mays
tgctggcgcgcccctgtgccggcctggctgcccgcgcccgccgctcgccccgcgtgacgtgagtgaccggagttggccatggccgggcacgccgcggaggccgacgtggatggactgggtgcgaccgaggggacgacatcgacggatgagattgagacgcagcgacgtcggccacgagggcgcgcgtcctgagcaacccctgctcgtgtggtggccagaggagtgcgacgtgccgcccacagcgtgttcgacagattgctttcatgaattacggtgaacgctcagaaaactgcgccacaatgctaaggcaggaccatttttctggtttggagcctcggaagaatctctgttgttacaactcttttttctcaacgaccgctgctagtccacttcttgtagagactggacctgaactagctacgaagagtccaggccatcatgccatgtgtataggtgatttggtggtagtggcaccatcggcgattggtggcagctgttggttcttgatggagacgactggtatagctagcagctaggtgtttagttattcagttcttcgaaggtgtatgttcatgttcaggcctcgaagacaaaactagcaagatggtgcttctaccttgtggacttttacagaacaatactacgagtcaaatttcctttttttggatgaaacttgcaagatcaacggagaggtgtatggacacttgtttggcgagtcatccagatatgtaatatctttatcatattatttgatttttcccccggggggataagcgtgcaattcattttctcttttcacagtgtggtagtgttaaaaaaaaacatgcatgccttggttacaaagagaat

SEQ ID NO: 7860 - DNA, 997 bp, Zea Mays
tcccacgcctctgcctgcccagatttatctcctccaggccacccctccccaggttctcttcccctagatctccccgccacctttctcgcttgtgcagtggcaccaccatgcgaggagctaggaaggaggacagaacttgtttctctttccaacaatcaagatgagccgtggcggtagcgcgggtggtggtcaaagttctctgggttacctctttggaagcggtgagccccccaaaccagcagtggcaccagctgtaagtgctccacctgctgctgcaggtgctccacctgctgagaaaccacctgctgcaaagcctgatggcaccagtcagattgctgctggggttaccagccaaaccaataactaccacagggccgacggtcagaacaccggaaacttccttacggaccgtccttcgaccaaggtccacgctgctcctggcggtggctcttccctgggatacctgtttggtggcaactgatgccgctcaccaagctatcaccccccactgtcgccgcatgctttttctgaatcgtgaacagccgttgtcatttcatgtgtacccaaacctcccgtcccgcgtgggcccgtaagctgcgcctagatttcagggctaatcgtgtgcctgaaccctcatcataagtcgtctctgtacccagcttctcgtttcgtttgcacccgtgatggtatggtttggttgttgcccgctggacctatctattctttgcatttttcctttgaaatgtatccttgcccatttcgatgcgtccggtgaagtgttcttgcatactttattactcgcctgacagcacttgagtacagcgtcgtgcctggctggccttctgcagtggcttcggctcatgctgaagctccgccaaatggtcatcgaagaagccgttctggcttgaagattggtctgaatgactggatctgcttgactgttatgctgctgaggaacaggagccgcaaaaaaaaaaacgaattaagtacaacaaaa

SEQ ID NO: 7861 - DNA, 2552 bp, Zea Mays
cgattattgaagaataatgacgctaagaaagcaaggtctgaagacaattccggcagtgttaagactaaagctcaagagaatggtgcaaatgccaagacaaatactaaaaaagatgaatcaaagggaaaatctaaaaacaaaaagggagatgataataaagtgaaaaatattcaatcccaaactgaagttccaaagggacaactacactcaaatgtgctggaggaagtgaaggaggaactttcagctgaggaattattcgaaaaaaagaaggctcaacttgctgaactggggatgtctatgcttgaagatcctgagtcgaacattagatctctgaatgatatgctaagtataagcaatgacagagaccaaaaggttgttaaacttggtgtgatgtctttgcttgctgtgtttaaggacgttattccaagttatcggattaggcagctgacagaaaaggagctagcagtagaagtttcgaaagaagtgaagaagacaagatattatgagtacacacttattcgctgctacaaggcctacctgcagaaattgatatcgttggagaagcagccctacttttatactgtggctgttcgttgcatgtgtgctttattagacactgccccacattttaacttccgtgaaagcctattggctagtgtggtaaaaaatttaagctcctcagatgatgtagtaaggaaaatgtgttgtgaagcaataagatcattatttataaatgaaggaaaacatcgtggtgaggcaacaatagaagcagttaggttgattgcagatcatgtgaagctcaatgattgccaacttcatcctgatagcattgaggtcttcctgtctttgagatttgatgaagatattggaaaagatgagattcaggaggaaaaggtgaaaccaaagaggaataaacgttggcaaaaaaatcaggaggttccgaagcaattgccagttaatgataagaagaaaaccagacaggaactgatctcaaaagctagaaaggaggttgatgcagaccttagagcagtttccttcactcttgacccgaaggagagaaaagggatacaaaaagaaacactttctgctctgtttgagacttacttccgcattctgaagcatagtatggccgcttcaaattcaaggactaaggtgaataatgtttcccctggtggctcacacccacttctcactccatgcctggagggtttagggaaattttcacatttaattgatttggatttcatgggtgaacttatatcttgcctcaagaagctttctgggtatagtgaccgacaagacgaaattcccaatgataatgcactgtctgtctcagaacgtctgcagtgctgcatagttgtgtttaaagtctggaggagcaaccttgaggcactgaatgtggatctgcaggatttctttgtgcagctctataacctcatactggagtatcggcctgacagggatcatggcgaggtattggctgatgcgctgaagacacttctttgggaaggcagacagcatgatatgctaagagccgctgctttcatcaaacgattagccacatttgctctctcatttggctctgcagaagcaatagcagcattggtcacactgaagcatctcctccaaaaaaacagcaagtgccgcaatatgttggaaaatgattctggtggcggttctctgtcttgcttagttgcgaaatacaaccccgaagctacggatccatatctgagtggtgcactcgcttcagtcctctgggagctcagcctcctagagaagcattatgacatctcagtttcctcgatggcttcgaatatcttgagtatggcaaacctgaatcccacccagaacccagttcctatcttgaacgtgaaccctcttgaagcgtacagagacctgtcattggaaagggaactatcaaaaccggctagcaaagcattgccactgaacctcaaaaggaagcggcgtgccaaggagtttgttgcgctaagcccagatgtgcttcagaaggcagattgctcggtggacaaagacgagctcgaagagaagctgcagagccatttctccgtgctaagaggcatctctgagaatgagaggttgagggcagagctgaaccacacactgtcatccataaacatgtacaaggagtacaagaagcagaaaaggaaaaacatgaaagttaagaccggaaggaaaaaaaacagcaaggctttagccgtttaaggctttagccgtcttatctgttccggaggtctttgcgctcgaccggtggatgggtgtaattttcagttttttttgggcatatttcccattgactactatagtgcagttttctgccacccttttgccgtttctgcacaccacactatgaaagacttgtttgcatttgtgattttgggaaatggtttagggaagttgtagtttttccccatttttctcagtttctctatacgattttgaggggaaagcggatagattcttccctaacgcattatacattgatattcacttttatcattctcttattttaagtcttgtcggttacataagat

SEQ ID NO: 7862 - DNA, 2851 bp, Zea Mays
cacgctttcttcttcctctactcgcgccgccgcgtctcaagtctcaacgctgcgccaaaacggcaaaaccctaccctgacctgaaccccaaacccgccgcgcctcctcctttctcgtactgcaattcgggactagccgccgccagtctcgatggggaagaggagcggcagcagtaggaaggacaagaacaaggtcattctcccaccggagctgccgccggaaatacacgacgatgaggtggatgtcagcgaggaagacatcgagttctatgccaccgacagcagtaacgttacacccttccgccacttcgacaagaagtccatcgacaggtatgtcgggagggttgccgggcgcgacgagggcgaggtcgagcgcctctacgaagagcgccagaagcggaaggccacagaatcgtcggggagaccccgcgaggatgatgattatttggaggtcgaccccgtcgacgcactccccaccaagacgctgcaaggggagctcgtctacaatagagctaagaaagcaaggtctgaagacaattccggcagtgttaagactaaagctcaagagaatggtgcaaatgccaagacaaatactaaaaaagatgaatcaaagggaaaatctaaaaacaaaaagggagatgataataaagtgaaaaatattcaatcccaaactgaagttccaaagggacaactacactcaaatgtgctggaggaagtgaaggaggaactttcagctgaggaattattcgaaaaaaagaaggctcaacttgctgaactggggatgtctatgcttgaagatcctgagtcgaacattagatctctgaatgatatgctaagtataagcaatgacagagaccaaaaggttgttaaacttggtgtgatgtctttgcttgctgtgtttaaggacgttattccaagttatcggattaggcagctgacagaaaaggagctagcagtagaagtttcgaaagaagtgaagaagacaagatattatgagtacacacttattcgctgctacaaggcctacctgcagaaattgatatcgttggagaagcagccctacttttatactgtggctgttcgttgcatgtgtgctttattagacactgccccacattttaacttccgtgaaagcctattggctagtgtggtaaaaaatttaagctcctcagatgatgtagtaaggaaaatgtgttgtgaagcaataagatcattatttataaatgaaggaaaacatcgtggtgaggcaacaatagaagcagttaggttgattgcagatcatgtgaagctcaatgattgccaacttcatcctgatagcattgaggtcttcctgtctttgagatttgatgaagatattggaaaagatgagattcaggaggaaaaggtgaaaccaaagaggaataaacgttggcaaaaaaatcaggaggttccgaagcaattgccagttaatgataagaagaaaaccagacaggaactgatctcaaaagctagaaaggaggttgatgcagaccttagagcagtttccttcactcttgacccgaaggagagaaaagggatacaaaaagaaacactttctgctctgtttgagacttacttccgcattctgaagcatagtatggccgcttcaaattcaaggactaaggtgaataatgtttcccctggtggctcacacccacttctcactccatgcctggagggtttagggaaattttcacatttaattgatttggatttcatgggtgaacttatatcttgcctcaagaagctttctgggtattggctgatgcgctgaagacacttctttgggaaggcagacagcatgatatgctaagagccgctgctttcatcaaacgattagccacatttgctctctcatttggctctgcagaagcaatagcagcattggtcacactgaagcatctcctccaaaaaaacagcaagtgccgcaatatgttggaaaatgattctggtggcggttctctgtcttgcttagttgcgaaatacaaccccgaagctacggatccatatctgagtggtgcactcgcttcagtcctctgggagctcagcctcctagagaagcattatgacatctcagtttcctcgatggcttcgaatatcttgagtatggcaaacctgaatcccacccagaacccagttcctatcttgaacgtgaaccctcttgaagcgtacagagacctgtcattggaaagggaactatcaaaaccggctagcaaagcattgccactgaacctcaaaaggaagcggcgtgccaaggagtttgttgcgctaagcccagatgtgcttcagaaggcagattgctcggtggacaaagacgagctcgaagagaagctgcagagccatttctccgtgctaagaggcatctctgagaatgagaggttgagggcagagctgaaccacacactgtcatccataaacatgtacaaggagtacaagaagcagaaaaggaaaaacatgaaagttaagaccggaaggaaaaaaaacagcaaggctttagccgtttaaggctttagccgtcttatctgttccggaggtctttgcgctcgaccggtggatgggtgtaattttcagttttttttgggcatatttcccattgactactatagtgcagttttctgccacccttttgccgtttctgcacaccacactatgaaagacttgtttgcatttgtgattttgggaaatggtttagggaagttgtagtttttccccatttttctcagtttctctatacgattttgaggggaaagcggatagattcttccctaacgcattatacattgatattcacttttatcattctcttattttaagtcttgtcggttacataagat

SEQ ID NO: 7863 - DNA, 3009 bp, Zea Mays
caccagaccaagcacgctttcttcttcctctactcgcgccgccgcgtctcaagtctcaacgctgcgccaaaacggcaaaaccctaccctgacctgaaccccaaacccgccgcgcctcctcctttctcgtactgcaattcgggactagccgccgccagtctcgatggggaagaggagcggcagcagtaggaaggacaagaacaaggtcattctcccaccggagctgccgccggaaatacacgacgatgaggtggatgtcagcgaggaagacatcgagttctatgccaccgacagcagtaacgttacacccttccgccacttcgacaagaagtccatcgacaggtatgtcgggagggttgccgggcgcgacgagggcgaggtcgagcgcctctacgaagagcgccagaagcggaaggccacagaatcgtcggggagaccccgcgaggatgatgattatttggaggtcgaccccgtcgacgcactccccaccaagacgctgcaaggggagctcgtctacaatagagctaagaaagcaaggtctgaagacaattccggcagtgttaagactaaagctcaagagaatggtgcaaatgccaagacaaatactaaaaaagatgaatcaaagggaaaatctaaaaacaaaaagggagatgataataaagtgaaaaatattcaatcccaaactgaagttccaaagggacaactacactcaaatgtgctggaggaagtgaaggaggaactttcagctgaggaattattcgaaaaaaagaaggctcaacttgctgaactggggatgtctatgcttgaagatcctgagtcgaacattagatctctgaatgatatgctaagtataagcaatgacagagaccaaaaggttgttaaacttggtgtgatgtctttgcttgctgtgtttaaggacgttattccaagttatcggattaggcagctgacagaaaaggagctagcagtagaagtttcgaaagaagtgaagaagacaagatattatgagtacacacttattcgctgctacaaggcctacctgcagaaattgatatcgttggagaagcagccctacttttatactgtggctgttcgttgcatgtgtgctttattagacactgccccacattttaacttccgtgaaagcctattggctagtgtggtaaaaaatttaagctcctcagatgatgtagtaaggaaaacatcgtggtgaggcaacaatagaagcagttaggttgattgcagatcatgtgaagctcaatgattgccaacttcatcctgatagcattgaggtcttcctgtctttgagatttgatgaagatattggaaaagatgagattcaggaggaaaaggtgaaaccaaagaggaataaacgttggcaaaaaaatcaggaggttccgaagcaattgccagttaatgataagaagaaaaccagacaggaactgatctcaaaagctagaaaggaggttgatgcagaccttagagcagtttccttcactcttgacccgaaggagagaaaagggatacaaaaagaaacactttctgctctgtttgagacttacttccgcattctgaagcatagtatggccgcttcaaattcaaggactaaggtgaataatgtttcccctggtggctcacacccacttctcactccatgcctggagggtttagggaaattttcacatttaattgatttggatttcatgggtgaacttatatcttgcctcaagaagctttctgggtatagtgaccgacaagacgaaattcccaatgataatgcactgtctgtctcagaacgtctgcagtgctgcatagttgtgtttaaagtctggaggagcaaccttgaggcactgaatgtggatctgcaggatttctttgtgcagctctataacctcatactggagtatcggcctgacagggatcatggcgaggtattggctgatgcgctgaagacacttctttgggaaggcagacagcatgatatgctaagagccgctgctttcatcaaacgattagccacatttgctctctcatttggctctgcagaagcaatagcagcattggtcacactgaagcatctcctccaaaaaaacagcaagtgccgcaatatgttggaaaatgattctggtggcggttctctgtcttgcttagttgcgaaatacaaccccgaagctacggatccatatctgagtggtgcactcgcttcagtcctctgggagctcagcctcctagagaagcattatgacatctcagtttcctcgatggcttcgaatatcttgagtatggcaaacctgaatcccacccagaacccagttcctatcttgaacgtgaaccctcttgaagcgtacagagacctgtcattggaaagggaactatcaaaaccggctagcaaagcattgccactgaacctcaaaaggaagcggcgtgccaaggagtttgttgcgctaagcccagatgtgcttcagaaggcagattgctcggtggacaaagacgagctcgaagagaagctgcagagccatttctccgtgctaagaggcatctctgagaatgagaggttgagggcagagctgaaccacacactgtcatccataaacatgtacaaggagtacaagaagcagaaaaggaaaaacatgaaagttaagaccggaaggaaaaaaaacagcaaggctttagccgtttaaggctttagccgtcttatctgttccggaggtctttgcgctcgaccggtggatgggtgtaattttcagttttttttgggcatatttcccattgactactatagtgcagttttctgccacccttttgccgtttctgcacaccacactatgaaagacttgtttgcatttgtgattttgggaaatggtttagggaagttgtagtttttccccatttttctcagtttctctatacgattttgaggggaaagcggatagattcttccctaacgcattatacattgatattcacttttatcattctcttattttaagtcttgtcggttacataagat

SEQ ID NO: 7864 - DNA, 1562 bp, Zea Mays
cggtgcaatgattatgaacaccgttattgtatgaaggtggtggcacgggtgggcaaacggagctccaaaagccatgtcatggtcgtgatatgacgagcgagagggaaacttcgaagttgcacctcagtcaaagcagcgtagtgcatcaaataataagtcccaaatctctgaacagatttgaaaatgctaaagtgaagttcatctcttctgaagaagtggcattattgagtagagagaggccaccatctgttacatcaagatttactttgtcgcagccaagcaaggcatcatctcctccaactacaaaacacttgtccaatatgaattgtgtatccccaagcaggagtgataaaaatgtgcaagccctgaaacgatgtgctgatgcaagtcatagtcaagcagaacttgaggataggtcatattctgctatgcagcaaaggcgggttcatcctgcatctccttcaagcatgaagcagccatccaatatgaaatcaacatcccctggtaggagagacatgcaagtgcaaaaccagaaacgatatgctcctatgcgggaaagtcaacctcatgtgaaacagttgtcaaataggactgccacgcaagtgcatgccaccaaacgatctgctacttcaagtcatgatcaggcaaatattgatgacataaacatggattgtgaagcaagatctggtggttccgtgcctatgatgcatgaatgtagaacaagtgaatcagtaaaagtaaaaatggactctctgattgaacacaaagctagagaaaagaagatagtgaatgcagacaaaggagaaattaaatctcagactgagcttgaacctagggaaaaggggaccttatgcacttcagatgaagatattggatgcaaatcagaaattgggagtctgaaccagaacaaagatgtgattgtcaccatggtttcaactgtgcagtattcaagacgcccagcacctacaaattgttggaggtgtgaaaagaaacactctaatgtattagaagcttacaacaactttgttctaagggcatatatccatgacataaagttgttgatatattcctcggaagtgcttccccctgattctcagtggatagatggtgagaattacttatgggggctttttgtgagttcagacggaaagagtggtccttcgtgatctaattcaactactacatgatctattttccatggacatgatagtaaaggtaatcaaatacagtacagagatggtcaagtggatgctccgttacattttctgtacccatctgatactgacggaagcgaggaaacctgagttctatggtttagagcagtttgggaaccccatttttacaagggaaattagttcatttttctttgagaaaatagaaatcccttggaaaaatggagttcccaaactagccaagaattccaccttgctggtctataacagttcagattccaccttgctggtctataacagttcatgctttagttcggatgctgaaactagctcctgtaaaatcagtctaacgaactcttgcagcctgcagcttgcccatgagaagttgag

SEQ ID NO: 7865 - DNA, 1871 bp, Zea Mays
caacaggcttacaggcaacaggccaattgacttcgttcgcaacagcgggacaaagggaagcaacagcgagggaaaaccccattcctcgtctctgctcctctcaatcaccatcgcccccctctctctccgatcactgcatctcttctccgcctggtcggcggtcggacggcgcaatggacattaaggtgtgtggggtatgtggcagtggtagcaactctgctcttattgtgaagtgtgttcggtgcaatgattatgaacaccgttattgtatgaaggtggtggcacgggtatctccacaggaatggtattgtgccaaatgccaagagcataccaacagaggcccgaaacctagtcaaggtgggcaaacggagctccaaaagccatgtcatggtcgtgatatgacgagcgagagggaaacttcgaagttgcacctcagtcaaagcagcgtagtgcatcaaataataagtcccaaatctctgaacagatttgaaaatgctaaagtgaagttcatctcttctgaagaagtggcattattgagtagagagaggccaccatctgttacatcaagatttactttgtcgcagccaagcaaggcatcatctcctccaactacaaaacacttgtccaatatgaattgtgtatccccaagcaggagtgataaaaatgtgcaagccctgaaacgatgtgctgatgcaagtcatagtcaagcagaacttgaggataggtcatattctgctatgcagcaaaggcgggttcatcctgcatctccttcaagcatgaagcagccatccaatatgaaatcaacatcccctggtaggagagacatgcaagtgcaaaaccagaaacgatatgctcctatgcgggaaagtcaacctcatgtgaaacagttgtcaaataggactgccacgcaagtgcatgccaccaaacgatctgctacttcaagtcatgatcaggcaaatattgatgacataaacatggattgtgaagcaagatctggtggttccgtgcctatgatgcatgaatgtagaacaagtgaatcagtaaaagtaaaaatggactctctgattgaacacaaagctagagaaaagaagatagtgaatgcagacaaaggagaaattaaatctcagactgagcttgaacctagggaaaaggggaccttatgcacttcagatgaagatattggatgcaaatcagaaattgggagtctgaaccagaacaaagatgtgattgtcaccatggtttcaactgtgcagtattcaagacgcccagcacctacaaattgttggaggtgtgaaaagaaacactctaatgtattagaagcttacaacaactttgttctaagggcatatatccatgacataaagttgttgatatattcctcggaagtgcttccccctgattctcagtggatagatggtgagaattacttatgggggctttttgtgagttcagacggaaagagtggtccttcgtgatctaattcaactactacatgatctattttccatggacatgatagtaaaggtaatcaaatacagtacagagatggtcaagtggatgctccgttacattttctgtacccatctgatactgacggaagcgaggaaacctgagttctatggtttagagcagtttgggaaccccatttttacaagggaaattagttcatttttctttgagaaaatagaaatcccttggaaaaatggagttcccaaactagccaagaattccaccttgctggtctataacagttcagattccaccttgctggtctataacagttcatgctttagttcggatgctgaaactagctcctgtaaaatcagtctaacgaactcttgcagcctgcagcttgcccatgagaagttgag

SEQ ID NO: 7866 - DNA, 2113 bp, Zea Mays
caaaattacaaacccaacaggcttacaggcaacaggccaattgacttcgttcgcaacagcgggacaaagggaagcaacagcgagggaaaaccccattcctcgtctctgctcctctcaatcaccatcgcccccctctctctccgatcactgcatctcttctccgcctggtcggcggtcggacggcgcaatggacattaaggtgtgtggggtatgtggcagtggtagcaactctgctcttattgtgaagtgtgttcggtgcaatgattatgaacaccgttattgtatgaaggtggtggcacgggtatctccacaggaatggtattgtgccaaatgccaagagcataccaacagaggcccgaaacctagtcaaggtgggcaaacggagctccaaaagccatgtcatggtcgtgatatgacgagcgagagggaaacttcgaagttgcacctcagtcaaagcagcgtagtgcatcaaataataagtcccaaatctctgaacagatttgaaaatgctaaagtgaagttcatctcttctgaagaagtggcattattgagtagagagaggccaccatctgttacatcaagatttactttgtcgcagccaagcaaggcatcatctcctccaactacaaaacacttgtccaatatgaattgtgtatccccaagcaggagtgataaaaatgtgcaagccctgaaacgatgtgctgatgcaagtcatagtcaagcagaacttgaggataggtcatattctgctatgcagcaaaggcgggttcatcctgcatctccttcaagcatgaagcagccatccaatatgaaatcaacatcccctggtaggagagacatgcaagtgcaaaaccagaaacgatatgctcctatgcgggaaagtcaacctcatgtgaaacagttgtcaaataggactgccacgcaagtgcatgccaccaaacgatctgctacttcaagtcatgatcaggcaaatattgatgacataaacatggattgtgaagcaagatctggtggttccgtgcctatgatgcatgaatgtagaacaagtgaatcagtaaaagtaaaaatggactctctgattgaacacaaagctagagaaaagaagatagtgaatgcagacaaaggagaaattaaatctcagactgagcttgaacctagggaaaaggggaccttatgcacttcagatgaagatattggatgcaaatcagaaattgggagtctgaaccagaacaaagatgtgattgtcaccatggtttcaactgtgcagtattcaagacgcccagcacctacaaattgttggaggggatgctttcatgtcttcaatgctggagaaaagctaaatcttggtgaatttaaagcctactttccatcaaaagtgtcatccagagttattgatattgtcaagatgatgccaactgttttacagctggagttattacatcgaatggatgactggccaaaatcttttgagactatgcatccagttcatgaagacattggcttgttcttttttcctaataaacctgatgggtgtgaaaagaaacactctaatgtattagaagcttacaacaactttgttctaagggcatatatccatgacataaagttgttgatatattcctcggaagtgcttccccctgattctcagtggatagatggtgagaattacttatgggggctttttgtgagttcagacggaaagagtggtccttcgtgatctaattcaactactacatgatctattttccatggacatgatagtaaaggtaatcaaatacagtacagagatggtcaagtggatgctccgttacattttctgtacccatctgatactgacggaagcgaggaaacctgagttctatggtttagagcagtttgggaaccccatttttacaagggaaattagttcatttttctttgagaaaatagaaatcccttggaaaaatggagttcccaaactagccaagaattccaccttgctggtctataacagttcagattccaccttgctggtctataacagttcatgctttagttcggatgctgaaactagctcctgtaaaatcagtctaacgaactcttgcagcctgcagcttgcccatgagaagttgag

SEQ ID NO: 7867 - DNA, 1271 bp, Zea Mays
tgccggcctgccgcacaaaagagatgtttcactctcagtcccatcaagtgttctacatcaagttcctgaaggacatgttggggtgtactggagaggaggtgctcttctgaagacaatcactcctccagggtttcatctgaagctccctttgatcacccagtacgagccaatacaggttacacttcaaacagaccaggtcagagatattccttgtggaacaaaaggtggtgttatgatcagctttgacaagatagaggtcgtgaaccgccttcgcaaagagtttgtgcatgaaaccctactcaactatggtgtgcactatgacaagacatggatatatgataaaatccatcatgagattaatcagttctgcagtgctcacagtttgcagcaagtttacattgacatgttcgatcagattgatgaaacaatgaaagaagctattcaaagagactgtacacgctatgctcctggaattgaaatcatcagtgttcgtgttacgaagccaaatatacctggtagtatcagaagaaactttgaacttatggaggaggagcgtacaaaggcactgatcgccatggagaagcaaaaggtagcagagaaggaggcagaaacacagaagaagattgcgctatctgaagcagagaagaacgcacaggtgagcaagatcctgatggagcagaagctgatggaaaaggacagttccaagcgacaggagcagattgataatgacatgtacctcgcacgagagaaagcagtagcagatgcaaactactacaggatattgaaggaagcagaggccaataggctcaaactgacacctgagtatcttgagctgaggttcattgaatcaatcgccaataactcaaagattttcttcggtgaaaagattcctaacatgatcatggatcaaaggttgctcaagaactaccttgatgctgctcctaggaaggaccattatgagatgtagaagcgtgttccgtgagttggaagcaaaagacctttgtgtgtgtgatcccaccgtccacgcagtagataggattcccacgagccgttcagtacctcagtaagccagaaaagactcatcaggaccctcttgaagatttagatgcaaaaattttcttcgccaaaaatgtacagttttgctcactgacttaggacatgtttggagcatctatttttttagaaactggtttatgaaaactgaaatggtttcaaacatatctgattatatcccagtttatagaaactagattcctagtttcttaaaaact

SEQ ID NO: 7868 - DNA, 2126 bp, Zea Mays
aatagcttaccttgataaagaatctcatatggatcttgacacacaatgttatttgacccgttttgtaagtgtttcctagtttcctacaatcatcctaacacaatttcaacaaattttcttatatttttatttttctgctttacacatgtattcatgtatttttactattcctgtgttcttcctaatccaaaaccgtattccaaaagaggcctacactttactcgctcgaaccaaaattacccaacacgggcaacactccacgccaggagtgggcgagtggcacaccgcacaccagccttcgtcttcctcgcggtttcgtccactcccgtcgcccgttccacctgtgacctgccaaggcaccaagcctgaccgacttcgcttacggttcccggtgacccccgcccaccctcctcgcgatgtctgacgtcacctccgactcggcgcagagacgccgctcgccgccgccgccgtcgccgtcgccgtcgatgccgcgtttccagcagcagccgagcgggcgccagccgcccccgcccggcgccgaccccttcgccttcggcatcgtggccttcatcggcatctgcttcgtcctggtttcactctcagtcccatcaagtgttctacatcaagttcctgaaggacatgttggggtgtactggagaggaggtgctcttctgaagacaatcactcctccagggtttcatctgaagctccctttgatcacccagtacgagccaatacaggttacacttcaaacagaccaggcgagtgagactgaataacactcttttccctttggcttctgatcctatgtttccactgaaaccatagtttagttcacctgcaaacggtggctgttttttctctcatggccataccaaaaactgcatcttctagttctcatcacaccttatttgattttcgtagctgcaaactgaaaggttactgtatttctatttaagatgagtttatgatagatattagattagtccactcggcatgttaaacatgagttttatggtggacatttatgctgttcattatgttcaaccaggtcagagatattccttgtggaacaaaaggtggtgttatgatcagctttgacaagatagaggtcgtgaaccgccttcgcaaagagtttgtgcatgaaaccctactcaactatggtgtgcactatgacaagacatggatatatgataaaatccatcatgagattaatcagttctgcagtgctcacagtttgcagcaagtttacattgacatgttcgatcagattgatgaaacaatgaaagaagctattcaaagagactgtacacgctatgctcctggaattgaaatcatcagtgttcgtgttacgaagccaaatatacctggtagtatcagaagaaactttgaacttatggaggaggagcgtacaaaggcactgatcgccatggagaagcaaaaggtagcagagaaggaggcagaaacacagaagaagattgcgctatctgaagcagagaagaacgcacaggtgagcaagatcctgatggagcagaagctgatggaaaaggacagttccaagcgacaggagcagattgataatgacatgtacctcgcacgagagaaagcagtagcagatgcaaactactacaggatattgaaggaagcagaggccaataggctcaaactgacacctgagtatcttgagctgaggttcattgaatcaatcgccaataactcaaagattttcttcggtgaaaagattcctaacatgatcatggatcaaaggttgctcaagaactaccttgatgctgctcctaggaaggaccattatgagatgtagaagcgtgttccgtgagttggaagcaaaagacctttgtgtgtgtgatcccaccgtccacgcagtagataggattcccacgagccgttcagtacctcagtaagccagaaaagactcatcaggaccctcttgaagatttagatgcaaaaattttcttcgccaaaaatgtacagttttgctcactgacttaggacatgtttggagcatctatttttttagaaactggtttatgaaaactgaaatggtttcaaacatatctgattatatcccagtttatagaaactagattcctagtttcttaaaaact

SEQ ID NO: 7869 - DNA, 2341 bp, Zea Mays
attctaaactctactgccgtacagtctatgcaacgcctgaagagcacggcgctgcccggagaaggatgcgtgtaaggtgtaactatcgcctactgcagctcaggttgtttctgatagtcttctcttctgccgtccatccggcctgcgcgctcgctctcctgctcttctgcgccaactgggcgaccgccgacgccaacgccgacgacctacgccaggtgctgggatttttgtcggttccttcggcagctttcgtcgcgtccttcgccggcgacgagcactcaccaggtccgctcctgaagaagactgggatattttgcatacacagaggatcatctttccgtttgatgaactcacgggaatggtgatgctcattttctaaaggaccggtcccctttttgtttaatttccaaaggtaccatgattactaaataatgatttattagaaattaatgactgatggggtcaagatgtgtgaaactgttaagagcttgagatctgctgattgaccacacccaaaagggaaaatgaaggtggtcttttgaagatttgatttactttgtaaaagggcataattttgtgataactgggaatcattcctcaacaatactgataaaacttcaagtttttccttgatgttgaactgctacctccatgcctccattgtgccacagtggatatccatttggtgctctgtccctatcatctagttgtggtgatggggttcaggcattccctagtcgaaccccctcgctcacccacccaccctggttggaagactccgttgtgattatccataacttttggttgaccttacatctctaattatcgtatttcatggaatgtgtatgctattcgtactgggacatatatataaagcagtgagccagtgaccactgttccatgctctactgaagtgcccttctatgttttcccatgtttatcatttttctgcaatcaattagtgtattacagtgaaagtgaagtactaaaattaggagtattggtaccacttctttctgtgctcatgaattagtttattttggcaatttaatgaggcttgtctcatgtctgattacttcttctgtttctttccctggaatcttgcctcttccaggtgtagaggacattcagttttctccagttctccagttcctggatagcaatggcaaatgagtttcctgatgaagttcttaagtctgttttcccattgctggatggtaaagatctagtattctgcatgcttgtatgccgtcaatggcatgaaatcgcaagggatgattacttctggaaatgcatttgctcacggaagtggccgtccatttgcaaacagcccccttctggcgcaaactacaaaaagctttacttaaccttctctaagccacgggagatgcagaacctccctgtgccaaggcttacattcgaggatattgttttctacattgatatgtggctcgaaggatcgctcatcttttctcaagcagtttcaggccgcactctccgagcaggcctacagggcgctccccctcctggcattccagatatacttgcagcacatttgagttcccaagactgcatcttgatgctggaagtagagcccaagttggcagttcccatggggccagccatcactgtatctgtccttgccaaccgcaaggattcaaacaagatggcttgcatcataaacaagtcaacgtttgattacatcgatagtaatgcagcgcgggctctggcttatgagtatcttaggttttcgcccagacaccctttcacatccgacatccgggcatggatgtcgttacttttcctgtgcaaaggggcgaacaccattgaggtgtttggtatcgagctagatttctgtgacgccgcgaagtcagagaaagaaatcttgtggctcctagacatgcttgattggaaatagaagctccttatcccctttggggtttgacacatgtaaagcctgttcatggttagtcgttcctttcctgttggaccatgtacgctactactccctccgtttctttttagttgtcgctggatagttcaattttgcactattcagcgacaactaaaatgaaacggagggagtactgaactacataatctcctgagaaaatgtaataaatgtcacctgctactccatgtgctaacaaggcgaggttattttgtacttctttttcccttgaaagtgttgctcatctttacgtagcattcggtgatgagtttctttacgatgtcattttttgttgcagactatgctgttgttcgtcataagttttgtgtattaactgtaaaaagaatggtgacctttactgcatccagatccagtgtccttatgtccgac

SEQ ID NO: 7870 - DNA, 1609 bp, Zea Mays
attctaaactctactgccgtacagtctatgcaacgcctgaagagcacggcgctgcccggagaaggatgcgtgtaaggtgtaactatcgcctactgcagctcaggttgtttctgatagtcttctcttctgccgtccatccggcctgcgcgctcgctctcctgctcttctgcgccaactgggcgaccgccgacgccaacgccgacgacctacgccaggtgctgggatttttgtcggttccttcggcagctttcgtcgcgtccttcgccggcgacgagcactcaccaggtccgctcctgaagaagactgggatattttgcatacacagaggatcatctgtaagttaaatcttctgaaatctggatccaacatttgtaccatactggtgtagaggacattcagttttctccagttctccagttcctggatagcaatggcaaatgagtttcctgatgaagttcttaagtctgttttcccattgctggatggtaaagatctagtattctgcatgcttgtatgccgtcaatggcatgaaatcgcaagggatgattacttctggaaatgcatttgctcacggaagtggccgtccatttgcaaacagcccccttctggcgcaaactacaaaaagctttacttaaccttctctaagccacgggagatgcagaacctccctgtgccaaggcttacattcgaggatattgttttctacattgatatgtggctcgaaggatcgctcatcttttctcaagcagtttcaggccgcactctccgagcaggcctacagggcgctccccctcctggcattccagatatacttgcagcacatttgagttcccaagactgcatcttgatgctggaagtagagcccaagttggcagttcccatggggccagccatcactgtatctgtccttgccaaccgcaaggattcaaacaagatggcttgcatcataaacaagtcaacgtttgattacatcgatagtaatgcagcgcgggctctggcttatgagtatcttaggttttcgcccagacaccctttcacatccgacatccgggcatggatgtcgttacttttcctgtgcaaaggggcgaacaccattgaggtgtttggtatcgagctagatttctgtgacgccgcgaagtcagagaaagaaatcttgtggctcctagacatgcttgattggaaatagaagctccttatcccctttggggtttgacacatgtaaagcctgttcatggttagtcgttcctttcctgttggaccatgtacgctactactccctccgtttctttttagttgtcgctggatagttcaattttgcactattcagcgacaactaaaatgaaacggagggagtactgaactacataatctcctgagaaaatgtaataaatgtcacctgctactccatgtgctaacaaggcgaggttattttgtacttctttttcccttgaaagtgttgctcatctttacgtagcattcggtgatgagtttctttacgatgtcattttttgttgcagactatgctgttgttcgtcataagttttgtgtattaactgtaaaaagaatggtgacctttactgcatccagatccagtgtccttatgtccgac

SEQ ID NO: 7871 - DNA, 1593 bp, Zea Mays
attctaaactctactgccgtacagtctatgcaacgcctgaagagcacggcgctgcccggagaaggatgcgtgtaaggtgtaactatcgcctactgcagctcaggttgtttctgatagtcttctcttctgccgtccatccggcctgcgcgctcgctctcctgctcttctgcgccaactgggcgaccgccgacgccaacgccgacgacctacgccaggtgctgggatttttgtcggttccttcggcagctttcgtcgcgtccttcgccggcgacgagcactcaccagtctgcacaaattattgggtgtacacccataggtccgctcctgaagaagactgggatattttgcatacacagaggatcatctgtgtagaggacattcagttttctccagttctccagttcctggatagcaatggcaaatgagtttcctgatgaagttcttaagtctgttttcccattgctggatggtaaagatctagtattctgcatgcttgtatgccgtcaatggcatgaaatcgcaagggatgattacttctggaaatgcatttgctcacggaagtggccgtccatttgcaaacagcccccttctggcgcaaactacaaaaagctttacttaaccttctctaagccacgggagatgcagaacctccctgtgccaaggcttacattcgaggatattgttttctacattgatatgtggctcgaaggatcgctcatcttttctcaagcagtttcaggccgcactctccgagcaggcctacagggcgctccccctcctggcattccagatatacttgcagcacatttgagttcccaagactgcatcttgatgctggaagtagagcccaagttggcagttcccatggggccagccatcactgtatctgtccttgccaaccgcaaggattcaaacaagatggcttgcatcataaacaagtcaacgtttgattacatcgatagtaatgcagcgcgggctctggcttatgagtatcttaggttttcgcccagacaccctttcacatccgacatccgggcatggatgtcgttacttttcctgtgcaaaggggcgaacaccattgaggtgtttggtatcgagctagatttctgtgacgccgcgaagtcagagaaagaaatcttgtggctcctagacatgcttgattggaaatagaagctccttatcccctttggggtttgacacatgtaaagcctgttcatggttagtcgttcctttcctgttggaccatgtacgctactactccctccgtttctttttagttgtcgctggatagttcaattttgcactattcagcgacaactaaaatgaaacggagggagtactgaactacataatctcctgagaaaatgtaataaatgtcacctgctactccatgtgctaacaaggcgaggttattttgtacttctttttcccttgaaagtgttgctcatctttacgtagcattcggtgatgagtttctttacgatgtcattttttgttgcagactatgctgttgttcgtcataagttttgtgtattaactgtaaaaagaatggtgacctttactgcatccagatccagtgtccttatgtccgac

SEQ ID NO: 7872 - DNA, 828 bp, Zea Mays
ccagcctctgcatattatgcggtatgtgcttagcgatggcaagatgaacattgaaaggctgacaaaacttgtcgagctggttgggaaacagaggcttgtgctggaccttagctgtcgaaaaaaggatggcagatatactattgtaactgacaggtggcagaagttcagtgatgtgtttgtggatgaaccggcattagaatatctcgctgccttcgcagatgagtttttggttcatggtgttgatgtggagggcaaaaggttagggattgatgaggaacttgtggaactattggggcatcattcaccaatcccagtaacttatgctgggggtgtgtcaacaatggatgacctagagaggataaagaaggcaggcaaaagtcgagtagatgtaactgttgggagtgctctagatatatttggaggagatttaccctacaaagatgttgtcctttggcacaagaagcaaagtatggttggccaagtgtcaaggaacatgtggtagcgatcagtattgccagaatttattgtgtatcgctcgctaaaagcatatttattttcattacaaaacttcattgtgcgtttgaattactgagctttcttttgcttttgcttttggttgtttagacagtctccagcaacgttccctaactttaaccctctaaagaaatattcctcatcctttataacattctctaaaagatttcatactctatatctttttaactccaataacttcatctaaatttctctctatatgtatagtgccaccgaatacatgcatatatattgttcgttgttggagagcctatacctttggcggatgaagag

SEQ ID NO: 7873 - DNA, 1510 bp, Zea Mays
gagggcagcagtagagcctaccgtctgtaactggaaggtcccggttcgagccccagcctctgcatattatgcggtatgtgcttagcgatggcaagatgaacattgaaaggctgacaaaacttgtcgagctggttgggaaacagaggcttgtgctggaccttagctgtcgaaaaaaggatggcagatatactattgtaactgacaggtggcagaagttcagtgatgtgtttgtggatgaaccggcattagaatatctcgctgccttcgcagatgagtttttggttcatggtgttgatgtggagggcaaaaggtgcaactgtggaattattatcaagtcttccttttattgattaaaaaaatcatattgcaacattgacatgaccatatgggacaaagttgctttgcaagttgtcatatcctattattccgaaatatatatgatggaccagtttttacataccgattttaagttctgaaattgtttcttctttgagattttttatatgggtatatattgtgtcctaccattgaaattaatctgctgctcccaaatgaaaatcatactaaataggctctcgtttttgtgagtatcaacaatgacaaaaaaaacttttttatctcaacaagttgggcacataaactaccaacaaaaggaagtataaaatgtaaaggcattaatactgtaatagtacaaggggatctaaaccctagctcctttgtttggagtttaatgtagattttgatctaattttctgtttggattgattatcactttgtattatctaattaatttccatattcatccatgttaagtactctaattcactgactcttgatttcttatcttctgaaacctcgttggttatcctgctcttgcaatttaaaatttgctactgtcctgttaccctgattctattttaagctaggatgtgaattacaggttagggattgatgaggaacttgtggaactattggggcatcattcaccaatcccagtaacttatgctgggggtgtgtcaacaatggatgacctagagaggataaagaaggcaggcaaaagtcgagtagatgtaactgttgggagtgctctagatatatttggaggagatttaccctacaaagatgttgtcctttggcacaagaagcaaagtatggttggccaagtgtcaaggaacatgtggtagcgatcagtattgccagaatttattgtgtatcgctcgctaaaagcatatttattttcattacaaaacttcattgtgcgtttgaattactgagctttcttttgcttttgcttttggttgtttagacagtctccagcaacgttccctaactttaaccctctaaagaaatattcctcatcctttataacattctctaaaagatttcatactctatatctttttaactccaataacttcatctaaatttctctctatatgtatagtgccaccgaatacatgcatatatattgttcgttgttggagagcctatacctttggcggatgaagag

SEQ ID NO: 7874 - DNA, 1350 bp, Zea Mays
ctgctactgattcagagatgagcccagatcagcagctcttgccttatcccgctggctggccgcagcaccggtggtgtggtggaggatggcatcgaaatacgtggccagggtaccgtctccatggtgggcgccacaacgtcgtttggttggttcatgggtttccgtctgctcggtaaaatgcggtgcattgggaggacgggatgttgtgtgcgctgctgttagcttcagaccatgcatcgacattcacaaggggaaagttaagcagattgttggttctactcttcgggattcatccaatgatggcatggaacttgtgacaaactttgaatcagacaaatctcctgcagaatttgcaaaatcatataaagaagatgaacttcttggaggacatgttataatgcttggctcagatcctgcaagccaggctgctgcactcgaggcactacatgcatatcctggtggcttgcaagttggaggtggaataaatttgcagaatgcaatgtcttaccttaatgaaggggccagtcatgtgatagtgacctcttatgtgcttagcgatggcaagatgaacattgaaaggctgacaaaacttgtcgagctggttgggaaacagaggcttgtgctggaccttagctgtcgaaaaaaggatggcagatatactattgtaactgacaggtggcagaagttcagtgatgtgtttgtggatgaaccggcattagaatatctcgctgccttcgcagatgagtttttggttcatggtgttgatgtggagggcaaaaggttagggattgatgaggaacttgtggaactattggggcatcattcaccaatcccagtaacttatgctgggggtgtgtcaacaatggatgacctagagaggataaagaaggcaggcaaaagtcgagtagatgtaactgttgggagtgctctagatatatttggaggagatttaccctacaaagatgttgtcctttggcacaagaagcaaagtatggttggccaagtgtcaaggaacatgtggtagcgatcagtattgccagaatttattgtgtatcgctcgctaaaagcatatttattttcattacaaaacttcattgtgcgtttgaattactgagctttcttttgcttttgcttttggttgtttagacagtctccagcaacgttccctaactttaaccctctaaagaaatattcctcatcctttataacattctctaaaagatttcatactctatatctttttaactccaataacttcatctaaatttctctctatatgtatagtgccaccgaatacatgcatatatattgttcgttgttggagagcctatacctttggcggatgaagag

SEQ ID NO: 7875 - DNA, 2374 bp, Zea Mays
aggagcccactcttgggcatacctcagttccaaaaagctcgcaacagccagccctaggtctgaactctctcggacgggtgacaggctgacagccgccgcccgccagctttggagagccacggtgacaggccgccagcagccatcgacggccctccctccacctcgccgtcgtccctcttcccccatctcgccgagccatcgtccctccacagcaggaccacctcaccgagccgtcgtccctccacagcaggagtgcaggaccgcatcgccgagtcgtcgtctctccacaccaggttcgccgtcgcggcgcggctacctcgctccggctcccagctcgtccggtccagctcactcgcggtcgcgaccatctccgtccacctcatccctccggcaagcagttgctaaactcatccagggtcagatcagcagctcttgccttatcccgctggctggccgcagcaccggtggtgtggtggaggatggcatcgaaatacgtggccagggtaccgtctccatggtgggcgccacaacgtcgtttggttggttcatgggtttccgtctgctcggtaaaatgcggtgcattgggaggacgggatgttgtgtgcgctgctgttagcttcagaccatgcatcgacattcacaaggggaaagttaagcagattgttggttctactcttcgggattcatccaatgatggcatggaacttgtgacaaactttgaatcagacaaatctcctgcagaatttgcaaaatcatataaagaagatgaacttcttggaggacatgttataatgcttggctcagatcctgcaagccaggctgctgcactcgaggcactacatgcatatcctggtggcttgcaagttggaggtggaataaatttgcagaatgcaatgtcttaccttaatgaaggggccagtcatgtgatagtgacctcttatgtgcttagcgatggcaagatgaacattgaaaggctgacaaaacttgtcgagctggttgggaaacagaggcttgtgctggaccttagctgtcgaaaaaaggatggcagatatactattgtaactgacaggtggcagaagttcagtgatgtgtttgtggatgaaccggcattagaatatctcgctgccttcgcagatgagtttttggttcatggtgttgatgtggagggcaaaaggtgcaactgtggaattattatcaagtcttccttttattgattaaaaaaatcatattgcaacattgacatgaccatatgggacaaagttgctttgcaagttgtcatatcctattattccgaaatatatatgatggaccagtttttacataccgattttaagttctgaaattgtttcttctttgagattttttatatgggtatatattgtgtcctaccattgaaattaatctgctgctcccaaatgaaaatcatactaaataggctctcgtttttgtgagtatcaacaatgacaaaaaaaacttttttatctcaacaagttgggcacataaactaccaacaaaaggaagtataaaatgtaaaggcattaatactgtaatagtacaaggggatctaaaccctagctcctttgtttggagtttaatgtagattttgatctaattttctgtttggattgattatcactttgtattatctaattaatttccatattcatccatgttaagtactctaattcactgactcttgatttcttatcttctgaaacctcgttggttatcctgctcttgcaatttaaaatttgctactgtcctgttaccctgattctattttaagctaggatgtgaattacaggttagggattgatgaggaacttgtggaactattggggcatcattcaccaatcccagtaacttatgctgggggtgtgtcaacaatggatgacctagagaggataaagaaggcaggcaaaagtcgagtagatgtaactgttgggagtgctctagatatatttggaggagatttaccctacaaagatgttgtcctttggcacaagaagcaaagtatggttggccaagtgtcaaggaacatgtggtagcgatcagtattgccagaatttattgtgtatcgctcgctaaaagcatatttattttcattacaaaacttcattgtgcgtttgaattactgagctttcttttgcttttgcttttggttgtttagacagtctccagcaacgttccctaactttaaccctctaaagaaatattcctcatcctttataacattctctaaaagatttcatactctatatctttttaactccaataacttcatctaaatttctctctatatgtatagtgccaccgaatacatgcatatatattgttcgttgttggagagcctatacctttggcggatgaagag

SEQ ID NO: 7876 - DNA, 1923 bp, Zea Mays
aggagcccactcttgggcatacctcagttccaaaaagctcgcaacagccagccctaggtctgaactctctcggacgggtgacaggctgacagccgccgcccgccagctttggagagccacggtgacaggccgccagcagccatcgacggccctccctccacctcgccgtcgtccctcttcccccatctcgccgagccatcgtccctccacagcaggaccacctcaccgagccgtcgtccctccacagcaggagtgcaggaccgcatcgccgagtcgtcgtctctccacaccaggttcgccgtcgcggcgcggctacctcgctccggctcccagctcgtccggtccagctcactcgcggtcgcgaccatctccgtccacctcatccctccggcaagcagttgctaaactcatccagggtcagatcagcagctcttgccttatcccgctggctggccgcagcaccggtggtgtggtggaggatggcatcgaaatacgtggccagggtaccgtctccatggtgggcgccacaacgtcgtttggttggttcatgggtttccgtctgctcggtaaaatgcggtgcattgggaggacgggatgttgtgtgcgctgctgttagcttcagaccatgcatcgacattcacaaggggaaagttaagcagattgttggttctactcttcgggattcatccaatgatggcatggaacttgtgacaaactttgaatcagacaaatctcctgcagaatttgcaaaatcatataaagaagatgaacttcttggaggacatgttataatgcttggctcagatcctgcaagccaggctgctgcactcgaggcactacatgcatatcctgggtaaagtattattgcaatccggtgctcgttttgttctctacggtcacagccaacagccttcttgtgatggagatttttacatcttccagtgtttcttctgttagtatggtttgtttctgctttaagccatgagatgccatcaatgacaaactgcaatgaacatgggctatcatactaggtggcttgcaagttggaggtggaataaatttgcagaatgcaatgtcttaccttaatgaaggggccagtcatgtgatagtgacctcttatgtgcttagcgatggcaagatgaacattgaaaggctgacaaaacttgtcgagctggttgggaaacagaggcttgtgctggaccttagctgtcgaaaaaaggatggcagatatactattgtaactgacaggtggcagaagttcagtgatgtgtttgtggatgaaccggcattagaatatctcgctgccttcgcagatgagtttttggttcatggtgttgatgtggagggcaaaaggttagggattgatgaggaacttgtggaactattggggcatcattcaccaatcccagtaacttatgctgggggtgtgtcaacaatggatgacctagagaggataaagaaggcaggcaaaagtcgagtagatgtaactgttgggagtgctctagatatatttggaggagatttaccctacaaagatgttgtcctttggcacaagaagcaaagtatggttggccaagtgtcaaggaacatgtggtagcgatcagtattgccagaatttattgtgtatcgctcgctaaaagcatatttattttcattacaaaacttcattgtgcgtttgaattactgagctttcttttgcttttgcttttggttgtttagacagtctccagcaacgttccctaactttaaccctctaaagaaatattcctcatcctttataacattctctaaaagatttcatactctatatctttttaactccaataacttcatctaaatttctctctatatgtatagtgccaccgaatacatgcatatatattgttcgttgttggagagcctatacctttggcggatgaagag

SEQ ID NO: 7877 - DNA, 1747 bp, Zea Mays
aggagcccactcttgggcatacctcagttccaaaaagctcgcaacagccagccctaggtctgaactctctcggacgggtgacaggctgacagccgccgcccgccagctttggagagccacggtgacaggccgccagcagccatcgacggccctccctccacctcgccgtcgtccctcttcccccatctcgccgagccatcgtccctccacagcaggaccacctcaccgagccgtcgtccctccacagcaggagtgcaggaccgcatcgccgagtcgtcgtctctccacaccaggttcgccgtcgcggcgcggctacctcgctccggctcccagctcgtccggtccagctcactcgcggtcgcgaccatctccgtccacctcatccctccggcaagcagttgctaaactcatccagggtcagcagatcagcagctcttgccttatcccgctggctggccgcagcaccggtggtgtggtggaggatggcatcgaaatacgtggccagggtaccgtctccatggtgggcgccacaacgtcgtttggttggttcatgggtttccgtctgctcggtaaaatgcggtgcattgggaggacgggatgttgtgtgcgctgctgttagcttcagaccatgcatcgacattcacaaggggaaagttaagcagattgttggttctactcttcgggattcatccaatgatggcatggaacttgtgacaaactttgaatcagacaaatctcctgcagaatttgcaaaatcatataaagaagatgaacttcttggaggacatgttataatgcttggctcagatcctgcaagccaggctgctgcactcgaggcactacatgcatatcctggtggcttgcaagttggaggtggaataaatttgcagaatgcaatgtcttaccttaatgaaggggccagtcatgtgatagtgacctcttatgtgcttagcgatggcaagatgaacattgaaaggctgacaaaacttgtcgagctggttgggaaacagaggcttgtgctggaccttagctgtcgaaaaaaggatggcagatatactattgtaactgacaggtggcagaagttcagtgatgtgtttgtggatgaaccggcattagaatatctcgctgccttcgcagatgagtttttggttcatggtgttgatgtggagggcaaaaggttagggattgatgaggaacttgtggaactattggggcatcattcaccaatcccagtaacttatgctgggggtgtgtcaacaatggatgacctagagaggataaagaaggcaggcaaaagtcgagtagatgtaactgttgggagtgctctagatatatttggaggagatttaccctacaaagatgttgtcctttggcacaagaagcaaagtatggttggccaagtgtcaaggaacatgtggtagcgatcagtattgccagaatttattgtgtatcgctcgctaaaagcatatttattttcattacaaaacttcattgtgcgtttgaattactgagctttcttttgcttttgcttttggttgtttagacagtctccagcaacgttccctaactttaaccctctaaagaaatattcctcatcctttataacattctctaaaagatttcatactctatatctttttaactccaataacttcatctaaatttctctctatatgtatagtgccaccgaatacatgcatatatattgttcgttgttggagagcctatacctttggcggatgaagag

SEQ ID NO: 7878 - DNA, 1744 bp, Zea Mays
aggagcccactcttgggcatacctcagttccaaaaagctcgcaacagccagccctaggtctgaactctctcggacgggtgacaggctgacagccgccgcccgccagctttggagagccacggtgacaggccgccagcagccatcgacggccctccctccacctcgccgtcgtccctcttcccccatctcgccgagccatcgtccctccacagcaggaccacctcaccgagccgtcgtccctccacagcaggagtgcaggaccgcatcgccgagtcgtcgtctctccacaccaggttcgccgtcgcggcgcggctacctcgctccggctcccagctcgtccggtccagctcactcgcggtcgcgaccatctccgtccacctcatccctccggcaagcagttgctaaactcatccagggtcagatcagcagctcttgccttatcccgctggctggccgcagcaccggtggtgtggtggaggatggcatcgaaatacgtggccagggtaccgtctccatggtgggcgccacaacgtcgtttggttggttcatgggtttccgtctgctcggtaaaatgcggtgcattgggaggacgggatgttgtgtgcgctgctgttagcttcagaccatgcatcgacattcacaaggggaaagttaagcagattgttggttctactcttcgggattcatccaatgatggcatggaacttgtgacaaactttgaatcagacaaatctcctgcagaatttgcaaaatcatataaagaagatgaacttcttggaggacatgttataatgcttggctcagatcctgcaagccaggctgctgcactcgaggcactacatgcatatcctggtggcttgcaagttggaggtggaataaatttgcagaatgcaatgtcttaccttaatgaaggggccagtcatgtgatagtgacctcttatgtgcttagcgatggcaagatgaacattgaaaggctgacaaaacttgtcgagctggttgggaaacagaggcttgtgctggaccttagctgtcgaaaaaaggatggcagatatactattgtaactgacaggtggcagaagttcagtgatgtgtttgtggatgaaccggcattagaatatctcgctgccttcgcagatgagtttttggttcatggtgttgatgtggagggcaaaaggttagggattgatgaggaacttgtggaactattggggcatcattcaccaatcccagtaacttatgctgggggtgtgtcaacaatggatgacctagagaggataaagaaggcaggcaaaagtcgagtagatgtaactgttgggagtgctctagatatatttggaggagatttaccctacaaagatgttgtcctttggcacaagaagcaaagtatggttggccaagtgtcaaggaacatgtggtagcgatcagtattgccagaatttattgtgtatcgctcgctaaaagcatatttattttcattacaaaacttcattgtgcgtttgaattactgagctttcttttgcttttgcttttggttgtttagacagtctccagcaacgttccctaactttaaccctctaaagaaatattcctcatcctttataacattctctaaaagatttcatactctatatctttttaactccaataacttcatctaaatttctctctatatgtatagtgccaccgaatacatgcatatatattgttcgttgttggagagcctatacctttggcggatgaagag

SEQ ID NO: 7879 - DNA, 2504 bp, Zea Mays
aggagcccactcttgggcatacctcagttccaaaaagctcgcaacagccagccctaggtctgaactctctcggacgggtgacaggctgacagccgccgcccgccagctttggagagccacggtgacaggccgccagcagccatcgacggccctccctccacctcgccgtcgtccctcttcccccatctcgccgagccatcgtccctccacagcaggaccacctcaccgagccgtcgtccctccacagcaggagtgcaggaccgcatcgccgagtcgtcgtctctccacaccaggttcgccgtcgcggcgcggctacctcgctccggctcccagctcgtccggtccagctcactcgcggtcgcgaccatctccgtccacctcatccctccggcaagcagttgctaaactcatccagggtcagtggtggaggatggcatcgaaatacgtggccagggtaccgtctccatggtgggcgccacaacgtcgtttggttggttcatgggtttccgtctgctcggtaaaatgcggtgcattgggaggacgggatgttgtgtgcgctgctgttagcttcagaccatgcatcgacattcacaaggggaaagttaagcagattgttggttctactcttcgggattcatccaatgatggcatggaacttgtgacaaactttgaatcagacaaatctcctgcagaatttgcaaaatcatataaagaagatgaacttcttggaggacatgttataatgcttggctcagatcctgcaagccaggctgctgcactcgaggcactacatgcatatcctgggtaaagtattattgcaatccggtgctcgttttgttctctacggtcacagccaacagccttcttgtgatggagatttttacatcttccagtgtttcttctgttagtatggtttgtttctgctttaagccatgagatgccatcaatgacaaactgcaatgaacatgggctatcatactaggtggcttgcaagttggaggtggaataaatttgcagaatgcaatgtcttaccttaatgaaggggccagtcatgtgatagtgacctcttatgtgcttagcgatggcaagatgaacattgaaaggctgacaaaacttgtcgagctggttgggaaacagaggcttgtgctggaccttagctgtcgaaaaaaggatggcagatatactattgtaactgacaggtggcagaagttcagtgatgtgtttgtggatgaaccggcattagaatatctcgctgccttcgcagatgagtttttggttcatggtgttgatgtggagggcaaaaggtgcaactgtggaattattatcaagtcttccttttattgattaaaaaaatcatattgcaacattgacatgaccatatgggacaaagttgctttgcaagttgtcatatcctattattccgaaatatatatgatggaccagtttttacataccgattttaagttctgaaattgtttcttctttgagattttttatatgggtatatattgtgtcctaccattgaaattaatctgctgctcccaaatgaaaatcatactaaataggctctcgtttttgtgagtatcaacaatgacaaaaaaaacttttttatctcaacaagttgggcacataaactaccaacaaaaggaagtataaaatgtaaaggcattaatactgtaatagtacaaggggatctaaaccctagctcctttgtttggagtttaatgtagattttgatctaattttctgtttggattgattatcactttgtattatctaattaatttccatattcatccatgttaagtactctaattcactgactcttgatttcttatcttctgaaacctcgttggttatcctgctcttgcaatttaaaatttgctactgtcctgttaccctgattctattttaagctaggatgtgaattacaggttagggattgatgaggaacttgtggaactattggggcatcattcaccaatcccagtaacttatgctgggggtgtgtcaacaatggatgacctagagaggataaagaaggcaggcaaaagtcgagtagatgtaactgttgggagtgctctagatatatttggaggagatttaccctacaaagatgttgtcctttggcacaagaagcaaagtatggttggccaagtgtcaaggaacatgtggtagcgatcagtattgccagaatttattgtgtatcgctcgctaaaagcatatttattttcattacaaaacttcattgtgcgtttgaattactgagctttcttttgcttttgcttttggttgtttagacagtctccagcaacgttccctaactttaaccctctaaagaaatattcctcatcctttataacattctctaaaagatttcatactctatatctttttaactccaataacttcatctaaatttctctctatatgtatagtgccaccgaatacatgcatatatattgttcgttgttggagagcctatacctttggcggatgaagag

SEQ ID NO: 7880 - DNA, 2366 bp, Zea Mays
aggagcccactcttgggcatacctcagttccaaaaagctcgcaacagccagccctaggtctgaactctctcggacgggtgacaggctgacagccgccgcccgccagctttggagagccacggtgacaggccgccagcagccatcgacggccctccctccacctcgccgtcgtccctcttcccccatctcgccgagccatcgtccctccacagcaggaccacctcaccgagccgtcgtccctccacagcaggagtgcaggaccgcatcgccgagtcgtcgtctctccacaccaggttcgccgtcgcggcgcggctacctcgctccggctcccagctcgtccggtccagctcactcgcggtcgcgaccatctccgtccacctcatccctccggcaagcagttgctaaactcatccagggtcagatcagcagctcttgccttatcccgctggctggccgcagcaccggtggtgtggtggaggatggcatcgaaatacgtggccagggtaccgtctccatggtgggcgccacaacgtcgtttggttggttcatgggtttccgtctgctcggtaaaatgcggtgcattgggaggacgggatgttgtgtgcgctgctgttagcttcagaccatgcatcgacattcacaaggggaaagttaagcagattgttggttctactcttcgggattcatccaatgatggcatggaacttgtgacaaactttgaatcagacaaatctcctgcagaatttgcaaaatcatataaagaagatgaacttcttggaggacatgttataatgcttggctcagatcctgcaagccaggctgctgcactcgaggcactacatgcatatcctggtggcttgcaagttggaggtggaataaatttgcagaatgcaatgtcttaccttaatgaaggggccagtcatgtgatagtgacctcttatgtgcttagcgatggcaagatgaacattgaaaggctgacaaaacttgtcgagctggttgggaaacagaggcttgtgctggaccttagctgtcgaaaaaagatatactattgtaactgacaggtggcagaagttcagtgatgtgtttgtggatgaaccggcattagaatatctcgctgccttcgcagatgagtttttggttcatggtgttgatgtggagggcaaaaggtgcaactgtggaattattatcaagtcttccttttattgattaaaaaaatcatattgcaacattgacatgaccatatgggacaaagttgctttgcaagttgtcatatcctattattccgaaatatatatgatggaccagtttttacataccgattttaagttctgaaattgtttcttctttgagattttttatatgggtatatattgtgtcctaccattgaaattaatctgctgctcccaaatgaaaatcatactaaataggctctcgtttttgtgagtatcaacaatgacaaaaaaaacttttttatctcaacaagttgggcacataaactaccaacaaaaggaagtataaaatgtaaaggcattaatactgtaatagtacaaggggatctaaaccctagctcctttgtttggagtttaatgtagattttgatctaattttctgtttggattgattatcactttgtattatctaattaatttccatattcatccatgttaagtactctaattcactgactcttgatttcttatcttctgaaacctcgttggttatcctgctcttgcaatttaaaatttgctactgtcctgttaccctgattctattttaagctaggatgtgaattacaggttagggattgatgaggaacttgtggaactattggggcatcattcaccaatcccagtaacttatgctgggggtgtgtcaacaatggatgacctagagaggataaagaaggcaggcaaaagtcgagtagatgtaactgttgggagtgctctagatatatttggaggagatttaccctacaaagatgttgtcctttggcacaagaagcaaagtatggttggccaagtgtcaaggaacatgtggtagcgatcagtattgccagaatttattgtgtatcgctcgctaaaagcatatttattttcattacaaaacttcattgtgcgtttgaattactgagctttcttttgcttttgcttttggttgtttagacagtctccagcaacgttccctaactttaaccctctaaagaaatattcctcatcctttataacattctctaaaagatttcatactctatatctttttaactccaataacttcatctaaatttctctctatatgtatagtgccaccgaatacatgcatatatattgttcgttgttggagagcctatacctttggcggatgaagag

SEQ ID NO: 7881 - DNA, 1915 bp, Zea Mays
aggagcccactcttgggcatacctcagttccaaaaagctcgcaacagccagccctaggtctgaactctctcggacgggtgacaggctgacagccgccgcccgccagctttggagagccacggtgacaggccgccagcagccatcgacggccctccctccacctcgccgtcgtccctcttcccccatctcgccgagccatcgtccctccacagcaggaccacctcaccgagccgtcgtccctccacagcaggagtgcaggaccgcatcgccgagtcgtcgtctctccacaccaggttcgccgtcgcggcgcggctacctcgctccggctcccagctcgtccggtccagctcactcgcggtcgcgaccatctccgtccacctcatccctccggcaagcagttgctaaactcatccagggtcagatcagcagctcttgccttatcccgctggctggccgcagcaccggtggtgtggtggaggatggcatcgaaatacgtggccagggtaccgtctccatggtgggcgccacaacgtcgtttggttggttcatgggtttccgtctgctcggtaaaatgcggtgcattgggaggacgggatgttgtgtgcgctgctgttagcttcagaccatgcatcgacattcacaaggggaaagttaagcagattgttggttctactcttcgggattcatccaatgatggcatggaacttgtgacaaactttgaatcagacaaatctcctgcagaatttgcaaaatcatataaagaagatgaacttcttggaggacatgttataatgcttggctcagatcctgcaagccaggctgctgcactcgaggcactacatgcatatcctgggtaaagtattattgcaatccggtgctcgttttgttctctacggtcacagccaacagccttcttgtgatggagatttttacatcttccagtgtttcttctgttagtatggtttgtttctgctttaagccatgagatgccatcaatgacaaactgcaatgaacatgggctatcatactaggtggcttgcaagttggaggtggaataaatttgcagaatgcaatgtcttaccttaatgaaggggccagtcatgtgatagtgacctcttatgtgcttagcgatggcaagatgaacattgaaaggctgacaaaacttgtcgagctggttgggaaacagaggcttgtgctggaccttagctgtcgaaaaaagatatactattgtaactgacaggtggcagaagttcagtgatgtgtttgtggatgaaccggcattagaatatctcgctgccttcgcagatgagtttttggttcatggtgttgatgtggagggcaaaaggttagggattgatgaggaacttgtggaactattggggcatcattcaccaatcccagtaacttatgctgggggtgtgtcaacaatggatgacctagagaggataaagaaggcaggcaaaagtcgagtagatgtaactgttgggagtgctctagatatatttggaggagatttaccctacaaagatgttgtcctttggcacaagaagcaaagtatggttggccaagtgtcaaggaacatgtggtagcgatcagtattgccagaatttattgtgtatcgctcgctaaaagcatatttattttcattacaaaacttcattgtgcgtttgaattactgagctttcttttgcttttgcttttggttgtttagacagtctccagcaacgttccctaactttaaccctctaaagaaatattcctcatcctttataacattctctaaaagatttcatactctatatctttttaactccaataacttcatctaaatttctctctatatgtatagtgccaccgaatacatgcatatatattgttcgttgttggagagcctatacctttggcggatgaagag

SEQ ID NO: 7882 - DNA, 1758 bp, Zea Mays
aggagcccactcttgggcatacctcagttccaaaaagctcgcaacagccagccctaggtctgaactctctcggacgggtgacaggctgacagccgccgcccgccagctttggagagccacggtgacaggccgccagcagccatcgacggccctccctccacctcgccgtcgtccctcttcccccatctcgccgagccatcgtccctccacagcaggaccacctcaccgagccgtcgtccctccacagcaggagtgcaggaccgcatcgccgagtcgtcgtctctccacaccaggttcgccgtcgcggcgcggctacctcgctccggctcccagctcgtccggtccagctcactcgcggtcgcgaccatctccgtccacctcatccctccggcaagcagttgctaaactcatccagggtcagatcagcagctcttgccttatcccgctggctggccgcagcaccggtggtgtggtggaggatggcatcgaaatacgtggccagggtaccgtctccatggtgggcgccacaacgtcgtttggttggttcatgggtttccgtctgctcggtaaaatgcggtgcattgggaggacgggatgttgtgtgcgctgctgttagcttcagaccatgcatcgacattcacaaggggaaagttaagcagattgttggttctactcttcgggattcatccaatgatggcatggaacttgtgacaaactttgaatcagacaaatctcctgcagaatttgcaaaatcatataaagaagatgaacttcttggaggacatgttataatgcttggctcagatcctgcaagccaggctgctgcactcgaggcactacatgcatatcctggtggcttgcaagttggaggtggaataaatttgcagaatgcaatgtcttaccttaatgaaggggccagtcatgtgatagtgacctcttatgtgcttagcgatggcaagatgaacattgaaaggctgacaaaacttgtcgagctggttgggaaacagaggcttgtgctggaccttagctgtcgaaaaaaggatggcagatatactattgtaactgacaggtggcagaagttcagtgatgtgtttgtggatgaaccggcattagaatatctcgctgccttcgcagatgagtttttggttcatggtgttgatgtggagggcaaaaggatgtgaattacaggttagggattgatgaggaacttgtggaactattggggcatcattcaccaatcccagtaacttatgctgggggtgtgtcaacaatggatgacctagagaggataaagaaggcaggcaaaagtcgagtagatgtaactgttgggagtgctctagatatatttggaggagatttaccctacaaagatgttgtcctttggcacaagaagcaaagtatggttggccaagtgtcaaggaacatgtggtagcgatcagtattgccagaatttattgtgtatcgctcgctaaaagcatatttattttcattacaaaacttcattgtgcgtttgaattactgagctttcttttgcttttgcttttggttgtttagacagtctccagcaacgttccctaactttaaccctctaaagaaatattcctcatcctttataacattctctaaaagatttcatactctatatctttttaactccaataacttcatctaaatttctctctatatgtatagtgccaccgaatacatgcatatatattgttcgttgttggagagcctatacctttggcggatgaagag

SEQ ID NO: 7883 - DNA, 1926 bp, Zea Mays
aggagcccactcttgggcatacctcagttccaaaaagctcgcaacagccagccctaggtctgaactctctcggacgggtgacaggctgacagccgccgcccgccagctttggagagccacggtgacaggccgccagcagccatcgacggccctccctccacctcgccgtcgtccctcttcccccatctcgccgagccatcgtccctccacagcaggaccacctcaccgagccgtcgtccctccacagcaggagtgcaggaccgcatcgccgagtcgtcgtctctccacaccaggttcgccgtcgcggcgcggctacctcgctccggctcccagctcgtccggtccagctcactcgcggtcgcgaccatctccgtccacctcatccctccggcaagcagttgctaaactcatccagggtcagcagatcagcagctcttgccttatcccgctggctggccgcagcaccggtggtgtggtggaggatggcatcgaaatacgtggccagggtaccgtctccatggtgggcgccacaacgtcgtttggttggttcatgggtttccgtctgctcggtaaaatgcggtgcattgggaggacgggatgttgtgtgcgctgctgttagcttcagaccatgcatcgacattcacaaggggaaagttaagcagattgttggttctactcttcgggattcatccaatgatggcatggaacttgtgacaaactttgaatcagacaaatctcctgcagaatttgcaaaatcatataaagaagatgaacttcttggaggacatgttataatgcttggctcagatcctgcaagccaggctgctgcactcgaggcactacatgcatatcctgggtaaagtattattgcaatccggtgctcgttttgttctctacggtcacagccaacagccttcttgtgatggagatttttacatcttccagtgtttcttctgttagtatggtttgtttctgctttaagccatgagatgccatcaatgacaaactgcaatgaacatgggctatcatactaggtggcttgcaagttggaggtggaataaatttgcagaatgcaatgtcttaccttaatgaaggggccagtcatgtgatagtgacctcttatgtgcttagcgatggcaagatgaacattgaaaggctgacaaaacttgtcgagctggttgggaaacagaggcttgtgctggaccttagctgtcgaaaaaaggatggcagatatactattgtaactgacaggtggcagaagttcagtgatgtgtttgtggatgaaccggcattagaatatctcgctgccttcgcagatgagtttttggttcatggtgttgatgtggagggcaaaaggttagggattgatgaggaacttgtggaactattggggcatcattcaccaatcccagtaacttatgctgggggtgtgtcaacaatggatgacctagagaggataaagaaggcaggcaaaagtcgagtagatgtaactgttgggagtgctctagatatatttggaggagatttaccctacaaagatgttgtcctttggcacaagaagcaaagtatggttggccaagtgtcaaggaacatgtggtagcgatcagtattgccagaatttattgtgtatcgctcgctaaaagcatatttattttcattacaaaacttcattgtgcgtttgaattactgagctttcttttgcttttgcttttggttgtttagacagtctccagcaacgttccctaactttaaccctctaaagaaatattcctcatcctttataacattctctaaaagatttcatactctatatctttttaactccaataacttcatctaaatttctctctatatgtatagtgccaccgaatacatgcatatatattgttcgttgttggagagcctatacctttggcggatgaagag

SEQ ID NO: 7884 - DNA, 2377 bp, Zea Mays
aggagcccactcttgggcatacctcagttccaaaaagctcgcaacagccagccctaggtctgaactctctcggacgggtgacaggctgacagccgccgcccgccagctttggagagccacggtgacaggccgccagcagccatcgacggccctccctccacctcgccgtcgtccctcttcccccatctcgccgagccatcgtccctccacagcaggaccacctcaccgagccgtcgtccctccacagcaggagtgcaggaccgcatcgccgagtcgtcgtctctccacaccaggttcgccgtcgcggcgcggctacctcgctccggctcccagctcgtccggtccagctcactcgcggtcgcgaccatctccgtccacctcatccctccggcaagcagttgctaaactcatccagggtcagcagatcagcagctcttgccttatcccgctggctggccgcagcaccggtggtgtggtggaggatggcatcgaaatacgtggccagggtaccgtctccatggtgggcgccacaacgtcgtttggttggttcatgggtttccgtctgctcggtaaaatgcggtgcattgggaggacgggatgttgtgtgcgctgctgttagcttcagaccatgcatcgacattcacaaggggaaagttaagcagattgttggttctactcttcgggattcatccaatgatggcatggaacttgtgacaaactttgaatcagacaaatctcctgcagaatttgcaaaatcatataaagaagatgaacttcttggaggacatgttataatgcttggctcagatcctgcaagccaggctgctgcactcgaggcactacatgcatatcctggtggcttgcaagttggaggtggaataaatttgcagaatgcaatgtcttaccttaatgaaggggccagtcatgtgatagtgacctcttatgtgcttagcgatggcaagatgaacattgaaaggctgacaaaacttgtcgagctggttgggaaacagaggcttgtgctggaccttagctgtcgaaaaaaggatggcagatatactattgtaactgacaggtggcagaagttcagtgatgtgtttgtggatgaaccggcattagaatatctcgctgccttcgcagatgagtttttggttcatggtgttgatgtggagggcaaaaggtgcaactgtggaattattatcaagtcttccttttattgattaaaaaaatcatattgcaacattgacatgaccatatgggacaaagttgctttgcaagttgtcatatcctattattccgaaatatatatgatggaccagtttttacataccgattttaagttctgaaattgtttcttctttgagattttttatatgggtatatattgtgtcctaccattgaaattaatctgctgctcccaaatgaaaatcatactaaataggctctcgtttttgtgagtatcaacaatgacaaaaaaaacttttttatctcaacaagttgggcacataaactaccaacaaaaggaagtataaaatgtaaaggcattaatactgtaatagtacaaggggatctaaaccctagctcctttgtttggagtttaatgtagattttgatctaattttctgtttggattgattatcactttgtattatctaattaatttccatattcatccatgttaagtactctaattcactgactcttgatttcttatcttctgaaacctcgttggttatcctgctcttgcaatttaaaatttgctactgtcctgttaccctgattctattttaagctaggatgtgaattacaggttagggattgatgaggaacttgtggaactattggggcatcattcaccaatcccagtaacttatgctgggggtgtgtcaacaatggatgacctagagaggataaagaaggcaggcaaaagtcgagtagatgtaactgttgggagtgctctagatatatttggaggagatttaccctacaaagatgttgtcctttggcacaagaagcaaagtatggttggccaagtgtcaaggaacatgtggtagcgatcagtattgccagaatttattgtgtatcgctcgctaaaagcatatttattttcattacaaaacttcattgtgcgtttgaattactgagctttcttttgcttttgcttttggttgtttagacagtctccagcaacgttccctaactttaaccctctaaagaaatattcctcatcctttataacattctctaaaagatttcatactctatatctttttaactccaataacttcatctaaatttctctctatatgtatagtgccaccgaatacatgcatatatattgttcgttgttggagagcctatacctttggcggatgaagag

SEQ ID NO: 7885 - DNA, 1736 bp, Zea Mays
aggagcccactcttgggcatacctcagttccaaaaagctcgcaacagccagccctaggtctgaactctctcggacgggtgacaggctgacagccgccgcccgccagctttggagagccacggtgacaggccgccagcagccatcgacggccctccctccacctcgccgtcgtccctcttcccccatctcgccgagccatcgtccctccacagcaggaccacctcaccgagccgtcgtccctccacagcaggagtgcaggaccgcatcgccgagtcgtcgtctctccacaccaggttcgccgtcgcggcgcggctacctcgctccggctcccagctcgtccggtccagctcactcgcggtcgcgaccatctccgtccacctcatccctccggcaagcagttgctaaactcatccagggtcagatcagcagctcttgccttatcccgctggctggccgcagcaccggtggtgtggtggaggatggcatcgaaatacgtggccagggtaccgtctccatggtgggcgccacaacgtcgtttggttggttcatgggtttccgtctgctcggtaaaatgcggtgcattgggaggacgggatgttgtgtgcgctgctgttagcttcagaccatgcatcgacattcacaaggggaaagttaagcagattgttggttctactcttcgggattcatccaatgatggcatggaacttgtgacaaactttgaatcagacaaatctcctgcagaatttgcaaaatcatataaagaagatgaacttcttggaggacatgttataatgcttggctcagatcctgcaagccaggctgctgcactcgaggcactacatgcatatcctggtggcttgcaagttggaggtggaataaatttgcagaatgcaatgtcttaccttaatgaaggggccagtcatgtgatagtgacctcttatgtgcttagcgatggcaagatgaacattgaaaggctgacaaaacttgtcgagctggttgggaaacagaggcttgtgctggaccttagctgtcgaaaaaagatatactattgtaactgacaggtggcagaagttcagtgatgtgtttgtggatgaaccggcattagaatatctcgctgccttcgcagatgagtttttggttcatggtgttgatgtggagggcaaaaggttagggattgatgaggaacttgtggaactattggggcatcattcaccaatcccagtaacttatgctgggggtgtgtcaacaatggatgacctagagaggataaagaaggcaggcaaaagtcgagtagatgtaactgttgggagtgctctagatatatttggaggagatttaccctacaaagatgttgtcctttggcacaagaagcaaagtatggttggccaagtgtcaaggaacatgtggtagcgatcagtattgccagaatttattgtgtatcgctcgctaaaagcatatttattttcattacaaaacttcattgtgcgtttgaattactgagctttcttttgcttttgcttttggttgtttagacagtctccagcaacgttccctaactttaaccctctaaagaaatattcctcatcctttataacattctctaaaagatttcatactctatatctttttaactccaataacttcatctaaatttctctctatatgtatagtgccaccgaatacatgcatatatattgttcgttgttggagagcctatacctttggcggatgaagag

SEQ ID NO: 7886 - DNA, 627 bp, Zea Mays
gctgctgctactgattcagagatgagcccagcagatcagcagctcttgccttatcccgctggctggccgcagcaccggtggtgtggtggaggatggcatcgaaatacgtggccagggtaccgtctccatggtgggcgccacaacgtcgtttggttggttcatgggtttccgtctgctcggtaaaatgcggtgcattgggaggacgggatgttgtgtgcgctgctgttagcttcagaccatgcatcgacattcacaaggggaaagttaagcagattgttggttctactcttcgggattcatccaatgatggcatggaacttgtgacaaactttgaatcagacaaatctcctgcagaatttgcaaaatcatataaagaagatgaacttcttggaggacatgttataatgcttggctcagatcctgcaagccaggctgctgcactcgaggcactacatgcatatcctgggtaaagtattattgcaatccggtgctcgttttgttctctacggtcacagccaacagccttcttgtgatggagatttttacatcttccagtgtttcttctgttagtatggtttgtttctgctttaagccatgagatgccatcaatgacaaactgcaatgaac

SEQ ID NO: 7887 - DNA, 1003 bp, Zea Mays
aggagcccactcttgggcatacctcagttccaaaaagctcgcaacagccagccctaggtctgaactctctcggacgggtgacaggctgacagccgccgcccgccagctttggagagccacggtgacaggccgccagcagccatcgacggccctccctccacctcgccgtcgtccctcttcccccatctcgccgagccatcgtccctccacagcaggaccacctcaccgagccgtcgtccctccacagcaggagtgcaggaccgcatcgccgagtcgtcgtctctccacaccaggttcgccgtcgcggcgcggctacctcgctccggctcccagctcgtccggtccagctcactcgcggtcgcgaccatctccgtccacctcatccctccggcaagcagttgctaaactcatccagggtcagatcagcagctcttgccttatcccgctggctggccgcagcaccggtggtgtggtggaggatggcatcgaaatacgtggccagggtaccgtctccatggtgggcgccacaacgtcgtttggttggttcatgggtttccgtctgctcggtaaaatgcggtgcattgggaggacgggatgttgtgtgcgctgctgttagcttcagaccatgcatcgacattcacaaggggaaagttaagcagattgttggttctactcttcgggattcatccaatgatggcatggaacttgtgacaaactttgaatcagacaaatctcctgcagaatttgcaaaatcatataaagaagatgaacttcttggaggacatgttataatgcttggctcagatcctgcaagccaggctgctgcactcgaggcactacatgcatatcctgggtcggcacttaaagatgcacacaacccactgatagctaagaagagactgaaacattggccccggccgagaaaatctccgaaccctggcctaacgggccggcatcaaccgtccactctgcaacggctcaaccgaagggtggcgcacatgac

SEQ ID NO: 7888 - DNA, 5598 bp, Zea Mays
ctttaaagcctccgcgttagtccttaatgtcttactgagacgcgctagaggggggaaaaaagacatatcaggactggtttggcagcccaaaatccagcgggtttcctggccttttctcctgggagaaagcccaccagaaaattgtcctcggattattcatgtgtgtcatttggcagcccaatctcgtgcagatattcgttccattttcccgtcggaaacaaccctggccttaggaggccaggcgattctccgccgcctcgtctcgtcttcgctatgcaccagcacctccgtcgctccaacgccctgagcgcctccgtcgtttgattccggtttgcttctggtttctgccgcacaaggatctccgtgcagggcatcgacgtcgtgctcttcgcgccggacgacgccaaggccacgcagaccgccggacgactccaaggccggatctccgtgcagccgtgcagggcatcacccacaagaagaagatcaagctccggcgagtacctctttccatctcctgtcgctgcctctaccatatctatctaaaggaacaaatttgagcgcatcttctgttgacagtgactttagtttgctattggtgctccagtaagaaaaatagatgtattttgttgatggtggcttcacaatctggcacatgactcatgaaaagctttgtttgacaaactattgtgaaggaacaagtatactgtcttttactacttcagtttgcttgacaaactattgtgatgatggataaagtgtgatgtgatgatggataaaccaatttactatgcttcagtttactttgtttgatttttcctgattttttgaagtattatttatagcatcacatagctatggatgaaccattttctgatgatggataaagttctcatccaatatagtagtatagagttgctgctggctatgttttgggactaaaacagctttggactaaatccttggttgccaaagggtggcaggaaattatatcctagtggggaaaatcctccatggaaatcgaggtgccatttaaatctcattggtggattttttttccatgggttttttccctattgctgccaaaccagtcctcatagaaatttttctcatatggaacgaaaatagccaaccattaattgtagtagactcggaccatcattgacaataatacatattttgtatttcaaagatacttgtccacttttgacattctgaaaggaacctcctaaatttatatcgaaattaccaaatctgccattttgaaaataccctaaagtgaaccccctaaatcttccatctaaattactcacctatatcattgtgaaagatgatttgaactattcgctaaattttcatctaagttgccccaattttaatgttattaaaataaccaaaagtaagctaataattctacatctcaatatatatcccaaagtcctcctacatatgcttctaggttacccacttctacattgttgatatagaactaactcaaggtaaacatgcatgatacatacgaccattgcatcatgcggaccacatcatatcaatttccatgtcaaacacagctcaaactaaggtacggaggtgctacgcaaaggggaaagcacgtatggggatggaaaagcatatagaatagatggtacaagtccagaattgaataaagataaaagtatctatgaatatttcgtcataatatgaacgatagagagcagagatacgctattctgaatagcactaggaacaaattttatccacaaacttctaacaattatgtccttttaaaattattagcccgtgtagaagcaacacattgcttgatgggctagttatgataatcacccactcaaccaaaagctgaaggtatcacactgaagcgatcagattgcctcagtcaacactgtcaattcaagtccagttcaattggttcaccattaagcactactatactcaacaatgacatgtagtttaggcatgaaccaatggcacccaatactccaatatgcctacaagcacctcaaaacttaaaaggttctacaagctaattcacatatttacaggagatataaaagttaaatcttcagaagaaatttcgagcagcaagcatccacaagccctaacttacatctgataacatcaaattaacaccacatttcaagtaacaggcagctgtactacttttgtttcttaaacaataaatgtgaaaagtgaccacttcacaagtatagatttgtgaagaagctaaacattaaaattaatggccaactactgtatgttgcttatgatgggtacagtacaaacattacctgactgtagaatttctcaggatttccctcacggagattatgaatgtcaagggcaacttttgcatcacaaccgatacctgtcaccatagtaagctaaggttattcgacaaggagcgccgataaacgaagtttctgtgtacctaccgagatagttgttcatgtactttactagaagcacattctttgatttcttatcttctactgtcaccttccatctatcaaggatagtgactgctgcatgctctatgtcatgtaaaattgtgcaaaggccaccttgcttctcaacagcacctaggccacctccccatgataaaactctcgaaagatcattgccagtgccagctggaagaattgcaatgggtggaggtgattcataattttgcttatctatcgcgtcaagaacccaaccaacagtaccatcaccaccacacacaagtattctgaaatgtggtacctttctgaacaaaaataatcctgtttctggcccttgtgaagaacttaattcaaaaacctagatgaatgatatgaaacattagaaacacagaaatcataaatatctgaagcatttactaaggtgggtgctaaaatacatatgaaaacagaacattttttcccgaaaggccagcaagagttttactgaattatattagaaggatataagacaaaaggattgcaggcaaaccccctttgacagtatctacatgactgtaccccatggccttacaagccaggttggaccaaaaacacatcactagggaaagagccctacccgcagaaagaccacagccccatactccacggccttacaaggcaggttggaccaaaaacacatcactagtgaaagacccctacccgcagaaagaccacaaccccatactccacgcccttacaaggcaggttggaccaaaaacacgtcaactagtgaaccactacccgcagaaagatgatggcctggaggcccaacccagaaccaaaaacagaacactagccttcaaattccaagcacgttgacagcttctgttcagctgtgtgcctacgttttagtaggatggaaaacaagtctcctacacatgatccaacagcagaagatgtaggcaaacggtgttgcttcttcaaagggttcaagtttttacacactgtagatgcagtaaattatactaactgaattacctaacatccaaaaaaaaatctaggcttaccactccctctttaccatgcggttactacttactactgattagcacagagaagatggattttatttttaagtgaagccatcactagaaacatgacagaaggttgattatgatgatttcctcacataatatgaactgatccagcaccaagtggatgattttaagtaattgcatgcacccaactagtgatgcaatgagcatattctacaaaattgaatatattggtagcataccatgttgcctagctgagaagtgactcgacttaaagtaaagttttgtgtgagaagtatcatgacctgcaccggattcaaaagaaaatgtagcttgtgcttgagaagatctccgcgctgagccccacttttcttgttgataaaaattagaaggggtctggaatcagcaggcaattcagacaatgcgtacttaagtttaacttcaccggtctcatcattaccgagccttctggactccgatatgagttctctaccatcactctcactgctatcatgctcattctcaggactcctttgagcactgtcgccaattgtttttaattctccagccctctggtttgagttcaacgtggtatcacttgatgaatcatcgttgctgtcagatgaaaatctgttctgatgcttctcctttttagttcggtttaaacgcccccgcacagtggttgcaaactcatttgctccatgagttatagaactcaagatgctaccaggtttgctaatggcccggacaaaaagtggcgacagaataaggcgcttgaagggaccaaggtcgcaaatttcaccggtttcagtagccatggcagactggcaatcagcatgcaccaatcgttggcaccacatgcagcagtatatgggaggacctcccagaaaagactcactgcataactcctcacagtaactacagtactggccttcttcggattggtcagctatgtctgtccagagtacagtccattgatggaccacatgtttgaacccaaacattgagatgcatttgcagtctttctgagaatttgaagagcatattatgtgcgcagctgcaccgcaaacattgcagcggtgaaccatattttctgatgtcatcatctgcccaaggggctgagcaggtgagatagattccaagcatacacagcacatcattccttttgcacgaatcaatgattctgtgttccaaacatgttcagcagtaggaacctcatggtttctttcaaaattcttcctcttcgatctggcaattattttcatccagcttaaactgatctttcgccgccacactgaaaagaaatgaaaaaatgtccaaagaccgactaggccaacagtgaaccaagcagcaagtggtatccagaactctgatggagtaggggctctactgtaccagtggaacttgtgcatttccagctggtcttgcaaccagaccattatcacaatggatgggccaaacaatattttattcttgaatcgtggacatggaccataagaaactatagcctttcaaccatggcaatcttgatcagaacattagggacaaggtcaatcacatggaagcatgtgaatgtctcctgcaattgaaccacatgaacaaaaaatcacagatatattttttgaacgcaatggcttgaattctggctgtcaactaaaaaggaaagagttcaaatatgagcaaaaaaccacagatatgagtacgacaaagtgtaaaaaacatgatcaacagggcaaacagtcatgctaggcaaaaagcctttatgccataagtggttaaagcttaaaagttgtaacaaacacattagcttgaccatggaattgcttaaaaccatatacagtagtcagtaggtgtgagccaatttcgatcaaggatagactaagctcgcattcaccttaataggcagcctagtgaattaggcattacctgtggttcatagttcataagttgagcagttatagtctttttttcgcgagcaggccgaagctagtatgttaaaaaaaatataacagaagccagtattccattaagaggacagtagggttttaacattacaagcctgacgtcccactaacaccagcccttccctctgtcagagaggcgag

SEQ ID NO: 7889 - DNA, 5570 bp, Zea Mays
ctttaaagcctccgcgttagtccttaatgtcttactgagacgcgctagaggggggaaaaaagacatatcaggactggtttggcagcccaaaatccagcgggtttcctggccttttctcctgggagaaagcccaccagaaaattgtcctcggattattcatgtgtgtcatttggcagcccaatctcgtgcagatattcgttccattttcccgtcggaaacaaccctggccttaggaggccaggcgattctccgccgcctcgtctcgtcttcgctatgcaccagcacctccgtcgctccaacgccctgagcgcctccgtcgtttgattccggtttgcttctggtttctgccgcacaaggatctccgtgcagggcatcgacgtcgtgctcttcgcgccggacgacgccaaggccggatctccgtgcagccgtgcagggcatcacccacaagaagaagatcaagctccggcgagtacctctttccatctcctgtcgctgcctctaccatatctatctaaaggaacaaatttgagcgcatcttctgttgacagtgactttagtttgctattggtgctccagtaagaaaaatagatgtattttgttgatggtggcttcacaatctggcacatgactcatgaaaagctttgtttgacaaactattgtgaaggaacaagtatactgtcttttactacttcagtttgcttgacaaactattgtgatgatggataaagtgtgatgtgatgatggataaaccaatttactatgcttcagtttactttgtttgatttttcctgattttttgaagtattatttatagcatcacatagctatggatgaaccattttctgatgatggataaagttctcatccaatatagtagtatagagttgctgctggctatgttttgggactaaaacagctttggactaaatccttggttgccaaagggtggcaggaaattatatcctagtggggaaaatcctccatggaaatcgaggtgccatttaaatctcattggtggattttttttccatgggttttttccctattgctgccaaaccagtcctcatagaaatttttctcatatggaacgaaaatagccaaccattaattgtagtagactcggaccatcattgacaataatacatattttgtatttcaaagatacttgtccacttttgacattctgaaaggaacctcctaaatttatatcgaaattaccaaatctgccattttgaaaataccctaaagtgaaccccctaaatcttccatctaaattactcacctatatcattgtgaaagatgatttgaactattcgctaaattttcatctaagttgccccaattttaatgttattaaaataaccaaaagtaagctaataattctacatctcaatatatatcccaaagtcctcctacatatgcttctaggttacccacttctacattgttgatatagaactaactcaaggtaaacatgcatgatacatacgaccattgcatcatgcggaccacatcatatcaatttccatgtcaaacacagctcaaactaaggtacggaggtgctacgcaaaggggaaagcacgtatggggatggaaaagcatatagaatagatggtacaagtccagaattgaataaagataaaagtatctatgaatatttcgtcataatatgaacgatagagagcagagatacgctattctgaatagcactaggaacaaattttatccacaaacttctaacaattatgtccttttaaaattattagcccgtgtagaagcaacacattgcttgatgggctagttatgataatcacccactcaaccaaaagctgaaggtatcacactgaagcgatcagattgcctcagtcaacactgtcaattcaagtccagttcaattggttcaccattaagcactactatactcaacaatgacatgtagtttaggcatgaaccaatggcacccaatactccaatatgcctacaagcacctcaaaacttaaaaggttctacaagctaattcacatatttacaggagatataaaagttaaatcttcagaagaaatttcgagcagcaagcatccacaagccctaacttacatctgataacatcaaattaacaccacatttcaagtaacaggcagctgtactacttttgtttcttaaacaataaatgtgaaaagtgaccacttcacaagtatagatttgtgaagaagctaaacattaaaattaatggccaactactgtatgttgcttatgatgggtacagtacaaacattacctgactgtagaatttctcaggatttccctcacggagattatgaatgtcaagggcaacttttgcatcacaaccgatacctgtcaccatagtaagctaaggttattcgacaaggagcgccgataaacgaagtttctgtgtacctaccgagatagttgttcatgtactttactagaagcacattctttgatttcttatcttctactgtcaccttccatctatcaaggatagtgactgctgcatgctctatgtcatgtaaaattgtgcaaaggccaccttgcttctcaacagcacctaggccacctccccatgataaaactctcgaaagatcattgccagtgccagctggaagaattgcaatgggtggaggtgattcataattttgcttatctatcgcgtcaagaacccaaccaacagtaccatcaccaccacacacaagtattctgaaatgtggtacctttctgaacaaaaataatcctgtttctggcccttgtgaagaacttaattcaaaaacctagatgaatgatatgaaacattagaaacacagaaatcataaatatctgaagcatttactaaggtgggtgctaaaatacatatgaaaacagaacattttttcccgaaaggccagcaagagttttactgaattatattagaaggatataagacaaaaggattgcaggcaaaccccctttgacagtatctacatgactgtaccccatggccttacaagccaggttggaccaaaaacacatcactagggaaagagccctacccgcagaaagaccacagccccatactccacggccttacaaggcaggttggaccaaaaacacatcactagtgaaagacccctacccgcagaaagaccacaaccccatactccacgcccttacaaggcaggttggaccaaaaacacgtcaactagtgaaccactacccgcagaaagatgatggcctggaggcccaacccagaaccaaaaacagaacactagccttcaaattccaagcacgttgacagcttctgttcagctgtgtgcctacgttttagtaggatggaaaacaagtctcctacacatgatccaacagcagaagatgtaggcaaacggtgttgcttcttcaaagggttcaagtttttacacactgtagatgcagtaaattatactaactgaattacctaacatccaaaaaaaaatctaggcttaccactccctctttaccatgcggttactacttactactgattagcacagagaagatggattttatttttaagtgaagccatcactagaaacatgacagaaggttgattatgatgatttcctcacataatatgaactgatccagcaccaagtggatgattttaagtaattgcatgcacccaactagtgatgcaatgagcatattctacaaaattgaatatattggtagcataccatgttgcctagctgagaagtgactcgacttaaagtaaagttttgtgtgagaagtatcatgacctgcaccggattcaaaagaaaatgtagcttgtgcttgagaagatctccgcgctgagccccacttttcttgttgataaaaattagaaggggtctggaatcagcaggcaattcagacaatgcgtacttaagtttaacttcaccggtctcatcattaccgagccttctggactccgatatgagttctctaccatcactctcactgctatcatgctcattctcaggactcctttgagcactgtcgccaattgtttttaattctccagccctctggtttgagttcaacgtggtatcacttgatgaatcatcgttgctgtcagatgaaaatctgttctgatgcttctcctttttagttcggtttaaacgcccccgcacagtggttgcaaactcatttgctccatgagttatagaactcaagatgctaccaggtttgctaatggcccggacaaaaagtggcgacagaataaggcgcttgaagggaccaaggtcgcaaatttcaccggtttcagtagccatggcagactggcaatcagcatgcaccaatcgttggcaccacatgcagcagtatatgggaggacctcccagaaaagactcactgcataactcctcacagtaactacagtactggccttcttcggattggtcagctatgtctgtccagagtacagtccattgatggaccacatgtttgaacccaaacattgagatgcatttgcagtctttctgagaatttgaagagcatattatgtgcgcagctgcaccgcaaacattgcagcggtgaaccatattttctgatgtcatcatctgcccaaggggctgagcaggtgagatagattccaagcatacacagcacatcattccttttgcacgaatcaatgattctgtgttccaaacatgttcagcagtaggaacctcatggtttctttcaaaattcttcctcttcgatctggcaattattttcatccagcttaaactgatctttcgccgccacactgaaaagaaatgaaaaaatgtccaaagaccgactaggccaacagtgaaccaagcagcaagtggtatccagaactctgatggagtaggggctctactgtaccagtggaacttgtgcatttccagctggtcttgcaaccagaccattatcacaatggatgggccaaacaatattttattcttgaatcgtggacatggaccataagaaactatagcctttcaaccatggcaatcttgatcagaacattagggacaaggtcaatcacatggaagcatgtgaatgtctcctgcaattgaaccacatgaacaaaaaatcacagatatattttttgaacgcaatggcttgaattctggctgtcaactaaaaaggaaagagttcaaatatgagcaaaaaaccacagatatgagtacgacaaagtgtaaaaaacatgatcaacagggcaaacagtcatgctaggcaaaaagcctttatgccataagtggttaaagcttaaaagttgtaacaaacacattagcttgaccatggaattgcttaaaaccatatacagtagtcagtaggtgtgagccaatttcgatcaaggatagactaagctcgcattcaccttaataggcagcctagtgaattaggcattacctgtggttcatagttcataagttgagcagttatagtctttttttcgcgagcaggccgaagctagtatgttaaaaaaaatataacagaagccagtattccattaagaggacagtagggttttaacattacaagcctgacgtcccactaacaccagcccttccctctgtcagagaggcgag

SEQ ID NO: 7890 - DNA, 5647 bp, Zea Mays
ctttaaagcctccgcgttagtccttaatgtcttactgagacgcgctagaggggggaaaaaagacatatcaggactggtttggcagcccaaaatccagcgggtttcctggccttttctcctgggagaaagcccaccagaaaattgtcctcggattattcatgtgtgtcatttggcagcccaatctcgtgcagatattcgttccattttcccgtcggaaacaaccctggccttaggaggccaggcgattctccgccgcctcgtctcgtcttcgctatgcaccagcacctccgtcgctccaacgccctgagcgcctccgtcgtttgattccggtttgcttctggtttctgccgcacaagggcatcgacgtcgtgctcttcgcgccggacgacgccaaggccacgcagaccgccgacccgaacaggaagaagatcaagctccatgcagggcatcacccaaggccacgcagaccgccggacgactccaaggccggatctccgtgcagccgtgcagggcatcacccacaagaagaagatcaagctccggcgagtacctctttccatctcctgtcgctgcctctaccatatctatctaaaggaacaaatttgagcgcatcttctgttgacagtgactttagtttgctattggtgctccagtaagaaaaatagatgtattttgttgatggtggcttcacaatctggcacatgactcatgaaaagctttgtttgacaaactattgtgaaggaacaagtatactgtcttttactacttcagtttgcttgacaaactattgtgatgatggataaagtgtgatgtgatgatggataaaccaatttactatgcttcagtttactttgtttgatttttcctgattttttgaagtattatttatagcatcacatagctatggatgaaccattttctgatgatggataaagttctcatccaatatagtagtatagagttgctgctggctatgttttgggactaaaacagctttggactaaatccttggttgccaaagggtggcaggaaattatatcctagtggggaaaatcctccatggaaatcgaggtgccatttaaatctcattggtggattttttttccatgggttttttccctattgctgccaaaccagtcctcatagaaatttttctcatatggaacgaaaatagccaaccattaattgtagtagactcggaccatcattgacaataatacatattttgtatttcaaagatacttgtccacttttgacattctgaaaggaacctcctaaatttatatcgaaattaccaaatctgccattttgaaaataccctaaagtgaaccccctaaatcttccatctaaattactcacctatatcattgtgaaagatgatttgaactattcgctaaattttcatctaagttgccccaattttaatgttattaaaataaccaaaagtaagctaataattctacatctcaatatatatcccaaagtcctcctacatatgcttctaggttacccacttctacattgttgatatagaactaactcaaggtaaacatgcatgatacatacgaccattgcatcatgcggaccacatcatatcaatttccatgtcaaacacagctcaaactaaggtacggaggtgctacgcaaaggggaaagcacgtatggggatggaaaagcatatagaatagatggtacaagtccagaattgaataaagataaaagtatctatgaatatttcgtcataatatgaacgatagagagcagagatacgctattctgaatagcactaggaacaaattttatccacaaacttctaacaattatgtccttttaaaattattagcccgtgtagaagcaacacattgcttgatgggctagttatgataatcacccactcaaccaaaagctgaaggtatcacactgaagcgatcagattgcctcagtcaacactgtcaattcaagtccagttcaattggttcaccattaagcactactatactcaacaatgacatgtagtttaggcatgaaccaatggcacccaatactccaatatgcctacaagcacctcaaaacttaaaaggttctacaagctaattcacatatttacaggagatataaaagttaaatcttcagaagaaatttcgagcagcaagcatccacaagccctaacttacatctgataacatcaaattaacaccacatttcaagtaacaggcagctgtactacttttgtttcttaaacaataaatgtgaaaagtgaccacttcacaagtatagatttgtgaagaagctaaacattaaaattaatggccaactactgtatgttgcttatgatgggtacagtacaaacattacctgactgtagaatttctcaggatttccctcacggagattatgaatgtcaagggcaacttttgcatcacaaccgatacctgtcaccatagtaagctaaggttattcgacaaggagcgccgataaacgaagtttctgtgtacctaccgagatagttgttcatgtactttactagaagcacattctttgatttcttatcttctactgtcaccttccatctatcaaggatagtgactgctgcatgctctatgtcatgtaaaattgtgcaaaggccaccttgcttctcaacagcacctaggccacctccccatgataaaactctcgaaagatcattgccagtgccagctggaagaattgcaatgggtggaggtgattcataattttgcttatctatcgcgtcaagaacccaaccaacagtaccatcaccaccacacacaagtattctgaaatgtggtacctttctgaacaaaaataatcctgtttctggcccttgtgaagaacttaattcaaaaacctagatgaatgatatgaaacattagaaacacagaaatcataaatatctgaagcatttactaaggtgggtgctaaaatacatatgaaaacagaacattttttcccgaaaggccagcaagagttttactgaattatattagaaggatataagacaaaaggattgcaggcaaaccccctttgacagtatctacatgactgtaccccatggccttacaagccaggttggaccaaaaacacatcactagggaaagagccctacccgcagaaagaccacagccccatactccacggccttacaaggcaggttggaccaaaaacacatcactagtgaaagacccctacccgcagaaagaccacaaccccatactccacgcccttacaaggcaggttggaccaaaaacacgtcaactagtgaaccactacccgcagaaagatgatggcctggaggcccaacccagaaccaaaaacagaacactagccttcaaattccaagcacgttgacagcttctgttcagctgtgtgcctacgttttagtaggatggaaaacaagtctcctacacatgatccaacagcagaagatgtaggcaaacggtgttgcttcttcaaagggttcaagtttttacacactgtagatgcagtaaattatactaactgaattacctaacatccaaaaaaaaatctaggcttaccactccctctttaccatgcggttactacttactactgattagcacagagaagatggattttatttttaagtgaagccatcactagaaacatgacagaaggttgattatgatgatttcctcacataatatgaactgatccagcaccaagtggatgattttaagtaattgcatgcacccaactagtgatgcaatgagcatattctacaaaattgaatatattggtagcataccatgttgcctagctgagaagtgactcgacttaaagtaaagttttgtgtgagaagtatcatgacctgcaccggattcaaaagaaaatgtagcttgtgcttgagaagatctccgcgctgagccccacttttcttgttgataaaaattagaaggggtctggaatcagcaggcaattcagacaatgcgtacttaagtttaacttcaccggtctcatcattaccgagccttctggactccgatatgagttctctaccatcactctcactgctatcatgctcattctcaggactcctttgagcactgtcgccaattgtttttaattctccagccctctggtttgagttcaacgtggtatcacttgatgaatcatcgttgctgtcagatgaaaatctgttctgatgcttctcctttttagttcggtttaaacgcccccgcacagtggttgcaaactcatttgctccatgagttatagaactcaagatgctaccaggtttgctaatggcccggacaaaaagtggcgacagaataaggcgcttgaagggaccaaggtcgcaaatttcaccggtttcagtagccatggcagactggcaatcagcatgcaccaatcgttggcaccacatgcagcagtatatgggaggacctcccagaaaagactcactgcataactcctcacagtaactacagtactggccttcttcggattggtcagctatgtctgtccagagtacagtccattgatggaccacatgtttgaacccaaacattgagatgcatttgcagtctttctgagaatttgaagagcatattatgtgcgcagctgcaccgcaaacattgcagcggtgaaccatattttctgatgtcatcatctgcccaaggggctgagcaggtgagatagattccaagcatacacagcacatcattccttttgcacgaatcaatgattctgtgttccaaacatgttcagcagtaggaacctcatggtttctttcaaaattcttcctcttcgatctggcaattattttcatccagcttaaactgatctttcgccgccacactgaaaagaaatgaaaaaatgtccaaagaccgactaggccaacagtgaaccaagcagcaagtggtatccagaactctgatggagtaggggctctactgtaccagtggaacttgtgcatttccagctggtcttgcaaccagaccattatcacaatggatgggccaaacaatattttattcttgaatcgtggacatggaccataagaaactatagcctttcaaccatggcaatcttgatcagaacattagggacaaggtcaatcacatggaagcatgtgaatgtctcctgcaattgaaccacatgaacaaaaaatcacagatatattttttgaacgcaatggcttgaattctggctgtcaactaaaaaggaaagagttcaaatatgagcaaaaaaccacagatatgagtacgacaaagtgtaaaaaacatgatcaacagggcaaacagtcatgctaggcaaaaagcctttatgccataagtggttaaagcttaaaagttgtaacaaacacattagcttgaccatggaattgcttaaaaccatatacagtagtcagtaggtgtgagccaatttcgatcaaggatagactaagctcgcattcaccttaataggcagcctagtgaattaggcattacctgtggttcatagttcataagttgagcagttatagtctttttttcgcgagcaggccgaagctagtatgttaaaaaaaatataacagaagccagtattccattaagaggacagtagggttttaacattacaagcctgacgtcccactaacaccagcccttccctctgtcagagaggcgag

SEQ ID NO: 7891 - DNA, 6342 bp, Zea Mays
ctttaaagcctccgcgttagtccttaatgtcttactgagacgcgctagaggggggaaaaaagacatatcaggactggtttggcagcccaaaatccagcgggtttcctggccttttctcctgggagaaagcccaccagaaaattgtcctcggattattcatgtgtgtcatttggcagcccaatctcgtgcagatattcgttccattttcccgtcggaaacaaccctggccttaggaggccaggcgattctccgccgcctcgtctcgtcttcgctatgcaccagcacctccgtcgctccaacgccctgagcgcctccgtcgtttgattccggtttgcttctggtttctgccgcacaaggatctccgtgcagggcatcgacgtcgtgctcttcgcgccggacgacgccaaggccacgcagaccgccgacccgaacaggaagaagatcaagctccatgcagggcatcacccaaggccacgcagaccgccggacgactccaaggccggatctccgtgcagccgtgcagggcatcacccacaagaagaagatcaagctccggcgaggtcagtacctacctaccttcagatctggacctgctcctttgtgtcctagtcgtaccattacagattgctctgtacatcgtagattggcagtgttctgaatatctatagcaggcctgatacttcctatatttgtttcattgctacatacatattaattacacgaacattcgatctataaaaaaagtacaagtgatactgtaatatacgtgaggaagtatcggaggatactgcaatctgaaaaaaattgaaatatgatactaaaatatgagatttgcaattcatgtagattgatttgcaatctgaaaaaagattggggaggtgtgtagattaatttcacaactgatcgctagcaccaatcaatgccagttcatctagtggtcagaatgtattggatttggaggaaggcatatgggcttgtcggtgtccgtctggacatttcctattgacatggacattttcttcttcctgtgaacgcatatctccatatttttcttctatgtttttcattattcctagagctagttgccagtggctatattttggagataaggtagtcaaagtatgttaagttaggtgtcataagcttaacatccacttgtaggttccaatgattggaattttttgcataccgacttctgattgatttgttgcatgtttgttttaacactatgcttccttgcagtacctctttccatctcctgtcgctgcctctaccatatctatctaaaggaacaaatttgagcgcatcttctgttgacagtgactttagtttgctattggtgctccagtaagaaaaatagatgtattttgttgatggtggcttcacaatctggcacatgactcatgaaaagctttgtttgacaaactattgtgaaggaacaagtatactgtcttttactacttcagtttgcttgacaaactattgtgatgatggataaagtgtgatgtgatgatggataaaccaatttactatgcttcagtttactttgtttgatttttcctgattttttgaagtattatttatagcatcacatagctatggatgaaccattttctgatgatggataaagttctcatccaatatagtagtatagagttgctgctggctatgttttgggactaaaacagctttggactaaatccttggttgccaaagggtggcaggaaattatatcctagtggggaaaatcctccatggaaatcgaggtgccatttaaatctcattggtggattttttttccatgggttttttccctattgctgccaaaccagtcctcatagaaatttttctcatatggaacgaaaatagccaaccattaattgtagtagactcggaccatcattgacaataatacatattttgtatttcaaagatacttgtccacttttgacattctgaaaggaacctcctaaatttatatcgaaattaccaaatctgccattttgaaaataccctaaagtgaaccccctaaatcttccatctaaattactcacctatatcattgtgaaagatgatttgaactattcgctaaattttcatctaagttgccccaattttaatgttattaaaataaccaaaagtaagctaataattctacatctcaatatatatcccaaagtcctcctacatatgcttctaggttacccacttctacattgttgatatagaactaactcaaggtaaacatgcatgatacatacgaccattgcatcatgcggaccacatcatatcaatttccatgtcaaacacagctcaaactaaggtacggaggtgctacgcaaaggggaaagcacgtatggggatggaaaagcatatagaatagatggtacaagtccagaattgaataaagataaaagtatctatgaatatttcgtcataatatgaacgatagagagcagagatacgctattctgaatagcactaggaacaaattttatccacaaacttctaacaattatgtccttttaaaattattagcccgtgtagaagcaacacattgcttgatgggctagttatgataatcacccactcaaccaaaagctgaaggtatcacactgaagcgatcagattgcctcagtcaacactgtcaattcaagtccagttcaattggttcaccattaagcactactatactcaacaatgacatgtagtttaggcatgaaccaatggcacccaatactccaatatgcctacaagcacctcaaaacttaaaaggttctacaagctaattcacatatttacaggagatataaaagttaaatcttcagaagaaatttcgagcagcaagcatccacaagccctaacttacatctgataacatcaaattaacaccacatttcaagtaacaggcagctgtactacttttgtttcttaaacaataaatgtgaaaagtgaccacttcacaagtatagatttgtgaagaagctaaacattaaaattaatggccaactactgtatgttgcttatgatgggtacagtacaaacattacctgactgtagaatttctcaggatttccctcacggagattatgaatgtcaagggcaacttttgcatcacaaccgatacctgtcaccatagtaagctaaggttattcgacaaggagcgccgataaacgaagtttctgtgtacctaccgagatagttgttcatgtactttactagaagcacattctttgatttcttatcttctactgtcaccttccatctatcaaggatagtgactgctgcatgctctatgtcatgtaaaattgtgcaaaggccaccttgcttctcaacagcacctaggccacctccccatgataaaactctcgaaagatcattgccagtgccagctggaagaattgcaatgggtggaggtgattcataattttgcttatctatcgcgtcaagaacccaaccaacagtaccatcaccaccacacacaagtattctgaaatgtggtacctttctgaacaaaaataatcctgtttctggcccttgtgaagaacttaattcaaaaacctagatgaatgatatgaaacattagaaacacagaaatcataaatatctgaagcatttactaaggtgggtgctaaaatacatatgaaaacagaacattttttcccgaaaggccagcaagagttttactgaattatattagaaggatataagacaaaaggattgcaggcaaaccccctttgacagtatctacatgactgtaccccatggccttacaagccaggttggaccaaaaacacatcactagggaaagagccctacccgcagaaagaccacagccccatactccacggccttacaaggcaggttggaccaaaaacacatcactagtgaaagacccctacccgcagaaagaccacaaccccatactccacgcccttacaaggcaggttggaccaaaaacacgtcaactagtgaaccactacccgcagaaagatgatggcctggaggcccaacccagaaccaaaaacagaacactagccttcaaattccaagcacgttgacagcttctgttcagctgtgtgcctacgttttagtaggatggaaaacaagtctcctacacatgatccaacagcagaagatgtaggcaaacggtgttgcttcttcaaagggttcaagtttttacacactgtagatgcagtaaattatactaactgaattacctaacatccaaaaaaaaatctaggcttaccactccctctttaccatgcggttactacttactactgattagcacagagaagatggattttatttttaagtgaagccatcactagaaacatgacagaaggttgattatgatgatttcctcacataatatgaactgatccagcaccaagtggatgattttaagtaattgcatgcacccaactagtgatgcaatgagcatattctacaaaattgaatatattggtagcataccatgttgcctagctgagaagtgactcgacttaaagtaaagttttgtgtgagaagtatcatgacctgcaccggattcaaaagaaaatgtagcttgtgcttgagaagatctccgcgctgagccccacttttcttgttgataaaaattagaaggggtctggaatcagcaggcaattcagacaatgcgtacttaagtttaacttcaccggtctcatcattaccgagccttctggactccgatatgagttctctaccatcactctcactgctatcatgctcattctcaggactcctttgagcactgtcgccaattgtttttaattctccagccctctggtttgagttcaacgtggtatcacttgatgaatcatcgttgctgtcagatgaaaatctgttctgatgcttctcctttttagttcggtttaaacgcccccgcacagtggttgcaaactcatttgctccatgagttatagaactcaagatgctaccaggtttgctaatggcccggacaaaaagtggcgacagaataaggcgcttgaagggaccaaggtcgcaaatttcaccggtttcagtagccatggcagactggcaatcagcatgcaccaatcgttggcaccacatgcagcagtatatgggaggacctcccagaaaagactcactgcataactcctcacagtaactacagtactggccttcttcggattggtcagctatgtctgtccagagtacagtccattgatggaccacatgtttgaacccaaacattgagatgcatttgcagtctttctgagaatttgaagagcatattatgtgcgcagctgcaccgcaaacattgcagcggtgaaccatattttctgatgtcatcatctgcccaaggggctgagcaggtgagatagattccaagcatacacagcacatcattccttttgcacgaatcaatgattctgtgttccaaacatgttcagcagtaggaacctcatggtttctttcaaaattcttcctcttcgatctggcaattattttcatccagcttaaactgatctttcgccgccacactgaaaagaaatgaaaaaatgtccaaagaccgactaggccaacagtgaaccaagcagcaagtggtatccagaactctgatggagtaggggctctactgtaccagtggaacttgtgcatttccagctggtcttgcaaccagaccattatcacaatggatgggccaaacaatattttattcttgaatcgtggacatggaccataagaaactatagcctttcaaccatggcaatcttgatcagaacattagggacaaggtcaatcacatggaagcatgtgaatgtctcctgcaattgaaccacatgaacaaaaaatcacagatatattttttgaacgcaatggcttgaattctggctgtcaactaaaaaggaaagagttcaaatatgagcaaaaaaccacagatatgagtacgacaaagtgtaaaaaacatgatcaacagggcaaacagtcatgctaggcaaaaagcctttatgccataagtggttaaagcttaaaagttgtaacaaacacattagcttgaccatggaattgcttaaaaccatatacagtagtcagtaggtgtgagccaatttcgatcaaggatagactaagctcgcattcaccttaataggcagcctagtgaattaggcattacctgtggttcatagttcataagttgagcagttatagtctttttttcgcgagcaggccgaagctagtatgttaaaaaaaatataacagaagccagtattccattaagaggacagtagggttttaacattacaagcctgacgtcccactaacaccagcccttccctctgtcagagaggcgag

SEQ ID NO: 7892 - DNA, 6590 bp, Zea Mays
caactagtagtttagtgcaactaaccatgtagtaatggcggtggtctacatgtaattagtcacaattcactcccgcacaacctctggtatctcgatctcggtgccatcgacttccaaccgaacttgccatggtaagtccacaaaagccctgtcaatgatgctcttggccccttccctcgcatatagcaccttatttaagaactgatgaagcccaacaaagaaacataagagtcatcttaatatttaataactaaagattctctttaaagcctccgcgttagtccttaatgtcttactgagacgcgctagaggggggaaaaaagacatatcaggactggtttggcagcccaaaatccagcgggtttcctggccttttctcctgggagaaagcccaccagaaaattgtcctcggattattcatgtgtgtcatttggcagcccaatctcgtgcagatattcgttccattttcccgtcggaaacaaccctggccttaggaggccaggcgattctccgccgcctcgtctcgtcttcgctatgcaccagcacctccgtcgctccaacgccctgagcgcctccgtcgtttgattccggtttgcttctggtttctgccgcacaagggcatcgacgtcgtgctcttcgcgccggacgacgccaaggccacgcagaccgccgacccgaacaggaagaagatcaagctccatgcagggcatcacccaaggccacgcagaccgccggacgactccaaggccggatctccgtgcagccgtgcagggcatcacccacaagaagaagatcaagctccggcgaggtcagtacctacctaccttcagatctggacctgctcctttgtgtcctagtcgtaccattacagattgctctgtacatcgtagattggcagtgttctgaatatctatagcaggcctgatacttcctatatttgtttcattgctacatacatattaattacacgaacattcgatctataaaaaaagtacaagtgatactgtaatatacgtgaggaagtatcggaggatactgcaatctgaaaaaaattgaaatatgatactaaaatatgagatttgcaattcatgtagattgatttgcaatctgaaaaaagattggggaggtgtgtagattaatttcacaactgatcgctagcaccaatcaatgccagttcatctagtggtcagaatgtattggatttggaggaaggcatatgggcttgtcggtgtccgtctggacatttcctattgacatggacattttcttcttcctgtgaacgcatatctccatatttttcttctatgtttttcattattcctagagctagttgccagtggctatattttggagataaggtagtcaaagtatgttaagttaggtgtcataagcttaacatccacttgtaggttccaatgattggaattttttgcataccgacttctgattgatttgttgcatgtttgttttaacactatgcttccttgcagtacctctttccatctcctgtcgctgcctctaccatatctatctaaaggaacaaatttgagcgcatcttctgttgacagtgactttagtttgctattggtgctccagtaagaaaaatagatgtattttgttgatggtggcttcacaatctggcacatgactcatgaaaagctttgtttgacaaactattgtgaaggaacaagtatactgtcttttactacttcagtttgcttgacaaactattgtgatgatggataaagtgtgatgtgatgatggataaaccaatttactatgcttcagtttactttgtttgatttttcctgattttttgaagtattatttatagcatcacatagctatggatgaaccattttctgatgatggataaagttctcatccaatatagtagtatagagttgctgctggctatgttttgggactaaaacagctttggactaaatccttggttgccaaagggtggcaggaaattatatcctagtggggaaaatcctccatggaaatcgaggtgccatttaaatctcattggtggattttttttccatgggttttttccctattgctgccaaaccagtcctcatagaaatttttctcatatggaacgaaaatagccaaccattaattgtagtagactcggaccatcattgacaataatacatattttgtatttcaaagatacttgtccacttttgacattctgaaaggaacctcctaaatttatatcgaaattaccaaatctgccattttgaaaataccctaaagtgaaccccctaaatcttccatctaaattactcacctatatcattgtgaaagatgatttgaactattcgctaaattttcatctaagttgccccaattttaatgttattaaaataaccaaaagtaagctaataattctacatctcaatatatatcccaaagtcctcctacatatgcttctaggttacccacttctacattgttgatatagaactaactcaaggtaaacatgcatgatacatacgaccattgcatcatgcggaccacatcatatcaatttccatgtcaaacacagctcaaactaaggtacggaggtgctacgcaaaggggaaagcacgtatggggatggaaaagcatatagaatagatggtacaagtccagaattgaataaagataaaagtatctatgaatatttcgtcataatatgaacgatagagagcagagatacgctattctgaatagcactaggaacaaattttatccacaaacttctaacaattatgtccttttaaaattattagcccgtgtagaagcaacacattgcttgatgggctagttatgataatcacccactcaaccaaaagctgaaggtatcacactgaagcgatcagattgcctcagtcaacactgtcaattcaagtccagttcaattggttcaccattaagcactactatactcaacaatgacatgtagtttaggcatgaaccaatggcacccaatactccaatatgcctacaagcacctcaaaacttaaaaggttctacaagctaattcacatatttacaggagatataaaagttaaatcttcagaagaaatttcgagcagcaagcatccacaagccctaacttacatctgataacatcaaattaacaccacatttcaagtaacaggcagctgtactacttttgtttcttaaacaataaatgtgaaaagtgaccacttcacaagtatagatttgtgaagaagctaaacattaaaattaatggccaactactgtatgttgcttatgatgggtacagtacaaacattacctgactgtagaatttctcaggatttccctcacggagattatgaatgtcaagggcaacttttgcatcacaaccgatacctgtcaccatagtaagctaaggttattcgacaaggagcgccgataaacgaagtttctgtgtacctaccgagatagttgttcatgtactttactagaagcacattctttgatttcttatcttctactgtcaccttccatctatcaaggatagtgactgctgcatgctctatgtcatgtaaaattgtgcaaaggccaccttgcttctcaacagcacctaggccacctccccatgataaaactctcgaaagatcattgccagtgccagctggaagaattgcaatgggtggaggtgattcataattttgcttatctatcgcgtcaagaacccaaccaacagtaccatcaccaccacacacaagtattctgaaatgtggtacctttctgaacaaaaataatcctgtttctggcccttgtgaagaacttaattcaaaaacctagatgaatgatatgaaacattagaaacacagaaatcataaatatctgaagcatttactaaggtgggtgctaaaatacatatgaaaacagaacattttttcccgaaaggccagcaagagttttactgaattatattagaaggatataagacaaaaggattgcaggcaaaccccctttgacagtatctacatgactgtaccccatggccttacaagccaggttggaccaaaaacacatcactagggaaagagccctacccgcagaaagaccacagccccatactccacggccttacaaggcaggttggaccaaaaacacatcactagtgaaagacccctacccgcagaaagaccacaaccccatactccacgcccttacaaggcaggttggaccaaaaacacgtcaactagtgaaccactacccgcagaaagatgatggcctggaggcccaacccagaaccaaaaacagaacactagccttcaaattccaagcacgttgacagcttctgttcagctgtgtgcctacgttttagtaggatggaaaacaagtctcctacacatgatccaacagcagaagatgtaggcaaacggtgttgcttcttcaaagggttcaagtttttacacactgtagatgcagtaaattatactaactgaattacctaacatccaaaaaaaaatctaggcttaccactccctctttaccatgcggttactacttactactgattagcacagagaagatggattttatttttaagtgaagccatcactagaaacatgacagaaggttgattatgatgatttcctcacataatatgaactgatccagcaccaagtggatgattttaagtaattgcatgcacccaactagtgatgcaatgagcatattctacaaaattgaatatattggtagcataccatgttgcctagctgagaagtgactcgacttaaagtaaagttttgtgtgagaagtatcatgacctgcaccggattcaaaagaaaatgtagcttgtgcttgagaagatctccgcgctgagccccacttttcttgttgataaaaattagaaggggtctggaatcagcaggcaattcagacaatgcgtacttaagtttaacttcaccggtctcatcattaccgagccttctggactccgatatgagttctctaccatcactctcactgctatcatgctcattctcaggactcctttgagcactgtcgccaattgtttttaattctccagccctctggtttgagttcaacgtggtatcacttgatgaatcatcgttgctgtcagatgaaaatctgttctgatgcttctcctttttagttcggtttaaacgcccccgcacagtggttgcaaactcatttgctccatgagttatagaactcaagatgctaccaggtttgctaatggcccggacaaaaagtggcgacagaataaggcgcttgaagggaccaaggtcgcaaatttcaccggtttcagtagccatggcagactggcaatcagcatgcaccaatcgttggcaccacatgcagcagtatatgggaggacctcccagaaaagactcactgcataactcctcacagtaactacagtactggccttcttcggattggtcagctatgtctgtccagagtacagtccattgatggaccacatgtttgaacccaaacattgagatgcatttgcagtctttctgagaatttgaagagcatattatgtgcgcagctgcaccgcaaacattgcagcggtgaaccatattttctgatgtcatcatctgcccaaggggctgagcaggtgagatagattccaagcatacacagcacatcattccttttgcacgaatcaatgattctgtgttccaaacatgttcagcagtaggaacctcatggtttctttcaaaattcttcctcttcgatctggcaattattttcatccagcttaaactgatctttcgccgccacactgaaaagaaatgaaaaaatgtccaaagaccgactaggccaacagtgaaccaagcagcaagtggtatccagaactctgatggagtaggggctctactgtaccagtggaacttgtgcatttccagctggtcttgcaaccagaccattatcacaatggatgggccaaacaatattttattcttgaatcgtggacatggaccataagaaactatagcctttcaaccatggcaatcttgatcagaacattagggacaaggtcaatcacatggaagcatgtgaatgtctcctgcaattgaaccacatgaacaaaaaatcacagatatattttttgaacgcaatggcttgaattctggctgtcaactaaaaaggaaagagttcaaatatgagcaaaaaaccacagatatgagtacgacaaagtgtaaaaaacatgatcaacagggcaaacagtcatgctaggcaaaaagcctttatgccataagtggttaaagcttaaaagttgtaacaaacacattagcttgaccatggaattgcttaaaaccatatacagtagtcagtaggtgtgagccaatttcgatcaaggatagactaagctcgcattcaccttaataggcagcctagtgaattaggcattacctgtggttcatagttcataagttgagcagttatagtctttttttcgcgagcaggccgaagctagtatgttaaaaaaaatataacagaagccagtattccattaagaggacagtagggttttaacattacaagcctgacgtcccactaacaccagcccttccctctgtcagagaggcgag

SEQ ID NO: 7893 - DNA, 738 bp, Zea Mays
agctatgctagatgagatcctggattatgtgaagtttctaaggctttagcctttaggtcaaggttctaagcatgagcaagctgggttatgatggtgttgtggcactgctggttgccgatatatcactttcaatcggtcctgaccagattgaagctctgtatcagtatgccaaatttcagtttgagtgtggtaactactcaggggctgctgattacctttaccagtatggtgctttgtgcacaaacagtgagcgaaatgtgagtgccctctggggaaagctggcagcagaaatcctaatgcaaaactgggacctagctttggaggaactcaaccgcttgaaggaaataattgattcaaagaacttctcatcacctctgaatcagctccagaataggatatggctgatgcattgggctctgttcatcttctttaaccatatcaggtacttgaatgctatacagacaaatgcacaccatcttattaggtatctagctactgcagttgttgtcaacaaaaggagaaggaatatgcttaaagagttgattaaggtcattcaacaggagcaccatacctacaaggatcccataactgaatttctggaatgcttatatgttaactatgtagttgtgggcttttgaacaatagctagagtgatatgaaacattagtgatgtagttgtgggcttttgaactgcttcaagctggagtgatgtcgttgtggtgtttttgtgactgatca

SEQ ID NO: 7894 - DNA, 243 bp, Zea Mays
atgtacattttattgctcacgatctgtagaactgcaaccgtgctccatcagacagccggcaagaacttctcgccttcagcagcgggcttcgattgctcacccactttccggaaaactagcttctgttgcggaagctggccgttagagggcaccgtgacctgggtgtccacaaagatgctgtcctcgtccttgaaatcacctctgaggatgcccttcgcgagttcgttctccacgtgctgttga

SEQ ID NO: 7895 - DNA, 1984 bp, Zea Mays
ctcttccatttggcctgccttcgagtgattttagtgtagctatacagtctggccatatgtattatgcactagttaggtgagtttaagtcaactgcacaatctttcttttactcctaaaagccttgtaacaaggatgcactggtaagtgatattgttgtatagaacagaacataattgtcaggtatatgtaactcatatttgaagctacccaagatgatgagacttctttaattattttattattgtaggtggtttgaatgctttccacttgctaactatgttcagttttttttaaataacacgagaaacaaaaaatatggctccacatcttagcctgttgtcttatattgtttgagtatcaccattacattgttcattaagttagtgtctgcgaagaggacaatgtttcttttgtactatgtttggttgagtatcttatgcagccatgctttaattttaataaaacttgcttagtggtgtgcagcgaaacttggccatctttagttccttcgcttgctccggctgttgcttatctagcctagccaagcaatatgttagttagatctgaagagaatgctttgagtaactgtttcagttgtgttctatgatttcaaaacaaaagaagcaaacaactagtggccctaacatgtttgcatcagcctctcctcatgtgggctagttgttcctttcctagcgacataaggtctacccccaagtgaaatcagggtcttcaagatagcttactgagatgtggggttttgcatcaaacgcttgggcagctgggctggagaagaggagttccccaaaccgcacttcctcgagtgctgcttattctgacgacgaagcatcctcgtgcacaagcagggaagaaggcctggagtgcccgatatgttgggagtctttcaacatagtggagaatgtgccttatgcgctatggtgcggacacaccatgtgcaagaactgcatcctagggcttcaatgggccgtcatcaaagtcccaaccgtgccgatccagctaccgttcttcatctgctgtccctggtgcaacctcctgtcgccccgcgtactttacaaggggaacctcacgttcccacgaaagaactatttcctcctctggatggtcgaggggatgaacggcgagcgggccagatcacgcccagctattcgcagcgagcagcatactccgtggctctcaagcagcagcagcgtggcaaatggaaatgcaggctgttcaaatcccactcgacgccacctcccgccaccatctgttgacacttcgcccaccaacgcaaatcatgccaactacggggggtcccctctgctgaacgcagggagggtacaagcttcgctgcgcaaatccctgtcgttcctggtccacctgactgccaagtttcccctggtgttcgtcttcctcctcatagtgctgtatgcgatcccagccagcgcagcagtcctgttactgtatatccttatcactgtgctgtttgcgcttccctcgttcctgatactgtattttgcatatccgagcctggactggcttgttagagagatctttgcctgagattttttgttcggaaaaaaaaatctcaatgctgttgttggggtctgtgtaactgaattctccctagattttgttgcaagtgttgaagttattgccaagttttggttttggacccatgccgacatgtgatagatatgtttacctcaagtctccatggtatggaaggtcctctgttgctgtgttgcattgcaacacatcagcgtgctctgtgctgctgacatctgttatgttggcttgtatcgcttgagtgcttggaatggcagggattgacgaagtgtgggggtatctgaaaagaaaagttctttttttttctggatttggtatggcttctcgaaatatatttgtgtcaagctgcctaaccactttgttatccttagaagtggggggtagtgacaactgttttctgaaacaaaactgtttaac

SEQ ID NO: 7896 - DNA, 3792 bp, Zea Mays
gatttagtttaaatatgaactagcggacggcaaatattaaatatctggaaatggaggtcgtattaattaggtttaataatttcttctcgttgtttagtcttcatctatattattagttttataactaaactatatttaatatctatttaatatctgtaattgacattcaaaatttttatatgatccatactataaacttttagttagggaccaaacacacactttaaacaatacaaaaaaaaccccaaagtcggctctctcgagtctgctcgaatcttgatccaccacaacacgcggttccccgagtcgaaggctcgaagcagcagagccagcagcgagccgccgcccgccgccgatggcgtccccatcgccggcttccgcgcggccgcagcgctctcctgacgaggtggaggacatcatcctccgcaagatcctcctcgtctccctgacgcccccggccaaccccagcccagccgtcgcctacctcgagctcaccgccgccgagctcctctctgagtcgcgccctctcctcgccctgcgcgatgccgccgagcgcctcctcatcgaccgcctctcgctcccggacccgcccgccgggtccccgacccctttcgcctacctcgtctccgctttccgccgcgccgccgacgaggcgcgtaagatctccaccatccgcgacgccgctctccgggcgcgcctcgcagcctccatagcgcacctccgggccctcatcctctcctacgcgcgcatcgtcgccgggaatcccgacaccttccccaccccgcccggcgcgcaacaccccgcctccgacctcctcgtattcctcctcgctgaggcagccgacccgctcgaccccaccccggcccccggggcgccgccgccgccgggcttcattgatgagttcttaggcagcgcggactatgactccatcgagccggccatgggggagctatacgagctccttaggcagagtgtcgataaggtttcggccctcggtgactttcagcgcccattgcggttgctcaggcggcttgtggggatccccaattgtgccaaggccctggttaaccatcctaagtggataccaaagaatcagatcatgctcattggggaagggagggtcatggagctatacagtgtactcggggccttcttccatgtaagcgccatccgagaccgagagttcgctagcaagcctgatgtggggcaacagtgtttctcagaggcatcttcacgtcggccagctgacttgttgtcatctttcacaacaatcaagagtgttatgaatggcttgtatgatggccttaaagatgtccttttaatccttctaaaaaatttggatactcgagaaaaggttcttgagtatatagcagaagtgataaataaaaatgcatccagatctggcatgcaggtggacccattaaaatgtgcgagttcaggtatgtttgtgaatcttagcgctgtgatgctccgtctatgcgagccttttctggataacatggaagcaaagaaggataagattgatgtcaattacctcttctgcaacaatagaattgatttcaaagatttgacagctataaacgcgtcttcagaagaagtctcgtcttggatagagagcataaacaatgagcatgctcaaaataatgccagtggagaggctcgatttgcggaatcacaggaagccacaagctctggcaaaaatagtacggcctcacaacttaggtgctcaaagaaggagaatttctcatttatttgcgaatgtttcttcatgacctcaagagtacttaatctcgggttgatgaaagctgtatcggacttcaaacatatttctcaggttcgaagatgatttggaatcaaacagagcagtgagagatcaaggagggggttcaccgcagcttgagcaagatataactcgcttggagaaaattgtcgaaattttatcacaggacaaattctgttatgaagctcagatactacgggttaatgatactctggtcagttaacctagttggcggatttaagatgcctttgccatcacaatgtcccaaggagtttgcttgcattccagaacattttcttgatgatgcaatggatttacttgttctaacctctagaattccaaaggctttggaaagctttgtattggatgactttctcagcttcatcattatgttcatgggaagcacatcttacattaagaatccttacctaagagcaaagatggttgaagttttgaattgctggatgccacaaagaagtggcttgaattctacagcctcattgtttgaggggcaccaactgtgtcttgactaccttgttggaaatcttctaaagctttatgtggatattgaattcactggctcccatacacaattttttgacaagtttaacattcgacataatattgctgagcttctggagtatttatgggatgttcctagtcaccgaaacgcatggagacaaatagctaaagaggaggagaagggtgtatacttaaattttcttaactttctcataaatgatagcatctatcttcttgacgagagtttgaacaaaattcttgaactgaaagaaatagaggctgaaatggctaacatagttgagtgggagcgcagacctgctcaagaaagagaggagcggctgcgtgtatttcatcagtgggaaaatattgttcgttttgacatgaggctagccaatgaggatgttgggatgcttgcattcacctctgaacaaattccagcacctttccttctccctgaaatggtggaaagggttgcgagcatgcttaattacttcctcttgcaacttgctggtccccagaggaaatctttgactgtaaaggatccggagaagtacgagttcaagccgaagcagcttttgaaacagattgccaccatctatgtccatatctcaaggggcgacaaggaatctgtcttctcagctgcaatctcgaaagatggcagagcatacaatgatcagttgttttctagtgcggctaatattctgtggaagattgggggtgatcccaaaatcatacaggagtttgtgcaacttgctggtagggcaaaagctgctgcttctgaagctatggatgctgaggcaatccttggggacataccagatgaattcctcgatccaattcagtatactctaatgaaagatcctgtgacactgccatcgtcaaaggtcacagtagaccggcccgtaattatcaggcatctgctgagtgattctacagatccatttaaccgctcccacctcactcaagacatgctgataccaaacacggagctcaagttgcagatcgaggagtttgtccggtcccagcagtcgagaaagcgaactgctgcggcgttgttggagattggcgaagcggagggtactgatgatatggccgaatgaattgtgccaggagcaggggatggacacattttttttgtggggaaagagtgatggttaattcacatgaaatgtatcggtccatctgtccgtataaagttggtttcccggcttgtgtccctgttgcctcgattctttgtaaatattgtaggtgcacacctgatacaaatgtagttatagaggaagcctgtcagcccgtctcatcaacaatgtgttttacgatatccccactacaactttttttaacacgatattatcactataacttgatatgtgtgttgggctgagaagcgtttgccttcgccttgttggttctccgcgataagtgcgaacaagccctggtcttctcatttctgcgaaccaacaatcacaagtgaattatttatgccagtt

SEQ ID NO: 7897 - DNA, 3803 bp, Zea Mays
gatttagtttaaatatgaactagcggacggcaaatattaaatatctggaaatggaggtcgtattaattaggtttaataatttcttctcgttgtttagtcttcatctatattattagttttataactaaactatatttaatatctatttaatatctgtaattgacattcaaaatttttatatgatccatactataaacttttagttagggaccaaacacacactttaaacaatacaaaaaaaaccccaaagtcggctctctcgagtctgctcgaatcttgatccaccacaacacgcggttccccgagtcgaaggctcgaagcagcagagccagcagcgagccgccgcccgccgccgatggcgtccccatcgccggcttccgcgcggccgcagcgctctcctgacgaggtggaggacatcatcctccgcaagatcctcctcgtctccctgacgcccccggccaaccccagcccagccgtcgcctacctcgagctcaccgccgccgagctcctctctgagtcgcgccctctcctcgccctgcgcgatgccgccgagcgcctcctcatcgaccgcctctcgctcccggacccgcccgccgggtccccgacccctttcgcctacctcgtctccgctttccgccgcgccgccgacgaggcgcgtaagatctccaccatccgcgacgccgctctccgggcgcgcctcgcagcctccatagcgcacctccgggccctcatcctctcctacgcgcgcatcgtcgccgggaatcccgacaccttccccaccccgcccggcgcgcaacaccccgcctccgacctcctcgtattcctcctcgctgaggcagccgacccgctcgaccccaccccggcccccggggcgccgccgccgccgggcttcattgatgagttcttaggcagcgcggactatgactccatcgagccggccatgggggagctatacgagctccttaggcagagtgtcgataaggtttcggccctcggtgactttcagcgcccattgcggttgctcaggcggcttgtggggatccccaattgtgccaaggccctggttaaccatcctaagtggataccaaagaatcagatcatgctcattggggaagggagggtcatggagctatacagtgtactcggggccttcttccatgtaagcgccatccgagaccgagagttcgctagcaagcctgatgtggggcaacagtgtttctcagaggcatcttcacgtcggccagctgacttgttgtcatctttcacaacaatcaagagtgttatgaatggcttgtatgatggccttaaagatgtccttttaatccttctaaaaaatttggatactcgagaaaaggttcttgagtatatagcagaagtgataaataaaaatgcatccagatctggcatgcaggtggacccattaaaatgtgcgagttcaggtatgtttgtgaatcttagcgctgtgatgctccgtctatgcgagccttttctggataacatggaagcaaagaaggataagattgatgtcaattacctcttctgcaacaatagaattgatttcaaagatttgacagctataaacgcgtcttcagaagaagtctcgtcttggatagagagcataaacaatgagcatgctcaaaataatgccagtggagaggctcgatttgcggaatcacaggaagccacaagctctggcaaaaatagtacggcctcacaacttaggtgctcaaagaaggagaatttctcatttatttgcgaatgtttcttcatgacctcaagagtacttaatctcgggttgatgaaagctgtatcggacttcaaacatatttctcagcaactttcaaggttcgaagatgatttggaatcaaacagagcagtgagagatcaaggagggggttcaccgcagcttgagcaagatataactcgcttggagaaaattgtcgaaattttatcacaggacaaattctgttatgaagctcagatactacgggttaatgatactctggtcagttaacctagttggcggatttaagatgcctttgccatcacaatgtcccaaggagtttgcttgcattccagaacattttcttgatgatgcaatggatttacttgttctaacctctagaattccaaaggctttggaaagctttgtattggatgactttctcagcttcatcattatgttcatgggaagcacatcttacattaagaatccttacctaagagcaaagatggttgaagttttgaattgctggatgccacaaagaagtggcttgaattctacagcctcattgtttgaggggcaccaactgtgtcttgactaccttgttggaaatcttctaaagctttatgtggatattgaattcactggctcccatacacaattttttgacaagtttaacattcgacataatattgctgagcttctggagtatttatgggatgttcctagtcaccgaaacgcatggagacaaatagctaaagaggaggagaagggtgtatacttaaattttcttaactttctcataaatgatagcatctatcttcttgacgagagtttgaacaaaattcttgaactgaaagaaatagaggctgaaatggctaacatagttgagtgggagcgcagacctgctcaagaaagagaggagcggctgcgtgtatttcatcagtgggaaaatattgttcgttttgacatgaggctagccaatgaggatgttgggatgcttgcattcacctctgaacaaattccagcacctttccttctccctgaaatggtggaaagggttgcgagcatgcttaattacttcctcttgcaacttgctggtccccagaggaaatctttgactgtaaaggatccggagaagtacgagttcaagccgaagcagcttttgaaacagattgccaccatctatgtccatatctcaaggggcgacaaggaatctgtcttctcagctgcaatctcgaaagatggcagagcatacaatgatcagttgttttctagtgcggctaatattctgtggaagattgggggtgatcccaaaatcatacaggagtttgtgcaacttgctggtagggcaaaagctgctgcttctgaagctatggatgctgaggcaatccttggggacataccagatgaattcctcgatccaattcagtatactctaatgaaagatcctgtgacactgccatcgtcaaaggtcacagtagaccggcccgtaattatcaggcatctgctgagtgattctacagatccatttaaccgctcccacctcactcaagacatgctgataccaaacacggagctcaagttgcagatcgaggagtttgtccggtcccagcagtcgagaaagcgaactgctgcggcgttgttggagattggcgaagcggagggtactgatgatatggccgaatgaattgtgccaggagcaggggatggacacattttttttgtggggaaagagtgatggttaattcacatgaaatgtatcggtccatctgtccgtataaagttggtttcccggcttgtgtccctgttgcctcgattctttgtaaatattgtaggtgcacacctgatacaaatgtagttatagaggaagcctgtcagcccgtctcatcaacaatgtgttttacgatatccccactacaactttttttaacacgatattatcactataacttgatatgtgtgttgggctgagaagcgtttgccttcgccttgttggttctccgcgataagtgcgaacaagccctggtcttctcatttctgcgaaccaacaatcacaagtgaattatttatgccagtt

SEQ ID NO: 7898 - DNA, 3837 bp, Zea Mays
gatttagtttaaatatgaactagcggacggcaaatattaaatatctggaaatggaggtcgtattaattaggtttaataatttcttctcgttgtttagtcttcatctatattattagttttataactaaactatatttaatatctatttaatatctgtaattgacattcaaaatttttatatgatccatactataaacttttagttagggaccaaacacacactttaaacaatacaaaaaaaaccccaaagtcggctctctcgagtctgctcgaatcttgatccaccacaacacgcggttccccgagtcgaaggctcgaagcagcagagccagcagcgagccgccgcccgccgccgatggcgtccccatcgccggcttccgcgcggccgcagcgctctcctgacgaggtggaggacatcatcctccgcaagatcctcctcgtctccctgacgcccccggccaaccccagcccagccgtcgcctacctcgagctcaccgccgccgagctcctctctgagtcgcgccctctcctcgccctgcgcgatgccgccgagcgcctcctcatcgaccgcctctcgctcccggacccgcccgccgggtccccgacccctttcgcctacctcgtctccgctttccgccgcgccgccgacgaggcgcgtaagatctccaccatccgcgacgccgctctccgggcgcgcctcgcagcctccatagcgcacctccgggccctcatcctctcctacgcgcgcatcgtcgccgggaatcccgacaccttccccaccccgcccggcgcgcaacaccccgcctccgacctcctcgtattcctcctcgctgaggcagccgacccgctcgaccccaccccggcccccggggcgccgccgccgccgggcttcattgatgagttcttaggcagcgcggactatgactccatcgagccggccatgggggagctatacgagctccttaggcagagtgtcgataaggtttcggccctcggtgactttcagcgcccattgcggttgctcaggcggcttgtggggatccccaattgtgccaaggccctggttaaccatcctaagtggataccaaagaatcagatcatgctcattggggaagggagggtcatggagctatacagtgtactcggggccttcttccatgtaagcgccatccgagaccgagagttcgctagcaagcctgatgtggggcaacagtgtttctcagaggcatcttcacgtcggccagctgacttgttgtcatctttcacaacaatcaagagtgttatgaatggcttgtatgatggccttaaagatgtccttttaatccttctaaaaaatttggatactcgagaaaaggttcttgagtatatagcagaagtgataaataaaaatgcatccagatctggcatgcaggtggacccattaaaatgtgcgagttcaggtatgtttgtgaatcttagcgctgtgatgctccgtctatgcgagccttttctggataacatggaagcaaagaaggataagattgatgtcaattacctcttctgcaacaatagaattgatttcaaagatttgacagctataaacgcgtcttcagaagaagtctcgtcttggatagagagcataaacaatgagcatgctcaaaataatgccagtggagaggctcgatttgcggaatcacaggaagccacaagctctggcaaaaatagtacggcctcacaacttaggtgctcaaagaaggagaatttctcatttatttgcgaatgtttcttcatgacctcaagagtacttaatctcgggttgatgaaagctgtatcggacttcaaacatatttctcagcaactttcaaggttcgaagatgatttggaatcaaacagagcagtgagagatcaaggagggggttcaccgcagcttgagcaagatataactcgcttggagaaaattgtcgaaattttatcacaggacaaattctgttatgaagctcagatactacgggatggtgcattccttcaacgagcattatctttctacaggttaatgatactctggtcagttaacctagttggcggatttaagatgcctttgccatcacaatgtcccaaggagtttgcttgcattccagaacattttcttgatgatgcaatggatttacttgttctaacctctagaattccaaaggctttggaaagctttgtattggatgactttctcagcttcatcattatgttcatgggaagcacatcttacattaagaatccttacctaagagcaaagatggttgaagttttgaattgctggatgccacaaagaagtggcttgaattctacagcctcattgtttgaggggcaccaactgtgtcttgactaccttgttggaaatcttctaaagctttatgtggatattgaattcactggctcccatacacaattttttgacaagtttaacattcgacataatattgctgagcttctggagtatttatgggatgttcctagtcaccgaaacgcatggagacaaatagctaaagaggaggagaagggtgtatacttaaattttcttaactttctcataaatgatagcatctatcttcttgacgagagtttgaacaaaattcttgaactgaaagaaatagaggctgaaatggctaacatagttgagtgggagcgcagacctgctcaagaaagagaggagcggctgcgtgtatttcatcagtgggaaaatattgttcgttttgacatgaggctagccaatgaggatgttgggatgcttgcattcacctctgaacaaattccagcacctttccttctccctgaaatggtggaaagggttgcgagcatgcttaattacttcctcttgcaacttgctggtccccagaggaaatctttgactgtaaaggatccggagaagtacgagttcaagccgaagcagcttttgaaacagattgccaccatctatgtccatatctcaaggggcgacaaggaatctgtcttctcagctgcaatctcgaaagatggcagagcatacaatgatcagttgttttctagtgcggctaatattctgtggaagattgggggtgatcccaaaatcatacaggagtttgtgcaacttgctggtagggcaaaagctgctgcttctgaagctatggatgctgaggcaatccttggggacataccagatgaattcctcgatccaattcagtatactctaatgaaagatcctgtgacactgccatcgtcaaaggtcacagtagaccggcccgtaattatcaggcatctgctgagtgattctatccatttaaccgctcccacctcactcaagacatgctgataccaaacacggagctcaagttgcagatcgaggagtttgtccggtcccagcagtcgagaaagcgaactgctgcggcgttgttggagattggcgaagcggagggtactgatgatatggccgaatgaattgtgccaggagcaggggatggacacattttttttgtggggaaagagtgatggttaattcacatgaaatgtatcggtccatctgtccgtataaagttggtttcccggcttgtgtccctgttgcctcgattctttgtaaatattgtaggtgcacacctgatacaaatgtagttatagaggaagcctgtcagcccgtctcatcaacaatgtgttttacgatatccccactacaactttttttaacacgatattatcactataacttgatatgtgtgttgggctgagaagcgtttgccttcgccttgttggttctccgcgataagtgcgaacaagccctggtcttctcatttctgcgaaccaacaatcacaagtgaattatttatgccagtt

SEQ ID NO: 7899 - DNA, 566 bp, Zea Mays
atatgaaatagttagtgagttgagacacaaagcttttcgtttggttcgtctgtcagctgctttgggaagtcggagttgctggatgctctgcatccttgcttgacaacgatgacctttagcagttttatatgctctcgtgtggggttgccgctgcctgtgtttgtttgggtactctgtgtcggcggtgagtgtggtgccgtgttgatgtcccagtccaaccggcgagttaagttgtatggtgtcggcgtgttgatgtcccaatccaaccgcctgttgtttgttttgttgtttagtccgatccggaccacttcttctttattaatataatcggcagctctcctgcctgcggcggcggcggcggtacggttggagggaaggcaactctgcgaccgccgtcgtcgcagtttggcgcggtgggacgaaacgaatcggcgggaacagtggttgcgggggtgtgccggtgtggtcggcagagatggcaatgggcccggatccacggggatgagttttttttttctcatgggatttaaacagacaaaattatttcctgaacggataaacgggaa

SEQ ID NO: 7900 - DNA, 1159 bp, Zea Mays
atgaatagtgctgggcgtcaggatcgccacaacctcgggatgcatccgccctatatgattaggtgttgcctaggcatgaaatggcgtcaggaagacgcctatagaactgcagcggacgccagacatgaatctgcatggggacaggagtcaatcagtatgcaccgaattgaccgcaagaaatcgaccgcttggagctcacgcaacttcaaggagagaggaggagggaaaacgagaaggtggagggcagaactggagctcttggtggcaggcagcaaaggcagcagccctgattcgccgcttgggcgctcctctattgaagtacacctcctcaagtccatttcactgccggtcatccacacctgtgacccgctaccgtcagccacccgcactgcagttgtcctcgtgcttcaaatcgccgtcgccatccacaagtacatacgatacgcacctgcctccttttgtgatatacacacctgtccattcgcttcaggtctatctgcacctatacgcccctgcctcctttcgtgttttggctcacatgaatctctcagctgcctgccgcttttcatatttgtttgctcagcctttgctcatggatggacgggtacatgtactctgctctcaatactgtgtgctgcttttacattttaatgttggactgtcacgtactcacgtatggagtagactaatgcctgattgtgcttgggttattattttctttgacaattacatagctcaaagcataaagatagattagtatgatatctttctttgattagtagtactcccttagcagtactagtatgtgctggcctaaaaaaattggaaataaataaggtatgtatgtgctgcactaggatctaaaatatgcatatggtgttgcctaggcgtttgccataaacgtctaggtgttgtgagggggagggggggggcactgcctcgccacaacgccttaaaaaccatgtatgagatgcaactggagaatagctacacgacttttgaagctaaaagacagtgaaataacaaaataaaaaaacgttcataaaagcagttaaatcaacataccaggaagaaaggaaaggaaacccaggaacaagagaccatatgcctgagaactatcaccctccatgtgacctgtgaatatgaagtaagaaagaaa

SEQ ID NO: 7901 - DNA, 1468 bp, Zea Mays
gaaaggctaataatctggtatggatgcaaaagtgtaccctggtgctccccgccatgaatagtaagcaactcgagtctcgtagaaacctgcaagtatgtaaaaaaaagagggtaaagctttcgctttccacaacatagcacataactccttgtgatgcaaaagtgtgaacagcagaccagcattgttttaagcgaccaagaaaccaattgatcaaataacaatgatgcataggccttatttttatatgaaattttccagccttatcagtggcaataaaattcactctgaaggcatgagatcatgatttatgatgcaggtgctgggcgtcaggatcgccacaacctcgggatgcatccgccctatatgattaggtgttgcctaggcatgaaatggcgtcaggaagacgcctatagaactgcagcggacgccagacatgaatctgcatggggacaggagtcaatcagtatgcaccgaattgaccgcaagaaatcgaccgcttggagctcacgcaacttcaaggagagaggaggagggaaaacgagaaggtggagggcagaactggagctcttggtggcaggcagcaaaggcagcagccctgattcgccgcttgggcgctcctctattgaagtacacctcctcaagtccatttcactgccggtcatccacacctgtgacccgctaccgtcagccacccgcactgcagttgtcctcgtgcttcaaatcgccgtcgccatccacaagtacatacgatacgcacctgcctccttttgtgatatacacacctgtccattcgcttcaggtctatctgcacctatacgcccctgcctcctttcgtgttttggctcacatgaatctctcagctgcctgccgcttttcatatttgtttgctcagcctttgctcatggatggacgggtacatgtactctgctctcaatactgtgtgctgcttttacattttaatgttggactgtcacgtactcacgtatggagtagactaatgcctgattgtgcttgggttattattttctttgacaattacatagctcaaagcataaagatagattagtatgatatctttctttgattagtagtactcccttagcagtactagtatgtgctggcctaaaaaaattggaaataaataaggtatgtatgtgctgcactaggatctaaaatatgcatatggtgttgcctaggcgtttgccataaacgtctaggtgttgtgagggggagggggggggcactgcctcgccacaacgccttaaaaaccatgtatgagatgcaactggagaatagctacacgacttttgaagctaaaagacagtgaaataacaaaataaaaaaacgttcataaaagcagttaaatcaacataccaggaagaaaggaaaggaaacccaggaacaagagaccatatgcctgagaactatcaccctccatgtgacctgtgaatatgaagtaagaaagaaa

SEQ ID NO: 7902 - DNA, 895 bp, Zea Mays
tctccctgttctaccagcagactgtttgattccggcggctgccctctccttgttcctcaacggcggatgccctctccttgttcttcaatggcggctgccctctctttgttcctcaacggttgcagcctccttggcagcggccagcagcctgcacagcggcaagatgagtacattgtctgaactctgaaggagttactacaaatgcacgtatcaagggtgcgatgtgaagaagcatattgaaagatcatcccaagacccaaatgccatcataacaacgtacgaagggaagcacagccatgatgttccagcagccaggaacagtagccatgccgctgccaatgccaatgggtcatgttccaccagcgtagcacacagggtccagagttcagcatccagtagtcgcagaatggcagacttacaaaacacatcctcagcttcttctatgcacctaaaagaggaagatgaaataacgtaaaattttagagtgcgtagcagggtaaatcatttctgttctctcactcatttccagtagcagtgagcaagcagtcattggttgtagcaagggcgagctcttctgtttgtgcccttccaaaagccagcgcaccctgctggctgcgtggcgtatattatgttgtcattaaggccattggttgtaaatgccaacagtcgttcccctggagaactatagtagatgacaactttcacctgcccaagtgtatatactcgattaaaaacctgtaaatgagacatggtttgtagatacacggcttccttcctgttcttcgtaaatgttatttctacaggatatataaaggtacagttgctgatgataatctgtgtctcgtcgaggtatgtatggctactgatttgtctggatcctttattttgtttcgct

SEQ ID NO: 7903 - DNA, 1706 bp, Zea Mays
tctgttgcatcaaacatttccatgttattcctgtgtttaaagtccttgaatgtctgttttttttactgtttttgctaacaatgaggtattacatttatgaaaaaaatatgttaatgctttggatcatgagtggtattaaaatttttctgcaggcaagttttgagatgtcccatcaacaagccttagcacaagtaacagcacaagcagtccattctcagtacaatatgatcaatcatgcagattacactatctctttttcgtcgacgacaacaccagctttggtcacagcacagcatgccaatttttctggcaatttgacatcagcacaggagaaaccagctctgccgtcacatacaggcaatagcaacattgaatcaaatgaggtttcacaaggactcaaaacttctgcacccacttttgataaacctgctgacgatggatacaactggcggaagtatggccagaaggcagttaagggtggcgagtatccaaggagttactacaaatgtacccacacgagttgtgcagttaagaaaaaagtggagcgctcagcagaaggacacatcacccaaataatttatagaggtcagcacaaccaccagcgcccaccaaaaaggaggtccaaagatggtggtggtcaactaaatgaagcagatgatttccatgagaatgaagacacttctactagatcagaacctggctctcaagatcactctggaaaacatgaggggtcaaatgatggcataccagggccttcagtgtcaagaaggggagaggtatatgagcaattgtcaggctcaagtgatagtgaggaggaacgagatgatgaacaaagggctggcaatggatgtcctggctatacaaatgcaaacagaagacatgtgccaactccagctcaaaggataattgtgcaaacaaatagtgaggttgatcttctggatgatggttatcgatggcgcaagtatggacagaaagtggtaaaggggaatccccacccgaggagttactacaaatgcacgtatcaagggtgcgatgtgaagaagcatattgaaagatcatcccaagacccaaatgccatcataacaacgtacgaagggaagcacagccatgatgttccagcagccaggaacagtagccatgccgctgccaatgccaatgggtcatgttccaccagcgtagcacacagggtccagagttcagcatccagtagtcgcagaatggcagacttacaaaacacatcctcagcttcttctatgcacctaaaagaggaagatgaaataacgtaaaattttagagtgcgtagcagggtaaatcatttctgttctctcactcatttccagtagcagtgagcaagcagtcattggttgtagcaagggcgagctcttctgtttgtgcccttccaaaagccagcgcaccctgctggctgcgtggcgtatattatgttgtcattaaggccattggttgtaaatgccaacagtcgttcccctggagaactatagtagatgacaactttcacctgcccaagtgtatatactcgattaaaaacctgtaaatgagacatggtttgtagatacacggcttccttcctgttcttcgtaaatgttatttctacaggatatataaaggtacagttgctgatgataatctgtgtctcgtcgaggtatgtatggctactgatttgtctggatcctttattttgtttcgct

SEQ ID NO: 7904 - DNA, 406 bp, Zea Mays
cctagccccaccggccaggagcatcttctccaacttcctgtgcccatgccgccaggaagagcagtgcccgcctcacatctcggccagttcaaccccccaattgcccccttccatgcgcagaaaccacctccaccgcccatcgcccagaccgctaatgcccacacacgcaatgctcagagttgccctcgcctaggtagcccccacctgcgtcgatctcttcccgccatgcacgaagtcgtcctcacctcaccggagcatcaccttgccatctatgcacggaagcgctctccatttctgtcaagtctcgttctaagacaatgagcagttcgtgtttctcgaaggagtagtgggagaagttcctaagcagcattttgtttggtgaaggcaagtgtactctaacgtatta

SEQ ID NO: 7905 - DNA, 738 bp, Zea Mays
gggggagtaaaaaagtccatgtccatcagcagcactcaacttacagccagcaaagcccagactagctaggtagaagcatttgcagataacttacataaggatagtggttagccataatattttggaatatcatcttccttataaaaacaggtatacgcaaactttcagtgataacgtttgcatatattttttcattcaaaatatccatctcctagtgtgtgaatgagtttgacaaatttgtagcaactagcacaggcccaagggatacacgtcccggtgccccccaccacccgttcattatccttggtcttcacctccacctacacctacatctccatctaccgaacatcagacccctccaactaccttgccgacgcatgaacgagaagacgggttaggctttgtcgaaaccctcttcgctagtggaggtatcgaccatcactcgtcactgtaacccgatggtgatcggcgaccgtgagcttccatgttttgtgttctgatacttgagacttttattatgactatgtataagatattgtctcttattagtattggatgatgagatgtatcttattatgactatggatgagacttttgtgatgtaattgatgagactatggatttaaatattgttatgtgattgtgtgtgagatgttttatgtgaaaaatatgttgtgctatataggtgttgatatatttgttatgttgtcgaatgtggcgtaaaataaaaataaataa

SEQ ID NO: 7906 - DNA, 3438 bp, Zea Mays
ctcatagtatttgagaacaagtccccaacagattattacctagaaaaggattggatgatggattaatggtcgtcatatcagattcaaacaccaatgcatcgtgttctgtggtaaatcgagtgaagtatctggttctgcattttgaccatgataacaatgttggtggtttagattgggatgatgtagtggcaaacccaactgcttctctccccaaggtcttaagccttgtcaaggcacaaccgactaaagacgaagaggtagagaaactaccagatttttacaatgacttgaaccccgtaactgaagtagactgtccagatattagcatcgaagaagatttagacttagtggacactgataatgaagtggatgtaggtgatactgacatagctgctcacaatgaagatgtagatgatgggtatcatgttgtttcaagatcaaagttgaaaaaggctgttggcagtaggttaaaggtagacattgcctctaggaaaagggttgtacaagacgacttagactcaactgatgaagatcttgagtgtcccaacactgaaaaggaggaacaaagcagcacaaagttaacatcattcaaaaaagttgaccttagtgaccctatgttcaaagttgggatgatgtttgagtcaatgaagctactaaggaaagctattactgagtatagcatgaaaaagaggtttgaaattaagctgccaaggaatgacaacaagaggctgagggctcattatgcacatggatgctcttaatgttatttgcatctatggacaacagagaaaatggcatcatggttaagacctatgtgtccactcatagatgccagagagagtggaatttgaggaggtgtactgctacatggctggctgagaagtacattgactcctttaaaagtgatgataaaatgactttgacaaacttttcaaggacagtgaaaaggaaatggaatgtcactcctatgagaagcaagttagttagggtcagaaggctagcactaaagaagatatatggtgttgagagtgaactatacaacaagctttggaattttggacttgaattgaggagtaacccaggaagtagtttctttctaaatttggtggacaatcattttcaatctgttatatgtccattgatgcttgcaaaaggggttttcttaaaggatgtaggcccaaaatcttcttggacggatgccatattaagacaaaatttggtggacaaatattcactgttgttggtctagatccaaatgactggatttatccaattgctttgggagtagttgaggttgaatcaaagtcaacttggaagtggtttcttgaaacactaaagcatgatttatgtattgaaaacacataaccttggattgtcatgattgacaagcagaacgtgattttccttgaattgtttaattttgaagcatgtcacatttattaaaaggtactaattttttttgaattcttgttaatagggaatgattcctgcaattgaggaggtattcctagaatatgagcacaaattctgtgttagatatttgtagtccaactttaaggatgcaggcttcaaggtggaagcaataaatgaataagatgaaggaactcagccctgctgctcatgcttgatttgaaaaaaatggcacctaacacttggagaataccaatcttgagcatgttggagagaataaaacaaaaagtcatgacgcgattctacaacaaacagaaggaacttaaggattttgtaggcaccatttgtccaaatattaggaagaaaatatctaaatttgcggatctagcgaatgtgtgctatgtgttaccttctggaagtgtgattttccaagttgtggacagagatcaccagtatatagtagaccttgcagctaagacttgtgattgtagagagtggaatttgactggaattctatgccagcatggtacaaacatcatgccatgcaaagatatgaccagttgggagaaagttgatgcccctacagtctcacctcctatctatgttagaaaacctggaaggccgaagagatgcagaaggaagcagcctcatgaaaaaattggaaagtatggcccaactctatcaaggcatggtgtgaaaatgacttgcaactattgtaaaggggacgaccataatgacaaaggcttccccatcaagaagctaggtgtcagtccaaaacctaatcatcttgagatgacaatcaagttgtcacccaagataacagtcaaggggccaccaatggaccagatgacacaagatggtgatgaaccccattattgcaatttgatgatagaaatgagctcaacgatgctacttcaaatgatggaacaggttggtcctagtcaactactttcacaggaacctaaacaagctgtgtcgaatgtaaattcatcatagcaaacattcctgtgccaagacctatagtcctcacatcagcaaccaaagaaggaaggaacacaacaagaaagaggattgcaaaaccaccaacaaataagggagaaacaaggaccaagaataataagaattgaagtagatgtatgcagtttgatcaaggccgatgaatgcctttaactataatagttgagcatgaatgtttttgtatgatgcactgatgctcttgatcagtcttttgtgtgtgttatctacagagggcaacaaaaatgctagctaaacatgaatgcttttgtatgttgcctatatgaacttaaatggcaacaataatgcttctgtgaactggggatgaggtttacaaatgcttaatgaatctgagtactcttttcattcattaccaccataactcacatcaaacaatccttacatatagattaatcagaaaaatgcacacacataagactgatattatttttagtggcacaacaatcttaactaagtaaccctactactaaatctagcttttgaaccatcaggccatctgcttttctatcttccctcttcattccacaacttcctaaaacatcagcttcaccagtaatcatcttctctgcttggctgaatattggtagatgattatgtagaacatggccattctccatcaaatattgctcatagtcatcttcctagtaccagaagtcacaaccactaccatcacgctgcaaacatatacaaatcaatcaaaaaaaatcaaatccacacatgagtttacagtccaaacacacttaaatcccaatatgaccttgtatgtcgggcagatgtagaagtaccgtccatagtttccgcttgtcttggccctgagtgcaatcacctttcttgtactgcatcggtcacatatggaggtggatgttccattaatgggtgcgatgcgggttagatctaggggagggggcagagctgctagggaatcgatttgaacagaggaggctacggttcttccatggggaagaaacgagtaattatgtatgtaatgcggtc

SEQ ID NO: 7907 - DNA, 10172 bp, Zea Mays
ccttattctacccagccaggctccctcacgcggacgcccagggccctctcaagtctcaacacactcgttgtctctagaatcctccccatgtctcctctctgctcgcctcattccccaacatcgatcccccacgcgctcgcgctctgcaccggctcccaggcacacgtcgacgacgcattctggcacgtgttttcttcctgattggattccccagcaccggtcagtctcgccttggcctcgggccattgcatcctaggccgagctcggccagttcaccagcgacctggccgtggcgctcgccctcctgctccggtctctccatcacgctcggctccagctggtcacgctcctcgcaccaaccccgactccaagtgctgccatgacctcgtcatggattcgaggcatcacatcgtcgctctgctgcataggcgcacgtgttgtcgcctccctgccgtcttcgcttgtgtgccagaacacctagaagaagtggtgtttgaaggagtctactccaatgcctgcttatcaagtggatggatctatctaactaaaggttgggtagaaggattttgggatcttctcctgcaacaaggaaaagttttattcccttatctttaggttagttacttcatgtggaggacttgaagcttagaaggtttttatatatcttttatggaaaggcttcacccttccaattattgtaataagttatgcacttcgagtactatcaggacttgtaataaatacatctctttctaccatgtaaaacttgagttctggaatgtaaagtgtactttgtaaaagtcttccgctctatctccaatgtgtgtgtatcaaatgtgattactgtaatatacctgttatgtgggagatccttgggatgatgagttccagttggcgaactcgatagccttaataagttatccggtatacgtgcacagccatctgaggccattaaggcaaggattggtgcatgtgggcctgataacttgggagggctgtcacaataaatccgagtaattttcctgctggtaccccaaaaacacatttttcgggattaagcttccatcggtactgtcgtagactgttgaaaaccagttgtaagtcttcaatgaagttttccgagttctccgttttgattaccacatcatctacgtaggcttccacacgcttgccccagtgatcgactaagcatgtttgaatggctctctgataagtcgctccagcgtttttgaggccaaacggcatggaggtgtaacagaaagcaccaaacggagtgatgaacgctgttttttcctcgtcttccttcaccaagctaatctgatggtatccggaatagcaatccaggaaagatagcacagaacatccagcggtagagtctaccacctgatctatccttgggagcccgaagggatcctttggacaatgtttgttgagatcagtatagtcgacgcacatgcgccaatccactttattctttttgagtacaagaacagggttggctaaccactcggggtgtaacacctctctaataaatccagccgcgaccaagcgagctagctcggcgcgaatggcctctctcttgtcgggcgtgaaacgacgtagtttttgccggatcggccttgcctggggatagaccttcagtttgtgctcggccagttctcttgggacttccggcatatccgcaggttgccatgcgaatacgtctcggttatcttgcagaaactggacgagcgcgtcttcctatttatcgtccaggctggagctgatgatggcagtcttgcgttcatcagcgaaccccaggttgatccttttagtttctttagtcggtcgcatagaggtcgcggcctgagcttcattcgccggtgctgcaaggtcctcctcaggcttagagttcgcctgtgttgaagaagtcgtcgacggtttggtggtgagggccgcttggatggccactcggaaacactctgcggcgccttggaagtcagcgtgcacagttatgattccttgtggtcctggcatcttcagtatcatgtacgtgtaatgcggaatggccatgaattttgccaatcccggcctcccgatgatggcgttgtacccgcagtcgaagttcgccacttcgaacctcaggaactcggttctgtagttatccggagttctgaaggtgactggcatgtagatgtggcccagcgggtattctccttcagtcggcacgatgccgaagaaaggagtgtctgactcgtggagctctttgaggtgaactcccaagccttggagtgtccgggggaaggtgacgttgatgctgctccccccgtccactaacaccttcttcaccctgctctctcggatcaccggatcgacgaggagcgggtatttgcctgggtggtcgaagttgagccattgatccgcccgagtgaaagtgatcgggtgctccgaccaccggtatggggcgggaggaccggtggtcgccaccaatatctggcgatcattgagcttttgttgtcttctattctcctgcgatccgtgtctgccgaagatgacgttaacctccctgtcaacgcgcgggaaagctcctcctccctcctcctgctgctggggttgtcgtggttcttctggccctcccctcggcggaggaggaggtagaggttggaagggtcggccgtgcccgacggagtgtttgaagtcccggcagttccgaagagtgtggcgcatgtccttgtggtacgggcattgggcgtcgaggatgtcgtccagcgtgcgctcgcctccgcgaggtcctccccgagcgcgagaggctggtggtccggcggcgtgtacttcttcgcgaggtctcttctcccagcgtttgtcgggttgctggttcgcgtcgcatcgtggtgctgccgatgcgggcttcgctccttcgatgaggtcctgggctcgctcgtcggtggtgatgtagaggtcggcttcccggaacagctcctcggaggtagtcggcgccttctgcaatatggctcgaacgaaggccgactcattggatcctctgtagaagtcctcgatcatggccgccttcgtgacctcagggatacgatttctcatggtctggaaccttttgaggtatgaccggagagtttcgtcccccgacgcttgatggatttgaggtcccacggttgcgccggtttgtcggagagggactaaaaattggcgatgaagcgtcgactgaagtcgttccagtcgtcgatgcagtgtcgaggtagatgtcgcagccattataatgcgtcttgcccgaggacaatgggtaagtacgcagtcatcacatcctcggatgctccggcagcccgggcggcggtggtgtagacggccagccagcctcctggatcctgcttaggttcatatttgtcgacattggataccttgaagttagggggccactgaatggccctaaggcgtggagtaagggcggtcactccacacgtgtcctcctgtcgtcggggatgatgtctgtcccggggaggggagtagttgttgcgatctctcgaccgtcctcgggtagtaccgccagtcgaggctgttgctgactcggttctggttgcttgactccgagccgggatgccatgatccctgtcgtactcctcccggcggcggatctcgttctcatgtcgtcacgcgaagcattgatggagcttcgcgcgtcccgacgactgttgatagcgtgtcgtagatcgttcggcgggtgagcaagcggtagaagatggttggccgcctgggtgaacagtcgtcgatagccctcggcgtcaggagtccgagggagtccatcagctatccgagctagtactcctccgacttcactcggcgtgttcatggctcgggcgaagtcgggattcaggttgcgcccaaagagtggattctcccggcgttgccttgcatcttgctcggcttgttcctgagcccggcggcgatcacgtcgttgggagttccttcgttctctgaagacgcgttcctccggagtttctcctatctccgagacctcgtcccacgaaacaggttgctccggatcccgttctctggcctcgtggtgtcgccgaatgtttcggcgccggtttctccgtcggcgggattcccgctgaggttgttcttctccgggcgcggtcggctcgtcgtcggagacggggggcgactccactctcccgatgaagaggacgtcggggtagaatggtacggcggtcgtgacgatcttttttccgttctcctttgaggacggaggaacggaaagaacaacttgctttctcccggcctctttcttccgtgcgacctatgtccattctttcgtcggggaagtagacagtggagttctccgggtcagcgggccctcggcccctgactttctgaaggcgatcttttttcggagagctggaggttgcgcttctccggtattttcggagttcgttggaggagacttctttttcggcggatctgcaatgcggtgtagagttccctcttcatctgctatggatgagattgttccaaagcagaatacggatccgggacggagggtgatcttgctgtggaaggtgacggccattgagctagcttggatcgtcgacacaccccctacctggcgcgccagccgtcggtgttttgggtccgaccgcacacccagggttgcccctcgaggtgttttaggagtaggaaggtgtcgccgactgtagcaaaatggttcgtgccagatgcacgagggacgatggacgatgtttacaggttcgggccgctttgaggtgcgtaacaccctacgtcctggtgagtatgctttgtgtacggggttacaaggtagctctccaaatagagaatgcagagagttgaggtggatggctgagtggtgggatcgatccctttgaaggggtgccccctaggccttatatattcgaccgtggggcaatacacgtggatatgataacaatgtgcgcctaaaagatagtgaactgtttgagtctatcttcctatgattctgccgacctatcctcgcctggttccgttgcatggggcttcaacgcgggaaagtcggatcttctgttgtggtcgcttgctcaacgctgtggggccgtccgggcttgcaccaatccggccttacatcaatctgctttactgattgtccctccccaggcccatgaaggaatgacattacgatttattaggctcttgggcctctcgtgaggtcttttacccttccggtggacccgagggatatctatcccccacaccagctttctgtcgttggcaccggacagtctggtgccccacaggataggcactgtgtagtgtccggtgcacaccacgtcagccgatcgttggtgtctgtagcagtcaaccgttggatccgaccgttacctactgtccggtgcacactggacagtccggtgctatagcctgagggcgcccttctgcggcccctctgcgtagactgtccggttgtcccaccggacagtccggtgcgcaccggacaggtactgttcactgtccggtgcgccaccaggcgctggctgtcagccctcttctagggtttcttcactgattccttcaggcttattttgttcttgagtctttgacttttatgcatctttttatgtcttcttttgaggtgttgcatcctcatttcctaagtccaatcctcttcgcatcctgtgaactacaattataaacactagcaaacatattagtcacagattatgtttaatcatcaaacaccaaaactcaattagccaaatggcccgaggtccattttccttacacacatcctcctcctttgtgcggactcccgacggtgccgcccggcctccacggcggagcatcaacggacacccaaaaattcgaaacccgagcccattacttggatacccaaacgcgctacatgtagaggacacccaggagaatgcaatggtccccttccttaccttcatccatgccgcaatgccacacgacgccaatgcccagcgactccatcttggcgagatctgaaatccgcgacatcagtcacccctggctcccaaactgatggccatatgccatcgcactccggtgagtttcccccgagcaaccagccgaggccatgcgacatcgcaagcaagtagaggcactcggattttctcccccccgtgtgcggcaatggaggccaagggagcaataaccacggcgctcgagaactggtcatgggaaaaggccgcgaacatacggtgaagggtggcgctgcctgggggttacctttatacccaacacgagagatcgagcgcgcgaagatcggaaccgaggcagtggattgcccaaccatgcacgcgcggacatagaacaaactaggaagaaaacaagcggggatttgttgggattcctgccgacgcatgcgaacacagagaagaagatggagtccgaccagcgggatttggccagcagcgagttttacggcgagggaatccgggtgaaaatcgtgtgtttgttgcgccgctgccgcaggcgatgcgcggtttgttgaggaagaaggtcgagctgcccaagcgggcccaccggcagtgacagcgacagagtctgcgcgtgcaagtagagaggctgacacatggggcccacttgtaagcgccagtggagaaaaagaaaaacagaaggggaaagcaggccggccctagggtgaagatgtttggttaacaaggccgaggggggagaaaacggagtgggccgccagggaggtttcagcccaaccgagttttctcaagtttcttttcttttctatattcttttctcatttctaattccacatattaaattcaattcaaattcaactcatgttttgaataccctagtttctaaatattgaacatattccttcacaaagatataacatctaataattcccatattatttataattttcattgtcatttatttatggatgtaataaatggtttcattagaaatttcctttctcattttcccattttatgttttcatttaaaattggagatctaatttgtgttgtcaataagatgcattaccactaaactattggcaagttatcaacttttctttatctatttattagttatttaattaatttaatgttatcaattgattatgaagagaaaagatcctcataaatttccagggtttctaaaattctagaaccaccatcatatattattatttctttattttattattttatgatatattttttctaccaattttaggctcaattacttcggaacgaaggttgttcagagttatagtacatccttcgtcttccgcatttttctgagccctgagggcattgctaagaatcaggccctgcaaaaagagttatggtattaagtataaacaaataaaacaaatttttgttttaaaatacaaaaaattcattctcatacctttaaactattatatgctaagctgtccgccagttcatctttcgatagcaccgaaagcccatcttctagtgtcgggaatccgaagcttttgcccatctcccggcagacagaaatctccttgctgtctgggagacaatacaagaaatcttattctccgctgccgttgaatatcaatgccccctttggatattttaatttctgagcgtaatattgagcttctcgcttttcttcttcagataacctttttcccgaagcatgtcgtacaatataatcaagtactttggaagatgcttcgggagttgaagtgacagttctttcaggcagaatttgttttgcactctctttttccgtttctttttctccggtttccaaggatttctcattggcaggctttgaaggcccatcttcagtcccggcctggctctttgcagcttcggcagttttccctggagtagagcttgaactctttatcgtctccagtacatctaatacattaaccatccttttcctcttggggtcgctataagatctttctgtgccttcggcactgtctcttctgccgaagggctcagaacttctgatatttttgtttcttccattctaggttcttcaattttgttaatcttcggcattgtagctggtttttcaatcttctgcgtgagggcaggttcgtcggctttagtagccgaatatatttcaccgtcgaattcaggcactatggccggttcaataaatcgtggccggtgagtaagaaccttcacctttttcctcttcggcgcgagctcgcttggtgcaaccgaagcagtatctttactggaagttgcactttttctcttcttcccctgtggcgggtagcggtaatcagggtacatgaacccaatagcatcaaaaaccctatttagccttttcttcttccggcttccgaaggccgcggatagcgcattatcttccgctttggagtatggcccaagcagttcatcacttgtagcttcgatacatttcagccagtcatcatttggctcatcaaatttatctccatatttgaagttgtatttcagtcgaaccagctctccttcgccagttttagtgacagtctccttcggcatttcccacttctctaaaagtggccatattctgaaggctatgtgctcctggactaggtcccttgtcccgatgaaagagcaaaccgtgccgaaggccctttggcatcctttggctgcctcatcaatctctaccttcggtttccgaaggccgaagcgctgccagataggacgcatgatgatttctttaatgtattctcgtacctttaaatcgtttttcacgtagaaccattccttcatccagtctccaggccacctcttccgaaaggttggcactgggcagcttgagcctgaacgagcgacgaagctatagcagccaaaattgttatgatactgttctttaccccagggcttcgtctcgtataaaagttcgtgcatgctgcagaaactttttgcacttggctccaagccctgactcctcacggcccagacgaatattcccattcttatgatggcttcgggagtaatttggtgaaggaaaatctgatatatcattaagacttcaaccacaaatctgcttaaggggagccgaagcccagctttgaaaaagcttcggaagatcacgacttcattctctttgggagtaggagcagtcttgtctccattgtcagccctcacaatagacatatctcgaaaatatcttcccctcatattatcgagatctttgtttaatagttgatttcccgaaaattgcatgacttggtcaccagggtcgatcttcggaggcttcgcccccactttccacatcataactgtcgctttcatcggtatcttcagataagccttccataatttcttttgtaatcttttctgtgttggtctttgcaattgactcgatgaatccagaaattttttccttaaggagcttctcctcctcgctcagctttgtttcagcaacaactttcttatcttgagacatctcttcggaaatggtgaaatgtgctcttaaagccgaagcttagaaaacctaaaaagccaagcaagcgttggtaggcaagagctaaaaattgagtaagcagagcagatggcaaaaagcgtgccaagtgagctcgtggtgtgctcttatttatacgcctagtgcgttgcaagttggagggccccgcttgtcattggctgttgttattctagcaaagggaaggtgttttttcggaccttcggcttagggccttcgtccatatcgcaatctgaatttatcattctaacaaattaatattgcgaggggctactgttgggggccttcggcttccgaaggtcctcaaaaacatgatttaacaatgtttctggagtataatacatgaacaggtatcttcggactcggatcagaaccacagtgtgaagaagcacaaagaacacgaaggttggcgcataaccgaagctgtgcgcaggagagcatcggcacaatagcagaaaaggaaaccgacttaaaaaggaaaaggttattcagacctcgatggtttactatagaatcattagcaaatgtaaagggcatggatgtaattttacatgggctgcgcctcgtgcctataaatagatgaacagtgctcacgtactgttcacactgacttgacatttgtttttgcgtcacgcttgtacccttacattctttcaagccgaaggtacatttgtaatttgatatcattttcatttttccataataataaaatagaaatgagttgataacaatgcataa

SEQ ID NO: 7908 - DNA, 1898 bp, Zea Mays
ctcacacgtcgggctccttattctacccagccaggctccctcacgcggacgcccagggccctctcaagtctcaacacactcgttgtctctagaatcctccccatgtctcctctctgctcgcctcattccccaacatcgatcccccacgcgctcgcgctctgcaccggctcccaggcacacgtcgacgacgcattctggcacgtgttttcttcctgattggattccccagcaccggtcagtctcgccttggcctcgggccattgcatcctaggccgagctcggccagttcaccagcgacctggccgtggcgctcgccctcctgctccggtctctccatcacgctcggctccagctggtcacgctcctcgcaccaaccccgactccaagtgctgccatgacctcgtcatggattcgaggcatcacatcgtcgctctgctgcataggcgcacgtgttgtcgcctccctgccgtcttcgcttgtgtgccaggtgggagttggccggaggttttgtattttattttccaatttcagattatagctgagacctagaaaatgacatagaaaattacagaaaaatgctaaatatgtaaaccaaatttgttgagttcaccaagatgagtactatctgataaaaatattcattaggcttgaacaacaacttttatgtttaggccttaattaaagttaacttactaacgcttattttagttataggaataaaaaaatatagctccaaaaatgctgaaactttgtaaataggtttattatgtctaaaatagtgctgggtaaaagttttaatgtatttggagctggtttgcctagagatccttgaaatagctaaaagaagaaatataaaaaaaccacacaagtagtgttaatatatgttgtaacggagttagaccctataaagtgttaggtagcaaatttagtgagccttagtatgtttagttctctggtttgtccaactaaattaagtttaagccttcagatcaaatgttaagtaaagtataagtataggtaagcttgtcatgtgcttagttagagatgtttatgttccccacctctcctttgtgagagtttgcatttcatatcataacataagcatacatgtatttgtaattgacttgtagaacacctagaagaagtggtgtttgaaggagtctactccaatgcctgcttatcaagtggatggatctatctaactaaaggttgggtagaaggattttgggatcttctcctgcaacaaggcaagccccggtgcatttgccaccatccttgtgtttacaaaattttatcacttatatgctacattaggtgataggagttgattggttaaactcttgatgcattaccatccttgaaagcttgattaccataccttgccacctgttttataaaagctagagatgcttagtcatgcgaatagactaagaaaaatgtttttgatctatgactcatgtttttacaaaaaagaaaatgggcttgggataatggaggcatcaagacgttgataaattcattatccaggcatggcccctctgtcaggcaccaaatttttgaaatagtttaaaatgggaccagacgttgagcaggaaaggtcgcccgtctgtgtcgattaaggaccgtaccgattgttggcatgatgatctaggaccttttaactggccacatacctcatcatgggcaagcctgaacccggctattccctacgtgaaaagacaaccgcgcactgggcgtgggagatggtgggagtagcagttaccctcctggcaagaagctgaatggtagggtaatgtgctcccaggtagcgcggaccggttcatgtagtggaggatccgtgggaatggttgacatatgcaagggttaagtgctacatatgtcgtgtggttggagatccc

SEQ ID NO: 7909 - DNA, 1176 bp, Zea Mays
ccttattctacccagccaggctccctcacgcggacgcccagggccctctcaagtctcaacacactcgttgtctctagaatcctccccatgtctcctctctgctcgcctcattccccaacatcgatcccccacgcgctcgcgctctgcaccggctcccaggcacacgtcgacgacgcattctggcacgtgttttcttcctgattggattccccagcaccggtcagtctcgccttggcctcgggccattgcatcctaggccgagctcggccagttcaccagcgacctggccgtggcgctcgccctcctgctccggtctctccatcacgctcggctccagctggtcacgctcctcgcaccaaccccgactccaagtgctgccatgacctcgtcatggattcgaggcatcacatcgtcgctctgctgcataggcgcacgtgttgtcgcctccctgccgtcttcgcttgtgtgccagaacacctagaagaagtggtgtttgaaggagtctactccaatgcctgcttatcaagtggatggatctatctaactaaaggttgggtagaaggattttgggatcttctcctgcaacaaggcaagccccggtgcatttgccaccatccttgtgtttacaaaattttatcacttatatgctacattaggtgataggagttgattggttaaactcttgatgcattaccatccttgaaagcttgattaccataccttgccacctgttttataaaagctagagatgcttagtcatgcgaatagactaagaaaaatgtttttgatctatgactcatgtttttacaaaaaagaaaatgggcttgggataatggaggcatcaagacgttgataaattcattatccaggcatggcccctctgtcaggcaccaaatttttgaaatagtttaaaatgggaccagacgttgagcaggaaaggtcgcccgtctgtgtcgattaaggaccgtaccgattgttggcatgatgatctaggaccttttaactggccacatacctcatcatgggcaagcctgaacccggctattccctacgtgaaaagacaaccgcgcactgggcgtgggagatggtgggagtagcagttaccctcctggcaagaagctgaatggtagggtaatgtgctcccaggtagcgcggaccggttcatgtagtggagga

SEQ ID NO: 7910 - DNA, 2431 bp, Zea Mays
agcaggctgccaggcaggcaacacgcggacacccaattattcacccaagacccaacacccgcccaggcagcaagacaaggacaagggtctccaccgcttcccctcccctcccctgctctgctcctcgcctcctccctcccgaatcccgatcccagcttccctccttcctcccgcccacgccgccaaatcgagccccagccgcgatgagttggtggtggacgggcgcgatcggcgcggtcaagaagcgccaggacgagcaggcggccgccgccgagccctcctaccagagcgtcgccctcgtcgtcggatccaccggcatcgtcggcacctccctcctcgacatcctcccgctcgccgacacccccgccgggccgtggaaggtctacgccgtctcgcgccgcccgctcccgccctggtccccggcgccctccccggccgtcacccacctccacctcgacctcgccgactccgccgccgtcgcggaggctctccagcccctcaccgacatcacccacgtcttcttcgtcgcctggaccaaccgccccaccgaggcggagaaccgggaggccaactccgccatgctccgtaacgtcctctccgtcgtcgtcccgaactgccccgcgctcgtccacgtctgcctccagaccggccgcaagcactacgtcggccccttcgaggccatcggcaaggtcgccgccccggacccgcccttcaccgaggacatgccgcgcctcgactgccccaacttctactacgacatggaggacatcctcttccacgaggtctcccgccgagacggcgccgtcagctggtccgtgcaccgccccaccaccgtcttcggatactcccctcgcagcgccatgaacctcgtcggcagcctctgcgtctacgccgccatctgccggaaggagggcacgacgctccggtggcccggctctcgggtcacttgggagggcttcagcgacgcctccgacgccgaccttatcgccgagcacgagatctgggccgccgtggatccgttcgccaagaacgaggccttcaattgcagcaacggggatctcttcaagtggaagcagctgtggccgatactcgccgaccatttcggcctggaatgggctggctacgaaggtgaggagaacaggttcaagctcgaggaggccatggccgggaaggaagctgtctgggcagagattgtcagggaaaacgaccttatagccacggagcttgacgagatcacgaattggtggttcgtcgatgccatgtttgctgtggagacccagcttctggacagcatgaacaaaagcaaggagcatggcttcctcggcttcaggaacactgtcagctctttcaacacatggatcgagaagctgaaggtcttcaagattgttccctaataataattcatccttgctattcacttctatactgttgttctgcatccttattatcctgctcatttatcagcaccagttctcctgtaattcaaacatcttgctatctgtgccaggtttgcatgttatatactagggaccaataaggatcaacacattgcaaaataggttattcttgtccagcatgggtttgattgaaattgtttgtgtattgaattactagctgaaaccgttcttgtttactagcattgctttatctgtgaatcggttggtgcatcaatcaattatctcccatctgtggtgcattcttgtataaggctctgcttctttcattacaaacattttgagaagccacttaaatctttttattttggcattaataatcactgcactgcatgctttgatatctttatgctttttggtgattatactttataccttcatgcttcttggtgatatcatacgggaggaaatgaatacactaacagccttacatgaaaagatagacaaacgagcaagaaccaaagccttgctacacattttcctggaacttggtctctacaatgtctcagactctctcggtcatcagtcatatacaaggccagttttgcctcggatgccccatctttttgctgcagtttttcttttgcatcggatgggatggaaaacctgttgcacaaagtttttcttttgctgagctctggattggttagtaattgaagctcaaggaaggcacgtcttctttgtgctcttattctggtggttgtgggcatctttgacaagtcactgattggctctgcaaaatctgatttgggttctgcaaccgaaacccaccttgcgtgtatatcgatgactcatcccgattttagatgacggaggtggttatgtgaagaatttcgccgcggccgggaggtgcgtcttttctgcatagtgaaatgatttgcgtaaacagattggactggattgcttcatggtgtaaactgtgattatagataaataccccacttcggattgattcatgctgtaaagggatgggttac

SEQ ID NO: 7911 - DNA, 262 bp, Zea Mays
gtgctgagtgccgactgtcgttggtctgtaactctgtatgagttaagtggtgccaaaaagtggtcgtttttcccttcctttgatctgtacagagatccatggtagccgccggggtgctggtaacgttgagattcttcggcacttgctgagaaggacattgcagcgctgtctcctgagcttcgtgcacaagcaactgatccgaagagcaggcaaggtcacaggaccctggatggaagtttgggaggtggccagacactgtcac

SEQ ID NO: 7912 - DNA, 4014 bp, Zea Mays
cgaagccccggcggagaggcgaggtgagctttctcggagaggggacctcgcgccaccagccgcccgagcttcccgcgccatggatcccatcatgaagctactcgaggacgacgaggatgagagtctgcactcgggtgccgacgtcgaggccttcacggcggcgctgaaccgcgaggtggaggccagcgcgagcgccagcgccagcaccagcaccagcgttcccgccggctcctcgtcccagcccacggatcacggtgctgagtttttttggcattggtgttatgagtgcaatgaagttttcaatcaaagactgcattaggaacattttcagcaagacttttacctcaggaacacaagtcactattaaaccatgatcctggtcagtggcaagatcctgtaaagaatgaaattgtaaaccaggagagtcagcaacaggaacagacacatgcatttagaaatgatcacccgtcaagacctgaaatggtttctcaaggttctaataactgcccccttcccactaatacaccaaaagaatgtgatttactgaaggcaaaacaagaacctggaagtacatctcaacaaggtattgttgctcagcatcagcctatgcagcaaatgaagagtgaacaaacaccaattgtcagtcagcagcagtcgatgcagcaaatgaagaatcaacaaacaccagtcacaaaccaaacaaatagtgcaactacaacagcaaaagctccagttgttacatttcacatgttaattccaattttgagtcgctacctagacaaagccagggacatagaagtgcagtccattttcgccaagttgcggaaaaatgaagtcagcaaggaatacttcttaaaaactgtaaggaatattgttggtgataaattgcttaagcaagctgcttcacaatatcaaatgcaggcacaacgaagccctcagacaaacccaagcaactattctttatcaggtcaagtttctggtcagcagactgctcccagtggttctgtgacaggagatgaacagaagggatatccaggggctcacaccatccctatgagacaagctattgccagcactcgaccacctcaatttcggccttcctcgtctggccaaatgcggagtaatacgggttatccaccttcacaaaccaatttgcataaggctaatgaaatgggaaacatgtcagatgggaaaggggtccatatgttacaaactcgtccacccaataactccataccagtacaaacaatgcagcatcatgtgcagcgaccacaaacatcttcaccagtgtttggggcaaatagtattcatgcacgtccatttccgcggccacttggaggtccagctgcaccatttagaccacaaatggcagattccaatccaaaagcacaattgattcagggagctgtgaccacagtatctgggagtgtgccaacacgatccatagtgtctggaaatgcgccagccttgggatcttcaaaagtcagtgctggcatggaaagccagtcacaacaattgagtgcgcctaagcctttagctgcaacaagcttaagtcagactcaatctcatggcattcaagaagagcctaaaattcagatccaatcttctgtgcaagcacctcctgcagcagcttctaaaacacctcagaggaaggcatcttctggacagaagaagcctttggaagtcttaggctcatcccctccaccatctagcaaaaagcagaaggtatctgggggtttccatgaacaaagcattgaccagcttaatgatgtcactgcagttagcggtgttaatctgagggaagaagaggaacaccttttctctgctccaaaggaagagggtcgagtttcagaagttgctcggaaagttgttcaactagaagaagaaaagctcattctgcagaagggacctctgacccaaaaattagcgggaatcatgagtaaatgtaatttgaaggtcattggcactgatgtggaacgctgtctgtccatgtgtgttgaggagaggttacgggggtttataagaagtataataaggttctctaaacagagggttgaggttgaaaagtcaagacatcatttttatccattatcctcagatgttcgcagtcatattatgagagtgaatcgagaagcaagagaacagtgggagaaaaagcaggctgaagatgctgagagaattaggaaacaaaatgatggagatggcaatgcaaatgttgatcttgaaaaagacagaatcgagacccgtggtttgtcaaagcatgcaaagacttacaaggaggacgatgataagatgcgaactacagctgcaaatgttgctgcacgagttgcagcggggggagatgacatgctgtcaaagtggcaattactagctgaacggaataagcagagaagtgagggaggtgatggttcttctggctctgtaccaggtaacatgttgcaacacaggccatcactgaaatctgggaaagacttaagggaagaacatgaagttgaaaagagaggatactccacaatgcttggatctggtggtgttagaaggtcaccgctaacaaaagtggcgcggagtatttctatgaaggatgtggtagcggcactcgagcgagagcctcagatgtcaaaatcctcattacttttccgcctatatggaaggccattgacagaaccatctgcaaagtaatttggaggataatcattgcagttcatattacagaggggcaacttttggtcaatatatgaggaggcccaatcaccaagcgatggggctgattggtcgacgatcaattttgcggggatttagcgattacttggaagccagcgtttccctggagccatttttgttttttcaagggaacagtctgcagatgtttcttttttttcaatgtttttttctctatataatcatgtgttgatcacaatgcccagccagcttcagctggtatgaacatcgtgatcgtttttgtatagcagatggagtaggatgttccttgagatgcttatgacttgctaagtgtcctattctttaatcgtgcgattttgttgtacagaaaacatgaaatgtatgtattggaggctcaaatttattcatgaacaatatgtgccctcgtttcagaacagtttgttttggtttgcaaaatatcaacacaagggcataaaagcagctattctgaatgcacacagaatatcaggacttgctatgccacccttatcaaatctagtcttaatatcatacatatatatagtcacgacattcttgaagctaggtttctattgataatactatcttgtctttccccctttcaactggggaaggtggtacattgttgatcggcatctaacatccaaaatcataaggaaccaatccttgtagctctggaccgttgagcctgctgttgttctcaaagctgcaaagtagagatgtgttagcgctttgtcaaaatcatacggattcacatcgaagttctagtggtaaataaaaatacaagttcaacgatctagcattgaaatgcaatatcaatggtcttaggctcttaagtcttagctcacataggttctaatccattttgagcaatgttttggaatcaatggacccagacataagaacatgtcatctatgctaagatttggtcaaaactgcaaacatcaataacgtttaatttatttagttggaaacatacacgatatgtgtgtagatttgtactgagacacactgcaaaatctcacaaatttggaggatcttaagagcacattcacaaagataagatcttaaggcttgtttgggatcaaggggaatggagggaattaagggaaaaatgaactaatttcccatcaatcccctccagaggggatttgagtttccaaactaacccttagggaatgacattagacaatctaaacctagcaaaatccagacgttgtcatatattgaatactatctggaacttgtggtaagcaagctgttcgaaccaaaattgagcggcggactgtccggccctgaggccggacggtccgcggt

SEQ ID NO: 7913 - DNA, 3613 bp, Zea Mays
cgaagccccggcggagaggcgaggtgagctttctcggagaggggacctcgcgccaccagccgcccgagcttcccgcgccatggatcccatcatgaagctactcgaggacgacgaggatgagagtctgcactcgggtgccgacgtcgaggccttcacggcggcgctgaaccgcgaggtggaggccagcgcgagcgccagcgccagcaccagcaccagcgttcccgccggctcctcgtcccagcccacggatcacggtgctggacttttacctcaggaacacaagtcactattaaaccatgatcctggtcagtggcaagatcctgtaaagaatgaaattgtaaaccaggagagtcagcaacaggaacagacacatgcatttagaaatgatcacccgtcaagacctgaaatggtttctcaaggttctaataactgcccccttcccactaatacaccaaaagaatgtgatttactgaaggcaaaacaagaacctggaagtacatctcaacaaggtattgttgctcagcatcagcctatgcagcaaatgaagagtgaacaaacaccaattgtcagtcagcagcagtcgatgcagcaaatgaagaatcaacaaacaccagtcacaaaccaaacaaatagtgcaactacaacagcaaaagctccagttgttacatttcacatgttaattccaattttgagtcgctacctagacaaagccagggacatagaagtgcagtccattttcgccaagttgcggaaaaatgaagtcagcaaggaatacttcttaaaaactgtaaggaatattgttggtgataaattgcttaagcaagctgcttcacaatatcaaatgcaggcacaacgaagccctcagacaaacccaagcaactattctttatcaggtcaagtttctggtcagcagactgctcccagtggttctgtgacaggagatgaacagaagggatatccaggggctcacaccatccctatgagacaagctattgccagcactcgaccacctcaatttcggccttcctcgtctggccaaatgcggagtaatacggtcaatcaagccttgggatcttcaaaagtcagtgctggcatggaaagccagtcacaacaattgagtgcgcctaagcctttagctgcaacaagcttaagtcagactcaatctcatggcattcaagaagagcctaaaattcagatccaatcttctgtgcaagcacctcctgcagcagcttctaaaacacctcagaggaaggcatcttctggacagaagaagcctttggaagtcttaggctcatcccctccaccatctagcaaaaagcagaaggtatctgggggtttccatgaacaaagcattgaccagcttaatgatgtcactgcagttagcggtgttaatctgagggaagaagaggaacaccttttctctgctccaaaggaagagggtcgagtttcagaagttgctcggaaagttgttcaactagaagaagaaaagctcattctgcagaagggacctctgacccaaaaattagcgggaatcatgagtaaatgtaatttgaaggtcattggcactgatgtggaacgctgtctgtccatgtgtgttgaggagaggttacgggggtttataagaagtataataaggttctctaaacagagggttgaggttgaaaagtcaagacatcatttttatccattatcctcagatgttcgcagtcatattatgagagtgaatcgagaagcaagagaacagtgggagaaaaagcaggctgaagatgctgagagaattaggaaacaaaatgatggagatggcaatgcaaatgttgatcttgaaaaagacagaatcgagacccgtggtttgtcaaagcatgcaaagacttacaaggaggacgatgataagatgcgaactacagctgcaaatgttgctgcacgagttgcagcggggggagatgacatgctgtcaaagtggcaattactagctgaacggaataagcagagaagtgagggaggtgatggttcttctggctctgtaccaggtaacatgttgcaacacaggccatcactgaaatctgggaaagacttaagggaagaacatgaagttgaaaagagaggatactccacaatgcttggatctggtggtgttagaaggtcaccgctaacaaaagtggcgcggagtatttctatgaaggatgtggtagcggcactcgagcgagagcctcagatgtcaaaatcctcattacttttccgcctatatggaaggccattgacagaaccatctgcaaagtaatttggaggataatcattgcagttcatattacagaggggcaacttttggtcaatatatgaggaggcccaatcaccaagcgatggggctgattggtcgacgatcaattttgcggggatttagcgattacttggaagccagcgtttccctggagccatttttgttttttcaagggaacagtctgcagatgtttcttttttttcaatgtttttttctctatataatcatgtgttgatcacaatgcccagccagcttcagctggtatgaacatcgtgatcgtttttgtatagcagatggagtaggatgttccttgagatgcttatgacttgctaagtgtcctattctttaatcgtgcgattttgttgtacagaaaacatgaaatgtatgtattggaggctcaaatttattcatgaacaatatgtgccctcgtttcagaacagtttgttttggtttgcaaaatatcaacacaagggcataaaagcagctattctgaatgcacacagaatatcaggacttgctatgccacccttatcaaatctagtcttaatatcatacatatatatagtcacgacattcttgaagctaggtttctattgataatactatcttgtctttccccctttcaactggggaaggtggtacattgttgatcggcatctaacatccaaaatcataaggaaccaatccttgtagctctggaccgttgagcctgctgttgttctcaaagctgcaaagtagagatgtgttagcgctttgtcaaaatcatacggattcacatcgaagttctagtggtaaataaaaatacaagttcaacgatctagcattgaaatgcaatatcaatggtcttaggctcttaagtcttagctcacataggttctaatccattttgagcaatgttttggaatcaatggacccagacataagaacatgtcatctatgctaagatttggtcaaaactgcaaacatcaataacgtttaatttatttagttggaaacatacacgatatgtgtgtagatttgtactgagacacactgcaaaatctcacaaatttggaggatcttaagagcacattcacaaagataagatcttaaggcttgtttgggatcaaggggaatggagggaattaagggaaaaatgaactaatttcccatcaatcccctccagaggggatttgagtttccaaactaacccttagggaatgacattagacaatctaaacctagcaaaatccagacgttgtcatatattgaatactatctggaacttgtggtaagcaagctgttcgaaccaaaattgagcggcggactgtccggccctgaggccggacggtccgcggt

SEQ ID NO: 7914 - DNA, 3954 bp, Zea Mays
atttcatttcgtttcctcccgttcgtcgaagccccggcggagaggcgaggtgagctttctcggagaggggacctcgcgccaccagccgcccgagcttcccgcgccatggatcccatcatgaagctactcgaggacgacgaggacttttacctcaggaacacaagtcactattaaaccatgatcctggtcagtggcaagatcctgtaaagaatgaaattgtaaaccaggagagtcagcaacaggaacagacacatgcatttagaaatgatcacccgtcaagacctgaaatggtttctcaaggttctaataactgcccccttcccactaatacaccaaaagaatgtgatttactgaaggcaaaacaagaacctggaagtacatctcaacaaggtattgttgctcagcatcagcctatgcagcaaatgaagagtgaacaaacaccaattgtcagtcagcagcagtcgatgcagcaaatgaagaatcaacaaacaccagtcacaaaccaaacaaatagtgcaactacaacagcaaaagctccagttgttacatttcacatgttaattccaattttgagtcgctacctagacaaagccagggacatagaagtgcagtccattttcgccaagttgcggaaaaatgaagtcagcaaggaatacttcttaaaaactgtaaggaatattgttggtgataaattgcttaagcaagctgcttcacaatatcaaatgcaggcacaacgaagccctcagacaaacccaagcaactattctttatcaggtcaagtttctggtcagcagactgctcccagtggttctgtgacaggagatgaacagaagggatatccaggggctcacaccatccctatgagacaagctattgccagcactcgaccacctcaatttcggccttcctcgtctggccaaatgcggagtaatacgggttatccaccttcacaaaccaatttgcataaggctaatgaaatgggaaacatgtcagatgggaaaggggtccatatgttacaaactcgtccacccaataactccataccagtacaaacaatgcagcatcatgtgcagcgaccacaaacatcttcaccagtgtttggggcaaatagtattcatgcacgtccatttccgcggccacttggaggtccagctgcaccatttagaccacaaatggcagattccaatccaaaagcacaattgattcagggagctgtgaccacagtatctgggagtgtgccaacacgatccatagtgtctggaaatgcgccaggtaatcaatctacaaggcaacaatcagcaaacaaggagcaaaaaactatttcttttactcgaacagcacatatgaataatgaaactgttagccaaaactctgaattctcacagaattcttttgctgtgatgcatgcaaaacaagtcaatcaagccttgggatcttcaaaagtcagtgctggcatggaaagccagtcacaacaattgagtgcgcctaagcctttagctgcaacaagcttaagtcagactcaatctcatggcattcaagaagagcctaaaattcagatccaatcttctgtgcaagcacctcctgcagcagcttctaaaacacctcagaggaaggcatcttctggacagaagaagcctttggaagtcttaggctcatcccctccaccatctagcaaaaagcagaaggtatctgggggtttccatgaacaaagcattgaccagcttaatgatgtcactgcagttagcggtgttaatctgagggaagaagaggaacaccttttctctgctccaaaggaagagggtcgagtttcagaagttgctcggaaagttgttcaactagaagaagaaaagctcattctgcagaagggacctctgacccaaaaattagcgggaatcagtcattggcactgatgtggaacgctgtctgtccatgtgtgttgaggagaggttacgggggtttataagaagtataataaggttctctaaacagagggttgaggttgaaaagtcaagacatcatttttatccattatcctcagatgttcgcagtcatattatgagagtgaatcgagaagcaagagaacagtgggagaaaaagcaggctgaagatgctgagagaattaggaaacaaaatgatggagatggcaatgcaaatgttgatcttgaaaaagacagaatcgagacccgtggtttgtcaaagcatgcaaagacttacaaggaggacgatgataagatgcgaactacagctgcaaatgttgctgcacgagttgcagcggggggagatgacatgctgtcaaagtggcaattactagctgaacggaataagcagagaagtgagggaggtgatggttcttctggctctgtaccaggtaacatgttgcaacacaggccatcactgaaatctgggaaagacttaagggaagaacatgaagttgaaaagagaggatactccacaatgcttggatctggtggtgttagaaggtcaccgctaacaaaagtggcgcggagtatttctatgaaggatgtggtagcggcactcgagcgagagcctcagatgtcaaaatcctcattacttttccgcctatatggaaggccattgacagaaccatctgcaaagtaatttggaggataatcattgcagttcatattacagaggggcaacttttggtcaatatatgaggaggcccaatcaccaagcgatggggctgattggtcgacgatcaattttgcggggatttagcgattacttggaagccagcgtttccctggagccatttttgttttttcaagggaacagtctgcagatgtttcttttttttcaatgtttttttctctatataatcatgtgttgatcacaatgcccagccagcttcagctggtatgaacatcgtgatcgtttttgtatagcagatggagtaggatgttccttgagatgcttatgacttgctaagtgtcctattctttaatcgtgcgattttgttgtacagaaaacatgaaatgtatgtattggaggctcaaatttattcatgaacaatatgtgccctcgtttcagaacagtttgttttggtttgcaaaatatcaacacaagggcataaaagcagctattctgaatgcacacagaatatcaggacttgctatgccacccttatcaaatctagtcttaatatcatacatatatatagtcacgacattcttgaagctaggtttctattgataatactatcttgtctttccccctttcaactggggaaggtggtacattgttgatcggcatctaacatccaaaatcataaggaaccaatccttgtagctctggaccgttgagcctgctgttgttctcaaagctgcaaagtagagatgtgttagcgctttgtcaaaatcatacggattcacatcgaagttctagtggtaaataaaaatacaagttcaacgatctagcattgaaatgcaatatcaatggtcttaggctcttaagtcttagctcacataggttctaatccattttgagcaatgttttggaatcaatggacccagacataagaacatgtcatctatgctaagatttggtcaaaactgcaaacatcaataacgtttaatttatttagttggaaacatacacgatatgtgtgtagatttgtactgagacacactgcaaaatctcacaaatttggaggatcttaagagcacattcacaaagataagatcttaaggcttgtttgggatcaaggggaatggagggaattaagggaaaaatgaactaatttcccatcaatcccctccagaggggatttgagtttccaaactaacccttagggaatgacattagacaatctaaacctagcaaaatccagacgttgtcatatattgaatactatctggaacttgtggtaagcaagctgttcgaaccaaaattgagcggcggactgtccggccctgaggccggacggtccgcggt

SEQ ID NO: 7915 - DNA, 3970 bp, Zea Mays
gtttcatttcatttcgtttcctcccgttcgtcgaagccccggcggagaggcgaggtgagctttctcggagaggggacctcgcgccaccagccgcccgagcttcccgcgccatggatcccatcatgaagctactcgaggacgacgaggatgagagtctgcactcgggtgccgacgtcgaggccttcacggcggcgctgaaccgcgaggtggaggccagcgcgagcgccagcgccagcaccagcaccagcgttcccgccggctcctcgtcccagcccacggatcacggtgctggacttttacctcaggaacacaagtcactattaaaccatgatcctggtcagtggcaagatcctgtaaagaatgaaattgtaaaccaggagagtcagcaacaggaacagacacatgcatttagaaatgatcacccgtcaagacctgaaatggtttctcaaggttctaataactgcccccttcccactaatacaccaaaagaatgtgatttactgaaggcaaaacaagaacctggaagtacatctcaacaaggtattgttgctcagcatcagcctatgcagcaaatgaagagtgaacaaacaccaattgtcagtcagcagcagtcgatgcagcaaatgaagaatcaacaaacaccagtcacaaaccaaacaaatagtgcaactacaacagcaaaagctccagttgttacatttcacatgttaattccaattttgagtcgctacctagacaaagccagggacatagaagtgcagtccattttcgccaagttgcggaaaaatgaagtcagcaaggaatacttcttaaaaactgtaaggaatattgttggtgataaattgcttaagcaagctgcttcacaatatcaaatgcaggcacaacgaagccctcagacaaacccaagcaactattctttatcaggtcaagtttctggtcagcagactgctcccagtggttctgtgacaggagatgaacagaagggatatccaggggctcacaccatccctatgagacaagctattgccagcactcgaccacctcaatttcggccttcctcgtctggccaaatgcggagtaatacgggttatccaccttcacaaaccaatttgcataaggctaatgaaatgggaaacatgtcagatgggaaaggggtccatatgttacaaactcgtccacccaataactccataccagtacaaacaatgcagcatcatgtgcagcgaccacaaacatcttcaccagtgtttggggcaaatagtattcatgcacgtccatttccgcggccacttggaggtccagctgcaccatttagaccacaaatggcagattccaatccaaaagcacaattgattcagggagctgtgaccacagtatctgggagtgtgccaacacgatccatagtgtctggaaatgcgccaggcaaaacaagtcaatcaagccttgggatcttcaaaagtcagtgctggcatggaaagccagtcacaacaattgagtgcgcctaagcctttagctgcaacaagcttaagtcagactcaatctcatggcattcaagaagagcctaaaattcagatccaatcttctgtgcaagcacctcctgcagcagcttctaaaacacctcagaggaaggcatcttctggacagaagaagcctttggaagtcttaggctcatcccctccaccatctagcaaaaagcagaaggtatctgggggtttccatgaacaaagcattgaccagcttaatgatgtcactgcagttagcggtgttaatctgagggaagaagaggaacaccttttctctgctccaaaggaagagggtcgagtttcagaagttgctcggaaagttgttcaactagaagaagaaaagctcattctgcagaagggacctctgacccaaaaattagcgggaatcagtcattggcactgatgtggaacgctgtctgtccatgtgtgttgaggagaggttacgggggtttataagaagtataataaggttctctaaacagagggttgaggttgaaaagtcaagacatcatttttatccattatcctcagatgttcgcagtcatattatgagagtgaatcgagaagcaagagaacagtgggagaaaaagcaggctgaagatgctgagagaattaggaaacaaaatgatggagatggcaatgcaaatgttgatcttgaaaaagacagaatcgagacccgtggtttgtcaaagcatgcaaagacttacaaggaggacgatgataagatgcgaactacagctgcaaatgttgctgcacgagttgcagcggggggagatgacatgctgtcaaagtggcaattactagctgaacggaataagcagagaagtgagggaggtgatggttcttctggctctgtaccaggtaacatgttgcaacacaggccatcactgaaatctgggaaagacttaagggaagaacatgaagttgaaaagagaggatactccacaatgcttggatctggtggtgttagaaggtcaccgctaacaaaagtggcgcggagtatttctatgaaggatgtggtagcggcactcgagcgagagcctcagatgtcaaaatcctcattacttttccgcctatatggaaggccattgacagaaccatctgcaaagtaatttggaggataatcattgcagttcatattacagaggggcaacttttggtcaatatatgaggaggcccaatcaccaagcgatggggctgattggtcgacgatcaattttgcggggatttagcgattacttggaagccagcgtttccctggagccatttttgttttttcaagggaacagtctgcagatgtttcttttttttcaatgtttttttctctatataatcatgtgttgatcacaatgcccagccagcttcagctggtatgaacatcgtgatcgtttttgtatagcagatggagtaggatgttccttgagatgcttatgacttgctaagtgtcctattctttaatcgtgcgattttgttgtacagaaaacatgaaatgtatgtattggaggctcaaatttattcatgaacaatatgtgccctcgtttcagaacagtttgttttggtttgcaaaatatcaacacaagggcataaaagcagctattctgaatgcacacagaatatcaggacttgctatgccacccttatcaaatctagtcttaatatcatacatatatatagtcacgacattcttgaagctaggtttctattgataatactatcttgtctttccccctttcaactggggaaggtggtacattgttgatcggcatctaacatccaaaatcataaggaaccaatccttgtagctctggaccgttgagcctgctgttgttctcaaagctgcaaagtagagatgtgttagcgctttgtcaaaatcatacggattcacatcgaagttctagtggtaaataaaaatacaagttcaacgatctagcattgaaatgcaatatcaatggtcttaggctcttaagtcttagctcacataggttctaatccattttgagcaatgttttggaatcaatggacccagacataagaacatgtcatctatgctaagatttggtcaaaactgcaaacatcaataacgtttaatttatttagttggaaacatacacgatatgtgtgtagatttgtactgagacacactgcaaaatctcacaaatttggaggatcttaagagcacattcacaaagataagatcttaaggcttgtttgggatcaaggggaatggagggaattaagggaaaaatgaactaatttcccatcaatcccctccagaggggatttgagtttccaaactaacccttagggaatgacattagacaatctaaacctagcaaaatccagacgttgtcatatattgaatactatctggaacttgtggtaagcaagctgttcgaaccaaaattgagcggcggactgtccggccctgaggccggacggtccgcggt

SEQ ID NO: 7916 - DNA, 3810 bp, Zea Mays
acagcccagtaagacacggaggcgccatgggaaaaagtagccggccttcttcctccggctcccttccttcctgcccgcacaagggatttcgttttgtttcgtttcatttcatttcgtttcctcccgttcgtcgaagccccggcggagaggcgaggtgagctttctcggagaggggacctcgcgccaccagccgcccgagcttcccgcgccatggatcccatcatgaagctactcgaggacgacgaggacttttacctcaggaacacaagtcactattaaaccatgatcctggtcagtggcaagatcctgtaaagaatgaaattgtaaaccaggagagtcagcaacaggaacagacacatgcatttagaaatgatcacccgtcaagacctgaaatggtttctcaaggttctaataactgcccccttcccactaatacaccaaaagaatgtgatttactgaaggcaaaacaagaacctggaagtacatctcaacaaggtattgttgctcagcatcagcctatgcagcaaatgaagagtgaacaaacaccaattgtcagtcagcagcagtcgatgcagcaaatgaagaatcaacaaacaccagtcacaaaccaaacaaatagtgcaactacaacagcaaaagctccagttgttacatttcacatgttaattccaattttgagtcgctacctagacaaagccagggacatagaagtgcagtccattttcgccaagttgcggaaaaatgaagtcagcaaggaatacttcttaaaaactgtaaggaatattgttggtgataaattgcttaagcaagctgcttcacaatatcaaatgcaggcacaacgaagccctcagacaaacccaagcaactattctttatcaggtcaagtttctggtcagcagactgctcccagtggttctgtgacaggagatgaacagaagggatatccaggggctcacaccatccctatgagacaagctattgccagcactcgaccacctcaatttcggccttcctcgtctggccaaatgcggagtaatacggcatcatgtgcagcgaccacaaacatcttcaccagtgtttggggcaaatagtattcatgcacgtccatttccgcggccacttggaggtccagctgcaccatttagaccacaaatggcagattccaatccaaaagcacaattgattcagggagctgtgaccacagtatctgggagtgtgccaacacgatccatagtgtctggaaatgcgccagtcaatcaagccttgggatcttcaaaagtcagtgctggcatggaaagccagtcacaacaattgagtgcgcctaagcctttagctgcaacaagcttaagtcagactcaatctcatggcattcaagaagagcctaaaattcagatccaatcttctgtgcaagcacctcctgcagcagcttctaaaacacctcagaggaaggcatcttctggacagaagaagcctttggaagtcttaggctcatcccctccaccatctagcaaaaagcagaaggtatctgggggtttccatgaacaaagcattgaccagcttaatgatgtcactgcagttagcggtgttaatctgagggaagaagaggaacaccttttctctgctccaaaggaagagggtcgagtttcagaagttgctcggaaagttgttcaactagaagaagaaaagctcattctgcagaagggacctctgacccaaaaattagcgggaatcatgagtaaatgtaatttgaaggtcattggcactgatgtggaacgctgtctgtccatgtgtgttgaggagaggttacgggggtttataagaagtataataaggttctctaaacagagggttgaggttgaaaagtcaagacatcatttttatccattatcctcagatgttcgcagtcatattatgagagtgaatcgagaagcaagagaacagtgggagaaaaagcaggctgaagatgctgagagaattaggaaacaaaatgatggagatggcaatgcaaatgttgatcttgaaaaagacagaatcgagacccgtggtttgtcaaagcatgcaaagacttacaaggaggacgatgataagatgcgaactacagctgcaaatgttgctgcacgagttgcagcggggggagatgacatgctgtcaaagtggcaattactagctgaacggaataagcagagaagtgagggaggtgatggttcttctggctctgtaccaggtaacatgttgcaacacaggccatcactgaaatctgggaaagacttaagggaagaacatgaagttgaaaagagaggatactccacaatgcttggatctggtggtgttagaaggtcaccgctaacaaaagtggcgcggagtatttctatgaaggatgtggtagcggcactcgagcgagagcctcagatgtcaaaatcctcattacttttccgcctatatggaaggccattgacagaaccatctgcaaagtaatttggaggataatcattgcagttcatattacagaggggcaacttttggtcaatatatgaggaggcccaatcaccaagcgatggggctgattggtcgacgatcaattttgcggggatttagcgattacttggaagccagcgtttccctggagccatttttgttttttcaagggaacagtctgcagatgtttcttttttttcaatgtttttttctctatataatcatgtgttgatcacaatgcccagccagcttcagctggtatgaacatcgtgatcgtttttgtatagcagatggagtaggatgttccttgagatgcttatgacttgctaagtgtcctattctttaatcgtgcgattttgttgtacagaaaacatgaaatgtatgtattggaggctcaaatttattcatgaacaatatgtgccctcgtttcagaacagtttgttttggtttgcaaaatatcaacacaagggcataaaagcagctattctgaatgcacacagaatatcaggacttgctatgccacccttatcaaatctagtcttaatatcatacatatatatagtcacgacattcttgaagctaggtttctattgataatactatcttgtctttccccctttcaactggggaaggtggtacattgttgatcggcatctaacatccaaaatcataaggaaccaatccttgtagctctggaccgttgagcctgctgttgttctcaaagctgcaaagtagagatgtgttagcgctttgtcaaaatcatacggattcacatcgaagttctagtggtaaataaaaatacaagttcaacgatctagcattgaaatgcaatatcaatggtcttaggctcttaagtcttagctcacataggttctaatccattttgagcaatgttttggaatcaatggacccagacataagaacatgtcatctatgctaagatttggtcaaaactgcaaacatcaataacgtttaatttatttagttggaaacatacacgatatgtgtgtagatttgtactgagacacactgcaaaatctcacaaatttggaggatcttaagagcacattcacaaagataagatcttaaggcttgtttgggatcaaggggaatggagggaattaagggaaaaatgaactaatttcccatcaatcccctccagaggggatttgagtttccaaactaacccttagggaatgacattagacaatctaaacctagcaaaatccagacgttgtcatatattgaatactatctggaacttgtggtaagcaagctgttcgaaccaaaattgagcggcggactgtccggccctgaggccggacggtccgcggt

SEQ ID NO: 7917 - DNA, 2553 bp, Zea Mays
cgaagccccggcggagaggcgaggtgagctttctcggagaggggacctcgcgccaccagccgcccgagcttcccgcgccatggatcccatcatgaagctactcgaggacgacgaggacttttacctcaggaacacaagtcactattaaaccatgatcctggtcagtggcaagatcctgtaaagaatgaaattgtaaaccaggagagtcagcaacaggaacagacacatgcatttagaaatgatcacccgtcaagacctgaaatggtttctcaaggttctaataactgcccccttcccactaatacaccaaaagaatgtgatttactgaaggcaaaacaagaacctggaagtacatctcaacaaggtattgttgctcagcatcagcctatgcagcaaatgaagagtgaacaaacaccaattgtcagtcagcagcagtcgatgcagcaaatgaagaatcaacaaacaccagtcacaaaccaaacaaatagtgcaactacaacagcaaaagctccagttgttacatttcacatgttaattccaattttgagtcgctacctagacaaagccagggacatagaagtgcagtccattttcgccaagttgcggaaaaatgaagtcagcaaggaatacttcttaaaaactgtaaggaatattgttggtgataaattgcttaagcaagctgcttcacaatatcaaatgcaggcacaacgaagccctcagacaaacccaagcaactattctttatcaggtcaagtttctggtcagcagactgctcccagtggttctgtgacaggagatgaacagaagggatatccaggggctcacaccatccctatgagacaagctattgccagcactcgaccacctcaatttcggccttcctcgtctggccaaatgcggagtaatacgggttatccaccttcacaaaccaatttgcataaggctaatgaaatgggaaacatgtcagatgggaaaggggtccatatgttacaaactcgtccacccaataactccataccagtacaaacaatgcagcatcatgtgcagcgaccacaaacatcttcaccagtgtttggggcaaatagtattcatgcacgtccatttccgcggccacttggaggtccagctgcaccatttagaccacaaatggcagattccaatccaaaagcacaattgattcagggagctgtgaccacagtatctgggagtgtgccaacacgatccatagtgtctggaaatgcgccaggtaatcaatctacaaggcaacaatcagcaaacaaggagcaaaaaactatttcttttactcgaacagcacatatgaataatgaaactgttagccaaaactctgaattctcacagaattcttttgctgtgatgcatgcaaaacaagtcaatcaagccttgggatcttcaaaagtcagtgctggcatggaaagccagtcacaacaattgagtgcgcctaagcctttagctgcaacaagcttaagtcagactcaatctcatggcattcaagaagagcctaaaattcagatccaatcttctgtgcaagcacctcctgcagcagcttctaaaacacctcagaggaaggcatcttctggacagaagaagcctttggaagtcttaggctcatcccctccaccatctagcaaaaagcagaaggtatctgggggtttccatgaacaaagcattgaccagcttaatgatgtcactgcagttagcggtgttaatctgagggaagaagaggaacaccttttctctgctccaaaggaagagggtcgagtttcagaagttgctcggaaagttgttcaactagaagaagaaaagctcattctgcagaagggacctctgacccaaaaattagcgggaatcatgagtaaatgtaatttgaaggtcattggcactgatgtggaacgctgtctgtccatgtgtgttgaggagaggttacgggggtttataagaagtataataaggttctctaaacagagggttgaggttgaaaagtcaagacatcatttttatccattatcctcagatgttcgcagtcatattatgagagtgaatcgagaagcaagagaacagtgggagaaaaagcaggctgaagatgctgagagaattaggaaacaaaatgatggagatggcaatgcaaatgttgatcttgaaaaagacagaatcgagacccgtggtttgtcaaagcatgcaaagacttacaaggaggacgatgataagatgcgaactacagctgcaaatgttgctgcacgagttgcagcggggggagatgacatgctgtcaaagtggcaattactagctgaacggaataagcagagaagtgagggaggtgatggttcttctggctctgtaccaggtaacatgttgcaacacaggccatcactgaaatctgggaaagacttaagggaagaacatgaagttgaaaagagaggatactccacaatgcttggatctggtggtaccatgatattagtagttgagacatttctcaatgataagatgcctattctgctatttgttcatacagactgtatttcaaacttatag

SEQ ID NO: 7918 - DNA, 2739 bp, Zea Mays
gttttgtttcgtttcatttcatttcgtttcctcccgttcgtcgaagccccggcggagaggcgaggtgagctttctcggagaggggacctcgcgccaccagccgcccgagcttcccgcgccatggatcccatcatgaagctactcgaggacgacgaggatgagagtctgcactcgggtgccgacgtcgaggccttcacggcggcgctgaaccgcgaggtggaggccagcgcgagcgccagcgccagcaccagcaccagcgttcccgccggctcctcgtcccagcccacggatcacggtgctggacttttacctcaggaacacaagtcactattaaaccatgatcctggtcagtggcaagatcctgtaaagaatgaaattgtaaaccaggagagtcagcaacaggaacagacacatgcatttagaaatgatcacccgtcaagacctgaaatggtttctcaaggttctaataactgcccccttcccactaatacaccaaaagaatgtgatttactgaaggcaaaacaagaacctggaagtacatctcaacaaggtattgttgctcagcatcagcctatgcagcaaatgaagagtgaacaaacaccaattgtcagtcagcagcagtcgatgcagcaaatgaagaatcaacaaacaccagtcacaaaccaaacaaatagtgcaactacaacagcaaaagctccagttgttacatttcacatgttaattccaattttgagtcgctacctagacaaagccagggacatagaagtgcagtccattttcgccaagttgcggaaaaatgaagtcagcaaggaatacttcttaaaaactgtaaggaatattgttggtgataaattgcttaagcaagctgcttcacaatatcaaatgcaggcacaacgaagccctcagacaaacccaagcaactattctttatcaggtcaagtttctggtcagcagactgctcccagtggttctgtgacaggagatgaacagaagggatatccaggggctcacaccatccctatgagacaagctattgccagcactcgaccacctcaatttcggccttcctcgtctggccaaatgcggagtaatacgggttatccaccttcacaaaccaatttgcataaggctaatgaaatgggaaacatgtcagatgggaaaggggtccatatgttacaaactcgtccacccaataactccataccagtacaaacaatgcagcatcatgtgcagcgaccacaaacatcttcaccagtgtttggggcaaatagtattcatgcacgtccatttccgcggccacttggaggtccagctgcaccatttagaccacaaatggcagattccaatccaaaagcacaattgattcagggagctgtgaccacagtatctgggagtgtgccaacacgatccatagtgtctggaaatgcgccaggtaatcaatctacaaggcaacaatcagcaaacaaggagcaaaaaactatttcttttactcgaacagcacatatgaataatgaaactgttagccaaaactctgaattctcacagaattcttttgctgtgatgcatgcaaaacaagtcaatcaagccttgggatcttcaaaagtcagtgctggcatggaaagccagtcacaacaattgagtgcgcctaagcctttagctgcaacaagcttaagtcagactcaatctcatggcattcaagaagagcctaaaattcagatccaatcttctgtgcaagcacctcctgcagcagcttctaaaacacctcagaggaaggcatcttctggacagaagaagcctttggaagtcttaggctcatcccctccaccatctagcaaaaagcagaaggtatctgggggtttccatgaacaaagcattgaccagcttaatgatgtcactgcagttagcggtgttaatctgagggaagaagaggaacaccttttctctgctccaaaggaagagggtcgagtttcagaagttgctcggaaagttgttcaactagaagaagaaaagctcattctgcagaagggacctctgacccaaaaattagcgggaatcatgagtaaatgtaatttgaaggtcattggcactgatgtggaacgctgtctgtccatgtgtgttgaggagaggttacgggggtttataagaagtataataaggttctctaaacagagggttgaggttgaaaagtcaagacatcatttttatccattatcctcagatgttcgcagtcatattatgagagtgaatcgagaagcaagagaacagtgggagaaaaagcaggctgaagatgctgagagaattaggaaacaaaatgatggagatggcaatgcaaatgttgatcttgaaaaagacagaatcgagacccgtggtttgtcaaagcatgcaaagacttacaaggaggacgatgataagatgcgaactacagctgcaaatgttgctgcacgagttgcagcggggggagatgacatgctgtcaaagtggcaattactagctgaacggaataagcagagaagtgagggaggtgatggttcttctggctctgtaccaggtaacatgttgcaacacaggccatcactgaaatctgggaaagacttaagggaagaacatgaagttgaaaagagaggatactccacaatgcttggatctggtggtaccatgatattagtagttgagacatttctcaatgataagatgcctattctgctatttgttcatacagactgtatttcaaacttatag

SEQ ID NO: 7919 - DNA, 1571 bp, Zea Mays
atttgatgcttatagtatactgaaggggatccacaagagaggaagcattgggctctcttaccgatgcttttgaaagttttgtgcttcttggtttagtggaaaacaaatatgtcacactattgagccagttcatcaattcaattaaaaggggatctgtaaaagaggtgtgtctggcttgtcgctgcattggtgctggaagtagttcgcacgaaataatggatgagtcacatccacatcttttgagagttctccaaacttggcctgacgcacaaaagatgatctctgcacttgattgcttagcagttgtcacatttgttggtgcaactgatcttgctgaaactcagctgtctctgaaagccatctgggatgtgatccatccaaaatcaggatcaaatgtcggcgtagtcagaaaaccgaagcctcctttgttagcagctgccgtatctgcatgggcatttcttttaacaactattggttcatctagaagaaatactgattcttggaaagagccaattacatttctctgtagccttctagaagcagaggaccgtgctgtgcggattgctgctggtgaagcattagctctgtgttttgagctaagaatgtttgatgtttcctctagtgacgaagctgatgttgacagttacactggagaggctggtggttctaagcatcaacttttcttgaatatgcaagcattgaaggccaaactatctggtctagtctatagtctatctatggaggcggggggcaggggtgctgacaagaaaaatcttaatgatcagagagacctgttccaacgaatctcagattttattaagagtggtgagtgccctgaagaatcacttaggatttcaggcaagaatggcattttaagagttacatcatggcgtgaatcaatacagttgaactatatgaggcggtttcttgggcggggattcctgaagcattcacaggacaacgatttgctgcatgaggtctttgacatcaaaattgatcgtactgaaaacatgtcagccaccgaaaagaaaatgttcagatctggagaagagaaaggaagagctctgaagttgaataaagagcgtcgtctagctcaggagaggaagcagcagaatatcttgaacgagcaatatggatagaacctacccggaagactggagttttgtacagtggaactgttaccagatggtgagtgctgtgtgtgtatgtgacggtattgatgcatttgaggtgtattgctccggtggcggtactacagcgacatgtttgaaattgctccgaaatactattgagttttgtagaaagtgccatgttccctgcactccctagtgtttcctctgcatgcgcaaaggagatcttgagttcagttaatcacaattgtacagttccatagggtagagatatgaggtgattgtgaataacacagaggtcgtctagcctaagggcaataattggcgaactcttcctctagccgcaataattggtctgcaagagatttcgaaatgcgttcgctctctttcgtcctgaactttttatcttgtccattctccctccgtttctttggaaacaac

SEQ ID NO: 7920 - DNA, 1697 bp, Zea Mays
atttgtttaagattgatgaactaatatccattgaccatgacatcaatgttccctagagtaaatgcatcaaaagtcggaaggaatggactttcagtagttctatttgatgcttatagtatactgaaggggatccacaagagaggaagcattgggctctcttaccgatgcttttgaaagttttgtgcttcttggtttagtggaaaacaaatatgtcacactattgagccagttcatcaattcaattaaaaggggatctgtaaaagaggtgtgtctggcttgtcgctgcattggcttactggcaattacactaggtgctggaagtagttcgcacgaaataatggatgagtcacatccacatcttttgagagttctccaaacttggcctgacgcacaaaagatgatctctgcacttgattgcttagcagttgtcacatttgttggtgcaactgatcttgctgaaactcagctgtctctgaaagccatctgggatgtgatccatccaaaatcaggatcaaatgtcggcgtagtcagaaaaccgaagcctcctttgttagcagctgccgtatctgcatgggcatttcttttaacaactattggttcatctagaagaaatactgattcttggaaagagtaggccaattacatttctctgtagccttctagaagcagaggaccgtgctgtgcggattgctgctggtgaagcattagctctgtgttttgagctaagaatgtttgatgtttcctctagtgacgaagctgatgttgacagttacactggagaggctggtggttctaagcatcaacttttcttgaatatgcaagcattgaaggccaaactatctggtctagtctatagtctatctatggaggcggggggcaggggtgctgacaagaaaaatcttaatgatcagagagacctgttccaacgaatctcagattttattaagagtggtgagtgccctgaagaatcacttaggatttcaggcaagaatggcattttaagagttacatcatggcgtgaatcaatacagttgaactatatgaggcggtttcttgggcggggattcctgaagcattcacaggacaacgatttgctgcatgaggtctttgacatcaaaattgatcgtactgaaaacatgtcagccaccgaaaagaaaatgttcagatctggagaagagaaaggaagagctctgaagttgaataaagagcgtcgtctagctcaggagaggaagcagcagaatatcttgaacgagcaatatggatagaacctacccggaagactggagttttgtacagtggaactgttaccagatggtgagtgctgtgtgtgtatgtgacggtattgatgcatttgaggtgtattgctccggtggcggtactacagcgacatgtttgaaattgctccgaaatactattgagttttgtagaaagtgccatgttccctgcactccctagtgtttcctctgcatgcgcaaaggagatcttgagttcagttaatcacaattgtacagttccatagggtagagatatgaggtgattgtgaataacacagaggtcgtctagcctaagggcaataattggcgaactcttcctctagccgcaataattggtctgcaagagatttcgaaatgcgttcgctctctttcgtcctgaactttttatcttgtccattctccctccgtttctttggaaacaac

SEQ ID NO: 7921 - DNA, 2107 bp, Zea Mays
caggtctctgttcctgtggcgggacggacgactctgctgcttctcgttgacaaatcacaaggaaaacaaggggggaagaaaaacaagccagaaaagtctcctcttccttgctccgttcatccgcccctcaccgtcgcccaatctcacatggctcggcgtctccacggccaatccgacctcaacgacggcgcgcgcctccgtttctccacctccaactccagctccagctcttcctcccggttcctcctcgccgccccctccgacgacgcctccctctgtcggatccaccgctgaccgcgcgccgctacgcctgcgcctgatcaccggctggttcttggcctcttcgcttcctggaccgcccagacgtctccatgggcaagagtaagaggaacaagggcggtcgaggtggtggtggtgccgatgacaagcttgacggtggtggcgatgccgatagcgtgacctccatgtccagtgggctgtctgaccttcagttcgcgcaggccacagagcatattagctcgcaggaattcgttcttgacaagggatccacaagagaggaagcattgggctctcttaccgatgcttttgaaagttttgtgcttcttggtttagtggaaaacaaatatgtcacactattgagccagttcatcaattcaattaaaaggggatctgtaaaagaggtgtgtctggcttgtcgctgcattggcttactggcaattacactaggtgctggaagtagttcgcacgaaataatggatgagtcacatccacatcttttgagagttctccaaacttggcctgacgcacaaaagatgatctctgcacttgattgcttagcagttgtcacatttgttggtgcaactgatcttgctgaaactcagctgtctctgaaagccatctgggatgtgatccatccaaaatcaggatcaaatgtcggcgtagtcagaaaaccgaagcctcctttgttagcagctgccgtatctgcatgggcatttcttttaacaactattggttcatctagaagaaatactgattcttggaaagagccaattacatttctctgtagccttctagaagcagaggaccgtgctgtgcggattgctgctgttacactggagaggctggtggttctaagcatcaacttttcttgaatatgcaagcattgaaggccaaactatctggtctagtctatagtctatctatggaggcggggggcaggggtgctgacaagaaaaatcttaatgatcagagagacctgttccaacgaatctcagattttattaagagtggtgagtgccctgaagaatcacttaggatttcaggcaagaatggcattttaagagttacatcatggcgtgaatcaatacagttgaactatatgaggcggtttcttgggcggggattcctgaagcattcacaggacaacgatttgctgcatgaggtctttgacatcaaaattgatcgtactgaaaacatgtcagccaccgaaaagtcaccagtaagataggcatcaagacatgggcatagcgacagttctctaaagaatctgtttgcatgcgttcagaaaatgttcagatctggagaagagaaaggaagagctctgaagttgaataaagagcgtcgtctagctcaggagaggaagcagcagaatatcttgaacgagcaatatggatagaacctacccggaagactggagttttgtacagtggaactgttaccagatggtgagtgctgtgtgtgtatgtgacggtattgatgcatttgaggtgtattgctccggtggcggtactacagcgacatgtttgaaattgctccgaaatactattgagttttgtagaaagtgccatgttccctgcactccctagtgtttcctctgcatgcgcaaaggagatcttgagttcagttaatcacaattgtacagttccatagggtagagatatgaggtgattgtgaataacacagaggtcgtctagcctaagggcaataattggcgaactcttcctctagccgcaataattggtctgcaagagatttcgaaatgcgttcgctctctttcgtcctgaactttttatcttgtccattctccctccgtttctttggaaacaac

SEQ ID NO: 7922 - DNA, 1979 bp, Zea Mays
caggtctctgttcctgtggcgggacggacgactctgctgcttctcgttgacaaatcacaaggaaaacaaggggggaagaaaaacaagccagaaaagtctcctcttccttgctccgttcatccgcccctcaccgtcgcccaatctcacatggctcggcgtctccacggccaatccgacctcaacgacggcgcgcgcctccgtttctccacctccaactccagctccagctcttcctcccggttcctcctcgccgccccctccgacgacgcctccctctgtcggatccaccgctgaccgcgcgccgctacgcctgcgcctgatcaccggctggttcttggcctcttcgcttcctggaccgcccagacgtctccatgggcaagagtaagaggaacaagggcggtcgaggtggtggtggtgccgatgacaagcttgacggtggtggcgatgccgatagcgtgacctccatgtccagtgggctgtctgaccttcagttcgcgcaggccacagagcatattagctcgcaggaattcgttcttgacaagtacgtcgacgctctctatgagaagaggggatccacaagagaggaagcattgggctctcttaccgatgcttttgaaagttttgtgcttcttggtttagtggaaaacaagcttactggcaattacactaggtgctggaagtagttcgcacgaaataatggatgagtcacatccacatcttttgagagttctccaaacttggcctgacgcacaaaagatgatctctgcacttgattgcttagcagttgtcacatttgttggtgcaactgatcttgctgaaactcagctgtctctgaaagccatctgggatgtgatccatccaaaatcaggatcaaatgtcggcgtagtcagaaaaccgaagcctcctttgttagcagctgccgtatctgcatgggcatttcttttaacaactattggttcatctagaagaaatactgattcttggaaagagccaattacatttctctgtagccttctagaagcagaggaccgtgctgtgcggattgctgctgttacactggagaggctggtggttctaagcatcaacttttcttgaatatgcaagcattgaaggccaaactatctggtctagtctatagtctatctatggaggcggggggcaggggtgctgacaagaaaaatcttaatgatcagagagacctgttccaacgaatctcagattttattaagagtggtgagtgccctgaagaatcacttaggatttcaggcaagaatggcattttaagagttacatcatggcgtgaatcaatacagttgaactatatgaggcggtttcttgggcggggattcctgaagcattcacaggacaacgatttgctgcatgaggtctttgacatcaaaattgatcgtactgaaaacatgtcagccaccgaaaagaaaatgttcagatctggagaagagaaaggaagagctctgaagttgaataaagagcgtcgtctagctcaggagaggaagcagcagaatatcttgaacgagcaatatggatagaacctacccggaagactggagttttgtacagtggaactgttaccagatggtgagtgctgtgtgtgtatgtgacggtattgatgcatttgaggtgtattgctccggtggcggtactacagcgacatgtttgaaattgctccgaaatactattgagttttgtagaaagtgccatgttccctgcactccctagtgtttcctctgcatgcgcaaaggagatcttgagttcagttaatcacaattgtacagttccatagggtagagatatgaggtgattgtgaataacacagaggtcgtctagcctaagggcaataattggcgaactcttcctctagccgcaataattggtctgcaagagatttcgaaatgcgttcgctctctttcgtcctgaactttttatcttgtccattctccctccgtttctttggaaacaac

SEQ ID NO: 7923 - DNA, 2297 bp, Zea Mays
caggtctctgttcctgtggcgggacggacgactctgctgcttctcgttgacaaatcacaaggaaaacaaggggggaagaaaaacaagccagaaaagtctcctcttccttgctccgttcatccgcccctcaccgtcgcccaatctcacatggctcggcgtctccacggccaatccgacctcaacgacggcgcgcgcctccgtttctccacctccaactccagctccagctcttcctcccggttcctcctcgccgccccctccgacgacgcctccctctgtcggatccaccgctgaccgcgcgccgctacgcctgcgcctgatcaccggctggttcttggcctcttcgcttcctggaccgcccagacgtctccatgggcaagagtaagaggaacaagggcggtcgaggtggtggtggtgccgatgacaagcttgacggtggtggcgatgccgatagcgtgacctccatgtccagtgggctgtctgaccttcagttcgcgcaggccacagagcatattagctcgcaggaattcgttcttgacaagtacgtcgacgctctctatgagaagaggggatccacaagagaggaagcattgggctctcttaccgatgcttttgaaagttttgtgcttcttggtttagtggaaaacaaatatgtcacactattgagccagttcatcaattcaattaaaaggggatctgtaaaagaggtgtgtctggcttgtcgctgcattggcttactggcaattacactaggtgctggaagtagttcgcacgaaataatggatgagtcacatccacatcttttgagagttctccaaacttggcctgacgcacaaaagatgatctctgtatgttgcaattttcacttttttttgtggttctggttctaagcttctagcaaatttatcatctagttaagttaaaccgaatgattgtaggcacttgattgcttagcagttgtcacatttgttggtgcaactgatcttgctgaaactcagctgtctctgaaagccatctgggatgtgatccatccaaaatcaggatcaaatgtcggcgtagtcagaaaaccgaagcctcctttgttagcagctgccgtatctgcatgggcatttcttttaacaactattggttcatctagaagaaatactgattcttggaaagagccaattacatttctctgtagccttctagaagcagaggaccgtgctgtgcggattgctgctggtgaagcattagctctgtgttttgagctaagaatgtttgatgtttcctctagtgacgaagctgatgttgacagttacactggagaggctggtggttctaagcatcaacttttcttgaatatgcaagcattgaaggccaaactatctggtctagtctatagtctatctatggaggcggggggcaggggtgctgacaagaaaaatcttaatgatcagagagacctgttccaacgaatctcagattttattaagagtggtgagtgccctgaagaatcacttaggatttcaggcaagaatggcattttaagagttacatcatggcgtgaatcaatacagttgaactatatgaggcggtttcttgggcggggattcctgaagcattcacaggacaacgatttgctgcatgaggtctttgacatcaaaattgatcgtactgaaaacatgtcagccaccgaaaagtcaccagtaagataggcatcaagacatgggcatagcgacagttctctaaagaatctgtttgcatgcgttcagaaaatgttcagatctggagaagagaaaggaagagctctgaagttgaataaagagcgtcgtctagctcaggagaggaagcagcagaatatcttgaacgagcaatatggatagaacctacccggaagactggagttttgtacagtggaactgttaccagatggtgagtgctgtgtgtgtatgtgacggtattgatgcatttgaggtgtattgctccggtggcggtactacagcgacatgtttgaaattgctccgaaatactattgagttttgtagaaagtgccatgttccctgcactccctagtgtttcctctgcatgcgcaaaggagatcttgagttcagttaatcacaattgtacagttccatagggtagagatatgaggtgattgtgaataacacagaggtcgtctagcctaagggcaataattggcgaactcttcctctagccgcaataattggtctgcaagagatttcgaaatgcgttcgctctctttcgtcctgaactttttatcttgtccattctccctccgtttctttggaaacaac

SEQ ID NO: 7924 - DNA, 2062 bp, Zea Mays
caggtctctgttcctgtggcgggacggacgactctgctgcttctcgttgacaaatcacaaggaaaacaaggggggaagaaaaacaagccagaaaagtctcctcttccttgctccgttcatccgcccctcaccgtcgcccaatctcacatggctcggcgtctccacggccaatccgacctcaacgacggcgcgcgcctccgtttctccacctccaactccagctccagctcttcctcccggttcctcctcgccgccccctccgacgacgcctccctctgtcggatccaccgctgaccgcgcgccgctacgcctgcgcctgatcaccggctggttcttggcctcttcgcttcctggaccgcccagacgtctccatgggcaagagtaagaggaacaagggcggtcgaggtggtggtggtgccgatgacaagcttgacggtggtggcgatgccgatagcgtgacctccatgtccagtgggctgtctgaccttcagttcgcgcaggccacagagcatattagctcgcaggaattcgttcttgacaagtacgtcgacgctctctatgagaagaggggatccacaagagaggaagcattgggctctcttaccgatgcttttgaaagttttgtgcttcttggtttagtggaaaacaaatatgtcacactattgagccagttcatcaattcaattaaaaggggatctgtaaaagaggtgtgtctggcttgtcgctgcattggcttactggcaattacactaggtgctggaagtagttcgcacgaaataatggatgagtcacatccacatcttttgagagttctccaaacttggcctgacgcacaaaagatgatctctgcacttgattgcttagcagttgtcacatttgttggtgcaactgatcttgctgaaactcagctgtctctgaaagccatctgggatgtgatccatccaaaatcaggatcaaatgtcggcgtagtcagaaaaccgaagcctcctttgttagcagctgccgtatctgcatgggcatttcttttaacaactattggttcatctagaagaaatactgattcttggaaagagccaattacatttctctgtagccttctagaagcagaggaccgtgctgtgcggattgctgctgttacactggagaggctggtggttctaagcatcaacttttcttgaatatgcaagcattgaaggccaaactatctggtctagtctatagtctatctatggaggcggggggcaggggtgctgacaagaaaaatcttaatgatcagagagacctgttccaacgaatctcagattttattaagagtggtgagtgccctgaagaatcacttaggatttcaggcaagaatggcattttaagagttacatcatggcgtgaatcaatacagttgaactatatgaggcggtttcttgggcggggattcctgaagcattcacaggacaacgatttgctgcatgaggtctttgacatcaaaattgatcgtactgaaaacatgtcagccaccgaaaagaaaatgttcagatctggagaagagaaaggaagagctctgaagttgaataaagagcgtcgtctagctcaggagaggaagcagcagaatatcttgaacgagcaatatggatagaacctacccggaagactggagttttgtacagtggaactgttaccagatggtgagtgctgtgtgtgtatgtgacggtattgatgcatttgaggtgtattgctccggtggcggtactacagcgacatgtttgaaattgctccgaaatactattgagttttgtagaaagtgccatgttccctgcactccctagtgtttcctctgcatgcgcaaaggagatcttgagttcagttaatcacaattgtacagttccatagggtagagatatgaggtgattgtgaataacacagaggtcgtctagcctaagggcaataattggcgaactcttcctctagccgcaataattggtctgcaagagatttcgaaatgcgttcgctctctttcgtcctgaactttttatcttgtccattctccctccgtttctttggaaacaac

SEQ ID NO: 7925 - DNA, 1291 bp, Zea Mays
aaaacacagggactggagatgagctcctcatctgaagattttcatatcctgctttgtaaagacatcacattttgaggagtatctcaatgtccaggaagctgttatgttggaccttcttagaatagttgggcatcacaaagcaaggcttgctacccaaattcgaacagttcagaaatcatatggcaatgcagacttcgataacattccttttggagaggacatgtatagtcgagtccgtggccggccacttctgattgatacatctgcaaggatcagtgatgacaaacccaggcctcgacctgtatcatcacgtgaggagcagaaagtcaagacaaatggctcggtagatattaagtccagttcccctgaaaatgctagttcaagcaactctgaaaagcaggaaccgaaaaaaatggtgcctgaagatactcgggtgaagaacattaagggtgataatgtgatgccagtaacaccatctttagatcctgctacgtcaacttccaaggctggtaaagggaagacacgggaaccagagcccactgagcggcaaggagatgggtcagtctcggtggctaatccaaagaaagaatctagaccagtttttgaagataacattgttctgggcgtagcccttgagggttccaggaggacactgcctattgaagaaggaaatcctcatctatcactatctgagactgaggtggacaccgaagaggcggcttcatcaccgaaggataagataggccaaagcccaaaactttgaggtccagaaaaaaagccgttcagaggaatctcgataggtcatccgagttcaaactgtatccttgtgaagatttgtcaccaagcctaccttttttgtgcgcttgtgcaaatacaatgccaccacacatcagtgttgtatgcttaaggggtaaattcacactgacgattattcagggaacattacctgtcagtcgtattgctacaggcttgtaaagaagcaagtgcttcaataggcattttgtaaagattatattattgctcatttaagtggcttcttgcatatgcatcggcaattcagcatgcgccgttgcaactgtcatctcggtttccaggtttggcttacgttagttttgtttccaatgccatctgctgcgagctgaaatatcatcgtctcttttcctttttttttttttacaaaagacacgctaagtcgtggagacggtgaattcttccggatggcgtctcatcttgcagacgactaaaacggaataccgcgattatcgaaaaggaaacggaataccgcgcggcg

SEQ ID NO: 7926 - DNA, 2214 bp, Zea Mays
atggaaacagtaccattgttcgtgtggtcatgtgatgctttacttgcaaatcctgctacctcacttgtggtccctgcaatcgggattattgtgtttgctctgtggggttttttgcctctaatgcgggatattagaaaccgttttgatcatggaggcaactggaagaagagtcctacatatttgatttcttcgtcgtaccttcaacctctacttctctggacaggagcaacactaatctgcaggggtttggatccagttgtcttgccttcagcagcaagtcaagctgtgaaaacacgtctgataacttttgtgagatcattatcaactgtcctggctgttgcatatattctcacaagcttgattcagcaggtacaaaagtttcttatggacatgcgcaatcccaatgatacaagaaatatggggtttgattttaccatgaaagctctttatactggtgtttggattgcttctgtttctctctttatggagttgctgggtttcaatacccagaagtggataactgctggagggtttgggacagtgttgcttacacttgctggtcgagagatttttactaacttcctctcaagtgtcatgatcaatgcaacacgcccatttgtagtcaatgaatggatcgatgcaaagatagatggtgttgatgtctctggcattgttgagcatgttggtttgtggtctccaacactcattagaggtgttgatcgagaagcgatatacattcctaaccataagtttacagtttctatattaaggaataacactcagaggacccattggcgtattaagacctatcttgctattagccacatggatgctggaaaaattgggactatagttgctgacatgaggaaagttttggcaaaaaatccgcatatagaacaacaaaagctgcacaggagagtattctttgagaaaattgatccaaaaaatcaagcacttatgattttcatatcctgctttgtaaagacatcacattttgaggagtatctcaatgtccaggaagctgttatgttggaccttcttagaatagttgggcatcacaaagcaaggcttgctacccaaattcgaacagttcagaaatcatatggcaatgcagacttcgataacattccttttggagaggacatgtatagtcgagtccgtggccggccacttctgattgatacatctgcaaggatcagtgatgacaaacccaggcctcgacctgtatcatcacgtgaggagcagaaagtcaagacaaatggctcggtagatattaagtccagttcccctgaaaatgctagttcaagcaactctgaaaagcaggaaccgaaaaaaatggtgcctgaagatactcgggtgaagaacattaagggtgataatgtgatgccagtaacaccatctttagatcctgctacgtcaacttccaaggctggtaaagggaagacacgggaaccagagcccactgagcggcaaggagatgggtcagtctcggtggctaatccaaagaaagaatctagaccagtttttgaagataacattgttctgggcgtagcccttgagggttccaggaggacactgcctattgaagaaggaaatcctcatctatcactatctgagactgaggtggacaccgaagaggcggcttcatcaccgaaggataagataggccaaagcccaaaactttgaggtccagaaaaaaagccgttcagaggaatctcgataggtcatccgagttcaaactgtatccttgtgaagatttgtcaccaagcctaccttttttgtgcgcttgtgcaaatacaatgccaccacacatcagtgttgtatgcttaaggggtaaattcacactgacgattattcagggaacattacctgtcagtcgtattgctacaggcttgtaaagaagcaagtgcttcaataggcattttgtaaagattatattattgctcatttaagtggcttcttgcatatgcatcggcaattcagcatgcgccgttgcaactgtcatctcggtttccaggtttggcttacgttagttttgtttccaatgccatctgctgcgagctgaaatatcatcgtctcttttcctttttttttttttacaaaagacacgctaagtcgtggagacggtgaattcttccggatggcgtctcatcttgcagacgactaaaacggaataccgcgattatcgaaaaggaaacggaataccgcgcggcg

SEQ ID NO: 7927 - DNA, 3008 bp, Zea Mays
cgtcctctcccctcttgctgtgtcgccgcgcgtggaagacgttatcgccttcgccttcctcttcctttccctctccctgaatcctgatttctattcaccttcttcccctcctccgggcggaaggcaaagacctacacgcctatccctctccctcccgggtcccggcttccccttccctgctccccagatcgattcacccagcgggaaaagcggcgcgcagtggggtgcagcaggcgcagcgggctcggcgggcggcgagcggctagcggctagccgcgacgggcggccaatctacagcggaaggcggtgggcggctaccggtggcacatcgacctacggaaagtagaaaggtggggaggactgccctgttcgcatttggagcatcaaaacagggttgcaatctagcacatattacacatcagtggctgataagaaactgcatccagtggatgtaaatttcattggatttgagttttggttgagatggcagttggattgacatctcagctgttccaaagagtaactgctactgacatcttttgccaaaggaacaaatttaggagttctgagatgaggagttctcttcccttgccatccacctcgtttccttcagttgctgataggcgagactgttggggtcgcaatgtgttagagagtagctgcatgcccatgctttatacacctcgcagatatagatctttgggctttagatcttttgccttgccaattcctttgaaggaaattcctcttgtcaagaacacatcattagcactaactaggtcatgtgatgctttacttgcaaatcctgctacctcacttgtggtccctgcaatcgggattattgtgtttgctctgtggggttttttgcctctaatgcgggatattagaaaccgttttgatcatggaggcaactggaagaagagtcctacatatttgatttcttcgtcgtaccttcaacctctacttctctggacaggagcaacactaatctgcaggggtttggatccagttgtcttgccttcagcagcaagtcaagctgtgaaaacacgtctgataacttttgtgagatcattatcaactgtcctggctgttgcatatattctcacaaggtgcacatgctacatcctcagaaaaactgcagttgttttttcttgattcagcaggtacaaaagtttcttatggacatgcgcaatcccaatgatacaagaaatatggggtttgattttaccatgaaagctctttatactggtgtttggattgcttctgtttctctctttatggagttgctgggtttcaatacccagaagtggataactgctggagggtttgggacagtgttgcttacacttgctggtcgagagatttttactaacttcctctcaagtgtcatgatcaatgcaacacgcccatttgtagtcaatgaatggatcgatgcaaagatagatggtgttgatgtctctggcattgttgagcatgttggtttgtggtctccaacactcattagaggtgttgatcgagaagcgatatacattcctaaccataagtttacagtttctatattaaggaataacactcagaggacccattggcgtattaagacctatcttgctattagccacatggatgctggaaaaattgggactatagttgctgacatgaggaaagttttggcaaaaaatccgcatatagaacaacaaaagctgcacaggagagtattctttgagaaaattgatccaaaaaatcaagcacttatgattttcatatcctgctttgtaaagacatcacattttgaggagtatctcaatgtccaggaagctgttatgttggaccttcttagaatagttgggcatcacaaagcaaggcttgctacccaaattcgaacagttcagaaatcatatggcaatgcagacttcgataacattccttttggagaggacatgtatagtcgagtccgtggccggccacttctgattgatacatctgcaaggatcagtgatgacaaacccaggcctcgacctgtatcatcacgtgaggagcagaaagtcaagacaaatggctcggtagatattaagtccagttcccctgaaaatgctagttcaagcaactctgaaaagcaggaaccgaaaaaaatggtgcctgaagatactcgggtgaagaacattaagggtgataatgtgatgccagtaacaccatctttagatcctgctacgtcaacttccaaggctggtaaagggaagacacgggaaccagagcccactgagcggcaaggagatgggtcagtctcggtggctaatccaaagaaagaatctagaccagtttttgaagataacattgttctgggcgtagcccttgagggttccaggaggacactgcctattgaagaaggaaatcctcatctatcactatctgagactgaggtggacaccgaagaggcggcttcatcaccgaaggataagataggccaaagcccaaaactttgaggtccagaaaaaaagccgttcagaggaatctcgataggtcatccgagttcaaactgtatccttgtgaagatttgtcaccaagcctaccttttttgtgcgcttgtgcaaatacaatgccaccacacatcagtgttgtatgcttaaggggtaaattcacactgacgattattcagggaacattacctgtcagtcgtattgctacaggcttgtaaagaagcaagtgcttcaataggcattttgtaaagattatattattgctcatttaagtggcttcttgcatatgcatcggcaattcagcatgcgccgttgcaactgtcatctcggtttccaggtttggcttacgttagttttgtttccaatgccatctgctgcgagctgaaatatcatcgtctcttttcctttttttttttttacaaaagacacgctaagtcgtggagacggtgaattcttccggatggcgtctcatcttgcagacgactaaaacggaataccgcgattatcgaaaaggaaacggaataccgcgcggcg

SEQ ID NO: 7928 - DNA, 2890 bp, Zea Mays
cgtcactctcgtcctctcccctcttgctgtgtcgccgcgcgtggaagacgttatcgccttcgccttcctcttcctttccctctccctgaatcctgatttctattcaccttcttcccctcctccgggcggaaggcaaagacctacacgcctatccctctccctcccgggtcccggcttccccttccctgctccccagatcgattcacccagcgggaaaagcggcgcgcagtggggtgcagcaggcgcagcgggctcggcgggcggcgagcggctagcggctagccgcgacgggcggccaatctacagcggaaggcggtgggcggctaccggtggcacatcgacctacggaaagtagaaaggtggggaggactgccctgttcgcatttggagcatcaaaacagggttgcaatctagcacatattacacatcagtggctgataagaaactgcatccagtggatgtaaatttcattggatttgagttttggttgagatggcagttggattgacatctcagctgttccaaagagtaactgctactgacatcttttgccaaaggaacaaatttaggagttctgagatgaggagttctcttcccttgccatccacctcgtttccttcagttgctgataggcgagactgttggggtcgcaatgtgttagagagtagctgcatgcccatgctttatacacctcgcagatatagatctttgggctttagatcttttgccttgccaattcctttgaaggaaattcctcttgtcaagaacacatcattagcactaactaggtcatgtgatgctttacttgcaaatcctgctacctcacttgtggtccctgcaatcgggattattgtgtttgctctgtggggttttttgcctctaatgcgggatattagaaaccgttttgatcatggaggcaactggaagaagagtcctacatatttgatttcttcgtcgtaccttcaacctctacttctctggacaggagcaacactaatctgcaggggtttggatccagttgtcttgccttcagcagcaagtcaagctgtgaaaacacgtctgataacttttgtgagatcattatcaactgtcctggctgttgcatatattctcacaagcttgattcagcaggtacaaaagtttcttatggacatgcgcaatcccaatgatacaagaaatatggggtttgattttaccatgaaagctctttatactggtgtttggattgcttctgtttctctctttatggagttgctgggtttcaatacccagaagtggataactgctggagggtttgggacagtgttgcttacacttgctggtcgagagatttttactaacttcctctcaagtgtcatgatcaatgcaacacgcccatttgtagtcaatgaatggatcgatgcaaagatagatggtgttgatgtctctggcattgttgagtttctatattaaggaataacactcagaggacccattggcgtattaagacctatcttgctattagccacatggatgctggaaaaattgggttgctgacatgaggaaagttttggcaaaaaatccgcatatagaacaacaaaagctgcacaggagagtattctttgagaaaattgatccaaaaaatcaagcacttatgattttcatatcctgctttgtaaagacatcacattttgaggagtatctcaatgtccaggaagctgttatgttggaccttcttagaatagttgggcatcacaaagcaaggcttgctacccaaattcgaacagttcagaaatcatatggcaatgcagacttcgataacattccttttggagaggacatgtatagtcgagtccgtggccggccacttctgattgatacatctgcaaggatcagtgatgacaaacccaggcctcgacctgtatcatcacgtgaggagcagaaagtcaagacaaatggctcggtagatattaagtccagttcccctgaaaatgctagttcaagcaactctgaaaagcaggaaccgaaaaaaatggtgcctgaagatactcgggtgaagaacattaagggtgataatgtgatgccagtaacaccatctttagatcctgctacgtcaacttccaaggctggtaaagggaagacacgggaaccagagcccactgagcggcaaggagatgggtcagtctcggtggctaatccaaagaaagaatctagaccagtttttgaagataacattgttctgggcgtagcccttgagggttccaggaggacactgcctattgaagaaggaaatcctcatctatcactatctgagactgaggtggacaccgaagaggcggcttcatcaccgaaggataagataggccaaagcccaaaactttgaggtccagaaaaaaagccgttcagaggaatctcgataggtcatccgagttcaaactgtatccttgtgaagatttgtcaccaagcctaccttttttgtgcgcttgtgcaaatacaatgccaccacacatcagtgttgtatgcttaaggggtaaattcacactgacgattattcagggaacattacctgtcagtcgtattgctacaggcttgtaaagaagcaagtgcttcaataggcattttgtaaagattatattattgctcatttaagtggcttcttgcatatgcatcggcaattcagcatgcgccgttgcaactgtcatctcggtttccaggtttggcttacgttagttttgtttccaatgccatctgctgcgagctgaaatatcatcgtctcttttcctttttttttttttacaaaagacacgctaagtcgtggagacggtgaattcttccggatggcgtctcatcttgcagacgactaaaacggaataccgcgattatcgaaaaggaaacggaataccgcgcggcg

SEQ ID NO: 7929 - DNA, 2855 bp, Zea Mays
cgtcactctcgtcctctcccctcttgctgtgtcgccgcgcgtggaagacgttatcgccttcgccttcctcttcctttccctctccctgaatcctgatttctattcaccttcttcccctcctccgggcggaaggcaaagacctacacgcctatccctctccctcccgggtcccggcttccccttccctgctccccagatcgattcacccagcgggaaaagcggcgcgcagtggggtgcagcaggcgcagcgggctcggcgggcggcgagcggctagcggctagccgcgacgggcggccaatctacagcggaaggcggtgggcggctaccggtggcacatcgacctacggaaagtagaaaggtggggaggactgccctgttcgcatttggagcatcaaaacagggttgcaatctagcacatattacacatcagtggctgataagaaactgcatccagtggatgtaaatttcattggatttgagttttggttgagatggcagttggattgacatctcagctgttccaaagagtaactgctactgacatcttttgccaaaggaacaaatttaggagttctgagatgaggagttctcttcccttgccatccacctcgtttccttcagttgctgataggcgagactgttggggtcgcaatgtgttagagagtagctgcatgcccatgctttatacacctcgcagatatagatctttgggctttagatcttttgccttgccaattcctttgaaggaaattcctcttgtcaagaacacatcattagcactaactagcatggaggcaactggaagaagagtcctacatatttgatttcttcgtcgtaccttcaacctctacttctctggacaggagcaacactaatctgcaggggtttggatccagttgtcttgccttcagcagcaagtcaagctgtgaaaacacgtctgataacttttgtgagatcattatcaactgtcctggctgttgcatatattctcacaagcttgattcagcaggtacaaaagtttcttatggacatgcgcaatcccaatgatacaagaaatatggggtttgattttaccatgaaagctctttatactggtgtttggattgcttctgtttctctctttatggagttgctgggtttcaatacccagaagtggataactgctggagggtttgggacagtgttgcttacacttgctggtcgagagatttttactaacttcctctcaagtgtcatgatcaatgcaacacgcccatttgtagtcaatgaatggatcgatgcaaagatagatggtgttgatgtctctggcattgttgagcatgttggtttgtggtctccaacactcattagaggtgttgatcgagaagcgatatacattcctaaccataagtttacagtttctatattaaggaataacactcagaggacccattggcgtattaagacctatcttgctattagccacatggatgctggaaaaattgggactatagttgctgacatgaggaaagttttggcaaaaaatccgcatatagaacaacaaaagctgcacaggagagtattctttgagaaaattgatccaaaaaatcaagcacttatgattttcatatcctgctttgtaaagacatcacattttgaggagtatctcaatgtccaggaagctgttatgttggaccttcttagaatagttgggcatcacaaagcaaggcttgctacccaaattcgaacagttcagaaatcatatggcaatgcagacttcgataacattccttttggagaggacatgtatagtcgagtccgtggccggccacttctgattgatacatctgcaaggatcagtgatgacaaacccaggcctcgacctgtatcatcacgtgaggagcagaaagtcaagacaaatggctcggtagatattaagtccagttcccctgaaaatgctagttcaagcaactctgaaaagcaggaaccgaaaaaaatggtgcctgaagatactcgggtgaagaacattaagggtgataatgtgatgccagtaacaccatctttagatcctgctacgtcaacttccaaggctggtaaagggaagacacgggaaccagagcccactgagcggcaaggagatgggtcagtctcggtggctaatccaaagaaagaatctagaccagtttttgaagataacattgttctgggcgtagcccttgagggttccaggaggacactgcctattgaagaaggaaatcctcatctatcactatctgagactgaggtggacaccgaagaggcggcttcatcaccgaaggataagataggccaaagcccaaaactttgaggtccagaaaaaaagccgttcagaggaatctcgataggtcatccgagttcaaactgtatccttgtgaagatttgtcaccaagcctaccttttttgtgcgcttgtgcaaatacaatgccaccacacatcagtgttgtatgcttaaggggtaaattcacactgacgattattcagggaacattacctgtcagtcgtattgctacaggcttgtaaagaagcaagtgcttcaataggcattttgtaaagattatattattgctcatttaagtggcttcttgcatatgcatcggcaattcagcatgcgccgttgcaactgtcatctcggtttccaggtttggcttacgttagttttgtttccaatgccatctgctgcgagctgaaatatcatcgtctcttttcctttttttttttttacaaaagacacgctaagtcgtggagacggtgaattcttccggatggcgtctcatcttgcagacgactaaaacggaataccgcgattatcgaaaaggaaacggaataccgcgcggcg

SEQ ID NO: 7930 - DNA, 2898 bp, Zea Mays
cgataaggcaccacgtccacgtgcgtggcctggcccttccgcccgtcactctcgtcctctcccctcttgctgtgtcgccgcgcgtggaagacgttatcgccttcgccttcctcttcctttccctctccctgaatcctgatttctattcaccttcttcccctcctccgggcggaaggcaaagacctacacgcctatccctctccctcccgggtcccggcttccccttccctgctccccagatcgattcacccagcgggaaaagcggcgcgcagtggggtgcagcaggcgcagcgggctcggcgggcggcgagcggctagcggctagccgcgacgggcggccaatctacagcggaaggcggtgggcggctaccggtggcacatcgacctacggaaagtagaaagggttgcaatctagcacatattacacatcagtggctgataagaaactgcatccagtggatgtaaatttcattggatttgagttttggttgagatggcagttggattgacatctcagctgttccaaagagtaactgctactgacatcttttgccaaaggaacaaatttaggagttctgagatgaggagttctcttcccttgccatccacctcgtttccttcagttgctgataggcgagactgttggggtcgcaatgtgttagagagtagctgcatgcccatgctttatacacctcgcagatatagatctttgggctttagatcttttgccttgccaattcctttgaaggaaattcctcttgtcaagaacacatcattagcactaactaggtcatgtgatgctttacttgcaaatcctgctacctcacttgtggtccctgcaatcgggattattgtgtttgctctgtggggttttttgcctctaatgcgggatattagaaaccgttttgatcatggaggcaactggaagaagagtcctacatatttgatttcttcgtcgtaccttcaacctctacttctctggacaggagcaacactaatctgcaggggtttggatccagttgtcttgccttcagcagcaagtcaagctgtgaaaacacgtctgataacttttgtgagatcattatcaactgtcctggctgttgcatatattctcacaagcttgattcagcaggtacaaaagtttcttatggacatgcgcaatcccaatgatacaagaaatatggggtttgattttaccatgaaagctctttatactggtgtttggattgcttctgtttctctctttatggagttgctgggtttcaatacccagaagtggataactgctggagggtttgggacagtgttgcttacacttgctggtcgagagatttttactaacttcctctcaagtgtcatgatcaatgcaacacgcccatttgtagtcaatgaatggatcgatgcaaagatagatggtgttgatgtctctggcattgttgagtttctatattaaggaataacactcagaggacccattggcgtattaagacctatcttgctattagccacatggatgctggaaaaattgggactatagttgctgacatgaggaaagttttggcaaaaaatccgcatatagaacaacaaaagctgcacaggagagtattctttgagaaaattgatccaaaaaatcaagcacttatgattttcatatcctgctttgtaaagacatcacattttgaggagtatctcaatgtccaggaagctgttatgttggaccttcttagaatagttgggcatcacaaagcaaggcttgctacccaaattcgaacagttcagaaatcatatggcaatgcagacttcgataacattccttttggagaggacatgtatagtcgagtccgtggccggccacttctgattgatacatctgcaaggatcagtgatgacaaacccaggcctcgacctgtatcatcacgtgaggagcagaaagtcaagacaaatggctcggtagatattaagtccagttcccctgaaaatgctagttcaagcaactctgaaaagcaggaaccgaaaaaaatggtgcctgaagatactcgggtgaagaacattaagggtgataatgtgatgccagtaacaccatctttagatcctgctacgtcaacttccaaggctggtaaagggaagacacgggaaccagagcccactgagcggcaaggagatgggtcagtctcggtggctaatccaaagaaagaatctagaccagtttttgaagataacattgttctgggcgtagcccttgagggttccaggaggacactgcctattgaagaaggaaatcctcatctatcactatctgagactgaggtggacaccgaagaggcggcttcatcaccgaaggataagataggccaaagcccaaaactttgaggtccagaaaaaaagccgttcagaggaatctcgataggtcatccgagttcaaactgtatccttgtgaagatttgtcaccaagcctaccttttttgtgcgcttgtgcaaatacaatgccaccacacatcagtgttgtatgcttaaggggtaaattcacactgacgattattcagggaacattacctgtcagtcgtattgctacaggcttgtaaagaagcaagtgcttcaataggcattttgtaaagattatattattgctcatttaagtggcttcttgcatatgcatcggcaattcagcatgcgccgttgcaactgtcatctcggtttccaggtttggcttacgttagttttgtttccaatgccatctgctgcgagctgaaatatcatcgtctcttttcctttttttttttttacaaaagacacgctaagtcgtggagacggtgaattcttccggatggcgtctcatcttgcagacgactaaaacggaataccgcgattatcgaaaaggaaacggaataccgcgcggcg

SEQ ID NO: 7931 - DNA, 3019 bp, Zea Mays
cgataaggcaccacgtccacgtgcgtggcctggcccttccgcccgtcactctcgtcctctcccctcttgctgtgtcgccgcgcgtggaagacgttatcgccttcgccttcctcttcctttccctctccctgaatcctgatttctattcaccttcttcccctcctccgggcggaaggcaaagacctacacgcctatccctctccctcccgggtcccggcttccccttccctgctccccagatcgattcacccagcgggaaaagcggcgcgcagtggggtgcagcaggcgcagcgggctcggcgggcggcgagcggctagcggctagccgcgacgggcggccaatctacagcggaaggcggtgggcggctaccggtggcacatcgacctacggaaagtagaaaggtggggaggactgccctgttcgcatttggagcatcaaaacagggttgcaatctagcacatattacacatcagtggctgataagaaactgcatccagtggatgtaaatttcattggatttgagttttggttgagatggcagttggattgacatctcagctgttccaaagagtaactgctactgacatcttttgccaaaggaacaaatttaggagttctgagatgaggagttctcttcccttgccatccacctcgtttccttcagttgctgataggcgagactgttggggtcgcaatgtgttagagagtagctgcatgcccatgctttatacacctcgcagatatagatctttgggctttagatcttttgccttgccaattcctttgaaggaaattcctcttgtcaagaacacatcattagcactaactaggtcatgtgatgctttacttgcaaatcctgctacctcacttgtggtccctgcaatcgggattattgtgtttgctctgtggggttttttgcctctaatgcgggatattagaaaccgttttgatcatggaggcaactggaagaagagtcctacatatttgatttcttcgtcgtaccttcaacctctacttctctggacaggagcaacactaatctgcaggggtttggatccagttgtcttgccttcagcagcaagtcaagctgtgaaaacacgtctgataacttttgtgagatcattatcaactgtcctggctgttgcatatattctcacaagcttgattcagcaggtacaaaagtttcttatggacatgcgcaatcccaatgatacaagaaatatggggtttgattttaccatgaaagctctttatactggtgtttggattgcttctgtttctctctttatggagttgctgggtttcaatacccagaagtggataactgctggagggtttgggacagtgttgcttacacttgctggtcgagagatttttactaacttcctctcaagtgtcatgatcaatgcaacacgcccatttgtagtcaatgaatggatcgatgcaaagatagatggtgttgatgtctctggcattgttgagcatgttggtttgtggtctccaacactcattagaggtgttgatcgagaagcgatatacattcctaaccataagtttacagtttctatattaaggaataacactcagaggacccattggcgtattaagacctatcttgctattagccacatggatgctggaaaaattgggactatagttgctgacatgaggaaagttttggcaaaaaatccgcatatagaacaacaaaagctgcacaggagagtattctttgagaaaattgatccaaaaaatcaagcacttatgattttcatatcctgctttgtaaagacatcacattttgaggagtatctcaatgtccaggaagctgttatgttggaccttcttagaatagttgggcatcacaaagcaaggcttgctacccaaattcgaacagttcagaaatcatatggcaatgcagacttcgataacattccttttggagaggacatgtatagtcgagtccgtggccggccacttctgattgatacatctgcaaggatcagtgatgacaaacccaggcctcgacctgtatcatcacgtgaggagcagaaagtcaagacaaatggctcggtagatattaagtccagttcccctgaaaatgctagttcaagcaactctgaaaagcaggaaccgaaaaaaatggtgcctgaagatactcgggtgaagaacattaagggtgataatgtgatgccagtaacaccatctttagatcctgctacgtcaacttccaaggctggtaaagggaagacacgggaaccagagcccactgagcggcaaggagatgggtcagtctcggtggctaatccaaagaaagaatctagaccagtttttgaagataacattgttctgggcgtagcccttgagggttccaggaggacactgcctattgaagaaggaaatcctcatctatcactatctgagactgaggtggacaccgaagaggcggcttcatcaccgaaggataagataggccaaagcccaaaactttgaggtccagaaaaaaagccgttcagaggaatctcgataggtcatccgagttcaaactgtatccttgtgaagatttgtcaccaagcctaccttttttgtgcgcttgtgcaaatacaatgccaccacacatcagtgttgtatgcttaaggggtaaattcacactgacgattattcagggaacattacctgtcagtcgtattgctacaggcttgtaaagaagcaagtgcttcaataggcattttgtaaagattatattattgctcatttaagtggcttcttgcatatgcatcggcaattcagcatgcgccgttgcaactgtcatctcggtttccaggtttggcttacgttagttttgtttccaatgccatctgctgcgagctgaaatatcatcgtctcttttcctttttttttttttacaaaagacacgctaagtcgtggagacggtgaattcttccggatggcgtctcatcttgcagacgactaaaacggaataccgcgattatcgaaaaggaaacggaataccgcgcggcg

SEQ ID NO: 7932 - DNA, 1418 bp, Zea Mays
cgataaggcaccacgtccacgtgcgtggcctggcccttccgcccgtcactctcgtcctctcccctcttgctgtgtcgccgcgcgtggaagacgttatcgccttcgccttcctcttcctttccctctccctgaatcctgatttctattcaccttcttcccctcctccgggcggaaggcaaagacctacacgcctatccctctccctcccgggtcccggcttccccttccctgctccccagatcgattcacccagcgggaaaagcggcgcgcagtggggtgcagcaggcgcagcgggctcggcgggcggcgagcggctagcggctagccgcgacgggcggccaatctacagcggaaggcggtgggcggctaccggtggcacatcgacctacggaaagtagaaaggtggggaggactgccctgttcgcatttggagcatcaaaacagggttgcaatctagcacatattacacatcagtggctgataagaaactgcatccagtggatgtaaatttcattggatttgagttttggttgagatggcagttggattgacatctcagctgttccaaagagtaactgctactgacatcttttgccaaaggaacaaatttaggagttctgagatgaggagttctcttcccttgccatccacctcgtttccttcagttgctgataggcgagactgttggggtcgcaatgtgttagagagtagctgcatgcccatgctttatacacctcgcagatatagatctttgggctttagatcttttgccttgccaattcctttgaaggaaattcctcttgtcaagaacacatcattagcactaactaggtcatgtgatgctttacttgcaaatcctgctacctcacttgtggtccctgcaatcgggattattgtgtttgctctgtggggttttttgcctctaatgcgggatattagaaaccgttttgatcatggaggcaactggaagaagagtcctacatatttgatttcttcgtcgtaccttcaacctctacttctctggacaggagcaacactaatctgcaggggtttggatccagttgtcttgccttcagcagcaagtcaagctgtgaaaacacgtctgataacttttgtgagatcattatcaactgtcctggctgttgcatatattctcacaaggtaatgacaacatttatgcagtcaagtagtactcaagataactgtaactgcaaaagcacatgttggagattacaaattacaattttggccatggacggttcttttctccccaactttagttttgtctatcatcttgaaatacaaatggttggtttgctggctacgtagcttgaatgacaatgcatagttctggcacaactagataaactaattacatattggtgattgaaatattagtgatagtatgtaaaaaataa

SEQ ID NO: 7933 - DNA, 1443 bp, Zea Mays
aaagctatcaatttccgttgcggcttgtgtttttaccttggatgaggaatagtactgcatgaaggttgattcaactgcttgcgaatcatcaagacgagttaccaaccttaagtcccaggtgtcatcattggagagagagaatgttgaacttaggaggcagattaatgaattatccatgaagcttcaaatcgctggacaagggaaaaatgagactttgtacaagcctggtccttttggagctgtcaaggctttgagaacaaatccaactgtaatccctgataactctgttaaccccaggttggccaagatattggaagaggttgctgtgaaaaaggaactcattgttgcgttggcaaacaccaatgtgagggagatgcttgaagtttggtttagcaatatcaaacgagttggtattccaaactacctggttgtggcattggatgataatatagaaagcttatgcaaatctaaaggggtgccagtctaccggcgtgatcctgatgaaggcatcgacaacattgcaaaaactggtggaaaccatgccgtttctggactcaagtttcgtgttttaagggagttcttgcaacttgggtatagtattctcctatctgacattgatattattttcttgaggaatccatttgatcatcttcatagagattctgatgtggagtccatgagtgatggccacaacaacatgacagcgtatggtttcaacgacgtgttcgacgaaccttctatgggttgggccagatatgctcacacgatgcggatttgggtgtacaactctggatttttctatataagaccaacggttccttctattgaacttcttgatcgtgtggctggccgtctttctcgtgagccaaagtcatgggaccaggcagttttcaacgaggagctgttcttcccgtcccatcctggttatgaaggcctccatgcatccaggagaaccatggatttttatcttttcatgaacagcaaagtcctcttcaagacagtgaggaaagacgccgggctcaagaagctaaagccagtgattgtgcatttgaactaccaccctaacaaactagagcgaatgaaagcggttatcgagttctatgtcaacggcaaacaagatgcactggatcatttccctgacgggtcagaatgaggaaattacagatagttgcgggtaaagaaacctataccctctgtatcctactcattttggggtgttctggcgtttggatctacatgtctcagatgtgggatctccacacgtgcgagaatgtttggcgagtgcaacatggatggatgcattggctttgaggtaaccacgatgtatcctttttcttgcagtttcagttggtaagttctaggtgttaagggcagtcgctctgtctgtttcttttattttcttgctcgttagtactattttagatcgcttgccactagtttggt

SEQ ID NO: 7934 - DNA, 1711 bp, Zea Mays
ctgaacatgaggcgtagatccaccacccatccccttgtcgcatcaccttttctactgcagaggggcacaaaaggtcctctaaaccccaccagcagcttcccctccgatctcaccccacagccgccggcgagatctccaggatgccgttggccgggcggcgggacggccccctaatgctgcgaggcggcggaggtgggaaacccctgtcacgcgggtcccgcatcgcggtggccgtcgctgtcggcgtcgcactcggctgcgtctgcgccttcctctaccccaacggcctcttcttccgcccgtctgcctctgccctccaatggacgcaccaggttgattcaactgcttgcgaatcatcaagacgagttaccaaccttaagtcccaggtgtcatcattggagagagagaatgttgaacttaggaggcagattaatgaattatccatgaagcttcaaatcgctggacaagggaaaaatgagactttgtacaagcctggtccttttggagctgtcaaggctttgagaacaaatccaactgtaatccctgataactctgttaaccccaggttggccaagatattggaagaggttgctgtgaaaaaggaactcattgttgcgttggcaaacaccaatgtgagggagatgcttgaagtttggtttagcaatatcaaacgagttggtattccaaactacctggttgtggcattggatgataatatagaaagcttatgcaaatctaaaggggtgccagtctaccggcgtgatcctgatgaaggcatcgacaacattgcaaaaactggtggaaaccatgccgtttctggactcaagtttcgtgttttaagggagttcttgcaacttgggtatagtattctcctatctgacattgatattattttcttgaggaatccatttgatcatcttcatagagattctgatgtggagtccatgagtgatggccacaacaacatgacagcgtatggtttcaacgacgtgttcgacgaaccttctatgggttgggccagatatgctcacacgatgcggatttgggtgtacaactctggatttttctatataagaccaacggttccttctattgaacttcttgatcgtgtggctggccgtctttctcgtgagccaaagtcatgggaccaggcagttttcaacgaggagctgttcttcccgtcccatcctggttatgaaggcctccatgcatccaggagaaccatggatttttatcttttcatgaacagcaaagtcctcttcaagacagtgaggaaagacgccgggctcaagaagctaaagccagtgattgtgcatttgaactaccaccctaacaaactagagcgaatgaaagcggttatcgagttctatgtcaacggcaaacaagatgcactggatcatttccctgacgggtcagaatgaggaaattacagatagttgcgggtaaagaaacctataccctctgtatcctactcattttggggtgttctggcgtttggatctacatgtctcagatgtgggatctccacacgtgcgagaatgtttggcgagtgcaacatggatggatgcattggctttgaggtaaccacgatgtatcctttttcttgcagtttcagttggtaagttctaggtgttaagggcagtcgctctgtctgtttcttttattttcttgctcgttagtactattttagatcgcttgccactagtttggt

SEQ ID NO: 7935 - DNA, 1638 bp, Zea Mays
ctgaacatgaggcgtagatccaccacccatccccttgtcgcatcaccttttctactgcagaggggcacaaaaggtcctctaaaccccaccagcagcttcccctccgatctcaccccacagccgccggcgagatctccaggatgccgttggccgggcggcgggacggccccctaatgctgcgaggcggcggaggtgggaaacccctgtcacgcgggtcccgcatcgcggtggccgtcgctgtcggcgtcgcactcggctgcgtctgcgccttcctctaccccaacggcctcttcttccgcccgtctgcctctgccctccaatggacgcaccaggttgattcaactgcttgcgaatcatcaagacgagttaccaaccttaagtcccaggtgtcatcattggagagagagaatgttgaacttaggaggcagattaatgaattatccatgaagcttcaaatcgctggacaagggaaaaatgagactttgtacaagcctggtccttttggagctgtcaaggctttgagaacaaatccaactgtaatccctgataactctgttaaccccaggttggccaagatattggaagaggttgctgtgaaaaaggaactcattgttgcgttggcaaacaccaatgtgagggagatgcttgaagtttggtttagcaatatcaaacgagttggtattccaaactacctggttgtggcattggatgataatatagaaagcttatgcaaatctaaaggggtgccagtctaccggcgtgatcctgatgaaggcatcgacaacattgcaaaaactggtggaaaccatgccgtttctggactcaagtttcgtgttttaagggagttcttgcaacttgggtatagtattctcctatctgacattgatattattttcttgaggaatccatttgatcatcttcatagagattctgatgtggagtccatgagtgatggccacaacaacatgacagcgtatggtttcaacgacgtgttcgacgaaccttctatgggttgggccagatatgctcacacgatgcggatttgggtgtacaactctggatttttctatataagaccaacggttccttctattgaacttcttgatcgtgtggctggccgtctttctcgtgagccaaagtcatgggaccaggcagttttcaacgaggagctgttcttcccgtcccatcctggttatgaaggcctccatgcatccaggagaaccatggatttttatcttttcatgaacagcaaagtcctcttcaagacagtgaggaaagacgccgggctcaagaagctaaagccagtgattgtgcatttgaactaccaccctaacaaactagagcgaatgaaagcggttatcgagttctatgtcaacggcaaacaagatgcactggatcatttccctgacgggtcagaatgaggaaattacagatagttgcgggtaaagaaacctataccctctgtatcctactcattttggggtgttctggcgtttggatctacatgtctcagatgtgggatctccacacgtgcgagaatgtttggcgagtgcaacatggatggatgcattggctttgagatgtcagatatccagatacagcctaactaggcattagcgtaatcgcgcccaagttgag

SEQ ID NO: 7936 - DNA, 1550 bp, Zea Mays
gtgtttttaccttggatgaggaatagtactgcatgaaggttgattcaactgcttgcgaatcatcaagacgagttaccaaccttaagtcccaggtgtcatcattggagagagagaatgttgaacttaggaggcagattaatgaattatccatgaagcttcaaatcgctggacaagggaaaaatgagactttgtacaagcctggtccttttggagctgtcaaggctttgagaacaaatccaactgtaatccctgataactctgttaaccccaggttggccaagatattggaagaggttgctgtgaaaaaggaactcattgttgcgttggcaaacaccaatgtgagggagatgcttgaagtttggtttagcaatatcaaacgagttggtattccaaactacctggttgtggcattggatgataatatagaaagcttatgcaaatctaaaggggtgccagtctaccggcgtgatcctgatgaaggcatcgacaacattgcaaaaactggtggaaaccatgccgtttctggactcaagtttcgtgttttaagggagttcttgcaacttgggtatagtattctcctatctgacattgatattattttcttgaggaatccatttgatcatcttcatagagattctgatgtggagtccatgagtgatggccacaacaacatgacagcgtatggtttcaacgacgtgttcgacgaaccttctatgggttgggccagatatgctcacacgatgcggatttgggtgtacaactctggatttttctatataagaccaacggttccttctattgaacttcttgatcgtgtggctggccgtctttctcgtgagccaaagtcatgggaccaggcagttttcaacgaggagctgttcttcccgtcccatcctggttatgaaggcctccatgcatccaggagaaccatggatttttatcttttcatgaacagcaaagtcctcttcaagacagtgaggaaagacgccgggctcaagaagctaaagccagtgattgtgcatttgaactaccaccctaacaaactagagcgaatgaaagcggttatcgagttctatgtcaacggcaaacaagatgcactggatcatttccctgacgggtcagaatgaggaaattacagatagttgcgggtaaagaaacctataccctctgtatcctactcattttggggtgttctggcgtttggatctacatgtctcagatgtgggatctccacacgtgcgagaatgtttggcgagtgcaacatggatggatgcattggctttgaggtatttggatatctccttggtctctagtccctactaacctcaaccgttctgtagcaaatttgtacaagcttagatagatggctcatcacgttttttccctttttccgtacaattttttgaggttcgaattttggaagtcgaggcggtttgttctggactggtgatacttttgatgctggtgtttcttgtgtggtggtttattgcttgtggtttgagaagcttttacggtttcattttttaatgaaacaatgttgtgggcaggat

SEQ ID NO: 7937 - DNA, 571 bp, Zea Mays
aacaaaccgtaaagactgataagcacggttcaagtcaaggcctcgtctaccaaggaacgtgatctcatccgagcccagccttaggcaagagcagtagtcccggacggattcacgcctcgcccgagggcatcctcaggcagtgggtgcaccctcggctcgcccgaagccaagctcgggcagactttgtcgtacaacgacctcggccaaatcgccttaccaaccgaccgtatcgcatgcgcatttaatgtggggatcgcctgacaccttatcctgacacgcgcgcctcagtcggcaaggtcgaagtgaccccagtcacttcgcccctttactgaccgttctgacaagaaaacagcgctattcaccccgttccgactactgtgccaaccaccagggtaaaactgagtcacgatctccctcgaattcagcctcgggcgcaacagggagctccgcctcgcctgacctcaggcctcggcctcagcctcggcctcgggagaaggtctccgcttcgcccgaccccaggcctcggcctcagcctcaggctcaggaagagtcacatcctcgcccgacctcg

SEQ ID NO: 7938 - DNA, 429 bp, Zea Mays
ctcgcacctgagacaacgacgggtgtcgcttcccaacaacgtgccaacctcaagcggactaatgacgctggcacccttgcgagggacttgtcgggcatttgtctcgcacctgagataacgacgcacttcgtccccgatgcgacttcaccaccgtccatcgatgaggaggtaccatcagtcttccaccctgttccctttagattcagcttcgatccaccaagcgacccctcttcagtgagcgctttcgcgagggcatatcctgaccttccagggtaccatatgtggtcaatctgggaccaactgacggccgtctcaacctacagacccgcgggttctgaggaagaggacgaccccgacttcggttgggatttctccggactgagtgatcccagtgccatgcgagacttcatgtccgcatgtgactactgc

SEQ ID NO: 7939 - DNA, 3173 bp, Zea Mays
aataaatatgttcatatatatatatataaatacatatatctatacctataaaaaacaaagaaaaagaataaaaaaagggaaaacaaatttcctctcctcacctttttccctcagcccggcgcaccctgttgcacgtggacacacgcgtggctgctcgagccgcgtgagcctcccctcgcccagtcgttgtttgcgcagcgggcccccatatcatctccttgcttcccccttcacaactgcctcagccccgtgcatccgaacgccaaggaaactagcccccactccatcatggcccgcccacgttgctcggacttcaagccccctgcagttcagttgcatagcagtcctggagttgcgctcgccaccaagctacgcgttgccatgcccggagaaggctacgcccgtgattctccctcatcgagttcgtcgcaaggtgagagtacagagcgtggccatctcttttgttttctttgcctcgtccgagctgtggcaatggcgatccatcgtcattcgcgcttccccggcgaagtcggctgagccgtcctcgctctctctgttgtgtggtcgtgcgtctacccttgcagcccctccctacaacgcccttcgcggccatggctgaccgaaccgccagcctcggcacgacggcacagctagccggcctgctgccaggcgcaacggcctgggcagagcccctgcgcgcccaatcgccaccgtaagccccgctcgccggcgagcccacccagccgtgccctgcctcccatgcgacccccgtgctttgcaaccactcgttccgtcaaaggtgtaggagagaggaaaatatgtgttcgtgggttgaagaagccagaaaagggaaccgttagtctattcccatgattcatggccacgtttcaatctcctagtgcaccacgatctagctagatcccaggatgctttgtggcttttctttgtgtggctctcagtgtggtaagccatcagccaatagaattgcgtcagatcgtagtaaactgtggctgattaagtattcaatatcttttgcatcgtaaacttatttcgactcgttttagttgtgtcaacttcgcaataatattgtatactcattgaaagtactatttggtcatgacacatgtttatttaactaattaattaattgttcgttcggtagttattaaaaatgaccttccaattaaacctaatgtatagttttaatttttgttttttaaatacatgttaatatgattaatgtcaactcaaccattttaaattaatagattcttagtataaacatggcatcaatatgttattcttgagtgtcacgtgcgttgcttcgcgcgtgtcatgcgtgtcgttcacgcgccatgctgtttcacgtgttgccgcgtgccgtttcgcgcgctgccgcgcgtgtcgtcacgcgttgtttgtccgcttcgtcgcacatcactcgcgagtgtcgcgcgtattgttcgcacgtgttgccgcgcgccgttcgcgtgtgtcgcgcgccttgccacgccgttcgcgcgtatcgcgcgttgtccgcgcgcgagattaaactattcccttataatcactcatgtcagttaattatttatttatttaatcatccacaataaaaacagtaagttagtcaaaactaagtagctttaatctatatttcataaatgctaattaatataattatatcgaattaaatattcttattaatacttgtttagtataaacacgtcacctatttagttctctcgcctgtcgtgcgtgttatggttagctacatgctagcgctttactttaatcaatgaacaagatgagatacaatgatgatactatgattttattctggatatgatgatatacttgtggcatttaggggactcgggctgtttcccgagtacctctccgtaaggacctgttcgttgagagaccacccgggataacagtgcaaccatgagggtgaaatgtgatgcccttagctaattaattagaggaactagaggtgtagttgcttcgccgtcgtgtcgtcaatggggtccaagcacagtgcttgctctgccgaggctgagtgccgaggttctttcgttttgctttttggttagtcactctcctgcggggaggggtactgtgtttatcaaactggagaaacctaacaggcggctatgacctctagggaatctttgtaaaagctacgtagtgataccctgccggaccacctaggaagtgatcaatggggagtcatgatccccgggcaaaatgggaatcacgactcatgggtaaagtgtgcgacctctgcagagggtagtgaaactgatatatcagccatgctcacggttatgagcggccttgggatcctctttgattagagatacagatggttcaagatgttatggttctatttatgattttggttcgatgatgataatgatgtttcctcgatgaggaaatggttcacgggttggttattactaaaacttggcttccactgataataaatacctgaccaactaaaagcaactgcttgagcttaaccccacataaaaagctagtccacttcagccaaacggggcatttgctgagtacgttgatgtgtactcacccttgctttcacaaaacaccatgttgcctttggtgcaatctatgctcaagtaaagaagaaggcgtcgaggcggatctccgggagtttcaggacttcggcgagtttgaggattaggctagcgacctcccccagtcagctgcctgtggtgggtttatttacgttggctacgtttctgttctgtgtactttggttatattatgtaaatgactctagtctttcatattattacttatctttattgttattcgaagcattgtgctatgatgagtcatttatgtaatcgccgtgtacgtgaatttctgatcctggcacgtacatggttcgcattcggtttaccttccaaaaccgggtgtgacaataagggagcagcaaggaaggtttcatgaagagttgcgataagagaaaatggcattcatctgacaacaatcagagtacattgctgcttacaacgcacaggcgcaacaaaaaagtgaactcttggttttcagagcaaccacaacaatcattcattttccctcaattttagccgctgatatctcaggattacatgatacaacaccttctccaacttaggtgcgtcgat

SEQ ID NO: 7940 - DNA, 236 bp, Zea Mays
ccttcacaactgcctcagccccgtgcatccgaacgccaaggaaactggcccccactccatcatggcccgcccacgttgctcggacttcaagccccctgcagttcaactacatagcagtcctggagtcgcgctcgccgccaagctacgcgttgccatgcccggagaaggctacgcccgtgattctccctcatcgagttcgtcgcaagggagcagcaaggaaggtttcatgaagagtt

SEQ ID NO: 7941 - DNA, 325 bp, Zea Mays
ccatcctttagggcacttatattctttgttcttatgaccatttacctcctctcttacattcttgtccgttgtcacctttaacccttgcaatatctatatctttaccttcacgcttactttgaacctaccctttaaagcctcctcttttccatccctgttcgaggataatgcctcacctacttcaccactgattgccccccttttttgacaccttgcaagtttttcctcaaatacacaccctgttgtgtgtttgtctgttatcaccttaacccttgtcactcgatctttacattgatgcttatcttgtacctgcattttaaagctg

SEQ ID NO: 7942 - DNA, 595 bp, Zea Mays
aaaaacaaagaaaaagaataaaaaaagggaaaacaaatttcctctcctcacctttttccctcagcccggcgcaccctgttgcacgtggacacacgcgtggctgctcgagccgcgtgagcctcccctcgcccagtcgttgtttgcgcagcgggcccccatatcatctccttgcttcccccttcacaactgcctcagccccgtgcatccgaacgccaaggaaactggcccccactccatcatggcccgcccacgttgctcggacttcaagccccctgcagttcaactacatagcagtcctggagtcgcgctcgccgccaagctacgcgttgccatgcccggagaaggctacgcccgtgattctccctcatcgagttcgtcgcaagattgcgatctgtttccaagcatcgaggaatcgacgatcaagcttcggcgaccaaatgatccagttcttcgagttctacgagatcgaagaccctgatcatctgtttggtgaaggcaagtgtcctctgacccatcatgtcccatttactttataatacattgtcccgcatactatgaacaacctaaagatttactagctttctatttaccttgt

SEQ ID NO: 7943 - DNA, 1570 bp, Zea Mays
gtccaccgtaccgccagcgaggtcatggaacgtcggctccggccaatcgcgcccaaacccatgccgccgctgatgcccactggcgccgcggcgaccagcgtgctgtggcgggcgcgcaagcgcggccgcgacgaagaccgtctccttttgtcccctccgctgtcaaagagggagacggagagggaggcggcgggggcgtcgtcttaccctaaccctcaacctccagcctcggcggcccccgtggcggcgacgaggagaggacgacggtgcccaaggtcatcaggcctcgccccgctcgccctctgtggaccaccatctgcatcgactccagcaacatcgccgtcgtcggtagcggcccggagacggcggcgtctgcgtccaacaagacggcgagggaggtggaggccgaactggagctcccgggcgcgctcccggccgtcgtgtcgggcccccgcaaccgtgtccacctggtgaacgacgcgtacaaggctatggtgggacagcccgtgtgcccgtggctcgacgcgctgccgggcgccggcgcgtcgaggaggatcaacggcatcgtggcgctggacgtgcggacgttcggcccggcgccacgcctgccgaagaatgccgggtcatcatcagacgccttcccatgcaccgcaaggatcacgtgggagcacggtggcggcagcgccatcgcctccctcaccgtgccgtgcgccgtcgagcacctggccggcggatccggtgactatcgcttcatctggaggtttgactccagcagagcgtccatcatctactgcatcgcgtgacaaactagctagctaggccatttatttacgattcatgctttgtttccatcgcatgggctgttatatatgctggtcactgaagctgcaaaatagcgcgttaggtgatggatcgttggttcgttttgtctctagctagcgcgccagtgttgattaaattggatgcatgtcaccgaaataattaatgtgcacatccaagcatgtatagggtagtattttctcatgcattgcatgcatatggcgcggcgtgtttactgattcaacattcaagagtattacaaaatgtatggaaggttttaaacttttaagttttaatattagggaatatatccggtgcacatgagtttttggtgcacataaaatgcatatgaactaacaaagttcaaaaacaaattccgaaaaaacctatacatattcttttcatcctactactccaattatatacataatttcaaattcgtatactttagctataataaaaaagagaacattttagtcgatttctaattaaaacttgtcagaaatttaacttttttattacagctaaaatataatgaattcgaacttggaattttgtatataattggagtaggatggaaaaaatatgtatggatttttcagtttgtttatgaactttgttagttcacgtgcattctaaatgtaccaaaggctcgtgtgcactggatatgttctcagcaatgccatcttttaaggggtatgttggttgtgacatgcaccaatgaatagttaacgacaaaatatggattaag

SEQ ID NO: 7944 - DNA, 2874 bp, Zea Mays
atttttttccctacgcgctctgctttctgctattctcatatgctcaggaagaaaaatctcgcggctctatccttccagccgtcttcttcccttatccctgccgccgctctgctcaaaatttttctcaccgtcgttgcctcgttcccatccgctcggccaccctggataaaaatcccatcgcggtgtccatcttctgctcttagacgagtgcccctgccctgctccctaccgagcccccatggcgcggtcgcctctccctggtgactcgcccagcctctgctcctcttctccccggcgcctggtcggatgtggattctctgctcgaagctcccagcgccggattccctgcaagcttcagcttcctgcgcgcccagcctttccacttctccagcgcccagccccaactcccagccgagctcggccgcccggcccccaacgccgctctcttccccagcgcccctcccctctgttcgcttgtcgccatggccgccgtagctcagctcgaccgctcggcttcccctagcctcttcccctgcgagctcgactcctgctcgcccatggagttcgcccagctccctgctccggtgactagcgctcggcgtcctgctctctatgccctgctcgtccctgcgcacgcgccgcggtttccccgagctccctcgccgtggattctttctgcgcgtcctctccggcgctgcggtgccccagcttggcctctgcccattcctcagtcgcaccctgctccagtcgctcacccatctgacgctacacgctcgcctctgctcgttccgtgggtgcgcactgccttctctgtccatggtgcgccctcacctctacttctctgctggccggcgtttttccagccgtggatctccttgtgtgccgcgtccggctccctaacgtgccgcagtgcccgtcgccctgcgcgcgctctgtttcctcgcgcggcttcgtgctcgcttggccgttgtcttggatgcgcaggagtagtgtaggtgcttgcagtcggtggatcctcgatatcgagctgggattagagaagacagtactgttccgtgcgtcgcttatctgatgctcgacggaatgtccaactgggaggtgatagcttcgtgtgtcggcgagccgtcgttttcctcgttcagtgtttgcgcgggcttgcctgaaccgtgctgccatctcccgaccgttggcccttgcccactgcacgggcttgtcgtgctagtcaaccccgcctcgatcctcgtcgtcgatactgcgcttgctggtggccaaagctcgcgctaacctgctcgatcacacctcgtcagctcgcttcatactcaatctcgtcgtcgcgtcgtgtgtgcatcactcgccagccatatgtgatcaaagacgtcaaccgggaaccatcctcgtgcttgcaactatcgcgtcgaattagtcagggtaagttgattcatattcccgttaactaggtctataaatagattaaatagaattgttggtcacagtaaatattatgaatttagcatgcgtatattgtgatgatcgatttagatagctcgctaaatcaagtaattaagttacacagtttagagagttaataaaaagctaggaataaaaatagattttctagtgttattaggtcaatttggttaatgaatgtagtcgatgctctgctatgatatccatggtgcttaatgcttgattttaagtgtttcatcctttttagtatagagtatctatcttatactcgttctacttgtgctcatacatgtgcatcgtgcatctcatgaggtacgataaataatcatgtgatgcggaagacgagccaagtcgaccccaagcacgtgctaaatccgcaggatgaagctgatggaccaacctgaagatggttaaattaagcaagtgctcggtcgagggatactcgtcaagcggacatcgtctaacaaacactaacgtagtgttattccaggcaagccccggtgcatttgccccttccttgtgttttaaatgctttttcaccttatctgatgcattaggtgataggagttgtgtgataaacaattgatgcattaccattccttggaaactccttaatcccggttttataaaaagaactgataatgcttagccctgcttagaaactaaaaaatcatttgttttcaaaaagaatgattgtggaacattggttatgggcctttcgtttcaaaaatcaaagcaaacttatggtgatgattccacttcggccggagtgggttcatcatttggaaaagagtacccctgtcgggtaccaaaaatgggaaaatggtttgaatacatctagaccagacgctgagcagacgtggtcgcccgtctgtgtcgattaaggaccgttcgatgtaggcctgttgtggtggagaccttgcaactagccacatgctccggtaagcctgaacccggctattccatacgtgaaaagacaaccgcgcactgggcgtgggagatggtgggagtagcgtgtaccctcctggctagaggctggatggaggagtactgtgctcccgggtagcgcggaccggttcacgttgtggaggatctgtgggaacggttgacatatgcaaggattaagtgctacatatgtcgtgtggttagggatccccagctgggtataatcggttcgaatcgtcgttgctcctcggtcatggagactctaccctccgaccactcatcgtagttgacaagtgaaatatgaattggctaaaagaaagctagaccaggacaagtggatgctctagattaggcaaatctagattcaggaaaaatactaaacttgtgaagtaaaattttggcataaggatttactactagtaagctcttctgcaaaacagagtctttgattcttgataagcc

SEQ ID NO: 7945 - DNA, 513 bp, Zea Mays
gtctaacctgttctgccaaccaagacatctttgggtgatactccaacgtgcgctgttgctactccactttccaacaccgctggattatactaatggatactgatccgctctacttggccgccctttgttgctgctgcctattggaagcctgcttctgagatctaagctgcgcacaacttgttctacaaacaccacttcaatttgcacggttgatataactggggattggcttgttagcgaagaaccgaagataccatgggttcttatgcaaatcacagttctcctagttctttctatcgttctgattgtccgttgcgatgtttggtgtacctagtagtatcttaattatataccttacactgtttacctttccaatggaattcttggtctagctaacattgtgagattatgtcacttttctcgttctctgtagtcattgcattttgctcctggtgttgtcttctttgtgggatgtccaatcttttgtggcctatacaagagcttgtttggttg

SEQ ID NO: 7946 - DNA, 587 bp, Zea Mays
ctcctccccgccctcgccccctcgccctcgcccgcctgtttaaacctgactgtctataacttaccgccggtccgcacccgcccaccgtccctgtccccttccccgtctaagcactcggatcctctgccgccgcgatgagctactacggccagcagcagccgcccgtcagcgcgccgccggcgcaagcttggccgccctttgttgctgctgcctattggaagcctgcttctgagatctaagctgcgcacaacttgttctacaaacaccacttcaatttgcacggttgatataactggggattggcttgttagcgaagaaccgaagataccatgggttcttatgcaaatcacagttctcctagttctttctatcgttctgattgtccgttgcgatgtttggtgtacctagtagtatcttaattatataccttacactgtttacctttccaatggaattcttggtctagctaacattgtgagattatgtcacttttctcgttctctgtagtcattgcattttgctcctggtgttgtcttctttgtgggatgtccaatcttttgtggcctatacaagagcttgtttggttg

SEQ ID NO: 7947 - DNA, 1063 bp, Zea Mays
ctgaaaccttcattgagctgtgaaaatcataagtttgtttgtacgtttgataatttgtagttggctcaagcatgctacatggaacgtgtggatctctctgctcatgggttttatgctacacctaatattgggtttgactggacgattggcaagggaactccattcaattatttcacgtatggagctgcatttgcagaagttgagatcgacaccctaactggggatttttacacaaggacagctgatattgttatggatctcggattttcaattaatccagcaattgacattggccagattgaaggagcttttatccaaggattgggctgggcagccatagaagagctaaaatggggggatgataaccataagtggattcgacctggacacctcttcacctgcggtcctggttcttacaaaataccctctgtaaatgatatacctctgaatttcaaggtttctctattaaagggtgttccaaatccaaaggctattcattcttccaaagccgtgggagagccaccatttttcctaggttccgccgtcttatttgcgataaaggatgcgatctctgcggcaagggctgaggaggggcacttggactggtttccactcgacaacccggcgacaccggaaagaataagaatggcatgtgtggattccattacaaagaaatttgccggtatagattatcggtccaagcttagtgtatagcggctgctgggctggtcacgggagaataaattggaaacagaagcccgcatttgtaaagtttcatgccctttgtgctaaaaagaatgggagggacggtttagtgttacttgtgggaaactttaaccctaacaaaggattgggtgatgtattaatagactgagttagttgggtctgacatacacatggatgagaagataattatacggtaaaccctaaggccctgttcggtttttagggattggagccccggattgattcctagccggattacttctctaatttatatagattttgatgagctggaacaaatcttggtttattcctgtacaaccgaacaggccctaaacgg

SEQ ID NO: 7948 - DNA, 4860 bp, Zea Mays
ccaaaatctacaaaccacacgtagacagcgtccgctcaaaatttttttttacggaaagctgtatggcgtcagaaattttttaacggaaaagctgtatcgcgtcaccgccgccagtacgcccgccaccggcgctcgttcttgtcttcgtccatgcactgtacactacacatcaccgactgtaccgcacccgcacatgcgggaagccgcctcatcctcttcgtcgccgtgatccatccatccacatcactgatcagacccgtgccgtgcagttccaccacacttgggggaggcagagccccaagcgcgcgtccgacctctggacctccgcaggcggaacctattgctccctgcaggttctctcgcgggcctagccgtgcttcttccccacccggaatctgatgggatcgctcacgcgggtgccggcggaggacccagcagcggcggaggaggagtggtccgacgaggcggtcatctacgtcaacggcgtccgccgcgtgctcccggacggcctcgcccacctcaccctgcttcagtaccttagagatattggccttcgagggacaaagcttggatgtggtgaaggtggttgtggagcttgcactgtcatggtctcttgctatgaccgaattacaaagaaatcactgcattttgcaatcaatgcatgcttggctccactttattccgtggaaggaatgcatataatcacagttgagggaattggagatcgtcagcgaggtttgcacccagttcaggaatgtttagccaaggcacatggttcacaatgtggattttgcacccctggttttgtgatgtctatgtatgcactgctgagatctagcaaacagcctcccactgaagaccagattgaagactgccttgcaggaaatttatgtcgttgtactggctaccgaccaattatagatgccttccgtgtgtttgccaaaacagataatttggcatacaccaattcatgttcagaagatgcaaaggaccaagctatctgcccttctactgggaaaccatgttcctgcaggaatgagacagatgtcaatgttaatgagtcctcgttatcatcgtctgtggaaagatattcaccttattcatacaatgaaattgatgggagtgcatacaatgaaagggaactcatcttccccccagaacttcagttgagaaaagttatgccacttaaattaaatgggtctaatgagatcaagtggtataggcctcttaaactaaagcaattactacatttgaaatcttgctacctggatgcaaagcttatcattggtaactcagaagtgggagtcgaaacgaagtttaagaatgcccaatataaggtcttgatcgcagttactcatattccagagcttaataccctcaaagctaaagaagatggcatacacattggttctgctgtaagacttgcacaacttcaaaattttcttaaaaaggttgtagcagaacatgatttgcctgaaacttcgtcatgccaggcaatagtacgtcagttaaaatggtttgcgggtacacaaatcaggaatgttgcatccattggtggtaacatttgtactgctagtccaatatcagacctaaatccactttggatagctgtaggtgcgaaattccatataatagatgtgaacggtaatgttagaactacccttgcaaaggacttctttcttggttatcgtaaagttgatataaaaccagaagaaatattgctttctattatactaccatggacaaggccttttgaatatgtcaaagaatttaaacaggcacatagaagggaggatgacattgctttggttaatgctggaatgcgtgtgtatttacaagaaactgaacgaaattggataatatctgatgtttcaattgtctttggtggggtagcagcagttccacttagtgcttcaagaactgaaaacttccttactggaaagaaatgggactctgggttgctggatgatactttcaatttattgaaagaagacatctctatttcagagaatgcacctggtggaatgattgaatttcgcagatcgcttactttgagtttctttttcaaatttttcctgtctgttacccatgaaatgaaaataaaagggttgttagcagatggattgcatgcagatcatctgtcagctgtacagccttacagtaggcctgttactgttggaactcaaagttatgaattagtaaggcaaggagcttctgtaggtcagccaatggttcatatgtcagctatgcttcaggtcactggtgaggctgaatacactgatgacacaccgacacctcccaatactttgcatgctgctttggtgctgagtaagaaggctcacgctcgcatattgtctattgatgattcacttgccaaatcttcccctggctttgctgggctgttcctttcaaaagacattcccggtgttaaccatactggaccaattatccatgatgaggagttttttgcatctaacattgttacttgtgttggtcagatcattggaattgttgttgctgatactcatgataatgcaaaaactgctgccaacaaagtacatatcgagtattgtgagctcccagcaattttatctatagaggaagctgtcaagattggaagctttcatccaaataccaagaaatgccttgtgaaaggcgatgtagaacaatgttttctgtctggtgcatgcgatagaattgtatcaggacaagttcatgtcggaggtcaagagcatttttacatggaacctcagtgcactcttgtctggccagtggattctggaaatgaaattcatatggtctcatctactcaagctccgcagaagcatcagaagtatgttgcaagtgttcttggtcttccacaatcaaaagtcgtttgcaagactaagcgtattggtggtggatttggtggaaaagaaaccagatcagcaatatttgctgctgcagcatctgtaccctctttctgtctgagaaggccagtaaagcttgttttggacagggacgttgacatgatatcaactggacagaggcacagtttccttgggaaatataaggtgggatttaccaatgaagggaagatactggccctagacctggaaatttataacaacggtggccattcacttgatctatcccttgcagtactggaacgtgctatgtttcattcagaaaatgtctatgacatagaaaacatcagaatcaatgggcaagtatgctttacaaacttcccaagtaatactgctttccgaggttttggtggtccacaaggcttgttgattgcagagaattggattcaccatatagctacagaactccaacgaagtcctgaagagataaaagaacttaattttcacaatgatggagttgtgctacattatggccagttgctccagaattgtacaataagttcagtttgggatgaactaaaagcatcttgtaattttgtggaagctcgcaaagccataaataattttaacagtaataaccgctggaggaagcgaggaattgccatgattccgacaaaatttggcatatccttcactgcaaaattcatgaatcaggctggcgctcttgtgcaagtttacactgatggcactgtcctggtaacacatggcggggtcgagatgggacagggtttgcacacaaaggtagcccaagttgctgcctcgtcattcaatatccctcttagctctgtatttatatcagagacaagtactgataaggttcctaatgcatcaccaacagcagcctctgctagttcagatctgtatggagctgcagttttggatgcttgtcaacaaatcaaggttcgaatggaacccattgctagcaaaggaacccacaactcgtttgcagagttggctcaagcatgctacatggaacgtgtggatctctctgctcatgggttttatgctacacctaatattgggtttgactggacgattggcaagggaactccattcaattatttcacgtatggagctgcatttgcagaagttgagatcgacaccctaactggggatttttacacaaggacagctgatattgttatggatctcggattttcaattaatccagcaattgacattggccagattgaaggagcttttatccaaggattgggctgggcagccatagaagagctaaaatggggggatgataaccataagtggattcgacctggacacctcttcacctgcggtcctggttcttacaaaataccctctgtaaatgatatacctctgaatttcaaggtttctctattaaagggtgttccaaatccaaaggctattcattcttccaaagccgtgggagagccaccatttttcctaggttccgccgtcttatttgcgataaaggatgcgatctctgcggcaagggctgaggaggggcacttggactggtttccactcgacaacccggcgacaccggaaagaataagaatggcatgtgtggattccattacaaagaaatttgccggtatagattatcggtccaagcttagtgtatagcggctgctgggctggtcacgggagaataaattggaaacagaagcccgcatttgtaaagtttcatgccctttgtgctaaaaagaatgggagggacggtttagtgttacttgtgggaaactttaaccctaacaaaggattgggtgatgtattaatagactgagttagttgggtctgacatacacatggatgagaagataattatacggtaaaccctaaggccctgttcggtttttagggattggagccccggattgattcctagccggattacttctctaatttatatagattttgatgagctggaacaaatcttggtttattcctgtacaaccgaacaggccctaaacgg

SEQ ID NO: 7949 - DNA, 4771 bp, Zea Mays
ccaaaatctacaaaccacacgtagacagcgtccgctcaaaatttttttttacggaaagctgtatggcgtcagaaattttttaacggaaaagctgtatcgcgtcaccgccgccagtacgcccgccaccggcgctcgttcttgtcttcgtccatgcactgtacactacacatcaccgactgtaccgcacccgcacatgcgggaagccgcctcatcctcttcgtcgccgtgatccatccatccacatcactgatcagacccgtgccgtgcagttccaccacacttgggggaggcagagccccaagcgcgcgtccgacctctggacctccgcaggcggaacctattgctccctgcaggttctctcgcgggcctagccgtgcttcttccccacccggaatctgatgggatcgctcacgcgggtgccggcggaggacccagcagcggcggaggaggagtggtccgacgaggcggtcatctacgtcaacggcgtccgccgcgtgctcccggacggcctcgcccacctcaccctgcttcagtaccttagagatattggccttcgagggacaaagcttggatgtggtgaaggtggttgtggagcttgcactgtcatggtctcttgctatgaccgaattacaaagaaatcactgcattttgcaatcaatgcatgcttggctccactttattccgtggaaggaatgcatataatcacagttgagggaattggagatcgtcagcgaggtttgcacccagttcaggaatgtttagccaaggcacatggttcacaatgtggattttgcacccctggttttgtgatgtctatgtatgcactgctgagatctagcaaacagcctcccactgaagaccagattgaagactgccttgcaggaaatttatgtcgttgtactggctaccgaccaattatagatgccttccgtgtgtttgccaaaacagataatttggcatacaccaattcatgttcagaagatgcaaaggaccaagctatctgcccttctactgggaaaccatgttcctgcaggaatgagacagatgtcaatgttaatgagtcctcgttatcatcgtctgtggaaagatattcaccttattcatacaatgaaattgatgggagtgcatacaatgaaagggaactcatcttccccccagaacttcagttgagaaaagttatgccacttaaattaaatgggtctaatgagatcaagtggtataggcctcttaaactaaagcaattactacatttgaaatcttgctacctggatgcaaagcttatcattggtaactcagaagtgggagtcgaaacgaagtttaagaatgcccaatataaggtcttgatcgcagttactcatattccagagcttaataccctcaaagctaaagaagatggcatacacattggttctgctgtaagacttgcacaacttcaaaattttcttaaaaaggttgtagcagaacatgatttgcctgaaacttcgtcatgccaggcaatagtacgtcagttaaaatggtttgcgggtacacaaatcaggaatgttgcatccattggtggtaacatttgtactgctagtccaatatcagacctaaatccactttggatagctgtaggtgcgaaattccatataatagatgtgaacggtaatgttagaactacccttgcaaaggacttctttcttggttatcgtaaagttgatataaaaccagaagaaatattgctttctattatactaccatggacaaggccttttgaatatgtcaaagaatttaaacaggcacatagaagggaggatgacattgctttggttaatgctggaatgcgtgtgtatttacaagaaactgaacgaaattggataatatctgatgtttcaattgtctttggtggggtagcagcagttccacttagtgcttcaagaactgaaaacttccttactggaaagaaatgggactctgggttgctggatgatactttcaatttattgaaagaagacatctctatttcagagaatgcacctggtggaatgattgaatttcgcagatcgcttactttgagtttctttttcaaatttttcctgtctgttacccatgaaatgaaaataaaagggttgttagcagatggattgcatgcagatcatctgtcagctgtacagccttacagtaggcctgttactgttggaactcaaagttatgaattagtaaggcaaggagcttctgtaggtcagccaatggttcatatgtcagctatgcttcaggtcactggtgaggctgaatacactgatgacacaccgacacctcccaatactttgcatgctgctttggtgctgagtaagaaggctcacgctcgcatattgtctattgatgattcacttgccaaatcttcccctggctttgctgggctgttcctttcaaaagacattcccggtgttaaccatactggaccaattatccatgatgaggagttttttgcatctaacattgttacttgtgttggtcagatcattggaattgttgttgctgatactcatgataatgcaaaaactgctgccaacaaagtacatatcgagtattgtgagctcccagcaattttatctatagaggaagctgtcaagattggaagctttcatccaaataccaagaaatgccttgtgaaaggcgatgtagaacaatgttttctgtctggtgcatgcgatagaattgtatcaggacaagttcatgtcggaggctccgcagaagcatcagaagtatgttgcaagtgttcttggtcttccacaatcaaaagtcgtttgcaagactaagcgtattggtggtggatttggtggaaaagaaaccagatcagcaatatttgctgctgcagcatctgtaccctctttctgtctgagaaggccagtaaagcttgttttggacagggacgttgacatgatatcaactggacagaggcacagtttccttgggaaatataaggtgggatttaccaatgaagggaagatactggccctagacctggaaatttataacaacggtggccattcacttgatctatcccttgcagtactggaacgtgctatgtttcattcagaaaatgtctatgacatagaaaacatcagaatcaatgggcaagtatgctttacaaacttcccaagtaatactgctttccgaggttttggtggtccacaaggcttgttgattgcagagaattggattcaccatatagctacagaactccaacgaagtcctgaagagataaaagaacttaattttcacaatgatggagttgtgctacattatggccagttgctccagaattgtacaataagttcagtttgggatgaactaaaagcatcttgtaattttgtggaagctcgcaaagccataaataattttaacagtaataaccgctggaggaagcgaggaattgccatgattccgacaaaatttggcatatccttcactgcaaaattcatgaatcaggctggcgctcttgtgcaagtttacactgatggcactgtcctggtaacacatggcggggtcgagatgggacagggtttgcacacaaaggtagcccaagttgctgcctcgtcattcaatatccctcttagctctgtatttatatcagagacaagtactgataaggttcctaatgcatcaccaacagcagcctctgctagttcagatctgtatggagctgcagttttggatgcttgtcaacaaatcaaggttcgaatggaacccattgctagcaaaggaacccacaactcgtttgcagagttggctcaagcatgctacatggaacgtgtggatctctctgctcatgggttttatgctacacctaatattgggtttgactggacgattggcaagggaactccattcaattatttcacgtatggagctgcatttgcagaagttgagatcgacaccctaactggggatttttacacaaggacagctgatattgttatggatctcggattttcaattaatccagcaattgacattggccagattgaaggagcttttatccaaggattgggctgggcagccatagaagagctaaaatggggggatgataaccataagtggattcgacctggacacctcttcacctgcggtcctggttcttacaaaataccctctgtaaatgatatacctctgaatttcaaggtttctctattaaagggtgttccaaatccaaaggctattcattcttccaaagccgtgggagagccaccatttttcctaggttccgccgtcttatttgcgataaaggatgcgatctctgcggcaagggctgaggaggggcacttggactggtttccactcgacaacccggcgacaccggaaagaataagaatggcatgtgtggattccattacaaagaaatttgccggtatagattatcggtccaagcttagtgtatagcggctgctgggctggtcacgggagaataaattggaaacagaagcccgcatttgtaaagtttcatgccctttgtgctaaaaagaatgggagggacggtttagtgttacttgtgggaaactttaaccctaacaaaggattgggtgatgtattaatagactgagttagttgggtctgacatacacatggatgagaagataattatacggtaaaccctaaggccctgttcggtttttagggattggagccccggattgattcctagccggattacttctctaatttatatagattttgatgagctggaacaaatcttggtttattcctgtacaaccgaacaggccctaaacgg

SEQ ID NO: 7950 - DNA, 4883 bp, Zea Mays
ccaaaatctacaaaccacacgtagacagcgtccgctcaaaatttttttttacggaaagctgtatggcgtcagaaattttttaacggaaaagctgtatcgcgtcaccgccgccagtacgcccgccaccggcgctcgttcttgtcttcgtccatgcactgtacactacacatcaccgactgtaccgcacccgcacatgcgggaagccgcctcatcctcttcgtcgccgtgatccatccatccacatcactgatcagacccgtgccgtgcagttccaccacacttgggggaggcagagccccaagcgcgcgtccgacctctggacctccgcaggcggaacctattgctccctgcaggttctctcgcgggcctagccgtgcttcttccccacccggaatctgatgggatcgctcacgcgggtgccggcggaggacccagcagcggcggaggaggagtggtccgacgaggcggtcatctacgtcaacggcgtccgccgcgtgctcccggacggcctcgcccacctcaccctgcttcagtaccttagagatattggccttcgagggacaaagcttggatgtggtgaaggtggttgtggagcttgcactgtcatggtctcttgctatgaccgaattacaaagaaatcactgcattttgcaatcaatgcatgcttggctccactttattccgtggaaggaatgcatataatcacagttgagggaattggagatcgtcagcgaggtttgcacccagttcaggaatgtttagccaaggcacatggttcacaatgtggattttgcacccctggttttgtgatgtctatgtatgcactgctgagatctagcaaacagcctcccactgaagaccagattgaagactgccttgcaggaaatttatgtcgttgtactggctaccgaccaattatagatgccttccgtgtgtttgccaaaacagataatttggcatacaccaattcatgttcagaagatgcaaaggaccaagctatctgcccttctactgggaaaccatgttcctgcaggaatgagacagatgtcaatgttaatgagtcctcgttatcatcgtctgtggaaagatattcaccttattcatacaatgaaattgatgggagtgcatacaatgaaagggaactcatcttccccccagaacttcagttgagaaaagttatgccacttaaattaaatgggtctaatgagatcaagtggtataggcctcttaaactaaagcaattactacatttgaaatcttgctacctggatgcaaagcttatcattggtaactcagaagtgggagtcgaaacgaagtttaagaatgcccaatataaggtcttgatcgcagttactcatattccagagcttaataccctcaaagctaaagaagatggcatacacattggttctgctgtaagacttgcacaacttcaaaattttcttaaaaaggttgtagcagaacatgatttgcctgaaacttcgtcatgccaggcaatagtacgtcagttaaaatggtttgcgggtacacaaatcaggaatgttgcatccattggtggtaacatttgtactgctagtccaatatcagacctaaatccactttggatagctgtaggtgcgaaattccatataatagatgtgaacggtaatgttagaactacccttgcaaaggacttctttcttggttatcgtaaagttgatataaaaccagaagaaatattgctttctattatactaccatggacaaggccttttgaatatgtcaaagaatttaaacaggcacatagaagggaggatgacattgctttggttaatgctggaatgcgtgtgtatttacaagaaactgaacgaaattggataatatctgatgtttcaattgtctttggtggggtagcagcagttccacttagtgcttcaagaactgaaaacttccttactggaaagaaatgggactctgggttgctggatgatactttcaatttattgaaagaagacatctctatttcagagaatgcacctggtggaatgattgaatttcgcagatcgcttactttgagtttctttttcaaatttttcctgtctgttacccatgaaatgaaaataaaagggttgttagcagatggattgcatgcagatcatctgtcagctgtacagccttacagtaggcctgttactgttggaactcaaagttatgaattagtaaggcaaggagcttctgtaggtcagccaatggttcatatgtcagctatgcttcaggtcactggtgaggctgaatacactgatgacacaccgacacctcccaatactttgcatgctgctttggtgctgagtaagaaggctcacgctcgcatattgtctattgatgattcacttgccaaatcttcccctggctttgctgggctgttcctttcaaaagacattcccggtgttaaccatactggaccaattatccatgatgaggagttttttgcatctaacattgttacttgtgttggtcagttgcatctctttcttattgacagatcattggaattgttgttgctgatactcatgataatgcaaaaactgctgccaacaaagtacatatcgagtattgtgagctcccagcaattttatctatagaggaagctgtcaagattggaagctttcatccaaataccaagaaatgccttgtgaaaggcgatgtagaacaatgttttctgtctggtgcatgcgatagaattgtatcaggacaagttcatgtcggaggtcaagagcatttttacatggaacctcagtgcactcttgtctggccagtggattctggaaatgaaattcatatggtctcatctactcaagctccgcagaagcatcagaagtatgttgcaagtgttcttggtcttccacaatcaaaagtcgtttgcaagactaagcgtattggtggtggatttggtggaaaagaaaccagatcagcaatatttgctgctgcagcatctgtaccctctttctgtctgagaaggccagtaaagcttgttttggacagggacgttgacatgatatcaactggacagaggcacagtttccttgggaaatataaggtgggatttaccaatgaagggaagatactggccctagacctggaaatttataacaacggtggccattcacttgatctatcccttgcagtactggaacgtgctatgtttcattcagaaaatgtctatgacatagaaaacatcagaatcaatgggcaagtatgctttacaaacttcccaagtaatactgctttccgaggttttggtggtccacaaggcttgttgattgcagagaattggattcaccatatagctacagaactccaacgaagtcctgaagagataaaagaacttaattttcacaatgatggagttgtgctacattatggccagttgctccagaattgtacaataagttcagtttgggatgaactaaaagcatcttgtaattttgtggaagctcgcaaagccataaataattttaacagtaataaccgctggaggaagcgaggaattgccatgattccgacaaaatttggcatatccttcactgcaaaattcatgaatcaggctggcgctcttgtgcaagtttacactgatggcactgtcctggtaacacatggcggggtcgagatgggacagggtttgcacacaaaggtagcccaagttgctgcctcgtcattcaatatccctcttagctctgtatttatatcagagacaagtactgataaggttcctaatgcatcaccaacagcagcctctgctagttcagatctgtatggagctgcagttttggatgcttgtcaacaaatcaaggttcgaatggaacccattgctagcaaaggaacccacaactcgtttgcagagttggctcaagcatgctacatggaacgtgtggatctctctgctcatgggttttatgctacacctaatattgggtttgactggacgattggcaagggaactccattcaattatttcacgtatggagctgcatttgcagaagttgagatcgacaccctaactggggatttttacacaaggacagctgatattgttatggatctcggattttcaattaatccagcaattgacattggccagattgaaggagcttttatccaaggattgggctgggcagccatagaagagctaaaatggggggatgataaccataagtggattcgacctggacacctcttcacctgcggtcctggttcttacaaaataccctctgtaaatgatatacctctgaatttcaaggtttctctattaaagggtgttccaaatccaaaggctattcattcttccaaagccgtgggagagccaccatttttcctaggttccgccgtcttatttgcgataaaggatgcgatctctgcggcaagggctgaggaggggcacttggactggtttccactcgacaacccggcgacaccggaaagaataagaatggcatgtgtggattccattacaaagaaatttgccggtatagattatcggtccaagcttagtgtatagcggctgctgggctggtcacgggagaataaattggaaacagaagcccgcatttgtaaagtttcatgccctttgtgctaaaaagaatgggagggacggtttagtgttacttgtgggaaactttaaccctaacaaaggattgggtgatgtattaatagactgagttagttgggtctgacatacacatggatgagaagataattatacggtaaaccctaaggccctgttcggtttttagggattggagccccggattgattcctagccggattacttctctaatttatatagattttgatgagctggaacaaatcttggtttattcctgtacaaccgaacaggccctaaacgg

SEQ ID NO: 7951 - DNA, 557 bp, Zea Mays
cttcacgccaccttgctcttccacgcaccatgcggcttccaagactccatccgtcacagcgcttggagcttgccggttgccgagatgacccctgtgattggtccctcagcaccctatcctcccattcacagtccctccctgacctccctcacgccaaagcagcaacagcactcggctccagtgccctcaacacccagccatagtctacctctacgctcgatacgaagccgcttgccctacagttccatcgtgtcaccgtcctgcaagcgctaagttccgtccacctcgttgaacgccatcgtccgcttcttcaccgtgccctcggcatcagccccctggtgcacaccgacgcaacactctggtcctcgccctccatcgcgcccggacatcagtacatgtttcctttggtttctccctgcccattccgtatgtcgtggtaggcttgcgtcggccatcgacctcacgttcatcctcgcaacctcgctgcagcgtcgccgttctccctgttgtgcacgaacgtctgtgaacacctagagaagaagtggtgtctgaagaag

SEQ ID NO: 7952 - DNA, 1133 bp, Zea Mays
cttcacgccaccttgctcttccacgcaccatgcggcttccaagactccatccgtcacagcgcttggagcttgccggttgccgagatgacccctgtgattggtccctcagcaccctatcctcccattcacagtccctccctgacctccctcacgccaaagcagcaacagcactcggctccagtgccctcaacacccagccatagtctacctctacgctcgatacgaagccgcttgccctacagttccatcgtgtcaccgtcctgcaagcgctaagttccgtccacctcgttgaacgccatcgtccgcttcttcaccgtgccctcggcatcagccccctggtgcacaccgacgcaacactctggtcctcgccctccatcgcgcccggacatcagtacatgtttcctttggtttctccctgcccattccgtatgtcgtggtaggcttgcgtcggccatcgacctcacgttcatcctcgcaacctcgctgcagcgtcgccgttctccctgttgtgcacgaacgtctgtgaacacctagagaagaagtggtgtctgaagaaggagttcactccagtgcctattgatccagtggtggaatcccatctaactaattatcgtgatagaaaggttttggatcttctctgcaacaaggcaagccccggtgcatttgccacctcccttgtgtttataaaattttatcacttatatgatgcattaggtgataggagttgattgattaaacacttgatgcattaccattccttgaaaagattcattaccataccttgtcacctattttataaaagctagagatgcttagtcatgctgatagattaagaaaaatgtttttgatctatgactcatgtttttacaaaaagaaaatgggcttgggataatgaaggcatcaagatgaagcgtcccgatcctttgggactcaaatgtgatacaattactagttccaggaggctagtaaccacattcattacttcaaatggttacagagtctgaataatgttattacaataccggaggatacaagctcgaaagtgagccgaaaaacataaagcgcagtggaagataaaatagcctaggccacaggaagaactgggtgaagacacaaccccatcaatcaagtat

SEQ ID NO: 7953 - DNA, 1382 bp, Zea Mays
  misc_feature (1382)..(1382): n is a, c, g, or t
aagaggcaagcccattctcgccgtctggaacagccggacaggaccacgccggccgcggagttaacggcacagcgtcgtttcaaagctaacctcccgctctttcctttctctgaatcccctgccttctcctgcctccccgtccaagatccccaaaactaccgccgcgccgccgccgccaccatgcctctgtcacaccggaacctcctcctcttcattccctctgtcatcgttctcgttgtcacctccgccgccgccctatccgtctccaccccggttgagctcacagtcacctcgcatccgccggcctccgtccacctcccgcacgcgcgacccctcgccggtggcggtaccgccgggccctactgcacgcgtgttctcctccaaggccgcccctcccgcatccgcgacccgtctcgcttcttccacgcgcttcgactccgcgccaacgccacccgcccccacggcctcgagctctgcttccacagaaatgccacagtggggccatgcaagtgcgccgcgtcccaatggcagaaaatgcccaagagcgggctctggatgcaggtcatctcaccatacgactaccggattcttgatttccgaatgcctgctgacccttcgagaattcttgctccacagggtggtgttctttgtcgtaggattggtgctcatggtggtggcacacacattgagcgagtctgtagtgttctactatggtggagcaatgactattggcattttccttgtgatactgattatactctttcagggaatgaagcttttaccaactggtagaaagagttctcttgctatttttgcatactcctcagtcgttggcatgacgacatattttcttcactatttgtcgggtatgctgcgctcagttcttgtggaaattgggattgctgaagacatgcataatcctgtatcttggaatattcgctctagtatgtgtcgtcttagctggagcctggtttggttactggggtgtccgtaaacttgtcctggcagaagatggatctgttgatgagggtgtggcttattttgttgagtgggctatcttgattgtttcagctgttatgatcctccagagttctctggactatctctttgcctttgcagctctaatcttctgtgtaatcatcaaagcgattgcaagaattgaaggaaagtcaaaagttttacactatatattcgggtatgataaactctcttccctaattgttagtcagggaaactctttacttgatatgtcaaatattagttactacatctattattaatcagatagctcatagcagaagatataaatctaacatacttcatagaagaacacaattttctgaccagattatcatgttactataactttaagaaaaatatcn

SEQ ID NO: 7954 - DNA, 1408 bp, Zea Mays
  misc_feature (1408)..(1408): n is a, c, g, or t
aagaggcaagcccattctcgccgtctggaacagccggacaggaccacgccggccgcggagttaacggcacagcgtcgtttcaaagctaacctcccgctctttcctttctctgaatcccctgccttctcctgcctccccgtccaagatccccaaaactaccgccgcgccgccgccgccaccatgcctctgtcacaccggaacctcctcctcttcattccctctgtcatcgttctcgttgtcacctccgccgccgccctatccgtctccaccccggttgagctcacagtcacctcgcatccgccggcctccgtccacctcccgcacgcgcgacccctcgccggtggcggtaccgccgggccctactgcacgcgtgttctcctccaaggccgcccctcccgcatccgcgacccgtctcgcttcttccacgcgcttcgactccgcgccaacgccacccgcccccacggcctcgagctctgcttccacagaaatgccacagtggggccatgcaagtgcgccgcgtcccaatggcagaaaatgcccaagagcgggctctggatgcaggtcatctcaccatacgactaccggattcttgatttccgaatgcctgctgacccttcgaggtctgttgtggtgtccactgaggaagaattcttgctccacagggtggtgttctttgtcgtaggattggtgctcatggtggtggcacacacattgagcgagtctgtagtgttctactatggtggagcaatgactattggcattttccttgtgatactgattatactctttcagggaatgaagcttttaccaactggtagaaagagttctcttgctatttttgcatactcctcagtcgttggcatgacgacatattttcttcactatttgtcgggtatgctgcgctcagttcttgtggaaattgggattgctgaagacatgcataatcctgtatcttggaatattcgctctagtatgtgtcgtcttagctggagcctggtttggttactggggtgtccgtaaacttgtcctggcagaagatggatctgttgatgagggtgtggcttattttgttgagtgggctatcttgattgtttcagctgttatgatcctccagagttctctggactatctctttgcctttgcagctctaatcttctgtgtaatcatcaaagcgattgcaagaattgaaggaaagtcaaaagttttacactatatattcgggtatgataaactctcttccctaattgttagtcagggaaactctttacttgatatgtcaaatattagttactacatctattattaatcagatagctcatagcagaagatataaatctaacatacttcatagaagaacacaattttctgaccagattatcatgttactataactttaagaaaaatatcn

SEQ ID NO: 7955 - DNA, 436 bp, Zea Mays
cgcctattctatttaagaaatgcccgccctcccatactgctatcactcaagcctattctccattgtggaaccaacaaatctccaagctctcccaatttagaaacgagagatggccatgacgatgaccctcggttccatgctcatcgccgccgccgcagttgtcggcctgtgctccgtcgctcccgctgcatcagcgcgcgaggagccactacagccgcagatcgtcggcgggtggaaaccgatcaagaacgtgaacgacccccacgtccaagagatcggccggtgggcggtttcggagcacatcaagacggccaacgacgggctgggcttcggcagggtggtgagcggcgaggagcagatcgtcgccgggaaaaactacaggctgcgcattcaagcgacgaagggattaggttttagcggcggcgacggtgccgcc

SEQ ID NO: 7956 - DNA, 1710 bp, Zea Mays
aacgcatcctaggggaaagagaaaattgctgtctcaagaaagaaaaagagaattaaaatagccgtaagtaacgtgaaggggcaagaattgctccggtggaatgggaaagcgaggaaaaataaaataaacccagtaaaataggcagtcggcagaccacgggccccttcgtccacctccggccgagcagtgccgactgccgccacctctgaaaaaccctagcaaaaaaaaaaaaaaacattgcccaatccaaatccccattccctccactcccaaaatttcgaactccgaatcgaagctatcatgtgcgagcgctcacctaccccacgttgactagaagaaccgtccgacttcaacttcccaattttgcctccaaaaaattcaaaatattattcgaccccgccgccatcccgtccgccctacaaatcccgccagcatgcgctccatgttcgccactaggtcgcttctcgccgctgccgcctccgcccccaccgtcctccgcgccagcgctttcccatcgcgttcgctgctcctctctctgcctttccctcggggtcgtgctgccagaaatatgcttggcgcggcgaggtcgatctcttcggccgccccgtcgcgagtcggaggccgtgcggctatggaggtccgggcggctcagtccggcgagatccatgtcatcgtgggccccatgttcgccggcaagaccaccgcgctcctccgccgggtccaggccgaggccggcaacgggaggagcgtggcactaataaagtccgacaaagacaaccgctatggattggattctgttgtgactcatgacggtacaaagatggcgtgctgggccttgtcagaactgtcaagttttcatgacaaattaggaattgaggcctataataagatgttataggtatcgatgaggcccaattcttcgacgatctttatgatttctgctgcaaagctgcagatcgtgatggaaaaattgtagttgttgctggcctagatggtgactacaaacggagaaagttcggttcaattcttgatattgttcctctggctgactcggtcaccaagctaacagcacgctgtgagctatgtggtcgccgggcgttctttacactgaggaagacgcaggaaaccaagactgaactaattggaggagcagatgtgtatatgcctgtgtgcaggcagcactacatggatgggcagattgttattgaggccacaaggattgtgttggaccttgacagatccaccgtgacggcgaaagccttgaaataggccaatacctgacttctgcatgcagatttgcagtgtgtaacgatttatttatgatgacattggttgctgtcgagtgttgaagacgcacaccagttggtgaaaagctgttggccttgagatgctgccaccagcgagggaagccaaatgagttgatcccacaaagtactgttgagaagtttgtaaatatctaacagtgtttgggtttaaaatgcggacatgtatcgcttttcttatgcaattggcattgtcatttttattaagcaatcagatgcttggaatcagctgtacgaatttgtaccacaaaggaattgcattcaagtttgaaagtaaactaaggctatctccatcatgtaaatggatgtgtaaagtactgtttttcactgtagatcgtactgattgtagagtgtgtaatttgaaatggagattgagacataaaatgag

SEQ ID NO: 7957 - DNA, 581 bp, Zea Mays
atcctcagaacccctctgatgttgttttcacgttagaatgggaaccaatcggtgtcctaccttgtggcgagaagaaagataatttttactaccaagcttccgaatgggtcaagggcaagcaagtggaggaagtagtagccatcaagaacaccgagattgcgaagcacctgtctcttccaccagtgaagctccactgcagcatgctcgctgaggacgcgatcaaggccgctgtgaaggattacgaggcaaagaaagggaagaagatggccaaggcagaggagcaggacaccccatgcccgtaagagcgacatgtagtaacctgaagcgagcagagagtactgtatgtagtatgtaacgggtaacgagcgaggtactcgtgtgtgcctaaagaagcatgtatgtaatgtaaagctaggtaacaacgatgtttgggttttcatagaataagcaaccttgtcgcgcgtagtgttttttttcctgctctgcacataaataaggtctgcccgttgctctttatctgcttagtcggagcatgcatgcttagattgatcaagcaatgctgttgagattaatccccggtt

SEQ ID NO: 7958 - DNA, 600 bp, Zea Mays
ctttttgttagccaattgcattgactaggttgtctgcaaaacatgtaccgcagaagtataaatctaaaaagtgttacgttagtacttagtgatatgcattaagttcagggtttgatctagctaccgcactacatccaaatatgcagtatgcacttacatttcttgtttgttcaagcttttcatcatgctaaaatattttcctattgagtcaaaagggaggcaacaaaagctgtaagtagtcggcagagttgccaccatatgtttctgttgtttctcggcacaatgcataatgatgtgcttcaatgcatttgacgaggaagctgacctcgatgttcttgaccatccagttctgaatttgttctattacctgcttgtggagattctcccttcatctcttgtcctgtacattctaaggaggattcctgcaaagctacggctatcccagtatcaccccgtcagcagcagctagagacgaggcattaccatctgctgagccaaaaatggtgactgctgtcaagctatgaaaaatcaactgcaacgccctctatataatatttgtattgattcactgagcacattaaatttaccagagcaaagtac

SEQ ID NO: 7959 - DNA, 589 bp, Zea Mays
ccgccgccctcttgttcgtcttcggtgcggtcgcggcctccagtgcccagcgccaccgccgctccaccaccgccgctccatcttctatcccgccggcggcctccagccctgcgccatccccatttgtgcggcctctaccgtccctacccccgcacagttcgtgcaaccgactcccccctcttcagtccccacgtcgtccactactgcatgcttcctccccacgacctccacttcctcagacaccttatagagctcgatgaagataaaccgggagcatgtgtggactctatctcgtccgagcacgcgttttcaccagagtcgggttcctgtaccacgccgccgcgccgggcctctacagtgttcgagcgcgcctgcagtggaccgagggggcgctcagcagaggcgaggaggggcttgctcggccgacaactgggactgcgcaggctacaaggggagtagtgaagatcgacggcgagttgctccacgaccgatctctcccgcttgaggagtaagttgctcttgcggtagttcccccaactgtcaccatgcagtacgaggagggtaagactgtggacctctatgtccccag

SEQ ID NO: 7960 - DNA, 495 bp, Zea Mays
atgaagagcgtcttggtcacgccgacggcgcacgtggtgccgagcagcttgttcttgtcggcgatgccggcgctctggaacacgcgcgggctgtagagcaccaccgagtcgatgcccgacgactgctggaagaagtggatgccgagcgccgacaggaggatgcgccggacggccggcgtcggggagaggatcagctctttccacacgcgctcctcgccgccggtccgcttgggcaccgcgacgacgtccccgtcgaggtcagcggggatgccggccgcctccttgatgtccgcgaggcgcagagcagcctcctccggcgtgtcggaggtcttgccgagcaccactttggcgtcggcgagacggcccttcatgaccaaccaccgtggggactcgggcatgccgagcaccatgagcgcgaggacgacggaaggcgcggcgccgacgccgagcataaggcgccagccgaccttcaagctgaggtgggagaaggcgtag

SEQ ID NO: 7961 - DNA, 463 bp, Zea Mays
ttcaaacttgttaccactgttattcgagtgtgaatcattatcattaccatttacgttacaaaatgtgaaccaaacagtacaaacgttagctagctttttttcataccgagtacaaaccaacaaccatgcatgcatattggtttgactccggagtccatacatcacccttttttttacttatacacgatacacgtaaacatacacgtattgcaagtccaataatttcctacttagccgtacatacaagaagccaaaaaggtcaaacaagaaagttatccgctcgcaataagtactcctatactagtactagtagttttgaacataaaaaagccgcgcgtctggcggacgcgcggtacggtcaccaccgccgcgcaatcttctcgtcttcttattagttcttattaattactcgatcagttcgttcgtctcagatcgatatcattactagtggccgtcgatgaca

SEQ ID NO: 7962 - DNA, 6274 bp, Zea Mays
aaaaaatggtattgtgttgccgcggagctgctggagattcatctggcaacggcgaaactgtccgtttttttaagaccgtttgtagctgcgtctgccctagttgaagggcggtccaatcgcagtttcacactgccgccgccacggcccacggcgccacgccctgttgcccgtttcgtctcccgtccccttcctagtctccccccaaaacaagaagcgggctggcggctgcagtttcccgcctgctcgcacattggcgcgaaatttgccgagctaccttgcgcgctcccttcccgcatcccagcaataacactatctacagtgtaagccaaagttcctagtccccctcccctccgctcccttctctctcctcctcacggacgtcagagctccttccccattccggcgttgccaagaaggccggtttccgggccctgtcttccgctacctcgccggccgcctttcaccgtcatacaaggaaataggaaatatttttctgtctgtaccattgctttccagacccacaatgcctgcttctgctcacaaaaatctcgattctggttgtcctaggagatctacaaggtttaaggatattcatgtagtttatgaagattctgacagggatccttcttcttttaagaggatcaaaactgaagtaattgattctgaactaagtgttggttctgtcagtgacaaggatagtgaacacaattgtcatgatgtattactcaaggatctcaggactcagtgtaaagctaagaatcggaagatttcaaaaatcacattggaaggatgtggcattaagaatcaggttaaaacagaagatgacattgatcttgataagcctattgttgcattgaaacagaagaggctgaaaacatctcctgctaaggctaatataaagatggatgcgctaagatcttctccatgtgctgctaaagagaaagatacaacatcagccagagacaagattcttagttctgcacagactttcctgctgaaagcaacaatgcaagaccgaggattagagaagcctggaaggagaattgcagaactggagcagtctaaagttgttattgattctgctgaagaaatagttggggagcaaatttattgtgctgaagtgaacaatacagctggagttctagcgggttgtgtaaaacctgatgtactatatgaaataaaaactgaagatacaaattattctgaatttggaacttctatgtgttccataaagaatcctgatcattcatcctttgagctgcaacagaagctggtggatgatgatgactgtgtgcctccattttgtttcatgacccgaccagctcaattagctgatgtttctgatcattcctgcgaacaaacctgcagttccaaagaaaacaattctgatgacattacagctgcaaaggcaactgatgttgtttcttcattggatctcactgatgaagtgagaaatcatcagaaaacatctgaaaatataactaatttagatgtggataagtcttctactgcaaatggacttatggcttctttcagtgagtcctgccatgaccgtatagataaagatgagcaatggaatttatttgcccatggggaatgaacctgcaaagattttggaagagttgtctcctattgatgagtctagcacagatactcaatctgatttgtgtagaagcacagaaatgaatttcacttcacttgagggggttgtacggatggaggctgagggccaattggattcaatagtctgctgtggtgtaagaccaaagcatatgttactagatatggaaattggacatacagccactggtacattcacctttgacaagactatcgacttagctcatcctgccaattttgttgcacaagatggaaggctagaaagtatagtatatgatgttttgaataatcatgcacaaaggacaacctctaaaagtaaatcttctgttggacttccagatactgctgtgcttcagagctcacttattgagttcactgacaattgtctggaagataaaagggcttcagatgataaattttcacatcccaataatgtggacttgccattgaaggatacgttaaattctacaatagactatgacatttgtagatctattaataatgaaggatcagaagaagaaatagtgcctcaacatcagttataccagtcatgtagtgataagttcaaccttagcagtgtcatgccagagatctctaatgctgaaaaatcacaaaaattatctgctggaactcaaaattcttctgctacttctttggaaactgacggacgaattaaaaggccaaatttttttgtggatgaggaatcaattgaagaacatgctccaaaagtattactgtccaagagaaagattatgtcaccaacgtctcaggagaagctttacagtgctgtgactggtattgatttgtgtgatggagtccaaagatcgaatagcaaaatcattattgaagattgtgacaaaactacaatatcattgcctcagccagcacacatgcaaggcaaatcaatgttccacacagacaggagacttaaggacaggacatctgtctcccctacaagcaaaggacttctgaagtcaacaggatccccgcccaatcaacagacttgttcttgcatgagaagttcgccagtggtcttagacactgagaaagctgttgagttttcacaaagacagatgcatgatatagaaaatattgctgcaaagcttatcaggagcttgaaacacatgaaaagtatagtggatgaaagtttgtcaacagaagcatactctttacttcctaattttaacattgcccagatcagagcagcctctgaggatgcattagaagtggagaggactacgaggaaatggctgtcgataatgaacaaagactgcagtcgcttttgtaaaatattgagcctagcaaagaagaatgatgtttctcatcctgaagcgccaaggaaacaaagaaaaataacgtttgcagatgaagctggaggaatgctctgccatgttaagttttttaaggatggacaagcctctctttctgaatgccagagtgatttataggcactaagctggtcttcatcatgaaatttgatcagaaaggaaaccttgttgacaacagaatataatcaaacaagctgctcagctcagatggaccaaaataatgaacgcacgcacagtatattgaaccaaaatagtgaacgcacagtagaaaacagacggagaagttagcgcatgttgaacgcacagtatgtattttactgtaaattaattgatgacattgttgtcccaactcaggtattatccttgtatgttgagttcaagagtccatgtaaagcggcaatttttacaatgttcgctgaggccacaagtatttgtaacccagaattgtagcctctgtaatacaattattggatactgttggtccaaagtgctttatttgaaggaactatttaagtttcagtaataggaatattctcttttaagttatactaagttttagattagtacgtaataaaaataaatctctactactaattataagcataacgtaggcgtccacacccccacggtggtgcacgttctgccgcccgcgcatcccgcccgcggccgcaccttgccccgcatcacgcagtccaggcgcaattcctgctcgcgaaggtttcgggaaaggttgaacaccgcatttcgcctccggtgtctgtctgcctgcctggctcgtgctcctcggcgtcgccctcacccccatctcgaggccgccaccccgccgccatcctggctcaccccacgacgcaaatctgtgtgccgcccctcccctcccatatcgccatctctcctcccctccccggtcaccacccatacctcagccacctcggcggttgtgctaggggcgatggtggtggaggctgcggtcgcagctgtgttagtggaggagatgtggtggcggcagctagacagcatcgtgagcgcggtgtcgtttgggctcatgtccatgttccttgccattgccatcctcgagcacttcctccgccccctggcccacacgctcgagcacgcgccgccccgggggatccgccaccgcctcctcctcttcctcagccgtggcggtgagcgcagcgccgcccccagtttagatcttgaggcggcgacgaagcttcaagcccacgcgcccctcgagatggggccgatgcggacgcggatccgaaactggaccatggggccgacggggtggccgcgtggtgggtgtgggtcgcgctcaccgtctgcgttgatgtcgtcggcgtcggtctcgcgctcgtcgggttcctctactgaacaaggtttctagggattccccggtttctaggaattccgtcgtcgcttggcgctgccctgttatcgtaggtgtcgccagctgccggtcctgtggcccgtgcaggtgcagccatgcccttccatggtgtgccacaccagctctcggaggtgcacaagaagcgcacgctctaccatcccgagttgccctctgcctccaggtacgcacctcctcgttacggcggtcgaaatgttcatgaacgcgagctctcagaggtgtagaagaagcgcacgctcagaggtgcagaacagatacgcacctcctccagagcatttcgtttgttactcatccatcggacatgcatttggtcccaaaaaaagggtcaagctcctatcactgttcatcatttggaatctttgagaactacaagtttgtagcggctcatttatctcttcaaaatcctaccagcacgtggtagtaaaatatagatgataatttagttgtttgtcaggatgaagcttgctaacgaacaaaactagatatctccgccactagcactgatggcgagaccgccccggtgcatcttaaggggcgagagggcaggggaaaagcagcagcagcaaaactggtcaggggccagcacaccgagatccaagcatttcactatcgagcagcggagaaggacaacgataaatgacaggtatgcatcttgactagctcgctgagggggatggcttggtggatctaatgttcgtttgcttgtatcgctactaggcctgctgttgatcgaaaggagcaagcgagcaacaccagtggactacccttgaaaattgtgacctggcaagtctaaaagccaccaagctgaggatcgcaagctttgtccacggttcagacggcctgaggatcgcaagcttcgtccacggttcagacggccactgtggatcgaggtgcggcaggtcggggcgccgccgcggattgtaggctcgaccgagactacttcgtcaccaacgtcctcgtatgtaagagtgaaaattatttgcctattgccgacatacttatctaaagtccaacttcttatcaaataaagtatgtgaagatttacgtgtttttttttctgttttcataccaccatattacctccttaaatggttttcccaggttttagcaagcatcactataaagcacgagtgaaggttctcccaggttttaataagaatagctacaaagcctactctgaataaatttgtctagatgttttagtaggttcaactgtaaacatccaatagttaatgtacctaccacttttaagaaatcacttctttgagttgttcacttgttgtagaggttaatgccaccaatgctgggacagaaacaagtgagttgaagcaagatcgacagatttgataaaggcttcaatgttaaacattgtcacaggttctcatatatgggtggaagataaagatttgtcctgggttgatggtgaggtatttcgaattgatggccaaaacgcccatgttcgcacaaccaaggggaaggcgggatggcgtattgtggcggctacgagggaccgatgttcctgtgtggcagtgacaacgataccgtggagccaaggcaatgtcagcaagctgatttttcagattggaatctatggttctttttaaagatcgaatatgttctagcatcttaaaaagatttgtcagaatgtaaacatttgttctgaggtcatttaggcctcaaacagaatttcttggacttatttcgttggagggaatgggacatcttgagatctaaatgtgtatagaagatccaaatgtgtatagaacatatatttttatgggtatcaaacatgattgtgtgcaaagcacggacatggtactataacaatgaaacacatatttgtacataattcatcatggtattatatgttgccgttgcaacgcacgggcactcacctagtatcttataatttagaaaggag

SEQ ID NO: 7963 - DNA, 5342 bp, Zea Mays
aaaaaatggtattgtgttgccgcggagctgctggagattcatctggcaacggcgaaactgtccgtttttttaagaccgtttgtagctgcgtctgccctagttgaagggcggtccaatcgcagtttcacactgccgccgccacggcccacggcgccacgccctgttgcccgtttcgtctcccgtccccttcctagtctccccccaaaacaagaagcgggctggcggctgcagtttcccgcctgctcgcacattggcgcgaaatttgccgagctaccttgcgcgctcccttcccgcatcccagcaataacactatctacagtgtaagccaaagttcctagtccccctcccctccgctcccttctctctcctcctcacggacgtcagagctccttccccattccggcgttgccaagaaggccggtttccgggccctgtcttccgctacctcgccggccgcctttcaccgtcatacaaggaaataggaaatatttttctgtctgtaccattgctttccagacccacaatgcctgcttctgctcacaaaaatctcgattctggttgtcctaggagatctacaaggtttaaggatattcatgtagtttatgaagattctgacagggatccttcttcttttaagaggatcaaaactgaagtaattgattctgaactaagtgttggttctgtcagtgacaaggatagtgaacacaattgtcatgatgtattactcaaggatctcaggactcagtgtaaagctaagaatcggaagatttcaaaaatcacattggaaggatgtggcattaagaatcaggttaaaacagaagatgacattgatcttgataagcctattgttgcattgaaacagaagaggctgaaaacatctcctgctaaggctaatataaagatggatgcgctaagatcttctccatgtgctgctaaagagaaagatacaacatcagccagagacaagattcttagttctgcacagactttcctgctgaaagcaacaatgcaagaccgaggattagagaagcctggaaggagaattgcagaactggagcagtctaaagttgttattgattctgctgaagaaatagttggggagcaaatttattgtgctgaagtgaacaatacagctggagttctagcgggttgtgtaaaacctgatgtactatatgaaataaaaactgaagatacaaattattctgaatttggaacttctatgtgttccataaagaatcctgatcattcatcctttgagctgcaacagaagctggtggatgatgatgactgtgtgcctccattttgtttcatgacccgaccagctcaattagctgatgtttctgatcattcctgcgaacaaacctgcagttccaaagaaaacaattctgatgacattacagctgcaaaggcaactgatgttgtttcttcattggatctcactgatgaagtgagaaatcatcagaaaacatctgaaaatataactaatttagatgtggataagtcttctactgcaaatggacttatggcttctttcagtgagtcctgccatgaccgtatagataaagatgagcaatggaatttatttgcccatggggaatgaacctgcaaagattttggaagagttgtctcctattgatgagtctagcacagatactcaatctgatttgtgtagaagcacagaaatgaatttcacttcacttgagggggttgtacggatggaggctgagggccaattggattcaatagtctgctgtggtgtaagaccaaagcatatgttactagatatggaaattggacatacagccactggtacattcacctttgacaagactatcgacttagctcatcctgccaattttgttgcacaagatggaaggctagaaagtatagtatatgatgttttgaataatcatgcacaaaggacaacctctaaaagtaaatcttctgttggacttccagatactgctgtgcttcagagctcacttattgagttcactgacaattgtctggaagataaaagggcttcagatgataaattttcacatcccaataatgtggacttgccattgaaggatacgttaaattctacaatagactatgacatttgtagatctattaataatgaaggatcagaagaagaaatagtgcctcaacatcagttataccagtcatgtagtgataagttcaaccttagcagtgtcatgccagagatctctaatgctgaaaaatcacaaaaattatctgctggaactcaaaattcttctgctacttctttggaaactgacggacgaattaaaaggccaaatttttttgtggatgaggaatcaattgaagaacatgctccaaaagtattactgtccaagagaaagattatgtcaccaacgtctcaggagaagctttacagtgctgtgactggtattgatttgtgtgatggagtccaaagatcgaatagcaaaatcattattgaagattgtgacaaaactacaatatcattgcctcagccagcacacatgcaaggcaaatcaatgttccacacagacaggagacttaaggacaggacatctgtctcccctacaagcaaaggacttctgaagtcaacaggatccccgcccaatcaacagacttgttcttgcatgagaagttcgccagtggtcttagacactgagaaagctgttgagttttcacaaagacagatgcatgatatagaaaatattgctgcaaagcttatcaggagcttgaaacacatgaaaagtatagtggatgaaagtttgtcaacagaagcatactctttacttcctaattttaacattgcccagatcagagcagcctctgaggatgcattagaagtggagaggactacgaggaaatggctgtcgataatgaacaaagactgcagtcgcttttgtaaaatattgagcctagcaaagaagaatgatgtttctcatcctgaagcgccaaggaaacaaagaaaaataacgtttgcagatgaagctggaggaatgctctgccatgttaagttttttaaggatggacaagcctctctttctgaatgccagagtgatttataggcactaagctggtcttcatcatgaaatttgatcagaaaggaaaccttgttgacaacagaatataatcaaacaagctgctcagctcagatggaccaaaataatgaacgcacgcacagtatattgaaccaaaatagtgaacgcacagtagaaaacagacggagaagttagcgcatgttgaacgcacagtatgtattttactgtaaattaattgatgacattgttgtcccaactcaggtattatccttgtatgttgagttcaagagtccatgtaaagcggcaatttttacaatgttcgctgaggccacaagtatttgtaacccagaattgtagcctctgtaatacaattattggatactgttggtccaaagtgctttatttgaaggaactatttaagtttcagtaataggaatattctcttttaagttatactaagttttagattagtacgtaataaaaataaatctctactactaattataagcataacgtaggcgtccacacccccacggtggtgcacgttctgccgcccgcgcatcccgcccgcggccgcaccttgccccgcatcacgcagtccaggcgcaattcctgctcgcgaaggtttcgggaaaggttgaacaccgcatttcgcctccggtgtctgtctgcctgcctggctcgtgctcctcggcgtcgccctcacccccatctcgaggccgccaccccgccgccatcctggctcaccccacgacgcaaatctgtgtgccgcccctcccctcccatatcgccatctctcctcccctccccggtcaccacccatacctcagccacctcggcggttgtgctaggggcgatggtggtggaggctgcggtcgcagctgtgttagtggaggagatgtggtggcggcagctagacagcatcgtgagcgcggtgtcgtttgggctcatgtccatgttccttgccattgccatcctcgagcacttcctccgccccctggcccacacgctcgagcacgcgccgccccgggggatccgccaccgcctcctcctcttcctcagccgtggcggtgagcgcagcgccgcccccagtttagatcttgaggcggcgacgaagcttcaagcccacgcgcccctcgagatggggccgatgcggacgcggatccgaaactggaccatggggccgacggggtggccgcgtggtgggtgtgggtcgcgctcaccgtctgcgttgatgtcgtcggcgtcggtctcgcgctcgtcgggttcctctactgaacaaggtttctagggattccccggtttctaggaattccgtcgtcgcttggcgctgccctgttatcgtaggtgtcgccagctgccggtcctgtggcccgtgcaggtgcagccatgcccttccatggtgtgccacaccagctctcggaggtgcacaagaagcgcacgctctaccatcccgagttgccctctgcctccaggtacgcacctcctcgttacggcggtcgaaatgttcatgaacgcgagctctcagaggtgtagaagaagcgcacgctcagaggtgcagaacagatacgcacctcctccagagtaagaattttctctgcttcccggttaggaagaaacaacattctgatttaatctgtattttttccaaacaaattgacatatctaggagcatttgttgcagcttttgagctctaattatttaaagttcaaacaactcaatctatttgattttaattgtaattacaacgcagtagtattgttctattgtcttattgtgagtggttcatggttcaaacttttttgacgccttaaaaaatttatatctccaactttttctttggtgcaaaatttggcccagtacagacaaaagcttttatgacatggtttagtagccatctgtttggcatttcgtttgttactcatccatcggacatgcatttggtcccaaaaaaagggtcaagctcctatcactgttcatcatttggaatctttgagaactacaagtttgtagcggctcatttatctcttcaaaatcctaccagcacgtggtagtaaaatatagatgataatttagttgtttgtcaggatgaagcttgctaacgaacaaaactagatatctccgccactagcactgatggcgagaccgccccggtgcatcttaaggggcgagagggcaggggaaaagcagcagcagcaaaactggtcaggggccagcacaccgagatccaagcatttcactatcgagcagcggagaaggacaacgataaatgacaggtggtccttaacaaccccaatgtg

SEQ ID NO: 7964 - DNA, 4616 bp, Zea Mays
aaaaaatggtattgtgttgccgcggagctgctggagattcatctggcaacggcgaaactgtccgtttttttaagaccgtttgtagctgcgtctgccctagttgaagggcggtccaatcgcagtttcacactgccgccgccacggcccacggcgccacgccctgttgcccgtttcgtctcccgtccccttcctagtctccccccaaaacaagaagcgggctggcggctgcagtttcccgcctgctcgcacattggcgcgaaatttgccgagctaccttgcgcgctcccttcccgcatcccagcaataacactatctacagtgtaagccaaagttcctagtccccctcccctccgctcccttctctctcctcctcacggacgtcagagctccttccccattccggcgttgccaagaaggccggtttccgggccctgtcttccgctacctcgccggccgcctttcaccgtcatacaaggaaataggaaatatttttctgtctgtaccattgctttccagacccacaatgcctgcttctgctcacaaaaatctcgattctggttgtcctaggagatctacaaggtttaaggatattcatgtagtttatgaagattctgacagggatccttcttcttttaagaggatcaaaactgaagtaattgattctgaactaagtgttggttctgtcagtgacaaggatagtgaacacaattgtcatgatgtattactcaaggatctcaggactcagtgtaaagctaagaatcggaagatttcaaaaatcacattggaaggatgtggcattaagaatcaggttaaaacagaagatgacattgatcttgataagcctattgttgcattgaaacagaagaggctgaaaacatctcctgctaaggctaatataaagatggatgcgctaagatcttctccatgtgctgctaaagagaaagatacaacatcagccagagacaagattcttagttctgcacagactttcctgctgaaagcaacaatgcaagaccgaggattagagaagcctggaaggagaattgcagaactggagcagtctaaagttgttattgattctgctgaagaaatagttggggagcaaatttattgtgctgaagtgaacaatacagctggagttctagcgggttgtgtaaaacctgatgtactatatgaaataaaaactgaagatacaaattattctgaatttggaacttctatgtgttccataaagaatcctgatcattcatcctttgagctgcaacagaagctggtggatgatgatgactgtgtgcctccattttgtttcatgacccgaccagctcaattagctgatgtttctgatcattcctgcgaacaaacctgcagttccaaagaaaacaattctgatgacattacagctgcaaaggcaactgatgttgtttcttcattggatctcactgatgaagtgagaaatcatcagaaaacatctgaaaatataactaatttagatgtggataagtcttctactgcaaatggacttatggcttctttcagtgagtcctgccatgaccgtatagataaagatgagcaatggaatttatttgcccatggggaatgaacctgcaaagattttggaagagttgtctcctattgatgagtctagcacagatactcaatctgatttgtgtagaagcacagaaatgaatttcacttcacttgagggggttgtacggatggaggctgagggccaattggattcaatagtctgctgtggtgtaagaccaaagcatatgttactagatatggaaattggacatacagccactggtacattcacctttgacaagactatcgacttagctcatcctgccaattttgttgcacaagatggaaggctagaaagtatagtatatgatgttttgaataatcatgcacaaaggacaacctctaaaagtaaatcttctgttggacttccagatactgctgtgcttcagagctcacttattgagttcactgacaattgtctggaagataaaagggcttcagatgataaattttcacatcccaataatgtggacttgccattgaaggatacgttaaattctacaatagactatgacatttgtagatctattaataatgaaggatcagaagaagaaatagtgcctcaacatcagttataccagtcatgtagtgataagttcaaccttagcagtgtcatgccagagatctctaatgctgaaaaatcacaaaaattatctgctggaactcaaaattcttctgctacttctttggaaactgacggacgaattaaaaggccaaatttttttgtggatgaggaatcaattgaagaacatgctccaaaagtattactgtccaagagaaagattatgtcaccaacgtctcaggagaagctttacagtgctgtgactggtattgatttgtgtgatggagtccaaagatcgaatagcaaaatcattattgaagattgtgacaaaactacaatatcattgcctcagccagcacacatgcaaggcaaatcaatgttccacacagacaggagacttaaggacaggacatctgtctcccctacaagcaaaggacttctgaagtcaacaggatccccgcccaatcaacagacttgttcttgcatgagaagttcgccagtggtcttagacactgagaaagctgttgagttttcacaaagacagatgcatgatatagaaaatattgctgcaaagcttatcaggagcttgaaacacatgaaaagtatagtggatgaaagtttgtcaacagaagcatactctttacttcctaattttaacattgcccagagcagcctctgaggatgcattagaagtggagaggactacgaggaaatggctgtcgataatgaacaaagactgcagtcgcttttgtaaaatattgagcctagcaaagaagaatgatgtttctcatcctgaagcgccaaggaaacaaagaaaaataacgtttgcagatgaagctggaggaatgctctgccatgttaagttttttaaggatggacaagcctctctttctgaatgccagagtgatttataggcactaagctggtcttcatcatgaaatttgatcagaaaggaaaccttgttgacaacagaatataatcaaacaagctgctcagctcagatggaccaaaataatgaacgcacgcacagtatattgaaccaaaatagtgaacgcacagtagaaaacagacggagaagttagcgcatgttgaacgcacagtatgtattttactgtaaattaattgatgacattgttgtcccaactcaggtattatccttgtatgttgagttcaagagtccatgtaaagcggcaatttttacaatgttcgctgaggccacaagtatttgtaacccagaattgtagcctctgtaatacaattattggatactgttggtccaaagtgctttatttgaaggaactatttaagtttcagtaataggaatattctcttttaagttatactaagttttagattagtacgtaataaaaataaatctctactactaattataagcataacgtaggcgtccacacccccacggtggtgcacgttctgccgcccgcgcatcccgcccgcggccgcaccttgccccgcatcacgcagtccaggcgcaattcctgctcgcgaaggtttcgggaaaggttgaacaccgcatttcgcctccggtgtctgtctgcctgcctggctcgtgctcctcggcgtcgccctcacccccatctcgaggccgccaccccgccgccatcctggctcaccccacgacgcaaatctgtgtgccgcccctcccctcccatatcgccatctctcctcccctccccggtcaccacccatacctcagccacctcggcggttgtgctaggggcgatggtggtggaggctgcggtcgcagctgtgttagtggaggagatgtggtggcggcagctagacagcatcgtgagcgcggtgtcgtttgggctcatgtccatgttccttgccattgccatcctcgagcacttcctccgccccctggcccacacgctcgagcacgcgccgccccgggggatccgccaccgcctcctcctcttcctcagccgtggcggtgagcgcagcgccgcccccagtttagatcttgaggcggcgacgaagcttcaagcccacgcgcccctcgagatggggccgatgcggacgcggatccgaaactggaccatggggccgacggggtggccgcgtggtgggtgtgggtcgcgctcaccgtctgcgttgatgtcgtcggcgtcggtctcgcgctcgtcgggttcctctactgaacaaggtttctagggattccccggtttctaggaattccgtcgtcgcttggcgctgccctgttatcgtaggtgtcgccagctgccggtcctgtggcccgtgcaggtgcagccatgcccttccatggtgtgccacaccagctctcggaggtgcacaagaagcgcacgctctaccatcccgagttgccctctgcctccaggcatttcgtttgttactcatccatcggacatgcatttggtcccaaaaaaagggtcaagctcctatcactgttcatcatttggaatctttgagaactacaagtttg

SEQ ID NO: 7965 - DNA, 2051 bp, Zea Mays
cgcggagtgcagtaatacggcacgccgttcaatctaccgggacggcgagacggagaatagaagacgtcagcactcagcagttcagcactgacccgtcggccgtcgccctcccggctcgcaaccgcatctctctcggcttctggcctcttcctagttcctaactaccaccgccacctctaccactggcctcaatctgcaaaccctagccctcgtcgccggcggccatggccgagaccgtcgacgacaaggtcagctactttcaggccgtcaccggcatctccaacacggacctctgcacggagatcctcgccgcgcacaactgggacctgcagctcgcggtgtccaccatcaccgccaacccctcctcgccctccgcttcggcctccacctcctcgcgtgacccggccccttccgctccgttggcggtagatgcggagtacgtcgcgcccccgccgccgctgccgctgccgctgccgccccagcagcagccggggatcgcgtggaagctggtgacgctccccttccacgtggtctcgggtggggtcggcctcgtcgccggcacgttccgccttggcgcctgggtagccgggggcgtgctgtcccgctccctctccctcctcggcctcgcggggcaagccggcagcggtgaccgcctgctagagttgccgccgtcagctgccgaggcggccgacttcgtcgctgagttcgagcgcgagttcggcgctggccgcggcccgcgcttcgtggccgaggggttcgctgatgcgctgaagcgagcgcagcgggaattcaagcttctgttcgtgtacctccactcccctgatcacccggatacccctgccttctgcggtggctgcctctgcgctgaacccgtcgcggcctttatagatgagaacttcgttgcctggggcggtagcatcagaaggactgaaggattcaagatgagcaacagcctgaatgcgtcgagatttccgttttgtgctgtggtcatggcttctacaaaccagagaatcgtgctattgcagcaggttgaagggcccaaatcacctgaagagatgataacagttcttcaacgtgttgttgaagaatgtgctacatcacttgttgctgctaggattgaagctgaagagagactaaacaaccagcgattgcgtgaggaacaagatgctgcttacagagctgcacttgaagctgatcaggccagggaacgtgaaaggttagaggaactgaaaagacgtgaaagagaggctgcagaggctgagaaaaagcgtaaagaagaggaggaagctgtagcaagggcatcccaagaagcagctgagaaggaagctgctcttgcaaggaggaggcaagagaaggccatggctcttggagctgaacctgagaaaggaccaggtgttactcgggttctcataagattcccaactggagagcgcagagagcggagattctacagttctgcaaccgtcgcttccctctatgactatgtcgattctctagactgcatgaaagcggagaagtacaccctagtttcgaatttcccacgcgttacatatggtccagaaaagcaatccctgacgctggaggaagcaggcttgcatctgcaggcgagcttgtttatcgagatagaacaatgatgctgtaagctaaagaaaagccgaaactaaagtacagacgctcctttttcgaagttgttcagcgacagttaaggatttccagatgtgcttcagggaggtaggcaaaactggaaggcttgtagccacaccgccatacatatgatttgctcccgttgtcgttgagcagccggagatccttatgtgttgtggattctgaaacttcagagtttccgcggttctcctgatcctctcgatcagagctgggttgcttttgcagcaaaaagtcaggcctgacggtttttaggcgccagaacagtgacaagcctggcctggcctggtcctgttagccgaagtatgatgaagtatttgtttgcctatccttctgacaagttcggtatccaaaaaatggcattttgagagttccaaactggagacaag

SEQ ID NO: 7966 - DNA, 2132 bp, Zea Mays
gaattcttcgcccgttttctttgccccacagtcgtaaaataaaatctcgtagagactgacgcgttgtcgcggagtgcagtaatacggcacgccgttcaatctaccgggacggcgagacggagaatagaagacgtcagcactcagcagttcagcactgacccgtcggccgtcgccctcccggctcgcaaccgcatctctctcggcttctggcctcttcctagttcctaactaccaccgccacctctaccactggcctcaatctgcaaaccctagccctcgtcgccggcggccatggccgagaccgtcgacgacaaggtcagctactttcaggccgtcaccggcatctccaacacggacctctgcacggagatcctcgccgcgcacaactgggacctgcagctcgcggtgtccaccatcaccgccaacccctcctcgccctccgcttcggcctccacctcctcgcgtgacccggccccttccgctccgttggcggtagatgcggagtacgtcgcgcccccgccgccgctgccgctgccgctgccgccccagcagcagccggggatcgcgtggaagctggtgacgctccccttccacgtggtctcgggtggggtcggcctcgtcgccggcacgttccgccttggcgcctgggtagccgggggcgtgctgtcccgctccctctccctcctcggcctcgcggggcaagccggcagcggtgaccgcctgctagagttgccgccgtcagctgccgaggcggccgacttcgtcgctgagttcgagcgcgagttcggcgctggccgcggcccgcgcttcgtggccgaggggttcgctgatgcgctgaagcgagcgcagcgggaattcaagcttctgttcgtgtacctccactcccctgatcacccggatacccctgccttctgcggtggctgcctctgcgctgaacccgtcgcggcctttatagatgagaacttcgttgcctggggcggtagcatcagaaggactgaaggattcaagatgagcaacagcctgaatgcgtcgagatttccgttttgtgctgtggtcatggcttctacaaaccagagaatcgtgctattgcagcaggttgaagggcccaaatcacctgaagagatgataacagttcttcaacgtgttgttgaagaatgtgctacatcacttgttgctgctaggattgaagctgaagagagactaaacaaccagcgattgcgtgaggaacaagatgctgcttacagagctgcacttgaagctgatcaggccagggaacgtgaaaggttagaggaactgaaaagacgtgaaagagaggctgcagaggctgagaaaaagcgtaaagaagaggaggaagctgtagcaagggcatcccaagaagcagctgagaaggaagctgctcttgcaaggaggaggcaagagaaggccatggctcttggagctgaacctgagaaaggaccaggtgttactcgggttctcataagattcccaactggagagcgcagagagcggagattctacagttctgcaaccgtcgcttccctctatgactatgtcgattctctagactgcatgaaagcggagaagtacaccctagtttcgaatttcccacgcgttacatatggtccagaaaagcaatccctgacgctggaggaagcaggcttgcatctgcaggcgagcttgtttatcgagatagaacaatgatgctgtaagctaaagaaaagccgaaactaaagtacagacgctcctttttcgaagttgttcagcgacagttaaggatttccagatggtaatacaccacagtgcttcagggaggtaggcaaaactggaaggcttgtagccacaccgccatacatatgatttgctcccgttgtcgttgagcagccggagatccttatgtgttgtggattctgaaacttcagagtttccgcggttctcctgatcctctcgatcagagctgggttgcttttgcagcaaaaagtcaggcctgacggtttttaggcgccagaacagtgacaagcctggcctggcctggtcctgttagccgaagtatgatgaagtatttgtttgcctatccttctgacaagttcggtatccaaaaaatggcattttgagagttccaaactggagacaag

SEQ ID NO: 7967 - DNA, 1036 bp, Zea Mays
cgcggagtgcagtaatacggcacgccgttcaatctaccgggacggcgagacggagaatagaagacgtcagcactcagcagttcagcactgacccgtcggccgtcgccctcccggctcgcaaccgcatctctctcggcttctggcctcttcctagttcctaactaccaccgccacctctaccactggcctcaatctgcaaaccctagccctcgtcgccggcggccatggccgagaccgtcgacgacaaggtcagctactttcaggccgtcaccggcatctccaacacggacctctgcacggagatcctcgccgcgcacaactgggacctgcagctcgcggtgtccaccatcaccgccaacccctcctcgccctccgcttcggcctccacctcctcgcgtgacccggccccttccgctccgttggcggtagatgcggagtacgtcgcgcccccgccgccgctgccgctgccgctgccgccccagcagcagccggggatcgcgtggaagctggtgacgctccccttccacgtggtctcgggtggggtcggcctcgtcgccggcacgttccgccttggcgcctgggtagccgggggcgtgctgtcccgctccctctccctcctcggcctcgcggggcaagccggcagcggtgaccgcctgctagagttgccgccgtcagctgccgaggcggccgacttcgtcgctgagttcgagcgcgagttcggcgctggccgcggcccgcgcttcgtggccgaggggttcgctgatgcgctgaagcgagcgcagcgggaattcaagcttctgttcgtgtacctccactcccctgatcacccggatacccctgccttctgcggtggctgcctctgcgctgaacccgtcgcggcctttatagatgagaacttcgttgcctggggcggtagcatcagaaggactgaaggattcaagatgagcaacagcctgaatgcgtcgagatttccgttttgtgctgtggtcatggcttctacaaaccagagaatcgtgctattgcagcagaagcggat

SEQ ID NO: 7968 - DNA, 1205 bp, Zea Mays
ccagtcctctccctgccctagccgcccccactagttggagcagcagtagccacagcaccctcccccaggggaagagataaagctggaagacctctctgattgtgaaatcaaacgattccgtcaagctctggcctcaggtgagctcagtaagatgattgaaccgtggacaccttggtggaaaaaaccctcagccagatctatttcccttggcccggatggaagccagcttatcagacaagtaaacgcagaagacactgctgtaccatatccagatgcaaatactgaccaagaggctagcatcaacgaaatccctgaagggccagaatctcctctcccgtcactgaaacagttaacaaggacagagccatctcctttgcttgctgtccacttggttgacattctgtacagttactgcttcacacttcggctctacaacggtgattggcactcagatcctttgggtgcttccactgtcgccctgtcgatgtcgaaagtcatgggccaggatgctaaacctgagactgtacctgaagcactcgcagcctgcatcgaggagacatgctcaccagcttacaggcatactggtggtttcaggtttgctattggactcgtggacgatatcatcgccattctctccttgggacagaacgcacttatttgtgccctatgcgacttccatcgactcgttgaagttggtaagagcatgctcaaagtggagaaggtgggcaagacggagagggcacagggctctccaaagcttcgcagtgcagctaggaagctattcttcatgacttgttgggtccatgagcagccagatgaggcgtggccatctttagctcacatcgtccaggtgcagaaagcatctatggaggagttggagaccgggaattggaaggcggatagaaagagcaaaccacaatccgcggttcttatcgaggagctgtaggcatatggatgtaccactggaaactggatcgcgaagctctgtacccttgtgtatcgctcaggatgaatccaacgagagaccttgtccttgtaatgcagttagttgcttttgtgtacacttttttttttgaaaaaaattgtatttgttgaaatcctggttgaagcgatcctgctttactttgcttgttaagttgcgggctgatttaatccatgcgttggagcttatgcagttcagatattcttatgattgcaagtttgtg

SEQ ID NO: 7969 - DNA, 1385 bp, Zea Mays
ctgtggttaagccaacagaagaacaacaccaacatcggaggaatcttgcaatggtcatagtgttcaatgcactgaatccttcatgcgtgagaatgttatggacgagcttaagcagatgcaacctgaggatgaatcaaagaaaaagatgctagatatcctcaagcggctccacttggaagaagagatggcatcagatggtgaagatgagtccatgctatcagaggagcttattcaaaaagttatgtctggggaagagataaagctggaagacctctctgattgtgaaatcaaacgattccgtcaagctctggcctcaggtgagctcagtaagatgattgaaccgtggacaccttggtggaaaaaaccctcagccagatctatttcccttggcccggatggaagccagcttatcagacaagtaaacgcagaagacactgctgtaccatatccagatgcaaatactgaccaagaggctagcatcaacgaaatccctgaagggccagaatctcctctcccgtcactgaaacagttaacaaggacagagccatctcctttgcttgctgtccacttggttgacattctgtacagttactgcttcacacttcggctctacaacggtgattggcactcagatcctttgggtgcttccactgtcgccctgtcgatgtcgaaagtcatgggccaggatgctaaacctgagactgtacctgaagcactcgcagcctgcatcgaggagacatgctcaccagcttacaggcatactggtggtttcaggtttgctattggactcgtggacgatatcatcgccattctctccttgggacagaacgcacttatttgtgccctatgcgacttccatcgactcgttgaagttggtaagagcatgctcaaagtggagaaggtgggcaagacggagagggcacagggctctccaaagcttcgcagtgcagctaggaagctattcttcatgacttgttgggtccatgagcagccagatgaggcgtggccatctttagctcacatcgtccaggtgcagaaagcatctatggaggagttggagaccgggaattggaaggcggatagaaagagcaaaccacaatccgcggttcttatcgaggagctgtaggcatatggatgtaccactggaaactggatcgcgaagctctgtacccttgtgtatcgctcaggatgaatccaacgagagaccttgtccttgtaatgcagttagttgcttttgtgtacacttttttttttgaaaaaaattgtatttgttgaaatcctggttgaagcgatcctgctttactttgcttgttaagttgcgggctgatttaatccatgcgttggagcttatgcagttcagatattcttatgattgcaagtttgtg

SEQ ID NO: 7970 - DNA, 2628 bp, Zea Mays
gtcatctcatgtagtcggggttcttttgagcatttgtgtcatgcctttcagttaggtcaacatgttaggctcccttttccctcctcttctagagcaacaagcaattttgatctggttcactgtgatgtttggacatcccctgttctcatcatttctagcaataaatattacttgctcattctggatgattactctcatttcttgtggacttttccgttacgcttgaagtctgatatgtttcccacgctctctaacttcgcttaggtttccactcagtttggactcaccatccgggctgtccggtgtgacactgggcgggagtttgataactccgcgtcctgtgacttcttcctttcacacgatgttcagcggaggatgttgtgcccctacacttcttctcagaacaacaggattgagcgcatgattcgcaccacaaacaacgtcatgcactccttgttgttctagacctcccttttcgctcgctactgggctggccactgctacctatctgctcaatggcctcaccaaggcggttcatcaccccacccccctactttgctctctttggtacctctccctcctatgatcaccttcgcgtgttcgggtgcgcttgctatcctaatctctctctcactgctctcataagcttgcatcttgctccactcgtagcgtcttccttggctactctcctaatcataaggggtaccagtgccttgatctctccacccatagagtcctcgtctctgactttcccttctctgtctccccttccaccgcctcctcctctgagtacgacaacctccttgaggtggactctgtggttccccctcttgctcccttgcttcccacaccctcgtgtgcgatgcgctgtcaaggagtctcccgcgccgccacgtaggactgggcagaaaacccgataccagaagcccgatcccgaaaccaaacccaaataacccgaacccgaaaagctcaagaaacattttggtacgaacttccggtacccaaagtttttaagcaaattttgggtcagttgtaccggtacccgaatagacatactacccgaactggtgcctgacgttgaatcgctgtcgcctgtggttaagccaacagaagaacaacaccaacatcggaggaatcttgcaatgcttgcagcaggtagggtatggtaatgtcgcactggtgtcaatagtcttccctgacgacatcttggcaccccctggctctgataccacttgtcaggaaccacgccggagagacaaccttcagcaggttgccgacaaactcctacctcccagggtcatagtgttcaatgcactgaatccttcatgcgtgagaatgttatggacgagcttaagcagatgcaacctgaggatgaatcaaagaaaaagatgctagatatcctcaagcggctccacttggaagaagagatggcatcagatggtgaagatgagtccatgctatcagaggagcttattcaaaaagttatgtctggggaagagataaagctggaagacctctctgattgtgaaatcaaacgattccgtcaagctctggcctcaggtgagctcagtaagatgattgaaccgtggacaccttggtggaaaaaaccctcagccagatctatttcccttggcccggatggaagccagcttatcagacaagtaaacgcagaagacactgctgtaccatatccagatgcaaatactgaccaagaggctagcatcaacgaaatccctgaagggccagaatctcctctcccgtcactgaaacagttaacaaggacagagccatctcctttgcttgctgtccacttggttgacattctgtacagttactgcttcacacttcggctctacaacggtgattggcactcagatcctttgggtgcttccactgtcgccctgtcgatgtcgaaagtcatgggccaggatgctaaacctgagactgtacctgaagcactcgcagcctgcatcgaggagacatgctcaccagcttacaggcatactggtggtttcaggtttgctattggactcgtggacgatatcatcgccattctctccttgggacagaacgcacttatttgtgccctatgcgacttccatcgactcgttgaagttggtaagagcatgctcaaagtggagaaggtgggcaagacggagagggcacagggctctccaaagcttcgcagtgcagctaggaagctattcttcatgacttgttgggtccatgagcagccagatgaggcgtggccatctttagctcacatcgtccaggtgcagaaagcatctatggaggagttggagaccgggaattggaaggcggatagaaagagcaaaccacaatccgcggttcttatcgaggagctgtaggcatatggatgtaccactggaaactggatcgcgaagctctgtacccttgtgtatcgctcaggatgaatccaacgagagaccttgtccttgtaatgcagttagttgcttttgtgtacacttttttttttgaaaaaaattgtatttgttgaaatcctggttgaagcgatcctgctttactttgcttgttaagttgcgggctgatttaatccatgcgttggagcttatgcagttcagatattcttatgattgcaagtttgtg

SEQ ID NO: 7971 - DNA, 1844 bp, Zea Mays
actctcgaatctcgactgtcggtgctgaactcgattactcatcactactcgtccttcgccgtttacctgtctcaggagtagtacgcagagtcgctggacggtggacgctagcccaattgactgcttcagaatttacagcctgctttcgattggataatgatcagcccattccgtattcaagttccaagcccaaatgcaaatccgatgcatgggccatgaccaccaatgggccttcgccgagcatcgagaagcctccgcgcccgccgcacgccggaggaaaggaactccccccgtccccaaattcccaaagacagtaccgccgagaaggacagagagtcagagactgagagactggaagcgcccgcgcgtgccggcgatggagagggacgtcgtgctctccgcacccgaggccgctgggtcctcgtcctcccccgcctcctcgtcgtactcctccttcgccgagaccagggtcatctgccgcgtgtgtcagaagcagttcgcgcagtacacttgcccccgctgtaacgcccggtactgctcgctctcgtgctacaaggcttgcagcaggtagggtatggtaatgtcgcactggtgtcaatagtcttccctgacgacatcttggcaccccctggctctgataccacttgtcaggaaccacgccggagagacaaccttcagcaggttgccgacaaactcctacctcccaggggaagagataaagctggaagacctctctgattgtgaaatcaaacgattccgtcaagctctggcctcaggtgagctcagtaagatgattgaaccgtggacaccttggtggaaaaaaccctcagccagatctatttcccttggcccggatggaagccagcttatcagacaagtaaacgcagaagacactgctgtaccatatccagatgcaaatactgaccaagaggctagcatcaacgaaatccctgaagggccagaatctcctctcccgtcactgaaacagttaacaaggacagagccatctcctttgcttgctgtccacttggttgacattctgtacagttactgcttcacacttcggctctacaacggtgattggcactcagatcctttgggtgcttccactgtcgccctgtcgatgtcgaaagtcatgggccaggatgctaaacctgagactgtacctgaagcactcgcagcctgcatcgaggagacatgctcaccagcttacaggcatactggtggtttcaggtttgctattggactcgtggacgatatcatcgccattctctccttgggacagaacgcacttatttgtgccctatgcgacttccatcgactcgttgaagttggtaagagcatgctcaaagtggagaaggtgggcaagacggagagggcacagggctctccaaagcttcgcagtgcagctaggaagctattcttcatgacttgttgggtccatgagcagccagatgaggcgtggccatctttagctcacatcgtccaggtgcagaaagcatctatggaggagttggagaccgggaattggaaggcggatagaaagagcaaaccacaatccgcggttcttatcgaggagctgtaggcatatggatgtaccactggaaactggatcgcgaagctctgtacccttgtgtatcgctcaggatgaatccaacgagagaccttgtccttgtaatgcagttagttgcttttgtgtacacttttttttttgaaaaaaattgtatttgttgaaatcctggttgaagcgatcctgctttactttgcttgttaagttgcgggctgatttaatccatgcgttggagcttatgcagttcagatattcttatgattgcaagtttgtg

SEQ ID NO: 7972 - DNA, 1375 bp, Zea Mays
actctcgaatctcgactgtcggtgctgaactcgattactcatcactactcgtccttcgccgtttacctgtctcaggagtagtacgcagagtcgctggacggtggacgctagcccaattgactgcttcagaatttacagcctgctttcgattggataatgatcagcccattccgtattcaagttccaagcccaaatgcaaatccgatgcatgggccatgaccaccaatgggccttcgccgagcatcgagaagcctccgcgcccgccgcacgccggaggaaaggaactccccccgtccccaaattcccaaagacagtaccgccgagaaggacagagagtcagagactgagagactggaagcgcccgcgcgtgccggcgatggagagggacgtcgtgctctccgcacccgaggccgctgggtcctcgtcctcccccgcctcctcgtcgtactcctccttcgccgagaccagggtcatctgccgcgtgtgtcagaagcagttcgcgcagtacacttgcccccgctgtaacgcccggtactgctcgctctcgtgctacaaggcttgcagcaggtagggtatggtaatgtcgcactggtgtcaatagtcttccctgacgacatcttggcaccccctggctctgataccacttgtcaggaaccacgccggagagacaaccttcagcagggtcatagtgttcaatgcactgaatccttcatgcgtgagaatgttatggacgagcttaagcagatgcaacctgaggatgaatcaaagaaaaagatgctagatatcctcaagcggctccacttggaagaagagatggcatcagatggtgaagatggtatgttctgcgtgcttcatgttcctatgccattgatctatcttactttctttaataataacactagaggtgcacataattgcattttttttatattgtgataactgctaatgaggacaaaactacagatacctccatgccagtggtggattcagacatgagacaagagaggagctaaatataattgaacacttaaaatcttattaacgtaaactaaaagctataatttgtataataaagaacataaataactatgtaaattaacattgttcaagcaacatgtaaaatatttttcagctgcgagagagggagaggctggctgtgtcgtcgttaggtcgggtggggctgggccttcaaacctggaatttccctgggctgctgaggtgaaaattacagggggtattctcatttttcttgggctcaccccgggatgagcaccccctaccgcttgggccctagggctgctcctgctccatgcgcagtatgctacacttacgattttactgtttggtacattaagttttcctgtttataggtagt

SEQ ID NO: 7973 - DNA, 4256 bp, Zea Mays
ctcatcgtgtggctctttcattgcggccagcagctccagcctccagcaacggtgagcgaggccccgggacctctcctctctccccgccgccgctgttcttgcaccgagagaactccaacttttcgcgagttgagggttggccttgggaggaggcggggcaatgggcagcagcacggcggagaagttcaggttctgcattgacaggggcggcacctttactgacatctatgccgaggtacccgggagaagagaaggctacgtcatgaagcttctctccgtcgacccgtcgaactacgacgacgcgcccatcgaagggatcaggaggatcctggaggagttctctggagagaggatcccccggtcggccaagatccccaccggcaggatcgagtggatcaggatgggcaccacggtcgccacgaacgccctcctggagaggaagggcgagaggatcgcgctttgcgtgacaagggggtttagggatttgctccagatcggtaaccaggctcgcccgaacatattcgacctcaaggtgtcaaagccgtcgaatctttacgaggaggtgattgaggtcgacgagcgagttgagctcgttcgggatggtgacagagatgagtcatctgttgaagggatctctggggaactggtgagggtgtcaaaacctgtcgatgtccaagcactgaagcctctgttgaaaggtttgcttgacaaggggatcagatgcttggcagtggtgttgatgcattcgtacacttatcctcaccatgaactcctggttgagaagttagctctggggatgggattcaagcacgtatcattgtcttcgtctctgacaccgatggtccgtgcagtgcctcggggcctgacggcaagcgtggacgcgtatctcacaccagtgatcaaagagtacctatcgggattcatgtcgagatatgaagggggctctgaacaagtgaatgtgctatttatgcagtcagatggaggactagcaccagagaggcgattctctgggcataaagcagtattgtcaggccctgcaggtggcgtggttggctattcgcagaccttatttggacttgagacatccaagccactgattgggtttgacatgggaggtacatccacagatgtcagccgctatgatggaagctatgaacaagttctggagacacagattgctggggctattattcaagctccccagcttgacataaacactgtggctgctggtggcggatcaaagcttaagtttcaatttggcgctttcaaggttgggccagaatctgttggagcacaccctggtccagtttgttaccgaaaaggtggtgagctagcaattaccgatgccaatttgatcctaggaaccgttattcctgaatacttcccatcaatatttggtccgaatgaagacatgcctcttgattatgaggctacaagaaaggcctttgaaaatcttgcacttgaaatcaactctcaccgaaagagtcaggacccatcagcaaaggacatgacaattgaagaggttgcacttgggtttgtcaatgtcgcaaatgagacaatgtgccggcctatacgccaactgactgaaatgaaggggcacgatacaaagaaccatgccctcgcatgctttggtggtgctggtccacaacatgcatgcgcaatggcaaggtctttgggcatgtctgaggtacttgtccaccggtactgtggaatactaagtgcatatgggatgggtcttgctgatgtcattgaggatttgcaagaaccatactctgctgtttataataccgattcttctgcagaagcatctagaagagaagcccttttagtaaaacatgtgaaagaaaagctgagggagcagggttttggagaggagagcatcaggacagattcatacttgaatttgaggtatgagggaactgatacagccataatggttagacagccagagcaaggatctggaaatgactatgctgatgagtttgaaaaattatttcagcaagagtatggcttcaaattgctaaacaggaaaatactcatatgtgatgtgagagttcagggtgttggtactacaaacatcctgcagcctcgtgaactgacgcaaatatcaaccaaacctgtgcaagaaagttcatgccggatttatttttcaagtggatggcaagatactccgctgtacaagcttgagaatttgggttatggccatctattggagggtcctgcagttattatgaatgggaatagtactgtgatcatagaaaaagactgtaaagccataattacaaagtatggtaacataaaaatagatatcaatgcagctccaagcactgtatcgatatcagagaaagttgcagatgtggtccagctttctattttcaatcaccgattcatgggcattgctgaacagatgggtcggacacttcaaagaacttcaatttccactaacataaaggaaaggctagacttctcttgtgctctctttggtccagatggcggccttgttgcaaatgcacctcatgtccctgtgcatctaggagccatgtctagtactgtgtgttggcagcttaacttttggggtgagaacctcaatgagggtgatgttcttgtaacaaatcatccatgttctggggggagccatcttccagacataacagttgtcacaccagtttttgatcacggtaagcttgtcttttttgttgctagtcgaggccaccatgctgagattggtggcatcacgccaggaagcatgcctcctttctcaaagtgtatttgggaggaaggtgctgccatcagagcatttaaacttgtcgaaaggggtgttttccaagagaaaggaataatccagctgctgcagtcaccttgctctgatgaacttgctggctataagatcccaggaacacgtaggatccaagataatctttccgatctccgtgctcaggttgcggcaaaccagagaggtatagcacttatcaaagaactcataaatcagtacgggttgatcactgttcaatcatatatgaaccatgttcaaaagaatgctgaggtagctgtcagggagatgctcaaaacagttgcgtctagagttgcaaaggagaatggatcatgtgttgtcgaggatgaagattatatggatgacggctctgtcattcacttgaaactcacccttgatgctattaaaggtgaagctacaattgacttcgagggtaccagtcctgaggtctatggcaactggaatgctcctgaagcagtcacaacagctgctgtcatatactgcctacgctgcttggtggatgttgatataccactaaatcaaggctgcctagcgcctgtgaagatcctcattcctaagggctctttcctctcaccaagtgacaaggctgctgttgttggtggcaatgtgctgacgtctcagagagtgaccgatgttatcctaatggcgttccaagcctgtgcctgctctcagggctgcatgaacaatttgaccttcggggacgacaccttcggttactacgagaccatcggaggtggatgtggagctgggccgacatgggacggcactagcggtgttcagtgtcacatgacaaatacaaggatgactgaccctgagatctttgagcagcggtaccctgcccttctgcacacatttagcatcagggagaacagtggaggttctggtttacacagaggtggtgatggccttgtaagggagattgagttccggcggcctattgttgtgagcgttctatctgagagacgggtgcatgctcccaggggactcaaaggaggacgagatggagatcgtggtgcaaactatttagtcagagaagatggtagaaagatttaccttggaggaaagaacactgtaacggtcagtgctggtgatatccttcagattttcacgcccggtggcggtggctttggctgtccttgatggcacttcctgcagacgcggaccttcctccatttgtttcctacctttgtacaccagtagctctatttagatcgcgattaaaataaaacgtaataaaaccgccaacaactggagattccttatgctattgttgctccccgaggcattggatccgaatgcagcatgaatggtgctattgtttatcagatatcatttatgtgaaaccagcaatcccaaaattggtgatgaatgatgcttgctctttcttcttgttttgatattagtcggaaattgccacgctaatcttcttatcgtttatattaaacatgccctcgtatgccttctt

SEQ ID NO: 7974 - DNA, 4209 bp, Zea Mays
ctgccatcgactcatcgtgtggctctttcattgcggccagcagctccagcctccagcaacgagaactccaacttttcgcgagttgagggttggccttgggaggaggcggggcaatgggcagcagcacggcggagaagttcaggttctgcattgacaggggcggcacctttactgacatctatgccgaggtacccgggagaagagaaggctacgtcatgaagcttctctccgtcgacccgtcgaactacgacgacgcgcccatcgaagggatcaggaggatcctggaggagttctctggagagaggatcccccggtcggccaagatccccaccggcaggatcgagtggatcaggatgggcaccacggtcgccacgaacgccctcctggagaggaagggcgagaggatcgcgctttgcgtgacaagggggtttagggatttgctccagatcggtaaccaggctcgcccgaacatattcgacctcaaggtgtcaaagccgtcgaatctttacgaggaggtgattgaggtcgacgagcgagttgagctcgttcgggatggtgacagagatgagtcatctgttgaagggatctctggggaactggtgagggtgtcaaaacctgtcgatgtccaagcactgaagcctctgttgaaaggtttgcttgacaaggggatcagatgcttggcagtggtgttgatgcattcgtacacttatcctcaccatgaactcctggttgagaagttagctctggggatgggattcaagcacgtatcattgtcttcgtctctgacaccgatggtccgtgcagtgcctcggggcctgacggcaagcgtggacgcgtatctcacaccagtgatcaaagagtacctatcgggattcatgtcgagatatgaagggggctctgaacaagtgaatgtgctatttatgcagtcagatggaggactagcaccagagaggcgattctctgggcataaagcagtattgtcaggccctgcaggtggcgtggttggctattcgcagaccttatttggacttgagacatccaagccactgattgggtttgacatgggaggtacatccacagatgtcagccgctatgatggaagctatgaacaagttctggagacacagattgctggggctattattcaagctccccagcttgacataaacactgtggctgctggtggcggatcaaagcttaagtttcaatttggcgctttcaaggttgggccagaatctgttggagcacaccctggtccagtttgttaccgaaaaggtggtgagctagcaattaccgatgccaatttgatcctaggaaccgttattcctgaatacttcccatcaatatttggtccgaatgaagacatgcctcttgattatgaggctacaagaaaggcctttgaaaatcttgcacttgaaatcaactctcaccgaaagagtcaggacccatcagcaaaggacatgacaattgaagaggttgcacttgggtttgtcaatgtcgcaaatgagacaatgtgccggcctatacgccaactgactgaaatgaaggggcacgatacaaagaaccatgccctcgcatgctttggtggtgctggtccacaacatgcatgcgcaatggcaaggtctttgggcatgtctgaggtacttgtccaccggtactgtggaatactaagtgcatatgggatgggtcttgctgatgtcattgaggatttgcaagaaccatactctgctgtttataataccgattcttctgcagaagcatctagaagagaagcccttttagtaaaacatgtgaaagaaaagctgagggagcagggttttggagaggagagcatcaggacagattcatacttgaatttgaggtatgagggaactgatacagccataatggttagacagccagagcaaggatctggaaatgactatgctgatgagtttgaaaaattatttcagcaagagtatggcttcaaattgctaaacaggaaaatactcatatgtgatgtgagagttcagggtgttggtactacaaacatcctgcagcctcgtgaactgacgcaaatatcaaccaaacctgtgcaagaaagttcatgccggatttatttttcaagtggatggcaagatactccgctgtacaagcttgagaatttgggttatggccatctattggagggtcctgcagttattatgaatgggaatagtactgtgatcatagaaaaagactgtaaagccataattacaaagtatggtaacataaaaatagatatcaatgcagctccaagcactgtatcgatatcagagaaagttgcagatgtggtccagctttctattttcaatcaccgattcatgggcattgctgaacagatgggtcggacacttcaaagaacttcaatttccactaacataaaggaaaggctagacttctcttgtgctctctttggtccagatggcggccttgttgcaaatgcacctcatgtccctgtgcatctaggagccatgtctagtactgtgtgttggcagcttaacttttggggtgagaacctcaatgagggtgatgttcttgtaacaaatcatccatgttctggggggagccatcttccagacataacagttgtcacaccagtttttgatcacggtaagcttgtcttttttgttgctagtcgaggccaccatgctgagattggtggcatcacgccaggaagcatgcctcctttctcaaagtgtatttgggaggaaggtgctgccatcagagcatttaaacttgtcgaaaggggtgttttccaagagaaaggaataatccagctgctgcagtcaccttgctctgatgaacttgctggctataagatcccaggaacacgtaggatccaagataatctttccgatctccgtgctcaggttgcggcaaaccagagaggtatagcacttatcaaagaactcataaatcagtacgggttgatcactgttcaatcatatatgaaccatgttcaaaagaatgctgaggtagctgtcagggagatgctcaaaacagttgcgtctagagttgcaaaggagaatggatcatgtgttgtcgaggatgaagattatatggatgacggctctgtcattcacttgaaactcacccttgatgctattaaaggtgaagctacaattgacttcgagggtaccagtcctgaggtctatggcaactggaatgctcctgaagcagtcacaacagctgctgtcatatactgcctacgctgcttggtggatgttgatataccactaaatcaaggctgcctagcgcctgtgaagatcctcattcctaagggctctttcctctcaccaagtgacaaggctgctgttgttggtggcaatgtgctgacgtctcagagagtgaccgatgttatcctaatggcgttccaagcctgtgcctgctctcagggctgcatgaacaatttgaccttcggggacgacaccttcggttactacgagaccatcggaggtggatgtggagctgggccgacatgggacggcactagcggtgttcagtgtcacatgacaaatacaaggatgactgaccctgagatctttgagcagcggtaccctgcccttctgcacacatttagcatcagggagaacagtggaggttctggtttacacagaggtggtgatggccttgtaagggagattgagttccggcggcctattgttgtgagcgttctatctgagagacgggtgcatgctcccaggggactcaaaggaggacgagatggagatcgtggtgcaaactatttagtcagagaagatggtagaaagatttaccttggaggaaagaacactgtaacggtcagtgctggtgatatccttcagattttcacgcccggtggcggtggctttggctgtccttgatggcacttcctgcagacgcggaccttcctccatttgtttcctacctttgtacaccagtagctctatttagatcgcgattaaaataaaacgtaataaaaccgccaacaactggagattccttatgctattgttgctccccgaggcattggatccgaatgcagcatgaatggtgctattgtttatcagatatcatttatgtgaaaccagcaatcccaaaattggtgatgaatgatgcttgctctttcttcttgttttgatattagtcggaaattgccacgctaatcttcttatcgtttatattaaacatgccctcgtatgccttctt

SEQ ID NO: 7975 - DNA, 1775 bp, Zea Mays
cttcctgaaccctgtgtcgctcacggaaccacggtcctagcgccgccgcgagagtcgtgacgacacatggcggccgcactcctgccggagacggcgccacggctgctgacgccggagacgctccgcacggcggcgaagcagtcccagggcatccacctcgtccccctctccctccgccgcgccatcaagcgctacctccgcgaccaggacagggcgcacatgaaccgcaaggtgctgctgctctcggcgtccttcgaccgcgccaagggcaccggagccgagctagccgcggccgccactcgcgccgcgctcctcgacgaccccaacgcgccgtcgggcgccgagcagcggtcggcgcgctggaaggtgcggtcggcctacggcgatattggcctccggtaccgcgaggacgagacagttgcctacgtcgcgtcacgcatgccagccatctacgccgcgtgccaccgcgtgctacgcgaggttagacgaaggttgccagagtttgcgcctgccaaggtgttggattttggcgccgggccaagttcagctctttgggcaatgagggcagtgtggccaaaatcaatagagagggttaacctggtcgagccttccaaggaaatgcaaagagcagggcagagtcttctcgacactatgacagcatccaagagttgaaccgcaaaatagaaaaacatgagcgaggccatgatcttgtagtatcatcttatgcacttggcgagattccttctttgagtgaccgaatcacaatagtgcgccagctttgggacctgacgagtgatgttttggttttgttagagcctgggacacctcaaggagcaaagatcataagtcaaatgcgctcttatattctttggatggaaaaaagaaagtgtcgcaaaattgaaaaatcctcaagccgtcctccaagtagcatgaagagtatcgtagcacaaaaagtctcattgaaaaatgggtcttttgtggttgccccttgtcctcatgatggtcgatgtcctttggagaattcagacaagtactgccactttgtccagagattggagaggacgtcatctcaacgtgccttcaagaggtcaaaaggtgtgcctttacgtggttttgaggacgaaaagttttgctatgttgctttaagaagaggcaaacgcccagaggaagcttggccgcttgatgacttgaactttgagacacttaaagaacgcaatgccaagagaaagccagaagatcttgtcatcgactatgacgaccaatttccaagcgaggaagacgaagaggttcatgtcgatggtggggacagtctggtaccatatgcttcagatgaacatgaattaagtcttttccatgacagtgaagaagcagaggcggaacaaacggttcgtgctgaccttggaggaggttggggccggattatatacagccccatgcgaagagggaggcaagtacaaatggatgtatgccgttccaccaaacgggacgcatccgaaggcacatttgagcgtgtagttgtcacccgaagcaagaaccctaccttgcattttcaggcccgtaagtcactttggggtgacctctggccattttaaatcagtatcctcaagtttggttaaagccatattgttagggaaaattggctgtgtaccctaaaccctaaaagattgcatctttggagatgaaccattaaaagaactcttctttgttatgtatcatggaaagattacatttatttgaatctcaccacatctgagaagtctcagttaaacaggaga

SEQ ID NO: 7976 - DNA, 1646 bp, Zea Mays
gatgaatccaggtcctgtcgtcctgacatggagttcgatagtacgtgttcttctcccgttagttgtcgctgctgcggtcccacataggattgctggtgagcaaaatgtacgacacggcaaagactattgtgcttaaccttgtatacctgttggaaaaatatggtttcgttccaaatggtgcaagatcctactacactaaccgaagccaaccaccacttttgagctccatggttttagaaatatacagggcaactggtgatgtggagtttgttaggacagtattccactctctgcttaaagagcatagcttctggatgtcagagattcataatgttgctatagcagacaatcatggtcgggtccataatttatctcggtatcaggccaggtggaacaaacctaggcctgaaagtgcgacaattgatgaggaactggcttcgaagttgaattctatggcagctaaggaaaaactgtactgcgaaattgcttcaacggcagaatcgggatgggatttcagctctcgatggatgaggaattctactgacatgacaacattggcaaccacttacataatacctgtggacttgaacacatttctttttaagatggagctggatattggtgccttggctaaagtcgtaggagataatgcgacttcagaattttttttaaatgcttcgaaagcacgtcatattgcaattgactctattttgtggaactctgagatggaacagtggcttgactattggcttcctggtgatgcagactgtcaggaagtacacgaatggaagcctaactcacagaaccgcaacatatttgcttccaacttcgttccgctgtggctaaatgcataccattccgagtcatggcgagcctcaaggcatctggattacttcatgccgcagggatagcaacttccctgacaaacacgagccaacaatgggatttcccgaatggatgggccccactgcagcatcttatagctgaggggctgctgcattctggatcagaggccaaaaaactagctgaggacattgctacgaggtgggtgagaacgaactacgccgcttacaaagcaacgggtgcgatgcatgagaagtacgatgttgaggcttgtggagaatctggaggcggtggagaatacaagccccagactggttttggctggtccaatggcgtggtgttgtcattcttggaagaattcgggtggccagagggcaaggaaatagcttgttgagcggcgaagcgctcacgacagggtggatctggtcttgccggagagcaatctggttaggcatcgttcatgtcacacatgtctagctacgagagtggcgcattgccttctgcagttcgtcaagtgcgtttgtgtgttcttgtttgcttttagttgcgactaggctgtagatccttcttgtatcacaacaatatatgtactgctactgtaccggccccggcctcttgtttaatctgaaatgctcattgtatatcctcttacgaaacgcaaacacgtgctttggcacgttcgtcgtcgaaaagagaagagaatataccattttgctctcttgaatacaaaatcagtgcatcgttctagatctcgcccacagggcgtggactggcagactgttggccccttttctgttcaaata

SEQ ID NO: 7977 - DNA, 2578 bp, Zea Mays
atgtgccacttgtcgaatcgaccggtcccccccaccacaacaccttttgcactcccccacccacccacacaccacgctacaccagtaggaatcgcgggagacgctcgtcgtcctcagtcctcaccgtcgtaaccgtcttcggacctcccacgccaacgcgctcgtcgtagccagtagccccaccaacacgtgcgggtgcggcacaccacgtaggagcttcctttaaaacctcgtcggatggctgggctcccgccgcaaccccagcacgtccacgccctccccctcctcctcctcgtcgtcctcccctgcctcatcccctgtctccgcgcgacgaccgagatggcgccaaccgccgccaccgccggcgcatccgacgagggcgccagcgcgctgctcgggctcctgcagcgggtgcagtcggaggcgctgcgcacgctggggcctcacgacttcgaccccaagttctacgtcgacctgccgctggcgaccgacgagcgcgccgcggcggccgcccttgcggcgctgccgcgcccgtcgccgtcgcgggcggagctagacgacttcctgtcccgctacttcggggaccccgggtccgatctcgtggcggacgtcccaccggatttcgagcccgagccgcgcgggttcctgccccacgtccacagccccgaggcgcgggcgtgggcgctggaggtgcacgcgctgtggaagcgcctggcgcggcgggtggcgcccgacgtcgcggcgcggccggaccggcacacgctgatgccgctgcccggcagggccgtcgtgccgggatccaggttccgggaggtatactactgggactcctattgggtcatcagaggattgctggtgagcaaaatgtacgacacggcaaagactattgtgcttaaccttgtatacctgttggaaaaatatggtttcgttccaaatggtgcaagatcctactacactaaccgaagccaaccaccacttttgagctccatggttttagaaatatacagggcaactggtgatgtggagtttgttaggacagtattccactctctgcttaaagagcatagcttctggatgtcagagattcataatgttgctatagcagacaatcatggtcgggtccataatttatctcggtatcaggccaggtggaacaaacctaggcctgaaagtgcgacaattgtaaagtcttagccttggctatattttaaatcaatttgctagtggcagtgcaaagttttaccattaaaggaccaactaatatagttttcttctttaaggatgaggaactggcttcgaagttgaattctatggcagctaaggaaaaactgtactgcgaaattgcttcaacggcagaatcgggatgggatttcagctctcgatggatgaggtttggatgtttgttatccttaaaaaggaactgacgagctaacagttctgctgctttcgcactggttaaaacaagaattctactgacatgacaacattggcaaccacttacataatacctgtggacttgaacacatttctttttaagatggagctggatattggtgccttggctaaagtcgtaggagataatgcgacttcagaattttttttaaatgcttcgaaagcacgtcatattgcaattgactctattttgtggaactctgagatggaacagtggcttgactattggcttcctggtgatgcagactgtcaggaagtacacgaatggaagcctaactcacagaaccgcaacatatttgcttccaacttcgttccgctgtggctaaatgcataccattccgagtcatggcgagcctcaaggcatctggattacttcatgccgcagggatagcaacttccctgacaaacacgagccaacaatgggatttcccgaatggatgggccccactgcagcatcttatagctgaggggctgctgcattctggatcagaggccaaaaaactagctgaggacattgctacgaggtgggtgagaacgaactacgccgcttacaaagcaacgggtgcgatgcatgagaagtacgatgttgaggcttgtggagaatctggaggcggtggagaatacaagccccagactggttttggctggtccaatggcgtggtgttgtcattcttggaagaattcgggtggccagagggcaaggaaatagcttgttgagcggcgaagcgctcacgacagggtggatctggtcttgccggagagcaatctggttaggcatcgttcatgtcacacatgtctagctacgagagtggcgcattgccttctgcagttcgtcaagtgcgtttgtgtgttcttgtttgcttttagttgcgactaggctgtagatccttcttgtatcacaacaatatatgtactgctactgtaccggccccggcctcttgtttaatctgaaatgctcattgtatatcctcttacgaaacgcaaacacgtgctttggcacgttcgtcgtcgaaaagagaagagaatataccattttgctctcttgaatacaaaatcagtgcatcgttctagatctcgcccacagggcgtggactggcagactgttggccccttttctgttcaaata

SEQ ID NO: 7978 - DNA, 2517 bp, Zea Mays
atgtgccacttgtcgaatcgaccggtcccccccaccacaacaccttttgcactcccccacccacccacacaccacgctacaccagtaggaatcgcgggagacgctcgtcgtcctcagtcctcaccgtcgtaaccgtcttcggacctcccacgccaacgcgctcgtcgtagccagtagccccaccaacacgtgcgggtgcggcacaccacgtaggagcttcctttaaaacctcgtcggatggctgggctcccgccgcaaccccagcacgtccacgccctccccctcctcctcctcgtcgtcctcccctgcctcatcccctgtctccgcgcgacgaccgagatggcgccaaccgccgccaccgccggcgcatccgacgagggcgccagcgcgctgctcgggctcctgcagcgggtgcagtcggaggcgctgcgcacgctggggcctcacgacttcgaccccaagttctacgtcgacctgccgctggcgaccgacgagcgcgccgcggcggccgcccttgcggcgctgccgcgcccgtcgccgtcgcgggcggagctagacgacttcctgtcccgctacttcggggaccccgggtccgatctcgtggcggacgtcccaccggatttcgagcccgagccgcgcgggttcctgccccacgtccacagccccgaggcgcgggcgtgggcgctggaggtgcacgcgctgtggaagcgcctggcgcggcgggtggcgcccgacgtcgcggcgcggccggaccggcacacgctgatgccgctgcccggcagggccgtcgtgccgggatccaggttccgggaggtatactactgggactcctattgggtcatcagaggattgctggtgagcaaaatgtacgacacggcaaagactattgtgcttaaccttgtatacctgttggaaaaatatggtttcgttccaaatggtgcaagatcctactacactaaccgaagccaaccaccacttttgagctccatggttttagaaatatacagggcaactggtgatgtggagtttgttaggacagtattccactctctgcttaaagagcatagcttctggatgtcagagattcataatgttgctatagcagacaatcatggtcgggtccataatttatctcggtatcaggccaggtggaacaaacctaggcctgaaagtgcgacaattgatgaggaactggcttcgaagttgaattctatggcagctaaggaaaaactgtactgcgaaattgcttcaacggcagaatcgggatgggatttcagctctcgatggatgaggtttggatgtttgttatccttaaaaaggaactgacgagctaacagttctgctgctttcgcactggttaaaacaagaattctactgacatgacaacattggcaaccacttacataatacctgtggacttgaacacatttctttttaagatggagctggatattggtgccttggctaaagtcgtaggagataatgcgacttcagaattttttttaaatgcttcgaaagcacgtcatattgcaattgactctattttgtggaactctgagatggaacagtggcttgactattggcttcctggtgatgcagactgtcaggaagtacacgaatggaagcctaactcacagaaccgcaacatatttgcttccaacttcgttccgctgtggctaaatgcataccattccgaattcgtacgctttgctgatgaggcaaaatcaaacagagtcatggcgagcctcaaggcatctggattacttcatgccgcagggatagcaacttccctgacaaacacgagccaacaatgggatttcccgaatggatgggccccactgcagcatcttatagctgaggggctgctgcattctggatcagaggccaaaaaactagctgaggacattgctacgaggtgggtgagaacgaactacgccgcttacaaagcaacgggtgcgatgcatgagaagtacgatgttgaggcttgtggagaatctggaggcggtggagaatacaagccccagactggttttggctggtccaatggcgtggtgttgtcattcttggaagaattcgggtggccagagggcaaggaaatagcttgttgagcggcgaagcgctcacgacagggtggatctggtcttgccggagagcaatctggttaggcatcgttcatgtcacacatgtctagctacgagagtggcgcattgccttctgcagttcgtcaagtgcgtttgtgtgttcttgtttgcttttagttgcgactaggctgtagatccttcttgtatcacaacaatatatgtactgctactgtaccggccccggcctcttgtttaatctgaaatgctcattgtatatcctcttacgaaacgcaaacacgtgctttggcacgttcgtcgtcgaaaagagaagagaatataccattttgctctcttgaatacaaaatcagtgcatcgttctagatctcgcccacagggcgtggactggcagactgttggccccttttctgttcaaata

SEQ ID NO: 7979 - DNA, 1653 bp, Zea Mays
ctcgagtgagccagacaataaacgagtgtcaaataaataaatccaaatcaagagaatacaaagtgcggcatataaggaaaagaaaaaaaagctaataaaggccttccatttccactccccgtcgtgtcgcttcctccctcttcctccggagctgcgaaattttgagacccagccgggaaagcggaggcggagactacccaccccaccaccagccccccggaattcgcgcaaatcacagaagctccctagccgccggcgagcactcgtgcgctcccctggaagcggcggaggcggcggcggagcccgcctctctgccggcgccggcgatgggcaactcactggggtgctcggcttccggcgagcggctcgtctcggcggcgcgcgacggggacgccatcgaggcgcggatgctgctggagctcagccccgcgctcgcgcgctactccaccttcggcggcctcaacactccgctacacttcgccgccgccaagggccatctcgacattgtcacgatgctgctggagaaaggcgctgacgttaacgcgcgcaactactgcggccagactgcgctgatgcatgcttgtcggcatgggcactgggaggtggtgcagatgcttcttctatttagatgcaatgttactagggcagattacttgagtggtcgaacagcactgcattttgctgcacatgatggatttgttcggtgtattaggcttttagttgcagactttgtcccgagtgtggccttggaggatattgcttcttctgtggtggatggtggtgattgccagacaaacagtgggagcagtcctaattcatcgtcggggcagaagtttaatgaatcggcccgtgtgaggtacatcaacaaacctgcagatggtggtgttacagcacttcacatggcagcattgaacggtcacttagattgcatgcagttgttgattgacttgggcgctaatgtctcagctgtctcattcccctatggcactactgcaaatttgataggagctggcagtacaccgttgcattatgcagcaggtggggggaaacaagaatgctgtgagctactaatatcaaaaggcgctagcaggttgacactcaattgcaatgggttgcagtcatgaattctgcatcaaatgtgctctctacctctgctcaaccagcaacatccgtgtcgagttcacaggcccacctgggtccatcccgtgccctctttgtcggaacggcataatgtctttcaccaagttaccaagcacaccaacagaagggcttaaatcaggttcagcgctcacattctgcaacccatgcatactgaacgcccggtccatggactcgccagccactttctccaaagctgaaatcagacggaaccgtgtggcagctgtctcttcggagctggtctgtccaatcacctgcagcccattcccgtcgtccgccctcccaacctgcaggtgcagcgacgacgatccatgcggcgatacagacgtgcaggatggtcccgagttccagtctccccggccctcgcacagcgcaagcatggagctggacaagaggggggagggggatctagaccgggccagttgctcaggcatgttctggagccgaagaagctgtcacagggagcagcagtgtgatgcggagatcaacgcttga

SEQ ID NO: 7980 - DNA, 2018 bp, Zea Mays
agaaaatggacagtagcctattaactgagagtctgagactttactggttaatcaggaaatgtctcccgttcacaaaaaagaaggacatgagaagtgggggggtggtgactctggctccaaaagaccaaagtttgagcaggatggagcaggagatattgttatggagccacacttaaccgaggataaacctgtgcggatagaccaagaatcatcgtcaacatctaatagggatgctgaggcaagcacatctactagcatgaaacctgttaaaactgaagaagcaggagcagatcttcttcccaaagagatgaatattatgacaattagcgacgataaagctgatggccataatgataaggaaggtgagggtgttacacttgatgggactggaacagagacagggcagataattgtgacaacaataggaggtcacaatgggaagccaaagcagaaggtctcatacatggcagaattggttgttggtactggttcgtttggtattgttttccaggcgaaatgcttggaaactgacgagacggtggcgataaaaaaggtgttacaagataagcgctacaagaatagagagctccagactatgcagttacatgaccacccgaatgtagttcagctgaagcatcacttcttttcaacaactcaaaagggagaagtttacctcaaccttgtacttgaatttgtatccgagacagtttatcgtgttgccaaatactacaaccggatgaaccagcgtgtacccataatatatgttaagttgtatgcatatcagatgtgccgtgcgcttgcttacatccatcgagttgtcggtgtgtgtcatcgtgatattaaacctcaaaatctactggtcaatcctcatacacatcaacttaagatttgtgattttgggagcgctaaaaaattggtccctggtgagcctaacatatcgtacatttgctcgcggtattatagggctcctgaactaatatttggagctacggagtataccactgcgatcgatatctggtctgttggctgtgtagtggctgagcttctgattggtcagcctttgtttcctggtgaaagtggtgttgaccaactggtggaaataataaagattttgggtactccaacaagagaggagatcaggtgcatgaatccaaattattccgaattcaagttccctcagataaaagcccatccatggcacaagctttttggtaagcgcatgccacccgaggctgtcgatctcgtgtcaaggctgctccagtactcaccgaacctgcgctgcactgctgtcgacgcctgtgcccatccgttcttcgatgagctgcgggaccccaaggcttgcctgccgaacggacggccaatgccaccgttgttcgacttcacagcagccgaactcgaagggctccccgccgagcttgtccaccggatcgttcctgaacacatgaggaaggaagtgaattaggtggacggacgtactggggcaaaaaaaaaaaaaaaactccctgtttctctgttggttctgagagatgtgtgagggcacggatatggaggagcggtggtgtattgtaattgtaaagagggctgaaagaaaggtccctctggttgggcgtgtcaccaaagagtggccctagaggcaaaccttacgtttgctcgttgcccttggtgtgtacccagatgtgtatcgatgacataggctggctgctgtatcatcatcagggttgacgctgaacaagagaaattcaagcagggtgctgctagctcgcttcctcccgtagctggaaaccccagaatgccagtttccatcactgcacgtcgtcgcgctgtccactggtgtcccgtaagcatatagagctctgccggctccgctattggcttgcgtgtgtctatcgataatgacttctacggacgctaccaaaaaataaaaataaaaaaacaagcggatggctacacgtccataaactgacaagaagacggtacaaaaaacgagcggttggcttgcgatgtgcgttaatagattg

SEQ ID NO: 7981 - DNA, 2035 bp, Zea Mays
tggcaactgagcttcataggaccatgaagaaaatggacagtagcctattaactgagagtctgagactttactggaaatgtctcccgttcacaaaaaagaaggacatgagaagtggggggtggtgactctggctccaaaagaccaaagtttgagcaggatggagcaggagatattgttatggagccacacttaaccgaggataaacctgtgcggatagaccaagaatcatcgtcaacatctaatagggatgctgaggcaagcacatctactagcatgaaacctgttaaaactgaagaagcaggagcagatcttcttcccaaagagatgaatattatgacaattagcgacgataaagctgatggccataatgataaggaaggtgagggtgttacacttgatgggactggaacagagacagggcagataattgtgacaacaataggaggtcacaatgggaagccaaagcagaaggtctcatacatggcagaattggttgttggtactggttcgtttggtattgttttccaggcgaaatgcttggaaactgacgagacggtggcgataaaaaaggtgttacaagataagcgctacaagaatagagagctccagactatgcagttacatgaccacccgaatgtagttcagctgaagcatcacttcttttcaacaactcaaaagggagaagtttacctcaaccttgtacttgaatttgtatccgagacagtttatcgtgttgccaaatactacaaccggatgaaccagcgtgtacccataatatatgttaagttgtatgcatatcagatgtgccgtgcgcttgcttacatccatcgagttgtcggtgtgtgtcatcgtgatattaaacctcaaaatctactggtcaatcctcatacacatcaacttaagatttgtgattttgggagcgctaaaaaattggtccctggtgagcctaacatatcgtacatttgctcgcggtattatagggctcctgaactaatatttggagctacggagtataccactgcgatcgatatctggtctgttggctgtgtagtggctgagcttctgattggtcagcctttgtttcctggtgaaagtggtgttgaccaactggtggaaataataaagattttgggtactccaacaagagaggagatcaggtgcatgaatccaaattattccgaattcaagttccctcagataaaagcccatccatggcacaagctttttggtaagcgcatgccacccgaggctgtcgatctcgtgtcaaggctgctccagtactcaccgaacctgcgctgcactgctgtcgacgcctgtgcccatccgttcttcgatgagctgcgggaccccaaggcttgcctgccgaacggacggccaatgccaccgttgttcgacttcacagcagccgaactcgaagggctccccgccgagcttgtccaccggatcgttcctgaacacatgaggaaggaagtgaattaggtggacggacgtactggggcaaaaaaaaaaaaaaaactccctgtttctctgttggttctgagagatgtgtgagggcacggatatggaggagcggtggtgtattgtaattgtaaagagggctgaaagaaaggtccctctggttgggcgtgtcaccaaagagtggccctagaggcaaaccttacgtttgctcgttgcccttggtgtgtacccagatgtgtatcgatgacataggctggctgctgtatcatcatcagggttgacgctgaacaagagaaattcaagcagggtgctgctagctcgcttcctcccgtagctggaaaccccagaatgccagtttccatcactgcacgtcgtcgcgctgtccactggtgtcccgtaagcatatagagctctgccggctccgctattggcttgcgtgtgtctatcgataatgacttctacggacgctaccaaaaaataaaaataaaaaaacaagcggatggctacacgtccataaactgacaagaagacggtacaaaaaacgagcggttggcttgcgatgtgcgttaatagattg

SEQ ID NO: 7982 - DNA, 2047 bp, Zea Mays
gctaaagcgttgcacggtctgttgcctcatcaggtgtggttttggctgtaatgcgttggcaactgagcttcataggaccatgaagaaaatggacagtagcctattaactgagagtctgagactttactgggtggtgactctggctccaaaagaccaaagtttgagcaggatggagcaggagatattgttatggagccacacttaaccgaggataaacctgtgcggatagaccaagaatcatcgtcaacatctaatagggatgctgaggcaagcacatctactagcatgaaacctgttaaaactgaagaagcaggagcagatcttcttcccaaagagatgaatattatgacaattagcgacgataaagctgatggccataatgataaggaaggtgagggtgttacacttgatgggactggaacagagacagggcagataattgtgacaacaataggaggtcacaatgggaagccaaagcagaaggtctcatacatggcagaattggttgttggtactggttcgtttggtattgttttccaggcgaaatgcttggaaactgacgagacggtggcgataaaaaaggtgttacaagataagcgctacaagaatagagagctccagactatgcagttacatgaccacccgaatgtagttcagctgaagcatcacttcttttcaacaactcaaaagggagaagtttacctcaaccttgtacttgaatttgtatccgagacagtttatcgtgttgccaaatactacaaccggatgaaccagcgtgtacccataatatatgttaagttgtatgcatatcagatgtgccgtgcgcttgcttacatccatcgagttgtcggtgtgtgtcatcgtgatattaaacctcaaaatctactggtcaatcctcatacacatcaacttaagatttgtgattttgggagcgctaaaaaattggtccctggtgagcctaacatatcgtacatttgctcgcggtattatagggctcctgaactaatatttggagctacggagtataccactgcgatcgatatctggtctgttggctgtgtagtggctgagcttctgattggtcagcctttgtttcctggtgaaagtggtgttgaccaactggtggaaataataaagattttgggtactccaacaagagaggagatcaggtgcatgaatccaaattattccgaattcaagttccctcagataaaagcccatccatggcacaagctttttggtaagcgcatgccacccgaggctgtcgatctcgtgtcaaggctgctccagtactcaccgaacctgcgctgcactgctgtcgacgcctgtgcccatccgttcttcgatgagctgcgggaccccaaggcttgcctgccgaacggacggccaatgccaccgttgttcgacttcacagcagccgaactcgaagggctccccgccgagcttgtccaccggatcgttcctgaacacatgaggaaggaagtgaattaggtggacggacgtactggggcaaaaaaaaaaaaaaaactccctgtttctctgttggttctgagagatgtgtgagggcacggatatggaggagcggtggtgtattgtaattgtaaagagggctgaaagaaaggtccctctggttgggcgtgtcaccaaagagtggccctagaggcaaaccttacgtttgctcgttgcccttggtgtgtacccagatgtgtatcgatgacataggctggctgctgtatcatcatcagggttgacgctgaacaagagaaattcaagcagggtgctgctagctcgcttcctcccgtagctggaaaccccagaatgccagtttccatcactgcacgtcgtcgcgctgtccactggtgtcccgtaagcatatagagctctgccggctccgctattggcttgcgtgtgtctatcgataatgacttctacggacgctaccaaaaaataaaaataaaaaaacaagcggatggctacacgtccataaactgacaagaagacggtacaaaaaacgagcggttggcttgcgatgtgcgttaatagattg

SEQ ID NO: 7983 - DNA, 2074 bp, Zea Mays
cccctttatagaaaggctaaagcgttgcacggtctgttgcctcatcagtttgtctaataggtgtggttttggctgtaatgcgttggcaactgagcttcataggaccatgaagaaaatggacagtagcctattaactgagagtctgagactttactgggtggtgactctggctccaaaagaccaaagtttgagcaggatggagcaggagatattgttatggagccacacttaaccgaggataaacctgtgcggatagaccaagaatcatcgtcaacatctaatagggatgctgaggcaagcacatctactagcatgaaacctgttaaaactgaagaagcaggagcagatcttcttcccaaagagatgaatattatgacaattagcgacgataaagctgatggccataatgataaggaaggtgagggtgttacacttgatgggactggaacagagacagggcagataattgtgacaacaataggaggtcacaatgggaagccaaagcagaaggtctcatacatggcagaattggttgttggtactggttcgtttggtattgttttccaggcgaaatgcttggaaactgacgagacggtggcgataaaaaaggtgttacaagataagcgctacaagaatagagagctccagactatgcagttacatgaccacccgaatgtagttcagctgaagcatcacttcttttcaacaactcaaaagggagaagtttacctcaaccttgtacttgaatttgtatccgagacagtttatcgtgttgccaaatactacaaccggatgaaccagcgtgtacccataatatatgttaagttgtatgcatatcagatgtgccgtgcgcttgcttacatccatcgagttgtcggtgtgtgtcatcgtgatattaaacctcaaaatctactggtcaatcctcatacacatcaacttaagatttgtgattttgggagcgctaaaaaattggtccctggtgagcctaacatatcgtacatttgctcgcggtattatagggctcctgaactaatatttggagctacggagtataccactgcgatcgatatctggtctgttggctgtgtagtggctgagcttctgattggtcagcctttgtttcctggtgaaagtggtgttgaccaactggtggaaataataaagattttgggtactccaacaagagaggagatcaggtgcatgaatccaaattattccgaattcaagttccctcagataaaagcccatccatggcacaagctttttggtaagcgcatgccacccgaggctgtcgatctcgtgtcaaggctgctccagtactcaccgaacctgcgctgcactgctgtcgacgcctgtgcccatccgttcttcgatgagctgcgggaccccaaggcttgcctgccgaacggacggccaatgccaccgttgttcgacttcacagcagccgaactcgaagggctccccgccgagcttgtccaccggatcgttcctgaacacatgaggaaggaagtgaattaggtggacggacgtactggggcaaaaaaaaaaaaaaaactccctgtttctctgttggttctgagagatgtgtgagggcacggatatggaggagcggtggtgtattgtaattgtaaagagggctgaaagaaaggtccctctggttgggcgtgtcaccaaagagtggccctagaggcaaaccttacgtttgctcgttgcccttggtgtgtacccagatgtgtatcgatgacataggctggctgctgtatcatcatcagggttgacgctgaacaagagaaattcaagcagggtgctgctagctcgcttcctcccgtagctggaaaccccagaatgccagtttccatcactgcacgtcgtcgcgctgtccactggtgtcccgtaagcatatagagctctgccggctccgctattggcttgcgtgtgtctatcgataatgacttctacggacgctaccaaaaaataaaaataaaaaaacaagcggatggctacacgtccataaactgacaagaagacggtacaaaaaacgagcggttggcttgcgatgtgcgttaatagattg

SEQ ID NO: 7984 - DNA, 2566 bp, Zea Mays
ctcccagcttttgccattttggcgaccagctccaacaaccggagagggggagagagagagagctcgagtcacaaagctaaaaaaagcaccgagaaatctagtggtgcagcgagcgaatccgtccggccgtccccttcctccgccacccatccccaaaattttcaccgcacgtcgcctccccgcgacgacgacgcccgaagcttccagggccctcccctcccccccgcggccgcccctccctagatcgccgcctccggcagcggcgaggctgcatcgcgagggcggcggaggagccgggcgacggggtcgacgaaggcggggaagacgaggctagggttcggggtcgctgctgctgggctgcgtctgagggaggaggatgcatatgatgcggcggctcaagagcatcgcctccggccgctcgtcggtctccgatccgggtggtgactctggctccaaaagaccaaagtttgagcaggatggagcaggagatattgttatggagccacacttaaccgaggataaacctgtgcggatagaccaagaatcatcgtcaacatctaatagggatgctgaggcaagcacatctactagcatgaaacctgttaaaactgaagaagcaggagcagatcttcttcccaaagagatgaatattatgacaattagcgacgataaagctgatggccataatgataaggaaggtgagggtgttacacttgatgggactggaacagagacagggcagataattgtgacaacaataggaggtcacaatgggaagccaaagcagaaggtctcatacatggcagaattggttgttggtactggttcgtttggtattgttttccaggcgaaatgcttggaaactgacgagacggtggcgataaaaaaggtgttacaagataagcgctacaagaatagagagctccagactatgcagttacatgaccacccgaatgtagttcagctgaagcatcacttcttttcaacaactcaaaagggagaagtttacctcaaccttgtacttgaatttgtatccgagacagtttatcgtgttgccaaatactacaaccggatgaaccagcgtgtacccataatatatgttaagttgtatgcatatcaatgtgccgtgcgcttgcttacatccatcgagttgtcggtgtgtgtcatcgtgatattaaacctcaaaatctactggtaagttcccagatccacttttcctcgaagcagtttgtgtggttgttagtgttgcaagtattctgttattcccattttggaccattttgctaccatcttgcttgtaagttgtaacacctgtcaacgcagaaatactgtgtaagtgcacatctgcaggtttgtcatgcaaaatgtctcttaaatctttggagtattttttttgttcagttttacgctaactgctgaaaatgttccttattgcaacttgattaaccttccaggtcaatcctcatacacatcaacttaagatttgtgattttgggagcgctaaaaaattgggctcctgaactaatatttggagctacggagtataccactgcgatcgatatctggtctgttggctgtgtagtggctgagcttctgattggtcagcctttgtttcctggtgaaagtggtgttgaccaactggtggaaataataaagattttgggtactccaacaagagaggagatcaggtgcatgaatccaaattattccgaattcaagttccctcagataaaagcccatccatggcacaagctttttggtaagcgcatgccacccgaggctgtcgatctcgtgtcaaggctgctccagtactcaccgaacctgcgctgcactgctgtcgacgcctgtgcccatccgttcttcgatgagctgcgggaccccaaggcttgcctgccgaacggacggccaatgccaccgttgttcgacttcacagcagccgaactcgaagggctccccgccgagcttgtccaccggatcgttcctgaacacatgaggaaggaagtgaattaggtggacggacgtactggggcaaaaaaaaaaaaaaaactccctgtttctctgttggttctgagagatgtgtgagggcacggatatggaggagcggtggtgtattgtaattgtaaagagggctgaaagaaaggtccctctggttgggcgtgtcaccaaagagtggccctagaggcaaaccttacgtttgctcgttgcccttggtgtgtacccagatgtgtatcgatgacataggctggctgctgtatcatcatcagggttgacgctgaacaagagaaattcaagcagggtgctgctagctcgcttcctcccgtagctggaaaccccagaatgccagtttccatcactgcacgtcgtcgcgctgtccactggtgtcccgtaagcatatagagctctgccggctccgctattggcttgcgtgtgtctatcgataatgacttctacggacgctaccaaaaaataaaaataaaaaaacaagcggatggctacacgtccataaactgacaagaagacggtacaaaaaacgagcggttggcttgcgatgtgcgttaatagattg

SEQ ID NO: 7985 - DNA, 2574 bp, Zea Mays
caaaggtctcccagcttttgccattttggcgaccagctccaacaaccggagagggggagagagagagagctcgagtcacaaagctaaaaaaagcaccgagaaatctagtggtgcagcgagcgaatccgtccggccgtccccttcctccgccacccatccccaaaattttcaccgcacgtcgcctccccgcgacgacgacgcccgaagcttccagggccctcccctcccccccgcggccgcccctccctagatcgccgcctccggcagcggcgaggctgcatcgcgagggcggcggaggagccgggcgacggggtcgacgaaggcggggaagacgaggctagggttcggggtcgctgctgctgggctgcgtctgagggaggaggatgcatatgatgcggcggctcaagagcatcgcctccggccgctcgtcggtctccgatccgggtggtgactctggctccaaaagaccaaagtttgagcaggatggagcaggagatattgttatggagccacacttaaccgaggataaacctgtgcggatagaccaagaatcatcgtcaacatctaatagggatgctgaggcaagcacatctactagcatgaaacctgttaaaactgaagaagcaggagcagatcttcttcccaaagagatgaatattatgacaattagcgacgataaagctgatggccataatgataaggaaggtgagggtgttacacttgatgggactggaacagagacagggcagataattgtgacaacaataggaggtcacaatgggaagccaaagcagaaggtctcatacatggcagaattggttgttggtactggttcgtttggtattgttttccaggcgaaatgcttggaaactgacgagacggtggcgataaaaaaggtgttacaagataagcgctacaagaatagagagctccagactatgcagttacatgaccacccgaatgtagttcagctgaagcatcacttcttttcaacaactcaaaagggagaagtttacctcaaccttgtacttgaatttgtatccgagacagtttatcgtgttgccaaatactacaaccggatgaaccagcgtgtacccataatatatgttaagttgtatgcatatcagatgtgccgtgcgcttgcttacatccatcgagttgtcggtgtgtgtcatcgtgatattaaacctcaaaatctactggtaagttcccagatccacttttcctcgaagcagtttgtgtggttgttagtgttgcaagtattctgttattcccattttggaccattttgctaccatcttgcttgtaagttgtaacacctgtcaacgcagaaatactgtgtaagtgcacatctgcaggtttgtcatgcaaaatgtctcttaaatctttggagtattttttttgttcagttttacgctaactgctgaaaatgttccttattgcaacttgattaaccttccaggtcaatcctcatacacatcaacttaagatttgtgattttgggagcgctaaaaaattgggctcctgaactaatatttggagctacggagtataccactgcgatcgatatctggtctgttggctgtgtagtggctgagcttctgattggtcagcctttgtttcctggtgaaagtggtgttgaccaactggtggaaataataaagattttgggtactccaacaagagaggagatcaggtgcatgaatccaaattattccgaattcaagttccctcagataaaagcccatccatggcacaagctttttggtaagcgcatgccacccgaggctgtcgatctcgtgtcaaggctgctccagtactcaccgaacctgcgctgcactgctgtcgacgcctgtgcccatccgttcttcgatgagctgcgggaccccaaggcttgcctgccgaacggacggccaatgccaccgttgttcgacttcacagcagccgaactcgaagggctccccgccgagcttgtccaccggatcgttcctgaacacatgaggaaggaagtgaattaggtggacggacgtactggggcaaaaaaaaaaaaaaaactccctgtttctctgttggttctgagagatgtgtgagggcacggatatggaggagcggtggtgtattgtaattgtaaagagggctgaaagaaaggtccctctggttgggcgtgtcaccaaagagtggccctagaggcaaaccttacgtttgctcgttgcccttggtgtgtacccagatgtgtatcgatgacataggctggctgctgtatcatcatcagggttgacgctgaacaagagaaattcaagcagggtgctgctagctcgcttcctcccgtagctggaaaccccagaatgccagtttccatcactgcacgtcgtcgcgctgtccactggtgtcccgtaagcatatagagctctgccggctccgctattggcttgcgtgtgtctatcgataatgacttctacggacgctaccaaaaaataaaaataaaaaaacaagcggatggctacacgtccataaactgacaagaagacggtacaaaaaacgagcggttggcttgcgatgtgcgttaatagattg

SEQ ID NO: 7986 - DNA, 2335 bp, Zea Mays
agaaagccaaggagccggatgcaaaggtctcccagcttttgccattttggcgaccagctccaacaaccggagagggggagagagagagagctcgagtcacaaagctaaaaaaagcaccgagaaatctagtggtgcagcgagcgaatccgtccggccgtccccttcctccgccacccatccccaaaattttcaccgcacgtcgcctccccgcgacgacgacgcccgaagcttccagggccctcccctcccccccgcggccgcccctccctagatcgccgcctccggcagcggcgaggctgcatcgcgagggcggcggaggagccgggcgacggggtcgacgaaggcggggaagacgaggctagggttcggggtcgctgctgctgggctgcgtctgagggaggaggatgcatatgatgcggcggctcaagagcatcgcctccggccgctcgtcggtctccgatccgggtggtgactctggctccaaaagaccaaagtttgagcaggatggagcaggagatattgttatggagccacacttaaccgaggataaacctgtgcggatagaccaagaatcatcgtcaacatctaatagggatgctgaggcaagcacatctactagcatgaaacctgttaaaactgaagaagcaggagcagatcttcttcccaaagagatgaatattatgacaattagcgacgataaagctgatggccataatgataaggaaggtgagggtgttacacttgatgggactggaacagagacagggcagataattgtgacaacaataggaggtcacaatgggaagccaaagcagaaggtctcatacatggcagaattggttgttggtactggttcgtttggtattgttttccaggcgaaatgcttggaaactgacgagacggtggcgataaaaaaggtgttacaagataagcgctacaagaatagagagctccagactatgcagttacatgaccacccgaatgtagttcagctgaagcatcacttcttttcaacaactcaaaagggagaagtttacctcaaccttgtacttgaatttgtatccgagacagtttatcgtgttgccaaatactacaaccggatgaaccagcgtgtacccataatatatgttaagttgtatgcatatcagatgtgccgtgcgcttgcttacatccatcgagttgtcggtgtgtgtcatcgtgatattaaacctcaaaatctactggtcaatcctcatacacatcaacttaagatttgtgattttgggagcgctaaaaaattgggctcctgaactaatatttggagctacggagtataccactgcgatcgatatctggtctgttggctgtgtagtggctgagcttctgattggtcagcctttgtttcctggtgaaagtggtgttgaccaactggtggaaataataaagattttgggtactccaacaagagaggagatcaggtgcatgaatccaaattattccgaattcaagttccctcagataaaagcccatccatggcacaagctttttggtaagcgcatgccacccgaggctgtcgatctcgtgtcaaggctgctccagtactcaccgaacctgcgctgcactgctgtcgacgcctgtgcccatccgttcttcgatgagctgcgggaccccaaggcttgcctgccgaacggacggccaatgccaccgttgttcgacttcacagcagccgaactcgaagggctccccgccgagcttgtccaccggatcgttcctgaacacatgaggaaggaagtgaattaggtggacggacgtactggggcaaaaaaaaaaaaaaaactccctgtttctctgttggttctgagagatgtgtgagggcacggatatggaggagcggtggtgtattgtaattgtaaagagggctgaaagaaaggtccctctggttgggcgtgtcaccaaagagtggccctagaggcaaaccttacgtttgctcgttgcccttggtgtgtacccagatgtgtatcgatgacataggctggctgctgtatcatcatcagggttgacgctgaacaagagaaattcaagcagggtgctgctagctcgcttcctcccgtagctggaaaccccagaatgccagtttccatcactgcacgtcgtcgcgctgtccactggtgtcccgtaagcatatagagctctgccggctccgctattggcttgcgtgtgtctatcgataatgacttctacggacgctaccaaaaaataaaaataaaaaaacaagcggatggctacacgtccataaactgacaagaagacggtacaaaaaacgagcggttggcttgcgatgtgcgttaatagattg

SEQ ID NO: 7987 - DNA, 2471 bp, Zea Mays
aagaaagccaaggagccggatgcaaaggtctcccagcttttgccattttggcgaccagctccaacaaccggagagggggagagagagagagctcgagtcacaaagctaaaaaaagcaccgagaaatctagtggtgcagcgagcgaatccgtccggccgtccccttcctccgccacccatccccaaaattttcaccgcacgtcgcctccccgcgacgacgacgcccgaagcttccagggccctcccctcccccccgcggccgcccctccctagatcgccgcctccggcagcggcgaggctgcatcgcgagggcggcggaggagccgggcgacggggtcgacgaaggcggggaagacgaggctagggttcggggtcgctgctgctgggctgcgtctgagggaggaggatgcatatgatgcggcggctcaagagcatcgcctccggccgctcgtcggtctccgatccgcgtctgttcatttcgtttgcttgcttcgtcgtggctgcctcccctttatagaaaggctaaagcgttgcacggtctgttgcctcatcagggtggtgactctggctccaaaagaccaaagtttgagcaggatggagcaggagatattgttatggagccacacttaaccgaggataaacctgtgcggatagaccaagaatcatcgtcaacatctaatagggatgctgaggcaagcacatctactagcatgaaacctgttaaaactgaagaagcaggagcagatcttcttcccaaagagatgaatattatgacaattagcgacgataaagctgatggccataatgataaggaaggtgagggtgttacacttgatgggactggaacagagacagggcagataattgtgacaacaataggaggtcacaatgggaagccaaagcagaaggtctcatacatggcagaattggttgttggtactggttcgtttggtattgttttccaggcgaaatgcttggaaactgacgagacggtggcgataaaaaaggtgttacaagataagcgctacaagaatagagagctccagactatgcagttacatgaccacccgaatgtagttcagctgaagcatcacttcttttcaacaactcaaaagggagaagtttacctcaaccttgtacttgaatttgtatccgagacagtttatcgtgttgccaaatactacaaccggatgaaccagcgtgtacccataatatatgttaagttgtatgcatatcagatgtgccgtgcgcttgcttacatccatcgagttgtcggtgtgtgtcatcgtgatattaaacctcaaaatctactggtcaatcctcatacacatcaacttaagatttgtgattttgggagcgctaaaaaattggtccctggtgagcctaacatatcgtacatttgctcgcggtattatagggctcctgaactaatatttggagctacggagtataccactgcgatcgatatctggtctgttggctgtgtagtggctgagcttctgattggtcagcctttgtttcctggtgaaagtggtgttgaccaactggtggaaataataaagattttgggtactccaacaagagaggagatcaggtgcatgaatccaaattattccgaattcaagttccctcagataaaagcccatccatggcacaagctttttggtaagcgcatgccacccgaggctgtcgatctcgtgtcaaggctgctccagtactcaccgaacctgcgctgcactgctgtcgacgcctgtgcccatccgttcttcgatgagctgcgggaccccaaggcttgcctgccgaacggacggccaatgccaccgttgttcgacttcacagcagccgaactcgaagggctccccgccgagcttgtccaccggatcgttcctgaacacatgaggaaggaagtgaattaggtggacggacgtactggggcaaaaaaaaaaaaaaaactccctgtttctctgttggttctgagagatgtgtgagggcacggatatggaggagcggtggtgtattgtaattgtaaagagggctgaaagaaaggtccctctggttgggcgtgtcaccaaagagtggccctagaggcaaaccttacgtttgctcgttgcccttggtgtgtacccagatgtgtatcgatgacataggctggctgctgtatcatcatcagggttgacgctgaacaagagaaattcaagcagggtgctgctagctcgcttcctcccgtagctggaaaccccagaatgccagtttccatcactgcacgtcgtcgcgctgtccactggtgtcccgtaagcatatagagctctgccggctccgctattggcttgcgtgtgtctatcgataatgacttctacggacgctaccaaaaaataaaaataaaaaaacaagcggatggctacacgtccataaactgacaagaagacggtacaaaaaacgagcggttggcttgcgatgtgcgttaatagattg

SEQ ID NO: 7988 - DNA, 2696 bp, Zea Mays
acacaaaccgcccccgaatcatttgaaaaccaagcccgattcgatgataacaaaagaaagccaaggagccggatgcaaaggtctcccagcttttgccattttggcgaccagctccaacaaccggagagggggagagagagagagctcgagtcacaaagctaaaaaaagcaccgagaaatctagtggtgcagcgagcgaatccgtccggccgtccccttcctccgccacccatccccaaaattttcaccgcacgtcgcctccccgcgacgacgacgcccgaagcttccagggccctcccctcccccccgcggccgcccctccctagatcgccgcctccggcagcggcgaggctgcatcgcgagggcggcggaggagccgggcgacggggtcgacgaaggcggggaagacgaggctagggttcggggtcgctgctgctgggctgcgtctgagggaggaggatgcatatgatgcggcggctcaagagcatcgcctccggccgctcgtcggtctccgatccgggtggtgactctggctccaaaagaccaaagtttgagcaggatggagcaggagatattgttatggagccacacttaaccgaggataaacctgtgcggatagaccaagaatcatcgtcaacatctaatagggatgctgaggcaagcacatctactagcatgaaacctgttaaaactgaagaagcaggagcagatcttcttcccaaagagatgaatattatgacaattagcgacgataaagctgatggccataatgataaggaaggtgagggtgttacacttgatgggactggaacagagacagggcagataattgtgacaacaataggaggtcacaatgggaagccaaagcagaaggtctcatacatggcagaattggttgttggtactggttcgtttggtattgttttccaggcgaaatgcttggaaactgacgagacggtggcgataaaaaaggtgttacaagataagcgctacaagaatagagagctccagactatgcagttacatgaccacccgaatgtagttcagctgaagcatcacttcttttcaacaactcaaaagggagaagtttacctcaaccttgtacttgaatttgtatccgagacagtttatcgtgttgccaaatactacaaccggatgaaccagcgtgtacccataatatatgttaagttgtatgcatatcagatgtgccgtgcgcttgcttacatccatcgagttgtcggtgtgtgtcatcgtgatattaaacctcaaaatctactggtaagttcccagatccacttttcctcgaagcagtttgtgtggttgttagtgttgcaagtattctgttattcccattttggaccattttgctaccatcttgcttgtaagttgtaacacctgtcaacgcagaaatactgtgtaagtgcacatctgcaggtttgtcatgcaaaatgtctcttaaatctttggagtattttttttgttcagttttacgctaactgctgaaaatgttccttattgcaacttgattaaccttccaggtcaatcctcatacacatcaacttaagatttgtgattttgggagcgctaaaaaattggtccctggtgagcctaacatatcgtacatttgctcgcggtattatagggctcctgaactaatatttggagctacggagtataccactgcgatcgatatctggtctgttggctgtgtagtggctgagcttctgattggtcagcctttgtttcctggtgaaagtggtgttgaccaactggtggaaataataaagattttgggtactccaacaagagaggagatcaggtgcatgaatccaaattattccgaattcaagttccctcagataaaagcccatccatggcacaagctttttggtaagcgcatgccacccgaggctgtcgatctcgtgtcaaggctgctccagtactcaccgaacctgcgctgcactgctgtcgacgcctgtgcccatccgttcttcgatgagctgcgggaccccaaggcttgcctgccgaacggacggccaatgccaccgttgttcgacttcacagcagccgaactcgaagggctccccgccgagcttgtccaccggatcgttcctgaacacatgaggaaggaagtgaattaggtggacggacgtactggggcaaaaaaaaaaaaaaaactccctgtttctctgttggttctgagagatgtgtgagggcacggatatggaggagcggtggtgtattgtaattgtaaagagggctgaaagaaaggtccctctggttgggcgtgtcaccaaagagtggccctagaggcaaaccttacgtttgctcgttgcccttggtgtgtacccagatgtgtatcgatgacataggctggctgctgtatcatcatcagggttgacgctgaacaagagaaattcaagcagggtgctgctagctcgcttcctcccgtagctggaaaccccagaatgccagtttccatcactgcacgtcgtcgcgctgtccactggtgtcccgtaagcatatagagctctgccggctccgctattggcttgcgtgtgtctatcgataatgacttctacggacgctaccaaaaaataaaaataaaaaaacaagcggatggctacacgtccataaactgacaagaagacggtacaaaaaacgagcggttggcttgcgatgtgcgttaatagattg

SEQ ID NO: 7989 - DNA, 1472 bp, Zea Mays
caaaggtctcccagcttttgccattttggcgaccagctccaacaaccggagagggggagagagagagagctcgagtcacaaagctaaaaaaagcaccgagaaatctagtggtgcagcgagcgaatccgtccggccgtccccttcctccgccacccatccccaaaattttcaccgcacgtcgcctccccgcgacgacgacgcccgaagcttccagggccctcccctcccccccgcggccgcccctccctagatcgccgcctccggcagcggcgaggctgcatcgcgagggcggcggaggagccgggcgacggggtcgacgaaggcggggaagacgaggctagggttcggggtcgctgctgctgggctgcgtctgagggaggaggatgcatatgatgcggcggctcaagagcatcgcctccggccgctcgtcggtctccgatccgggtggtgactctggctccaaaagaccaaagtttgagcaggatggagcaggagatattgttatggagccacacttaaccgaggataaacctgtgcggatagaccaagaatcatcgtcaacatctaatagggatgctgaggcaagcacatctactagcatgaaacctgttaaaactgaagaagcaggagcagatcttcttcccaaagagatgaatattatgacaattagcgacgataaagctgatggccataatgataaggaaggtgagggtgttacacttgatgggactggaacagagacagggcagataattgtgacaacaataggaggtcacaatgggaagccaaagcagaaggtctcatacatggcagaattggttgttggtactggttcgtttggtattgttttccaggcgaaatgcttggaaactgacgagacggtggcgataaaaaaggtgttacaagataagcgctacaagaatagagagctccagactatgcagttacatgaccacccgaatgtagttcagctgaagcatcacttcttttcaacaactcaaaagggagaagtttacctcaaccttgtacttgaatttgtatccgagacagtttatcgtgttgccaaatactacaaccggatgaaccagcgtgtacccataatatatgttaagttgtatgcatatcagatgtgccgtgcgcttgcttacatccatcgagttgtcggtgtgtgtcatcgtgatattaaacctcaaaatctactggtcaatcctcatacacatcaacttaagatttgtgattttgggagcgctaaaaaattggtccctggtgagcctaacatatcgtacatttgctcgcggtattatagggctcctgaactaatatttggagctacggagtataccactgcgatcgatatctggtctgttggctgtgtagtggctgagcttctgattggtcagttttggatttcatgcacattaggatttgatccgctcactgttgattgagacacttcttatccgatgacaatt

SEQ ID NO: 7990 - DNA, 989 bp, Zea Mays
ccagactccagactccagaggcttggtcaaagacgacttgaatcagttctctcccgtttcctccgcctcgccctcgtatcttcctcccctcctcgatcgccgctccggccatggcgaacgacgggtcgcagagcgcgcgcggcggcggcggcggcaggaggtgctgctgcggcgccctcacgcgcgtggacctcctggtcttcctcctcgccgcggcgctctgctccgcgtcctactgcctcggggtatggcacaacagccgcggcgccgcggacagccgggtcctggcgccgagcgccggcgccaacacctactgcggggacgacgcccgcgagccgctcgacttcgagacgcgccacgccgccgaggacgccgggctctccgcgcctactactacggcggcggcggcggggacgacgagcacccggcgggcgttgcgcggcgccgcggacggcggcgtccgcgtccggctcacgggcgccgtcgccgtccgagcgtaggtccgcgccatgtgcacgtggcctcggcgcgcgtcgctccggacgtcggagttggagcccccccaccccacgccgtgttcccggctccggcgctcgatcccaatgaagttccggggtcgtctgttgcatttggggactccgagtgctggagtttactccagagcatctatctgatgccgataccgatgccgaagaggaggactgtcttcggaattttctctttggtttgatgcgtgcgtgttggcagtggcacttggcagccggtagctttgcactttagtgggcgaccaaatcaaaaggacaagggagctgcaggccggcacgacggagcaagccatgtcgtcagccaagaagactttttgagagccgagttgacatttatcttgtggcttgtatggccaaaaaagaggaacgattgggaactgagcagctacgccctgtttgctaattccgggcgaatttatcaggtggtatggtacctgttgggcg

SEQ ID NO: 7991 - DNA, 1487 bp, Zea Mays
atggggttccttgctttttggagcgtttccccagtcggatcggcggcagagcaggtcacgtggacggggctccttgttgctggaactaaataccgtggagagtttgaatgcactggtgccacaacactggatgggtataggaagcatatagagaaagatcctgccttggaaagaaggtttcaaccagttaaggttccagagcctactgtggatgaaacaatacagatcttaagaggacttcatgagagatatgaacttcatcacaaactgagatacacagatgatgctttaattgctgctgcacaactgtcttatcagtatatcaggtttgcaaatcaccaagtttttaagtagtatgttatatatctacttaaattttacctttttaagaagtcacatgaacttggcaatggttttgttatacatttttattgataatatgttaccaaaatgctaatttgaattatcagtttggattttgagcaacttatatttgccaccttcagtatcaatgtacattttttgagccactcaaatattatgattaattgattatatctgaacaaagagggatggatggtgggtagtttagttttattagaaaatagtgtatcctttgttactttctaaagaaatgtcatttgtttttttatcaagcaggccaatcatttggttgtgatataaatgggaatttatattgcttttatttctttcagcgatcgttttctgcctgacaaagccattgacttgattgatgaagctggatctcgtgttaggctgaggcatgcgcagctccctgatgaagccaaagagctggacaaagagctgcggcagataagcaagcagaaaaataaggctgtacgtggccaagattttgagaagaatctgtagcaaatggctaacgatgaggacatccatcacttgtttatgacaatagaactgatatgttcaagattccgtagcaacgcacgggcacccaactagttctccacatatgggaataacagggcgaccataattcatgacgagtcgtcaatgtccactgcctcagctaaaagaagtttatcaaagatgaacttattgaaaaactattaaaatcaactatgtggcatgaaagattaaattgtatagctacatgttatatggacaagggtatattgaaaaatgtggatctaaacattgtcctcacatattttgcttcaataaatattcgagtgagttatttattttgagagacattagagctatatgtaacctaaagttgcaattaagaatactctgaatttatggtcccttaatatgattgtaattgtctctgcggtcatacgaggcacaagcggagaggatggagacgtgataggtttgcctcttcatctccaagggttaatcggcccaatgcatcaggtcactctctgtctctacgatgtgttgttcgtctctggttgtcattacaaataatatagttttttaaatagttaaacttttag

SEQ ID NO: 7992 - DNA, 1803 bp, Zea Mays
cttttttctaatctctactactacttaagtatctactgtaggcgtgcacagtggtgcacgttctgccacagcgatggcgcacccggccgcggcggcatcccgcccgcagccttccttcaatggcgcaccccacccgcgaccttcctttaatggcgcaccaatcaccccgcccgcggccttccttcaatagcgcaccaatcatcccgcccgcggccactaatcaacgccgcatcccgcccgaggccttccttcaatggcgcgtggaaggtcgtctgttattaattggtgcgaccacggacgacaccatggctccgcccgacgcccctctccccgcaactcgcaagcccgatattgtcggcgttctcgcacccaccgatttggcctgcctcccccaggattgccggcgttctcccccctccccgtcgcgccgcgcgatgccagccgtgattcccgcgtccgcccgccccacatctacaaacttgctctgcagatgtcctcccgcccatcgtcatccatcccctgccgccgccacggacgaccttcctcggccgccacaagggggcttctgtaagcgagcgtgcagggggagctataggcgagcgcgcagggggacccgcacacgacgacgcccgcgaggatgctggaggacgtcatcgccgtcgcgctcaacattagggcctccgacgcgctctttttggcctagaaacggaggaggcgatgcggcgccgtctcgcccgtcagccggtggccgcaccaatgagttccacgccgccacgctgcaccttcctcgtcgtcggtgtcctcctcgaacctgtgcactggtgccacaacactggatgggtataggaagcatatagagaaagatcctgccttggaaagaaggtttcaaccagttaaggttccagagcctactgtggatgaaacaatacagatcttaagaggacttcatgagagatatgaacttcatcacaaactgagatacacagatgatgctttaattgctgctgcacaactgtcttatcagtatatcagcgatcgttttctgcctgacaaagccattgacttgattgatgaagctggatctcgtgttaggctgaggcatgcgcagctccctgatgaagccaaagagctggacaaagagctgcggcagataagcaagcagaaaaataaggctgtacgtggccaagattttgagaagaatctgtagcaaatggctaacgatgaggacatccatcacttgtttatgacaatagaactgatatgttcaagattccgtagcaacgcacgggcacccaactagttctccacatatgggaataacagggcgaccataattcatgacgagtcgtcaatgtccactgcctcagctaaaagaagtttatcaaagatgaacttattgaaaaactattaaaatcaactatgtggcatgaaagattaaattgtatagctacatgttatatggacaagggtatattgaaaaatgtggatctaaacattgtcctcacatattttgcttcaataaatattcgagtgagttatttattttgagagacattagagctatatgtaacctaaagttgcaattaagaatactctgaatttatggtcccttaatatgattgtaattgtctctgcggtcatacgaggcacaagcggagaggatggagacgtgataggtttgcctcttcatctccaagggttaatcggcccaatgcatcaggtcactctctgtctctacgatgtgttgttcgtctctggttgtcattacaaataatatagttttttaaatagttaaacttttag

SEQ ID NO: 7993 - DNA, 1451 bp, Zea Mays
cttttttctaatctctactactacttaagtatctactgtaggcgtgcacagtggtgcacgttctgccacagcgatggcgcacccggccgcggcggcatcccgcccgcagccttccttcaatggcgcaccccacccgcgaccttcctttaatggcgcaccaatcaccccgcccgcggccttccttcaatagcgcaccaatcatcccgcccgcggccactaatcaacgccgcatcccgcccgaggccttccttcaatggcgcgtggaaggtcgtctgttattaattggtgcgaccacggacgacaccatggctccgcccgacgcccctctccccgcaactcgcaagcccgatattgtcggcgttctcgcacccaccgatttggcctgcctcccccaggattgccggcgttctcccccctccccgtcgcgccgcgcgatgccagccgtgattcccgcgtccgcccgccccacatctacaaacttgctctgcagatgtcctcccgcccatcgtcatccatcccctgccgccgccacggacgaccttcctcggccgccacaagggggcttctgtaagcgagcgtgcagggggagctataggcgagcgcgcagggggacccgcacacgacgacgcccgcgaggatgctggaggacgtcatcgccgtcgcgctcaacattagggcctccgacgcgctctttttggcctagaaacggaggaggcgatgcggcgccgtctcgcccgtcagccggtggccgcaccaatgagttccacgccgccacgctgcaccttcctcgtcgtcggtgtcctcctcgaacctgttgttcgatcgaaattcgacctgaaaacgggcacaagagatgtccgtaacacgggtggacttgagctgagaacaagaagcgaagcaactcgctggatctcattctcgaacgccaatcccccagtcccctcctccgtctgctggccagaccagacctgctctgctctgctctttttcctccataagcaacatggagaaatggcctgtcactgcctcccaactctctaacagcgatctctcgcctgggcactaattagtgcttaggctaatgtatgatcggaggatccccgacaaacacgctggcctaatgctctcccatcccaagtgatcctccgagaactagctggtgcgaaggcaggatgtgttgtctgcctctgtgacccccagtcgctattgttttgttttgtgggtggttactgttacctgcttctgaaacaagcaacccactgcagtgagcaaaggaagaaagaaaggtgtggtgtgtgcccgttttcaggtcggtcgtgactttggttatccattgaaaagatatgcttggtggttgtgctgaagaacaagtatcccacggaaccacaaccgtttgtattatctggtgatttcctgcattattagctggcctaactaaaccatgcgctcag

SEQ ID NO: 7994 - DNA, 2777 bp, Zea Mays
cagaaacattgttaaatcacgtttttgaagaccctcggaagctgaaggccccaacaataagctaagccaaagatcttaaagacaaacaacctccattacacaactggaagtggaaggagcctgtaaagctctcgtcgaaaatccatcgcctctgccctgcctcctgaaaagcagctccactatatagcgcgaaggagcctgtaaagctctcgtcgaggatccatcggcccccaagggccagaacgcatctcaaaaatcagagctcagccccccaatccgactcgtagaagcatcaccaccggggcgagtggtgaacgaacggagatgctggtgatcgacctgggcatatggctcatcccgctggcgctcgtcctcgtcccgtgccgccggatcgcgctcctcctgtcgaggctcgaggagctcggccggagcgtgacggggccgaggctccccacggcggacatgtgggcccgcttcgccaccctcaactccatggctttcatggcgtgaggtgacggtagcgctgctgcctctgagccatcttccttcctcctttgggtccgttgaagtgaatttcctgatatgatacgtatatattgcttcgatttcaagatgaggattttccggaacgtgatgcagtatatatatgtatatatgcgtcttcttctcaccaccagatagcaacatcaggttgtcgtagaacagatcactctgctgatgttagatggagccaacctactggtgataaatgaagagaaggatgcagcagatcggaagctttggtgttggaattcctcatcatatttgcatggcgcagaagaaataggctgcgaagcctaccgcggtccagcttctcgagcagcttcctcgcgccggccacgtccttctccgagagcttcttcaggtacccgatggcgccgtgagagaccatcagcttcttgcaccgcttgctcgccgaaagcgccagcaggcaggagatggcgtacttcttggccgtgttctgggggctcgggtccagcagctgcaccaggttgggcacgctcttctcgtccttcttgacgtccctcgcgttcgcggggcaccccatcaggctcgccaccgcctgcgccgcggcctcgcgagcgccgttcgacttggcctccagcaggcgcaccaggagcaggacgcacccgtgctcgcccaccagccgcttcatgtccatgctgccggagaccttgcagatggtcgccgcggcagcctgctgggcacccacggaaccgtcgcggagcacgtgtgcgaggcgcgggagcacgcaaagtgacaccaggctgtcaggtgggacaacggtgaccaggttccggagcgcggccacgggtggctcctgcggcagtggcccgtcgaggtaggcgagcaggctacggaggccgccctcggacacgacggcgcgccgcaggttgtcgttgcttgacgtgaggttctgcaggcactccgcggcgtactccttggagccgagaacgacgccggagtcgaggatgttgatcatgactcgcaccacgccttcctcggccagcgcttgccggacttctggcaccgcagagatgttcttgagcgctcccgacgcggcggactgtgtgatcgagtccccggtctggcacatgtcgatgagagcgcggaagccgctgtggccgacgatcgcacgggcaatgtcggccgacatggacagccgctgcagcgtgatgacggccttctcccgcccaacaaggctaccggactcagccagccggatgagcggtggcagcgcgccttctgacaccagtaagccctcgcagctgccagactcggcgagcaagcacaaaacagtggcggccttctccctaaccttgggtgtcgtcgccgtgagcagctgcacgagtgcggccacgttgccacggccgagcgccgacagcacgctcttctcgtcctcgcgcagagcatcgagcaggccatccacagcccggtgcttcgcctctgcgtgcccaatctgcagcctggcaagcagctcccgcacgtccacctgtgcgccagcagccgacgctgtctcagccggggccgcgggaaccgtcgcgtcagacaacacaccagtcttgacaagaagagagcaatccctgaggttgagatccagcttcccggccagcgcgtcgaggtcgctctgcatctgcagcttccccgccttcggaggctcgtggcagcgcgcaccgagctcggcggcctccgctagcgttgcagccaccgactgcaacagctcccgacagagcgagttcttggagaagcaggggtggctagacaggtccgacaggcactgcggcagcctccccagcctcgctgcgatagccttccaccgcccaccgaagccagtggccgcgcgcgcagcggccagggcgggtggcaccagcccccgcgcccgttcaagcagctcctctgccgtcgcgcccccggccacggccggacagctcccaaagctcatttcttggcagctaggacaccagaagctgagccatgtcctgcggttacctctctcaccgatgccggtcgtgtcgccgcccgccacccctcctcgcccaccgccactttccggcggcctccacctcctcctcccggcgccgctcgccgcgacgcagagtccaaccagaggtagattggctgcaatcaggacgcgtggacgccgatcatcaatcaaacgacaaccatcctgggaacgccgctgcgcgcgtgggcgttgttgctcctactcgatcgctgcatgattgggaggaggatct

SEQ ID NO: 7995 - DNA, 3574 bp, Zea Mays
cggccgcagggctggcgggtagaagtagaatcgatggccaggtcccgccaaccaccgtcctgcttcttccgatcccattcgattccagagttcaacatccatccttttcattcgtacgccgtcgtggtcgtggtcgccacccacgactcttccacctccggcctctctgcccaattcaatctcgggctccgaccacagggaaagatcaatcgaaagcggagccgtgttgagagcaaccgaggaaccaggcgcccgggcggtgatggagaacggcaacaacggcggcaatccgccgcactacccgccgtaccaatacccgtatccgcaggcgcaggcgcaactgtatccttacgggtaccagtacccgcctgcgccgccgtcgccgtcgccgtctgccgcgccggcggggccatacctctctccgtctccatccttcccgagctatgcccccgccccgcatccgccgcagcagtttcactccggcccgctccaggcgtacccgcccccgccgcagtaccacgcctacccgccgccgccgcatccatcgccttacggccacgggtacgacccctacccatccccgtatttctcctacccgagcaccaaccctagccccagccccagcccggggctctcgcccagctccagcttccaccaccagcacgcctccgcgcccgaacccccgtcgcccgcgccctccgcaccctccgcgccgtcctatcccatcgaggatgtccttgccagcatgcgcctctccggccgtcacgattacgcgtcgtcgccctcagtgaccccgccctcgacccccttcttgggcgatgggagcagccacggcggcgggatgcagctggtgccctatggcacggccgccggagggtcgcagcacggaggcgggatgcaggtggtgccctatggtgcggccgcgggagggtcgcagcacggcggcagcttcagggcatcgcttaaggtggtgctgctccacggcagcctcgacatctgggtgcacgacgcgcgacacttgcctaacaaggatatgttctccaagagggtcggcgagctccttggcccacgcatcaccagcgctgttggcagcaagatgtccagcgcgtccatgaccagcgacccctatgtcaccgtacaggtctcctatgccaccgtcgcgcggacctatgtcatccccaactgtgagaatccagtctggtcgcagaacttcatggtgcccgtcgggcatgaggctgccgaagtccagtttgttgtcaaggacagtgatgtcttcggtgctcaaatcatcggtgttgtgtccattcccgccgagaagcttctgacaggggacaggattcagggtgtcttccccgtccttgagcccaatggcaagccttgtgctcctggagctgtactgcatttgtcaatacagttgatccccgttgctcagctcacaatgtaccaccatggcgtcattgctggtccagacagtcatggagtgcctcatacttacttcccacttaggcgtggcatgagagtgaccctgtatcaagacgcccatgtgcctgatggttgtctcccagacatatggcttagcaatgggctgcgctaccagcacgggcagtgttggcgtgacatctatgatgccatatgccaggcaaggaagttaatttacattgtggggtggtctgttttccacacaatccacctcgtgagagatggcactcaagctccatcacttggggacctgttgaagatgaagtcacaggaaggggtgcgtgtgttgctgcttgtttgggatgatcctacatcgaggagcattcttggatataagatggatggtttcatgggcacaagagatgaggagacacgcagatttttcaagcattcttcagtccaagtgttgctctgcccacgatctgctgggaaacgccacagctgggtgaaacagcaggaaacaggaaccatttttacccatcatcagaaaacagttattgtggatgctgatgctggcaactataggagaaagatagttgcttttgttggaggcctagatttatgtggcggacgatatgatacaccttggcatcctctgtttcggactcttcagaatgaacacaaagaggattattacaatccaaactttaatacagttgatgctcgtggtccaagggaaccatggcatgacttgcattctaagatcgatggtccagctgcttatgatgttctacagaactttcaggagcgttggttaaaagcggccaaacgacatgggattaaaaagttggcaaaatcctatgacgatgctctgctcactattgaaagaataccagagattataaacataaatgatgcaatatattttagtgacaatgatccagagacatggcatgttcaggtgtttcggtctattgattcaaactctgccaagggatttccaaaggatccacgagcagcaaccatgaagaatcttgtttgtggaaagaacgtacttattgacatgagcatacatacggcttatgtccatgctatccggtcagcccaacattatatttatattgagaatcagtacttcattggttcttcatttaattgggattcaaacaaggacttaggggctaacaatttaattccaattgaaattgctctcaaaattgcaaataagattaaggcaaatgaaaggttttctgcatacatagtggtacctatgtggcctgagggtaatccaactggggctgcaacacaacgaattctttactggcagaataaaaccatgcaaatgatgtacgagacaatatacaggaccttgaaagaagaaggcctggatgatatgtatgagcctcaggattatttaaacttcttctgtcttggcaaccgtgaagttgctgacagcactagcacttcaaacgcttcgaatacagcaaataatcctcagatttatggctacagaatgtccttatgggctgagcatattggaagcattgaggaagacttcaactatccggagagcctggagtgcatgaggcgtgtacgtcatcttggggaagagaactggaagcagtttgttgccgatgaggtgacggagatgagaggccacctcatgaagtatccagtaagcgttgaccgtaaaggcaaggtgaaaccgctacccggatgcacaacattcccagatatgggtgggaacatctgtggctcgtttgtggccatccaggaaaacctcacaatataaactttagctgtgcaacttacataatgtctggtggcctctgcccagggggaccctagcactagcttatcctctttcttgagagcgtagatagggtgaaaattttgcaatagctacaggttgcaggcaagcaggggaaatggtaatatgggctttctccccttgacctttttttctggattcgttcagtacatatataagtagccaatcaatttatacctttattgggtacatgtatagaaaaattaaagaggttcaggaatatcacatttggaccaaggtattccaatgtagatcctggaaagtactggtaaatgttcagaatgtaaattgatcctgcagaatattttcaagtgtttttccctt

SEQ ID NO: 7996 - DNA, 3684 bp, Zea Mays
cggccgcagggctggcgggtagaagtagaatcgatggccaggtcccgccaaccaccgtcctgcttcttccgatcccattcgattccagagttcaacatccatccttttcattcgtacgccgtcgtggtcgtggtcgccacccacgactcttccacctccggcctctctgcccaattcaatctcgggctccgaccacagggaaagatcaatcgaaagcggagccgtgttgagagcaaccgaggaaccaggcgcccgggcggtgatggagaacggcaacaacggcggcaatccgccgcactacccgccgtaccaatacccgtatccgcaggcgcaggcgcaactgtatccttacgggtaccagtacccgcctgcgccgccgtcgccgtcgccgtctgccgcgccggcggggccatacctctctccgtctccatccttcccgagctatgcccccgccccgcatccgccgcagcagtttcactccggcccgctccaggcgtacccgcccccgccgcagtaccacgcctacccgccgccgccgcatccatcgccttacggccacgggtacgacccctacccatccccgtatttctcctacccgagcaccaaccctagccccagccccagcccggggctctcgcccagctccagcttccaccaccagcacgcctccgcgcccgaacccccgtcgcccgcgccctccgcaccctccgcgccgtcctatcccatcgaggatgtccttgccagcatgcgcctctccggccgtcacgattacgcgtcgtcgccctcagtgaccccgccctcgacccccttcttgggcgatgggagcagccacggcggcgggatgcagctggtgccctatggcacggccgccggagggtcgcagcacggaggcgggatgcaggtggtgccctatggtgcggccgcgggagggtcgcagcacggcggcagcttcagggcatcgcttaaggtggtgctgctccacggcagcctcgacatctgggtgcacgacgcgcgacacttgcctaacaaggatatgttctccaagagggtcggcgagctccttggcccacgcatcaccagcgctgttggcagcaagatgtccagcgcgtccatgaccagcgacccctatgtcaccgtacaggtctcctatgccaccgtcgcgcggacctatgtcatccccaactgtgagaatccagtctggtcgcagaacttcatggtgcccgtcgggcatgaggctgccgaagtccagtttgttgtcaaggacagtgatgtcttcggtgctcaaatcatcggtgttgtgtccattcccgccgagaagcttctgacaggggacaggattcagggtgtcttccccgtccttgagcccaatggcaagccttgtgctcctggagctgtactgcatttgtcaatacagttgatccccgttgctcagctcacaatgtaccaccatggcgtcattgctggtccagacagtcatggagtgcctcatacttacttcccacttaggcgtggcatgagagtgaccctgtatcaagacgcccatgtgcctgatggttgtctcccagacatatggcttagcaatgggctgcgctaccagcacgggcagtgttggcgtgacatctatgatgccatatgccaggcaaggaagttaatttacattgtggggtggtctgttttccacacaatccacctcgtgagagatggcactcaagctccatcacttggggacctgttgaagatgaagtcacaggaaggggtgcgtgtgttgctgcttgtttgggatgatcctacatcgaggagcattcttggatataagatggatggtttcatgggcacaagagatgaggagacacgcagatttttcaagcattcttcagtccaagtgttgctctgcccacgatctgctgggaaacgccacagctgggtgaaacagcaggaaacaggaaccatttttacccatcatcagaaaacagttattgtggatgctgatgctggcaactataggagaaagatagttgcttttgttggaggcctagatttatgtggcggacgatatgatacaccttggcatcctctgtttcggactcttcagaatgaacacaaagaggattattacaatccaaactttaatacagttgatgctcgtggtccaagggaaccatggcatgacttgcattctaagatcgatggtccagctgcttatgatgttctacagaactttcaggagcgttggttaaaagcggccaaacgacatgggattaaaaagttggcaaaatcctatgacgatgctctgctcactattgaaagaataccagagattataaacataaatgatgcaatatattttagtgacaatgatccagagacatggcatgttcaggtgtttcggtctattgattcaaactctgccaagggatttccaaaggatccacgagcagcaaccatgaagaatcttgtttgtggaaagaacgtacttattgacatgagcatacatacggcttatgtccatgctatccggtcagcccaacattatatttatattgagaatcagtacttcattggttcttcatttaattgggattcaaacaaggacttaggggctaacaatttaattccaattgaaattgctctcaaaattgcaaataagattaaggcaaatgaaaggttttctgcatacatagtggtacctatgtggcctgagggtaatccaactggggctgcaacacaacgaattctttactggcagaataaaaccatgcaaatgatgtacgagacaatatacaggaccttgaaagaagaaggcctggatgatatgtatgagcctcaggattatttaaacttcttctgtcttggcaaccgtgaagttgctgacagcactagcacttcaaacgcttcgaatacagcaaataatcctcagctaatattaaccagagatccatggaaggaataagagacactgagattgcgatgggagcgtatcagccacaatatacatgggctaataagctttctgccccacgtggacagatttatggctacagaatgtccttatgggctgagcatattggaagcattgaggaagacttcaactatccggagagcctggagtgcatgaggcgtgtacgtcatcttggggaagagaactggaagcagtttgttgccgatgaggtgacggagatgagaggccacctcatgaagtatccagtaagcgttgaccgtaaaggcaaggtgaaaccgctacccggatgcacaacattcccagatatgggtgggaacatctgtggctcgtttgtggccatccaggaaaacctcacaatataaactttagctgtgcaacttacataatgtctggtggcctctgcccagggggaccctagcactagcttatcctctttcttgagagcgtagatagggtgaaaattttgcaatagctacaggttgcaggcaagcaggggaaatggtaatatgggctttctccccttgacctttttttctggattcgttcagtacatatataagtagccaatcaatttatacctttattgggtacatgtatagaaaaattaaagaggttcaggaatatcacatttggaccaaggtattccaatgtagatcctggaaagtactggtaaatgttcagaatgtaaattgatcctgcagaatattttcaagtgtttttccctt

SEQ ID NO: 7997 - DNA, 3760 bp, Zea Mays
cacggccgcagggctggcgggtagaagtagaatcgatggccaggtcccgccaaccaccgtcctgcttcttccgatcccattcgattccagagttcaacatccatccttttcattcgtacgccgtcgtggtcgtggtcgccacccacgactcttccacctccggcctctctgcccaattcaatctcgggctccgaccacagggaaagatcaatcgaaagcggagccgtgttgagagcaaccgaggaaccaggcgcccgggcggtgatggagaacggcaacaacggcggcaatccgccgcactacccgccgtaccaatacccgtatccgcaggcgcaggcgcaactgtatccttacgggtaccagtacccgcctgcgccgccgtcgccgtcgccgtctgccgcgccggcggggccatacctctctccgtctccatccttcccgagctatgcccccgccccgcatccgccgcagcagtttcactccggcccgctccaggcgtacccgcccccgccgcagtaccacgcctacccgccgccgccgcatccatcgccttacggccacgggtacgacccctacccatccccgtatttctcctacccgagcaccaaccctagccccagccccagcccggggctctcgcccagctccagcttccaccaccagcacgcctccgcgcccgaacccccgtcgcccgcgccctccgcaccctccgcgccgtcctatcccatcgaggatgtccttgccagcatgcgcctctccggccgtcacgattacgcgtcgtcgccctcagtgaccccgccctcgacccccttcttgggcgatgggagcagccacggcggcgggatgcagctggtgccctatggcacggccgccggagggtcgcagcacggaggcgggatgcaggtggtgccctatggtgcggccgcgggagggtcgcagcacggcggcagcttcagggcatcgcttaaggtggtgctgctccacggcagcctcgacatctgggtgcacgacgcgcgacacttgcctaacaaggatatgttctccaagagggtcggcgagctccttggcccacgcatcaccagcgctgttggcagcaagatgtccagcgcgtccatgaccagcgacccctatgtcaccgtacaggtctcctatgccaccgtcgcgcggacctatgtcatccccaactgtgagaatccagtctggtcgcagaacttcatggtgcccgtcgggcatgaggctgccgaagtccagtttgttgtcaaggacagtgatgtcttcggtgctcaaatcatcggtgttgtgtccattcccgccgagaagcttctgacaggggacaggattcagggtgtcttccccgtccttgagcccaatggcaagccttgtgctcctggagctgtactgcatttgtcaatacagttgatccccgttgctcagctcacaatgtaccaccatggcgtcattgctggtccagacagtcatggagtgcctcatacttacttcccacttaggcgtggcatgagagtgaccctgtatcaagacgcccatgtgcctgatggttgtctcccagacatatggcttagcaatgggctgcgctaccagcacgggcagtgttggcgtgacatctatgatgccatatgccaggcaaggaagttaatttacattgtggggtggtctgttttccacacaatccacctcgtgagagatggcactcaagctccatcacttggggacctgttgaagatgaagtcacaggaaggggtgcgtgtgttgctgcttgtttgggatgatcctacatcgaggagcattcttggatataagatggatggtttcatgggcacaagagatgaggagacacgcagatttttcaagcattcttcagtccaagtgttgctctgcccacgatctgctgggaaacgccacagctgggtgaaacagcaggaaacaggaaccatttttacccatcatcagaaaacagttattgtggatgctgatgctggcaactataggagaaagatagttgcttttgttggaggcctagatttatgtggcggacgatatgatacaccttggcatcctctgtttcggactcttcagaatgaacacaaagaggattattacaatccaaactttaatacagttgatgctcgtggtccaagggaaccatggcatgacttgcattctaagatcgatggtccagctgcttatgatgttctacagaactttcaggagcgttggttaaaagcggccaaacgacatgggattaaaaagttggcaaaatcctatgacgatgctctgctcactattgaaagaataccagagattataaacataaatgatgcaatatattttagtgacaatgatccagagacatggcatgttcaggtgtttcggtctattgattcaaactctgccaagggatttccaaaggatccacgagcagcaaccatgaagaatcttgtttgtggaaagaacgtacttattgacatgagcatacatacggcttatgtccatgctatccggtcagcccaacattatatttatattgagaatcagtacttcattggttcttcatttaattgggattcaaacaaggacttaggggctaacaatttaattccaattgaaattgctctcaaaattgcaaataagattaaggcaaatgaaaggttttctgcatacatagtggtacctatgtggcctgagggtaatccaactggggctgcaacacaacgaattctttactggcagaataaaaccatgcaaatgatgtacgagacaatatacaggaccttgaaagaagaaggcctggatgatatgtatgagcctcaggattatttaaacttcttctgtcttggcaaccgtgaagttgctgacagcactagcacttcaaacgcttcgaatacagcaaataatcctcaggaacaagctaggaaaaataggagattcatggtctatgtacattcaaaaggcatgattgtggatgatgagtatgttatcattggatcagctaatattaaccagagatccatggaaggaataagagacactgagattgcgatgggagcgtatcagccacaatatacatgggctaataagctttctgccccacgtggacagaatgtccttatgggctgagcatattggaagcattgaggaagacttcaactatccggagagcctggagtgcatgaggcgtgtacgtcatcttggggaagagaactggaagcagtttgttgccgatgaggtgacggagatgagaggccacctcatgaagtatccagtaagcgttgaccgtaaaggcaaggtgaaaccgctacccggatgcacaacattcccagatatgggtgggaacatctgtggctcgtttgtggccatccaggaaaacctcacaatataaactttagctgtgcaacttacataatgtctggtggcctctgcccagggggaccctagcactagcttatcctctttcttgagagcgtagatagggtgaaaattttgcaatagctacaggttgcaggcaagcaggggaaatggtaatatgggctttctccccttgacctttttttctggattcgttcagtacatatataagtagccaatcaatttatacctttattgggtacatgtatagaaaaattaaagaggttcaggaatatcacatttggaccaaggtattccaatgtagatcctggaaagtactggtaaatgttcagaatgtaaattgatcctgcagaatattttcaagtgtttttccctt

SEQ ID NO: 7998 - DNA, 2263 bp, Zea Mays
gagccacagccaaatgatactctttggttagccagccgaaattctctagcctggcagcagccatgggagaagcacaagactactacgacacctccacggctctggccgccgccgccgccgccgccgccggcctcgcgctgctcgcggtctgctcgtactacctgctcgtcgggcggcgccgcggcggcggcggcggcaaggcgccgaagcggtacgcgccggtggtggggacggtgttccaccagctgtaccacgtccggcggctgcacgactaccacacggacctgttccgggagcgcaagaccttccagctgctggtgccggccggccggcggcagatatacacgtgcgaccccgccgtggtcgagcacatcctcaggaccaacttcgccaactacggcaagggaagcttcaactacgagaacatgactgacctgctcggcgacggcatcttcgccgtggacggcgacaagtggaggcagcagcggaagatcgccagctacgacttctccacgagggcgctgcgcgacttcagcggctcggtcttcaagaggaacgccgcgaggctcgccggcatcgtctccggcaaggcggcgtccgggcagcccatggagttccagggcctcgcgctcagggcgaccatggactccatcttcaccatcgccttcggcctggacctagacacgctgggcggctcggcggaagggagccgcttcgccgcggcgttcgacgacgccagcgagttcacgctgctccgctacgtgaacgcgttctggaaggcgcagaggttcctcggcgtaggctccgaggcggcgctcaagaagcgggtcaaggtcgtcgacgagttcgtgtacaagcgcatccgcgagagagcccaggagctctccgacagcaagctggcgaccgaggacactgtccctgattcgaggcaagacatgctgtccagattcatccacacggccacgaacgagtccgggacggtggactacaagtacctgagggacatcatactgaacatagtcatcgccggcaaggacacgacggcgggggcgctcgcctggttcctctacatggcgtgcaagcacccggagatccaggagaagatctgccaggaggccgcaaaggcgaccgacgccagcgagacggcgggcgtggacgagttcgcgcagagcctgaccgacgaggccctgaacaagatgcactacctgcacgccgcgctgaccgagacgctcaggttgtacccgtcggttcctctggataacaagcagtgcttcggagacgacgtcctgcctgacggttccagcgtcagcaagggagacatcgtgttctacgtcccctacgccatgggccggatggagtacctctggggcaaggacgccgaggtgttccggccggagcggtggctggatcaggacggagagttccagcaggagagcccgttcaaattcacagcgttccaggctggtccgaggatatgcctggggaaggagttcgcgtaccggcagatgaagatcttcgcggcggtgctcctccgattcttcgtgttccgcctgcgcgacggcgacaaagcgagcgtgaattaccggaccatgatcacgctccacatcgacgagggtctgcatctgacagcgacggcgagatgaggtcgcctggcctggccaccggtggacacgtagccgccggtgcctgtagctacgcgagcgacaggctagcttgcatgcagtacgtcagtgtcgcggcggtgaggcggtgagcagaggtcggtgttctacgccatgcgtccgtgtctgaaaatatcggacttgtcacctgaatctcagctgatcgtcgtcgttcagagcacgtttttcagcattggtggtcacggcgaaacgccacgcatccgcagtttcccgggatctgtgccacatcaagtcatggcaagcaccgtttgctgtcaagacgatggatggctgacgcgacatcctgctggtctagacgatgggcatggagtcgcctcggacagcaacttgcgtcaacatggtcgtcgtgatatatttgacagatggcaccggcaccggcaccggaccgagacgcacggtgacggtgctcactacagctgttcaacgttcttgcgtcacaggagcgacacatgaacaatgactgagcccccaactcactgaaatggattagggaatataagaataaatattggattcacccaataattggagtataaatcgtaagaaaggagaatcacctaatttgtaagactttgttggtc

SEQ ID NO: 7999 - DNA, 2369 bp, Zea Mays
gagccacagccaaatgatactctttggttagccagccgaaattctctagcctggcagcagccatgggagaagcacaagactactacgacacctccacggctctggccgccgccgccgccgccgccgccggcctcgcgctgctcgcggtctgctcgtactacctgctcgtcgggcggcgccgcggcggcggcggcggcaaggcgccgaagcggtacgcgccggtggtggggacggtgttccaccagctgtaccacgtccggcggctgcacgactaccacacggacctgttccgggagcgcaagaccttccagctgctggtgccggccggccggcggcagatatacacgtgcgaccccgccgtggtcgagcacatcctcaggaccaacttcgccaactacggcaagggaagcttcaactacgagaacatgactgacctgctcggcgacggcatcttcgccgtggacggcgacaagtggaggcagcagcggaagatcgccagctacgacttctccacgagggcgctgcgcgacttcagcggctcggtcttcaagaggaacgccgcgaggctcgccggcatcgtctccggcaaggcggcgtccgggcagcccatggagttccagggcctcgcgctcagggcgaccatggactccatcttcaccatcgccttcggcctggacctagacacgctgggcggctcggcggaagggagccgcttcgccgcggcgttcgacgacgccagcgagttcacgctgctccgctacgtgaacgcgttctggaaggcgcagaggttcctcggcgtaggctccgaggcggcgctcaagaagcgggtcaaggtcgtcgacgagttcgtgtacaagcgcatccgcgagagagcccaggagctctccgacagcaagctggcgaccgaggacactgtccctgattcgaggcaagacatgctgtccagattcatccacacggccacgaacgagtccgggacggtggactacaagtacctgagggacatcatactgaacatagtcatcgccggcaaggacacgacggcgggggcgctcgcctggttcctctacatggcgtgcaagcacccggagatccaggagaagatctgccaggaggccgcaaaggcgaccgacgccagcgagacggcgggcgtggacgagttcgcgcagagcctgaccgacgaggccctgaacaagatgcactacctgcacgccgcgctgaccgagacgctcaggataacaagcagtgcttcggagacgacgtcctgcctgacggttccagcgtcagcaagggagacatcgtgttctacgtcccctacgccatgggccggatggagtacctctggggcaaggacgccgaggtgttccggccggagcggtggctggatcaggacggagagttccagcaggagagcccgttcaaattcacagcgttccaggctggtccgaggatatgcctggggaaggagttcgcgtaccggcagatgaagatcttcgcggcggtgctcctccgattcttcgtgttccgcctgcgcgacggcgacaaagcgagcgtgaattaccggaccatgatcacgctccacatcgacgagggtctgcatctgacagcgacggcgagatgaggtcgcctggcctggccaccggtggacacgtagccgccggtgcctgtagctacgcgagcgacaggtccttgacaccgtaccttgtgtacatatatatatgcaaagaaacgaaaacgagcagtggtagtaggcaaccactttgtgtactgcgtcttgctggggaataatgacatgtcatggcatgagttgcaggctagcttgcatgcagtacgtcagtgtcgcggcggtgaggcggtgagcagaggtcggtgttctacgccatgcgtccgtgtctgaaaatatcggacttgtcacctgaatctcagctgatcgtcgtcgttcagagcacgtttttcagcattggtggtcacggcgaaacgccacgcatccgcagtttcccgggatctgtgccacatcaagtcatggcaagcaccgtttgctgtcaagacgatggatggctgacgcgacatcctgctggtctagacgatgggcatggagtcgcctcggacagcaacttgcgtcaacatggtcgtcgtgatatatttgacagatggcaccggcaccggcaccggaccgagacgcacggtgacggtgctcactacagctgttcaacgttcttgcgtcacaggagcgacacatgaacaatgactgagcccccaactcactgaaatggattagggaatataagaataaatattggattcacccaataattggagtataaatcgtaagaaaggagaatcacctaatttgtaagactttgttggtc

SEQ ID NO: 8000 - DNA, 1757 bp, Zea Mays
aataaaacattatattagcgagaaggcacaaatttatagtacaaaaaattcacacagatgtagatataaataagaaagcctaagaagaaacatgatgagcatttaactgacatgatcactactcatcttttaattcacggtgatccctattattggtgcaagtgatcttaccttcctgctcctcttttcagccctcatccttatctgtacacctctgaccctcctcacttttctgtcattgcctttaccttcttgaaaaaaaaataagctttttatctgctttgccttatatttcatatggctgccattggtgctgaacttgttgcgctactacttggcccagggagttgcaacctgcagcagctgctccttattactttggtgagttggaggaggcacttatccatggcactcgtacttctgtcgatcacagcatgattggaagtgatgtggacacagagattaagagtaagattgccttttttttctctgcacctctctcctttaatccaaaaccttaaccaccagtggaatcggcttctttcttgcttgctttctttgctgccctccctccctacaactacaacaccacagtagataagcacagggtagcatggcttggcttttgcctggccaagcacagaataagattcctacactggtaatcagctataaattggaattaagattcctacactggtaatcagtgttgacatattagacctaaaattaggtcaaccaggtatctaagaaaagatcattattgatcactcaagacttatttactttgttgaatccctctagcaaaaggacccaagacatttccatctttaggaatccctctagagcatatctggaaaccctcaaaactcattttttttcttctcgtattgtgactgctagtgaagaatcccaattttccagacacaaatagtccagtcccttcatatcatggattgaaaaaaatcaaggtaccttggaatcaagttgctcttgaagtttttagttaagtacttattcaaatgaaatgttgtgcttatgcatgattttttactccctttacctgaacttatggccctttatgttgtatcaggaattttctttatgatgttgggcattgtaaggaattttctttatgatgttgggcattgtaatgttcatccctgggttctactacacaaggattgcctactatgcatacaaaggttacaagggcttatctttttcgaacatcccaccgatctgaaggagtgtgttgtctgcctgctggttatgaagtggtgtcgctggtttaagcatctgtccctggttatgaagtggctctatagacacccttggtctacatctttctatggccattctctttgaacactctagaatgaactggtggatgtgtacagataaatgcagccatagtagtgctccatcgcggttttggccgattggaaggtcatttgttgtgctagtgtgaccatgttcaaccgatacgcattgctacttgtgcattattgtcgtttttgtcagggaccttaaatcattctatgataataagatctcatcattccaattgtgaagaatatactactacctccagtttcaaattacaatttcaaattattacaagttgtttagaacaaccataaggtaattgcgaagaatatactaattgctctagtttcaaattcactaatatatcttcggctacaaaagaacagttgatgcatagcatagggggcaggaatggggacagatgggat

SEQ ID NO: 8001 - DNA, 464 bp, Zea Mays
aggaaatactgtaaagggtaaagagctggattgctggaaggcagcaatgaatctgacagaaatgaaaagagacaacgcaccaaagttttcttcaagtctcagcaagcagagacaaacgattggtatggcatcgaaaaagaaactctggattgtacagtaccccgaatgagctaaaaatattgtcgtagcacaaggaatgaaaaaggcacccatgtttgtgcaatgttgaagagatgtgtgagatctatgtcaatcacattttgcagtggttggtcctgattagttttgtgcttctgctaggacaagaaaagccagggtagtaaacaataccctactaaagcttggcagcaaatggaaagaacccaatgagctatattactatatatcatatctccaagataggtgagtatatgtccactgaggcttgaacacagatacggcagaggcgcaaacagtatcgagat

SEQ ID NO: 8002 - DNA, 1017 bp, Zea Mays
ataccagagcattagacgatcgtactttgtgaggcgctggtctcttgcacagactcggagcaagataggcctagctggttacaagccaagaacaagtagagcggtagagggaaaatatatctggagagggaaacaatggcgggcgaggagggtcttaaggtcctcggcctgcaggtgagcccgttcgtgctccgcgtgtgcttggcgctgaacatgaaaggagtgagttacgagtacgtcgaggaggacatatccaacaagagtgagctcctgctcaagtccaacccggtgcacaagaaggtgcccgtgctcatccacaacggtaagcccatctgcgagtcactcgtcatcatgcagtacgtcgacgagctgttcgccggccggccgatcctcccaaccgacccctacgagcgcgccactgctcgcttctgggctgcctacgccgacgacaagcgtggtacggcatggtgaaggcccaggcggaggaggagagggcggagaaggcgaaggagacgctcgccgccatcgagcacatggaagtgaccttcgccaagtgctccggcggcaacgccttcttcggtggcgactccatcggctacgtcgacatcgtgctgacgtgctcggctccttcttgttctggttcgaggcggtgcgcagggttttcgacctggagatcattaacgctagcaagactccgctgttggctgcgtgggcggagcggtttgtagggactgtagaagcgaaggaggtggtgccgttgcccacggcggacatggcggtacagtacatcaataagcttcatgcccccctgccgccgccatgagttcacaatgagtcgtgtaagtgtaaccaagcagggaaaaaggtaaatggtgcggtgctttggtccaaattccaaccgaataatgttcaaagcttatattgataggcttgggttgttgtcatcaaatattgtggttcagtcgtctcctctgcaataaatataaatatgattattactttctttgccgtaaaata

SEQ ID NO: 8003 - DNA, 2060 bp, Zea Mays
ctagcacacacacgcgttcttctacctctcgctcgtccaacgcttccctctccctgtctccttctccctcacggcagtagcagccagcatagttcttcctcctccatgcttcttcccttcttccatggatggtgcctagcaggagctccatggccagcgcccctcccctgctcggccccttcctcactgctcccttcctctcccctcatggagagttttccccctgcagtcttccccaatgtgcagcaagtttgggagccgacgcccctcctcctactggcgcaggtaattcccatggctgctcctccccatggctggcagcagcttccagcagctcgcccctaaccatatccccagtgagctcctcccttgcattgccgtaggacgtcgctgctactccctcgctccctcatcgtgcagcgcagcacactgcccttatgttgatttccctgccacgcttgcagggtgttcggtaaaaggcgcagcaggagcaacaaccccttctaccgctatggccaagcccggacaccgtcgttccctctaggcgcgcgctcgattcctatcgctgcgcacttgacgacaagctcccttccttgtcgagcctcgctgtgcaacgccatgtagcagcaacggcgcactcttccacctcatgcttgccttcaacctccgcaacaccttctcgacatcagccaccgcgcacccctgctgcccccccttggctgcacgagagtgctctcccacgtcgagcccccctcaatctggttcctggctacagtagcagtcccgacatcgccgcgcagcgagctccaccgcagatctgcgcagccccgacccacgccgtcccgttggtgcttggatagccccatgctgcgtcgtcgatctgcgcagttctaccgtctccgcatctcgcttcgccaggtctacgcagtccctacgtgccgtcgtcaaaacccgtgcccttgtcgtcgtcacgcctcgcgcatcgctcctcggcaaagagcctaaactgatgggatgcatgcgtaactccaatcggatttcggccaggatcgagagatgatgatcgtgcaagtgatgtggtgccaaccacaagatacagatggtggatgacccaaagaatgatggacttaaccagtggatgctcgctaagtgagtgtcatatagcaaacactatctagtgttggattccaggcaagccctggttttatgcataaccgtttatatatgatattttactacacttaatgtttgtaggttcgtaatgtgcacttaagtataggagttgcttgaaaccctagttgcataaactcaggattcctttttgagatggatactagtatgctaggtcgagtagctgctttgctaattagggatctcgatagaagtcgagtgatttttctagcactcgcgcgaggtcaggaattggttgtatccattttttatacagaatgatgatggtctgtggacacagatccatggggatgcgctgcctacgagacgaaattggaataaggattaacgtgcggatacatgtgttaagcgtttgaacgtactaaacacatgttagaaaatatggtaaccggtaagcctagtacctgagtgaagccggacgcggactttacccctcactggacctgagacggagtctcccatatcggattatggtgggtacaagtgcggccattgcacggcggtagcccgggacaattggagcattgtacgcccaaggccgtgagtcatggccgtgaacgggggatcgatggggacggttgacgcgtgtggggggcggagtgcccctacatgtcatgtgtttagggtttaccttgcaaggttaaaactcgattcgaattgtttgcttcttgcagctaatgagactgcttgatccattgtactgtattgagtaataagtgaaaatgaggatactggcaaaagatgttgattgcactaaatgattgttaccatgtatgcttagaaaggagcaagcctagcttaattaaatatgctagaactggaaaagctaaaactgtttttagactcagctagtgcttttggcaaaccaa

SEQ ID NO: 8004 - DNA, 1097 bp, Zea Mays
cgttcttctacctctcgctcgtccaacgcttccctctccctgtctccttctccctcacggcagtagcagccagcatagttcttcctcctccatgcttcttcccttcttccatggatggtgcctagcaggagctccatggccagcgcccctcccctgctcggccccttcctcactgctcccttcctctcccctcatggagagttttccccctgcagtcttccccaatgtgcagcaagtttgggagccgacgcccctcctcctactggcgcagggtgttcggtaaaaggcgcagcaggagcaacaaccccttctaccgctatggccaagcccggacaccgtcgttccctctaggcgcgcgctcgattcctatcgctgcgcacttgacgacaagctcccttccttgtcgagcctcgctgtgcaacgccatgtagcagcaacggcgcactcttccacctcatgcttgccttcaacctccgcaacaccttctcgacatcagccaccgcgcacccctgctgcccccccttggctgcacgagagtgctctcccacgtcgagcccccctcaatctggttcctggctacagtagcagtcccgacatcgccgcgcagcgagctccaccgcagatctgcgcagccccgacccacgccgtcccgttggtgcttggatagccccatgctgcgtcgtcgatctgcgcagttctaccgtctccgcatctcgcttcgccaggtctacgcagtccctacgtgccgtcgtcaaaacccgtgcccttgtcgtcgtcacgcctcgcgcatcgctcctcggcaaagagcctaaactgatgggatgcatgcgtaactccaatcggatttcggccaggttgttcgtcttgagtgattcatgatttgtttttatttacgtaattggtcgatattgtgcatgtatgtttatatgtgtgggaaaaatataattgtatgaatggaagagtgtagagaagaaaataaagtagaaaagaactcagatgtttttatattttgataggaatatatgcgatgtgttgtttgatgcgaagactaagtttaaataaataaaaaaatgtggatcgatgcttcgctttataaa

SEQ ID NO: 8005 - DNA, 569 bp, Zea Mays
tgccatgtccgcaccaaaatcataaaagcgtccgaacgatcagattccgcggcgacctcgtcacgcattggccacgtcgccatgttttggattccccgctgaacgaggctctgacaggcgaagtccagcgcctgaagctcggcgacacagcctcgtccggtaataatctaccccagcaagtgcagctccgttgccagaaccaggtggcggggctgcacaagcagcagcagcagcagggtggtgagcagatacccttctatcagctggagcagaacggcgcgccgaggaacgacgcgcctaaatgaggatggcacacctcgactacctgcgctgggttacacagggaaaaaaaaaaccttgattagtcccgtagatgatacgtttatcttggagctgtgatctcgttcatagtataactacgtttgtcgggccggcagcggcagggaccccgtacgttgctggatattttatattcttctcgatggagtcgtcatagctggcgaaaaaaatgtaatggattgaaattcttttgtagtactctcatttatgaatgaattcgtttcgaaatt

SEQ ID NO: 8006 - DNA, 706 bp, Zea Mays
cacccaactgccactacccatgcttgctttttaagctctcctcctggcgctgcctctcggcgccatcgttccctcctctgcaccccccatcctcggacatcctcgcctgcagcagaccctcctctggtgcgcgtgcgccaccggcgagatgtcgaagaaaatcgtggtgaagctgcacctgcaggacaacaaggacaagcagaaggccatgaaggctgtctcggcgctcaccggcatcgacgagatatccgcggacatggcgtcgcacaagatgacggtggtcggcatggtggaccccgtgagcgtggtgagcaacaggtccagctggccgagctgttgaaccagtattaccgggcctcctcctactacccgtacccgcccgtggccacgcactaccacgtccagagcatggaggaggaccccaactcctgcaccgtctgctaaggcgactcatggcatggagaatgatctacgaaggtgaagaaggtagtgttgaaccagcatgcagtttctttttttttttttcacttctagatcgcgttctggctgctcatggaggatacgcagcgtgtctgtatgtacagtacatatagaataacacgtacgtacgtgtggcggtatatgtgtaaatgggacttcgctttctgggataaccagagctgtatgtagctaatacagttttggattttatacgagtactattgat

SEQ ID NO: 8007 - DNA, 1002 bp, Zea Mays
gtggaccggagatctccctccgctccagctccgattgatgatccccccacccaacttcttccgccaagtgttactcgggtgttccctcccctcccctgtggcctgagagctgtgctgcagagcccaagagaagtcgttggtgcagacagccttggattggatgtggaatgaggcgatggcatctgacggatcatcatcctctaccttccgggggttgtacggcaacgtccacggcccggcggtgctcactggcgcgccgttcgcgctcgtggcgctcctcatctcgctctggctcatcctgcagcacctcagatcctacagcgatccagctgaacagaagtggatcatagctgtgctgttcatggtgcctgtttatgcctgcgaatcgataatctcactgtggaactcgaagctctctctggcctgtgatatattacggaattgttacgaagcctttgctctgtacgccttcggacgatacttggtggcttgccttggtttttttggagtatttggaaactcggaaatgggctttgttttcagaaagtaggctggaaaagcatggagatgcttctacacgggattgctgggttaccacagaactgagcaattccgttcacaacagaatagaacgagtgatagaagagtacggtggatgagattaagccgtcaacaaagaactatcttattgctgcccaactagagcttggaggctttcaaaagcttcatcttggtgtggctggaagagatcaagcctgcagtggtatggtattgacaagaatgccgctgcgtggtcagattcgtcgtgctgttagtggaagtctgtgaacatctcgttggagtagttgtaaaaggattttttctgtttcgatgcaggctttgttgagttgggttctggtttgagacggattttatggcctctggggttagtgttggtgtaaggtttatgtgcccggttgttaggtttaaacttatatttaatctcacctatctaacaaaaca

SEQ ID NO: 8008 - DNA, 686 bp, Zea Mays
tgtacatctatagtcgtcgtgtcctcattcagccgtgcagccagtggcggtggaccggagatctccctccgctccagctccgattgatgatccccccacccaacttcttccgccaagtgttactcgggtgttccctcccctcccctgtggcctgagagctgtgctgcagagcccaagagaagtcgttggtgcagacagccttggattggatgtggaatgaggcgatggcatctgacggatcatcatcctctaccttccgggggttgtacggcaacgtccacggcccggcggtgctcactggcgcgccgttcgcgctcgtggcgctcctcatctcgctctggctcatcctgcagcacctcagatcctacagcgatccagctgaacagaagtggatcatagctgtgctgttcatggtgcctgtttatgcctgcgaatcgataatctcactgtggaactcgaagctctctctggcctgtgatatattacggaattgttacgaagcctttgctctgtacgccttcggacgatacttggtggcttgccttgctacgtacacatctatgctctccccacagctagagtactgggctatattgtcacagaatcttttccgttacggcctatattgtcaacacgcttgcggtatctattgggccctcaaactggagtactgggctacctcgtag

SEQ ID NO: 8009 - DNA, 880 bp, Zea Mays
gcaccacgcagtcatcctcgctcgtgggccgtggcgtctgcctgactgcctgtcttgcagttgcagaccgtccaaaacctggtggcctagtggcgatcggcggccggcatcagcgatggagtaaagggtgcagcacgacagcacgccagcggccagcagggggcaccgggcaggtgggcagcagcaggggacaggctgcaagcagaaatggacattaaaggtcttgaggcagataaactggagtgcaggctctatgtagggaacctagacttcaggatgtcagagtccgatgtaatcaagatgttttccccttttggaaagattacagccgaggattttctgtggcacacacgcggtccaaagagaggcgaaccccggggctatgcctttgttcagtacaccactaaagaggaagctcagttagcaaaggagaagatgaatggaaagttaatctgcggacgcccaatggtagttcaccttgctagtgagagaagttctctaggctcttcaagttcacatagagcagtcaaagacaagaaattggcaggtggttcaggtgccaaatcacaatatactgatacagctgcaaagatagctgctataaaaaataagttgaaatctctggaggatgggggatgtagcacaaaaaaaccaagacttaatccagacaacttgacagaaatcagggaacagtctcataagaagttttgaagcgaggattttttttcgttctctggaacattgagtgcttttgccctctcatactggtgacacttctaaagctgctgctattctataattctagcttcagttagtcaagcacatccaaacaaactgatcttgctgcaacgatagctagttagctacaactaaaaaaagt

SEQ ID NO: 8010 - DNA, 1056 bp, Zea Mays
agtcatcctcgctcgtgggccgtggcgtctgcctgactgcctgtcttgcagttgcagaccgtccaaaacctggtggcctagtggcgatcggcggccggcatcagcgatggagtaaagggtgcagcacgacagcacgccagcggccagcagggggcaccgggcaggtgggcagcagcaggggacaggctgcaagcagaaatggacattaaaggtcttgaggcagataaactggagtgcaggctctatgtagggaacctagacttcaggatgtcagagtccgatgtaatcaagatgttttccccttttggaaagattacagccgaggattttctgtggcacacacgcggtccaaagagaggcgaaccccggggctatgcctttgttcagtacaccactaaagagcattcaggaagctcagttagcaaaggagaagatgaatggaaagttaatctgcggacgcccaatggtagttcaccttgctagtgagagaagttctctaggctcttcaagttcacatagagcagtcaaagacaagaaattggcaggtggttcaggtgccaaatcacaatatactgatacagctgcaaagatagctgctataaaaaataagttgaaatctctggaggatgggggatgtagcacaaaaaaaccaagacttaatccagacaacttgacagaaatcagggaacagtctcataagaagttttgaagcgaggattttttttcgttctctggaacattgagtgcttttgccctctcatactggtgacacttctaaagctgctgctattctataattctagcttcagttagtcaagtgagtcacaagtgtagtgtttccacagtgtatcaaatatgtacaatagtttgtaccgatcatctttttcctgaatgaattgcccttttgatgggggaatcattgtgactacatactgttttgttattgacaacatattctcagtgtgcccctgttgaacatatgtttccttaacttaattgtgtcgcattagtttatccacctatacttaaatcgctgaccacacttttctagaaata

SEQ ID NO: 8011 - DNA, 1024 bp, Zea Mays
agtcatcctcgctcgtgggccgtggcgtctgcctgactgcctgtcttgcagttgcagaccgtccaaaacctggtggcctagtggcgatcggcggccggcatcagcgatggagtaaagggtgcagcacgacagcacgccagcggccagcagggggcaccgggcaggtgggcagcagcaggggacaggacattaaaggtcttgaggcagataaactggagtgcaggctctatgtagggaacctagacttcaggatgtcagagtccgatgtaatcaagatgttttccccttttggaaagattacagccgaggattttctgtggcacacacgcggtccaaagagaggcgaaccccggggctatgcctttgttcagtacaccactaaagagttagcaaaggagaagatgaatggaaagttaatctgcggacgcccaatggtagttcaccttgctagtgagagaagttctctaggctcttcaagttcacatagagcagtcaaagacaagaaattggcaggtggttcaggtgccaaatcacaatatactgatacagctgcaaagatagctgctataaaaaataagttgaaatctctggaggatgggggatgtagcacaaaaaaaccaagacttaatccagacaacttgacagaaatcagggaacagtctcataagaagttttgaagcgaggattttttttcgttctctggaacattgagtgcttttgccctctcatactggtgacacttctaaagctgctgctattctataattctagcttcagttagtcaagtgagtcacaagtgtagtgtttccacagtgtatcaaatatgtacaatagtttgtaccgatcatctttttcctgaatgaattgcccttttgatgggggaatcattgtgactacatactgttttgttattgacaacatattctcagtgtgcccctgttgaacatatgtttccttaacttaattgtgtcgcattagtttatccacctatacttaaatcgctgaccacacttttctagaaata

SEQ ID NO: 8012 - DNA, 1049 bp, Zea Mays
agtcatcctcgctcgtgggccgtggcgtctgcctgactgcctgtcttgcagttgcagaccgtccaaaacctggtggcctagtggcgatcggcggccggcatcagcgatggagtaaagggtgcagcacgacagcacgccagcggccagcagggggcaccgggcaggtgggcagcagcaggggacaggctgcaagcagaaatggacattaaaggtcttgaggcagataaactggagtgcaggctctatgtagggaacctagacttcaggatgtcagagtccgatgtaatcaagatgttttccccttttggaaagattacagccgaggattttctgtggcacacacgcggtccaaagagaggcgaaccccggggctatgcctttgttcagtacaccactaaagaggaagctcagttagcaaaggagaagatgaatggaaagttaatctgcggacgcccaatggtagttcaccttgctagtgagagaagttctctaggctcttcaagttcacatagagcagtcaaagacaagaaattggcaggtggttcaggtgccaaatcacaatatactgatacagctgcaaagatagctgctataaaaaataagttgaaatctctggaggatgggggatgtagcacaaaaaaaccaagacttaatccagacaacttgacagaaatcagggaacagtctcataagaagttttgaagcgaggattttttttcgttctctggaacattgagtgcttttgccctctcatactggtgacacttctaaagctgctgctattctataattctagcttcagttagtcaagtgagtcacaagtgtagtgtttccacagtgtatcaaatatgtacaatagtttgtaccgatcatctttttcctgaatgaattgcccttttgatgggggaatcattgtgactacatactgttttgttattgacaacatattctcagtgtgcccctgttgaacatatgtttccttaacttaattgtgtcgcattagtttatccacctatacttaaatcgctgaccacacttttctagaaata

SEQ ID NO: 8013 - DNA, 1223 bp, Zea Mays
gggtccctccctgctcccctcgtagctcggctgtaataactgacccgctcctcgtgtcgtgtcgcgggctcgcggcactatatctatggcaggcgcgtacgtggcgtgcggcggaggcggcgcgtacctaggggtggtggtggcgtgcgcggcggggtccgtgtgctacgtgctcgccaaggccgcggccgtgctgccgcgccgcgccgcgggtggcgctcgcgccgtagccgctgccggcggcccggaggccatgctcctcctctccctggcgctcgccgccgcgcacctcgccgtggcgtaccggaccagctgccgcgagcgccgccgaatgctcgtgtacaggatcgacgttgaaggcgccgtgaggttaaaaggaggccatcaaacacccaaagggcccaagcagtagtgtagcgtctgacactccgttcccatcatcacacacgtgcgtaggcgcccgaaagattgatttccattttaggagcaaattttggttgagttgtacgctaagatacatttgttactcgtgtaaactactgtcactgccacaagtgaacatactgtaagtaccaaacggtcgtatgctagctcattatcagcattttattgccccggcctcctgcagctgcgacgcagacgcaggacgagccgtgttggacgcccggtcggcctcctgcagttttttttttttttttttgcgtgcgtgtataggtacaatcgcagctgcagtttacatgtgtcccttctggaaaaacgagacttggacgtgtgtccgaagatactaatcagtagctgcacataataaaacgatgcaggctgtaccgaccccggccggttcagagaaacttcttttttttttcgccgaagaattttcgcttttggaaaggagacacggtcagggtcagtgccgttctaccagacgcctcctaactttttcagaccaagctactccaggacaaaaattagacaagacatctggttctgggaccaggaaccttctcgttcttcttgacgccagaaaccaggagaaacgtcctgcccagctttcgacggaccggtttaagaagtcaataaagggaattcttggttctattattgttccatctacatctgacttgagtgtggcccctcccttgtcaaacatctcaggttcagaaaatgagttcaaagaaagcccaacaaccttttgtgcaggtcaaaatgtgcatatggctgtttaa

SEQ ID NO: 8014 - DNA, 1156 bp, Zea Mays
cggcggaggcggcgcgtacctaggggtggtggtggcgtgcgcggcggggtccgtgtgctacgtgctcgccaaggccgcggccgtgctgccgcgccgcgccgcgggtggcgctcgcgccgtagccgctgccggcggcccggaggccatgctcctcctctccctggcgctcgccgccgcgcacctcgccgtggcgtaccggaccagctgccgcgagcgccgccgaatgctcgtgtacaggatcgacgttgaaggcgccgtgaggttaaaaggaggccatcaaacacccaaagggcccaagcagtagtgtagcgtctgacactccgttcccatcatcacacacgtgcgtaggcgcccgaaagattgatttccattttaggagcaaattttggttgagttgtacgctaagatacatttgttactcgtgtaaactactgtcactgccacaagtgaacatactgtaagtaccaaacggtcgtatgctagctcattatcagcattttattgccccggcctcctgcagctgcgacgcagacgcaggacgagccgtgttggacgcccggtcggcctcctgcagttttttttttttttttttgcgtgcgtgtataggtacaatcgcagctgcagtttacatgtgtcccttctggaaaaacgagacttggacgtgtgtccgaagatactaatcagtagctgcacataataaaacgatgcaggctgtaccgaccccggccggttcagagaaacttcttttttttttcgccgaagaattttcgcttttggaaaggagacacggtcagggtcagtgccgttctaccagacgcctcctaactttttcagaccaagctactccaggacaaaaattagacaagacatctggttctgggaccaggaaccttctcgttcttcttgacgccagaaaccaggagaaacgtcctgcccagctttcgacggaccggtttaagaagtcaataaagggaattcttggttctattattgttccatctacatctgacttgagtgtggcccctcccttgtcaaacatctcaggttcagaaaatgagttcaaagaaagcccaacaaccttttgtgcagggcctcgactttattcatgttggtcctgttaatgattggattgagtcatttcggcctcaaggattcc

SEQ ID NO: 8015 - DNA, 625 bp, Zea Mays
ccgtcgtcgtccgcgcccaggccgcccggccatggagaagaagctgctgctgccgctggcggtggcgcacaagcacgcgcacggaggcggcggggagcggccgtgggcgcggccgtggcggtgggccaagaccgccttcttcgtcgcggcgatgctggcatcgctcctgctcgtctgcgcgccgccgctgctcgtcgtgctcctcgacctcgcgctcccgccggcgctcctcctccgcggcggggatggcggcggcggctcgctcgcgctggcggtcgtggcccaggcgcgggcgttcgacttccgctcctcgctcgtcgacctgcccgccgtctccgcggcgcgcgcgctgctcatcctctgtgaggttaaaaggaggccatcaaacacccaaagggcccaagcagtagtgtagcgtctgacactccgttcccatcatcacacacgtgcgtaggcgcccgaaagattgatttccattttaggagcaaattttggttgagttgtacgctaagatacatttgttactcgtgtaaactactgtcactgccacaagtgaacatactgtaagtaccaaacggtcgtatgctagctcattatcagcattttattgccccggcctcctgca

SEQ ID NO: 8016 - DNA, 99 bp, Zea Mays
ccttgtatttgcagacttactcatcacataaaataagcacgacacatttatttactaaaacatgaatgcgaccttgccacggtgtataaacaaacattt

SEQ ID NO: 8017 - DNA, 1373 bp, Zea Mays
gtttggtttgccaaaagcactagctgagtctaaaatcaagttttagcttttcaagttttagtatgatccttttaaactagatgagtacctagctattcatacatggtatcacacatttttaagcaatcaacatttttgccagtcaactcatttccacttattactcaatgtagcagcatggatcaagcagtctcattagctgcgagaagcagacgattcgaatcgagttttatccttgcaaggtaaacctaaacacacgacatggcgaggcactccgtccccacacatatcaaccgtccccatcgattccccgtcagcagatcagggctcaccgccttggcgtacaatgcctcactgaccccgactggccgtcgtgcagtgaccgcacttgtacccaccataaccggaatgggagacctcgtctcaggtcgcgtgaggggtaaagtccactgccaggttcaatcaggtactaggcttaccgatttaccatatttctcggcatatgtttagtacgttcaaacgtttgactcacggtaccacaccataatccttattccaatttccgtctcagagacgacgcatccccatggaccgtagtcaacagaccatcatcattatgatagaaagtggatacaatcaattcctgacctcgcgcgagtgctagaaaaatcactcgacttctaccgagatccctaattagcaaagcagctactcgacctagcatactagtatccatctcaaaggcatcctgagttcatgcaactagggtttcaggcaactcctacacttaagtgcacagtacaagcctacaaacattaagtgcagtaaaatagcatatataacggttatgcataaaacaggggcttgcctttaatttttaacacttagatagtgtttgctgggggagatactcgcttggcgagcatccactggttaagtccatccttccttggttcgtccgccgactgcatcttgtgggtggcaccacatcacttgcacgatcgtcatctctcggtcctaaatgagatgcaaggtgcatatgtatgaatataatgaaaaatatcacaagatatacaaatacacggtagcgaactaagcactaaattatacgacaccgaaatcaaccacatgctagtattagctatctatacttcatcaggctttcaacattaacaccattgaaaacacaacaacatttcattgatttacgcaacacaactacgacatcacaagtacgcgcactttatttatttggatacgacttttcattagttcttctatttatcacacaaaagcatcccaaacaccgatttaacataggacctatgcatcaagggctatggaaactcctatatcacaaccaactagagaag

SEQ ID NO: 8018 - DNA, 918 bp, Zea Mays
cgcaaacggggcccggcatccgttccatccccaacgcccccatcttatcatcttcccccggggaacgtgtggcgcccgtgccccacttcatccgcgcgcgcgtcagagactcagagcccaagcatagacgtgcgccttcagcagcgcgcagcgacgtcacctgagcgcgcgacacgccccagcgtccacagttcactgcgcgcgcgtcgtgcaggacaccacaccatggcacctgccgcccctgctgccacgggcgcggcgagccccgccgtcaccaagggcggcggcaaggttgcagcacgctccgtcaggctggggctgcccgcgctgccgccgctgcccggcctcagcctcgccgcgcagggccagacccgggccgcgtcgtccttgtacaagcggctggcgagggacgtggtggccatggccgcgggggagccggcggcgcctcaggctgccaacgaggagctgaccgagttcgtcgacgcgttgaaaaaggagtgggacaggatcgaggacaagtacgcggtgaccacgctcgccgtcgccgccacgcttggcatgtggagcgccggtggagtagtgtcggcaatcgataggctccccgtggttcctggtctgatgcaggccgttggaattggatacagcgggtggttcgcgtaccgaaacctgctattcaagcctgacagggatgctttctttgcgaaggtcagggagatctacgaggatattatcagcgcttaacagatgggagcaccaatgcaaagctcatccaaattaatgaagttcactttaagacatccttctagtttgctgctgttcagttgtttttgctgtgatgtatttcagtgtagcttctaatttggtccttactcagtgcacgtatggataagtaatttggacgttaaatttaaaaaaaag

SEQ ID NO: 8019 - DNA, 1081 bp, Zea Mays
cgcaaacggggcccggcatccgttccatccccaacgcccccatcttatcatcttcccccggggaacgtgtggcgcccgtgccccacttcatccgcgcgcgcgtcagagactcagagcccaagcatagacgtgcgccttcagcagcgcgcagcgacgtcacctgagcgcgcgacacgccccagcgtccacagttcactgcgcgcgcgtcgtgcaggacaccacaccatggcacctgccgcccctgctgccacgggcgcggcgagccccgccgtcaccaagggcggcggcaaggttgcagcacgctccgtcaggctggggctgcccgcgctgccgccgctgcccggcctcagcctcgccgcgcagggccagacccgggccgcgtcgtccttgtacaagcggctggcgagggacgtggtggccatggccgcgggggagccggcggcgcctcaggctgccaacgaggagctgaccgagttcgtcgacgcgttgaaaaaggaggcaatcgataggctccccgtggttcctggtctgatgcaggccgttggaattggatacagcgggtggttcgcgtaccgaaacctgctattcaagcctgacagggatgctttctttgcgaaggtcagggagatctacgaggatattatcagcgcttaacagatgggagcaccaatgcaaagctcatccaaattaatgaagttcactttaagacatccttctagtttgctgctgttcagttgtttttgctgtgatgtatttcagtgtagcttctaatttggtccttactcagtgcacgtatggataagtaatttggacgttaaatttagttttctggcccaacagattcggttcacgcaaaaaaaaatagtagccactacaacttgtccagtaatcatgttttttttttgcaactactacaatttgagtacaactaaagtattatcccgataggaagaagtccatagtccacgtgtagctatcgaaacgccgctcgagtccgattctggccattaaattgcagatatagatcaatttagtttcaaatactgtttgctcctttatacgtaataaaaataaataaaaa

SEQ ID NO: 8020 - DNA, 2026 bp, Zea Mays
catattagtattcgaattaaaatatggcaaatagcgtatccatacgagtggagcctgcttgagccttccccctgcggatctctccgcattccatcgcccccaaggccccaatcatggctggaaagctagcccgcccccaattggcaggcactctaccaacctatgtgtcccctgtgcacatgcctggcatatggcacactcactgctggtctggccctaaacccacatttgttatatagagatagggattagactcccgagtgcctttgccttccttaaccaagaagcatatagctactgattgatgtctgcctgggtgcgcgtataaaagctagctagtgccgtaaagaaagagagagcgagaacgagtggcgatggcagtactgcacttgcaggcggcggcggtggcggtgctgctgatggcgacggggctgcgcgcgcagctgcgtgtgggcttctacgacagctcgtgcccagcggcggagatcatcgtgcagcaggaggtgagcagggcggtggcggccaacccgggcctcgccgccggcctgctccgcctccacttccacgactgcttcgttgggggctgcgacgcgtccgtgctcatcgactccaccaagggcaacacagcggagaaggacgccgggcccaacctcagcctgcggggcttcgaggtcgtcgatcgcatcaaggcgcgcgtcgagcaggcctgcttcggcgtcgtctcctgcgcggacatactcgcgttcgcggccagggacagcgtcgcactcgtaagtcacactgctttagtgtcagtggacgcctgccttttgattttaacccgacatgattagtttacatggatttggaatccaatgctggactggactagactgaaaagcatatgtgtctgttcgaccttttttgacgcacatgatgccgcgtgcagctgcctgaaagaactcgatgcattgccgggcccgggcatgggtccaactcccaactttatttacagtatttgcttactctccaatccatccatccatccatccgtacgtataggccggcgggaacgcgtaccaggtgccggcggggcggcgggacgggtccgtgtcgcgcgcgtcggacaccagcaacctgccgccgccgacggccaacgtcgcgcagctcacgcagatcttcggcaccaagggcctgacgcagaaggagatggtcatcctgtcgggcgcgcacaccatcggctcctcgcactgcagctccttcagcggccggctgtcggggtcggccacgacggcgggcgggcaggacccgaccatggaccccgcgtacgtggcgcagctggcgcggcagtgcccgcagggcggcgacccgctcgtgcccatggactacgtctcccccaacgccttcgacgagggcttctacaagggcgtcatggccaaccggggcctgctgtcctcggaccaggcgctgctcagcgacaagaacaccgccgtgcaggtcgtcacctacgccaacgacccggccaccttccaggccgacttcgccgccgccatggtcaagatgggctccgtcggcgtgctcaccggcaccagcggcaaggtcagggccaactgcagagtcgcctgattcatcgtcatcactcgtgtggagttgtagattcattatattgattgatttggaccggacgacgtcgacgggatgctacatggcctgcttgcgcaattgtatgtatgcctgtacttgcgcgtgtatgggtttcgctgtgcaaattttcgttgtctcccccgattgattgaggcgtgtgtgcgtgtgtgtctcttctgaatctgaatggaaaatctgtaacctgagctaaaactgctcgtgtactacccaatagttgcttcaaactacgatggatttttattcaaactatcacttccaaacacgcacaaatatgtactcaatcaactagggatcggagaaactggtttgtaaagggaattttataaacacaagctattcagacatgtaactcgacatgggcctaagttctcgtcgacctgat

SEQ ID NO: 8021 - DNA, 3185 bp, Zea Mays
aaaacatgtttgtcaaacaaggcgaggccactccctatgacatatactcaaggaaccacttcagtaacttatttggtctacattctctgagatcagagagctcgaatttgacaagtgagaagcatccaggaaactggcaagaaagttcagagaccctcactaaagattttggaccatcagtgtttcatcagcagcagagtgcctttgtgagtaaattgcttgatcattcaggtgccgaagacacaggaccttatcccccacgacaagatttaaatcagtatccttttggttctacatatgacaaatacatgacacagctttcgtcatgttcaacagatacacgacctcacatcttttctacacaatatgtcaattcacctgaaatggccaatacaactgttccattgatgaatgacactattggggaaagttccttctccttttcgcattatatgaatccttgcagaatcaatcttgattattttgattccgtgtggaatgaacaaaaaggtcttggataccaaactacagataagcagcatggaaaatggagtaaccctgatgacaaggcaacagtggggaactattccctcaattctcttggagagagtcaccttaatcctgagcatttagggaatgggagaccaatgcagggatcttctgaaatgaaacatgaattgggaagtttcagttccaaggtttcttcgtctgagtctggatttgttcagcctcgtgaatgttcatctgagtttcctgaggtcaataacaccagtgttgattcaccttgttggaagggcacaccagcccagtaccagccttcgtttgggattattgaaaataatggcgctcctcctgtggtgataggaacagtaggctacattaattcacatcaaaaccagaaactacctgagttgagttttgagtatccatggcgattctgtgaacaccaagtatcaggttctgaaaatgacccttttaaggcggtcaagttgcctgaaagatgtaaaatctccaaagatcataaagttctgccaattgatgtcagggttcttaatgacatgactacacatgctagttatttgcctgacaaacagcatcccacaacacagaaatgcaatgattctggagaagattctaagaatgtgataacttcaagtcaacaggaaagttcgtgttctggcagaaaaccaatacttttgggtgaacatggtggcagtcttacaggaagcataagtgaactaatgagtaaaacggtggagaaagaagaaagcactcacaagagaggtgaagacccttctcaatgttatccaggtgttgaggggaatatgctgaatatgtcttccgaatccagctctagcaatcaggaagatgaagaggaacttctccaatcagtgattcaaaatcttacagctgccagttccaaaagaagcaaggttgaacaaaaaaatgatgatggattgagtaactccagccaaatgaaattcaaagatattaattatgtgaggaaacacttttggaggtcaatgcatgaagactcagaacaggagaatgctgattcagaatttaaggccactgtttcacaggttcttactaatcaccaggaggataaggtgctcgacaacactgaagttcctcaggcatcaatctatagaaacttgtggattgaagcagaagcttcagcttgtaaactcaaatatgagcttcaacatgctctcctgaagctcgagacagcaaaaggcctcaacgacacaataaaagcccctgactcattggaagacagtaaaggctctaactcatacattttcagtaacaaaccacagaaccatgggaaaggaaccgtttcatgcgctgcggcctttcagggccacggaggagattctcgtgacaagcaatctcctgttgtaagtaggagcattttcaatggtgttgatgctgatgtgtttgcccgatttgaagttttgcagtcccgtattgataatataaactccttgagtgagattgactgtggggagcagaaagaagcaagcaagagaccatatgcagtcgaagatactgttatggcgagactgaaagttttgaagtctcgtcctgacaatataacctctttgagtcaaggaagcactaaacaccagctagatggaagcacaaacagtgcagataatgttgatgacactgttattgctaggctgggaattttggagtcccatcctaataatgaagccctattgggacaggaaagcagcaagcgacaactggatgcgagaacaaatagagaagatgggattgatgctgctgttatggctaggctgagaattttgaagtctcgacctgataatgaaacctcaatgggcgatgccaacaaggagcagcaagacgcatgtggtgaacaattaaatggggatgaccttggtattgtgtccaatggagccattagcaacaccctgagtgagaagtgctctaagtttacgcactctgatgatcatttaggagaaaaaaactcagtaggtgtcccggacacatttggtgatggaaacagtgctagggagaaaaaggaggttggtggttcagcagatgttgctacccccatgaggtgcaaaggtacatctgatggagtgagcgtcggaagcgcagtacatggtgaagataatcttggtgaaaaccatgtgtggcttcaaactgctggggactctcatgtttgcacagaagggtctcaggaagcgcacccaatctcctctccagttgaccagtatggtggttcacctacagagtgggagcacgtgctgaaggagaatttcttccatccaggcaaattggcgaattctgacccataaactggaaagcttttgtttcagctcatgttgcctcaaaatgctgatgcttcttgtaaatatatgatacgatattatacatcccctcccccgaacctttgtctctatgttcaataatctgcatatctggtgatcaaggaaacgcactgtgcccccgatggtgctatatggaactagtctggtttgtctgcttgggtctatcatgccatagtctatctgtaaatggcacatgtatgttctggaccgagagtgaattattgtatatatttacttccagcaaatttggatattgtggactgtgcagtctgttgaccctgcttggctgcttttgttcagcaggtgaaaactcgttttttt

SEQ ID NO: 8022 - DNA, 3473 bp, Zea Mays
gaggatttcgggtgagtggagttgaggccgaggtgacaccagcagtggagggaagggtaaggaggtggctgccgtctgcgggcaagtgccttgccggagctccatgctggcttcagcaaaaccctagctgctgtggcagggtggaggtatgtggggtggcgttggagcagtagagctggggaagaagcagtttgctcaaagcagaatatgaccctttccattcgatctccatccagaaaatagggtgctggaaaagatttttcatccgaatattgtatagcctgactgtttggtgttgacaagttacaggcgaggccactccctatgacatatactcaaggaaccacttcagtaacttatttggtctacattctctgagatcagagagctcgaatttgacaagtgagaagcatccaggaaactggcaagaaagttcagagaccctcactaaagattttggaccatcagtgtttcatcagcagcagagtgcctttgtgagtaaattgcttgatcattcaggtgccgaagacacaggaccttatcccccacgacaagatttaaatcagtatccttttggttctacatatgacaaatacatgacacagctttcgtcatgttcaacagatacacgacctcacatcttttctacacaatatgtcaattcacctgaaatggccaatacaactgttccattgatgaatgacactattggggaaagttccttctccttttcgcattatatgaatccttgcagaatcaatcttgattattttgattccgtgtggaatgaacaaaaaggtcttggataccaaactacagataagcagcatggaaaatggagtaaccctgatgacaaggcaacagtggggaactattccctcaattctcttggagagagtcaccttaatcctgagcatttagggaatgggagaccaatgcagggatcttctgaaatgaaacatgaattgggaagtttcagttccaaggtttcttcgtctgagtctggatttgttcagcctcgtgaatgttcatctgagtttcctgaggtcaataacaccagtgttgattcaccttgttggaagggcacaccagcccagtaccagccttcgtttgggattattgaaaataatggcgctcctcctgtggtgataggaacagtaggctacattaattcacatcaaaaccagaaactacctgagttgagttttgagtatccatggcgattctgtgaacaccaagtatcaggttctgaaaatgacccttttaaggcggtcaagttgcctgaaagatgtaaaatctccaaagatcataaagttctgccaattgatgtcagggttcttaatgacatgactacacatgctagttatttgcctgacaaacagcatcccacaacacagaaatgcaatgattctggagaagattctaagaatgtgataacttcaagtcaacaggaaagttcgtgttctggcagaaaaccaatacttttgggtgaacatggtggcagtcttacaggaagcataagtgaactaatgagtaaaacggtggagaaagaagaaagcactcacaagagaggtgaagacccttctcaatgttatccaggtgttgaggggaatatgctgaatatgtcttccgaatccagctctagcaatcaggaagatgaagaggaacttctccaatcagtgattcaaaatcttacagctgccagttccaaaagaagcaaggttgaacaaaaaaatgatgatggattgagtaactccagccaaatgaaattcaaagatattaattatgtgaggaaacacttttggaggtcaatgcatgaagactcagaacaggagaatgctgattcagaatttaaggccactgtttcacaggttcttactaatcaccaggaggataaggtgctcgacaacactgaagttcctcaggcatcaatctatagaaacttgtggattgaagcagaagcttcagcttgtaaactcaaatatgagcttcaacatgctctcctgaagctcgagacagcaaaaggcctcaacgacacaataaaagcccctgactcattggaagacagtaaaggctctaactcatacattttcagtaacaaaccacagaaccatgggaaaggaaccgtttcatgcgctgcggcctttcagggccacggaggagattctcgtgacaagcaatctcctgttgtaagtaggagcattttcaatggtgttgatgctgatgtgtttgcccgatttgaagttttgcagtcccgtattgataatataaactccttgagtgagattgactgtggggagcagaaagaagcaagcaagagaccatatgcagtcgaagatactgttatggcgagactgaaagttttgaagtctcgtcctgacaatataacctctttgagtcaaggaagcactaaacaccagctagatggaagcacaaacagtgcagataatgttgatgacactgttattgctaggctgggaattttggagtcccatcctaataatgaagccctattgggacaggaaagcagcaagcgacaactggatgcgagaacaaatagagaagatgggattgatgctgctgttatggctaggctgagaattttgaagtctcgacctgataatgaaacctcaatgggcgatgccaacaaggagcagcaagacgcatgtggtgaacaattaaatggggatgaccttggtattgtgtccaatggagccattagcaacaccctgagtgagaagtgctctaagtttacgcactctgatgatcatttaggagaaaaaaactcagtaggtgtcccggacacatttggtgatggaaacagtgctagggagaaaaaggaggttggtggttcagcagatgttgctacccccatgaggtgcaaaggtacatctgatggagtgagcgtcggaagcgcagtacatggtgaagataatcttggtgaaaaccatgtgtggcttcaaactgctggggactctcatgtttgcacagaagggtctcaggaagcgcacccaatctcctctccagttgaccagtatggtggttcacctacagagtgggagcacgtgctgaaggagaatttcttccatccaggcaaattggcgaattctgacccataaactggaaagcttttgtttcagctcatgttgcctcaaaatgctgatgcttcttgtaaatatatgatacgatattatacatcccctcccccgaacctttgtctctatgttcaataatctgcatatctggtgatcaaggaaacgcactgtgcccccgatggtgctatatggaactagtctggtttgtctgcttgggtctatcatgccatagtctatctgtaaatggcacatgtatgttctggaccgagagtgaattattgtatatatttacttccagcaaatttggatattgtggactgtgcagtctgttgaccctgcttggctgcttttgttcagcaggtgaaaactcgttttttt

SEQ ID NO: 8023 - DNA, 3948 bp, Zea Mays
gttatgttctgatagggatcagtaaaaaggaatctcttcgacctgctctttcctaaaaatccaatagaatcactcaactggagaatcatttctttatttacactgacagctgggagctaaaaacatgcttcacactgctttttattatattctactaaactcgttctcgaatatttgttgtaggctaatttatttttgaattaaaacacgtcaaataaaaaagaacggaggactaatttatattctgacagagattagtacagaaccaattatctctctaatagaaacccagtagaatcactcaatcagagaatcaaatatcatcaataatcacagaggaacgaagctcttcgaaacgggactttgccctctttctttgtgcttcacatcgcactctgatcaaagatacggcctggtccaaaagagtacacacttcctgctggcgcacccatgatgagggctgagctgaggccggagaggcggagacccatactgttccgtgctcaaccgattacggcccatcaaactacttccttcctctggtccaccagaaacgcacacgtcgcataccagaccagacctcaccttccccacccggacgccaccaccgcctgcgccctgctggctgccgcgatgctgccgtactccggtgaccaccagcgctctccgccgccgcagccaccgccacgagcggcgttctcctcctccctctccccatccgccgcgcccttccccgccgctgatccggtgggcccgggcccaggccccggccgtgatctgcccaccgccccgtccgtctacacggcgggcggggactggggcgccctgtcgtggatggagcctcccgcgagctacatggcccccgccgccacgccgccgggttataaaggcgaggccactccctatgacatatactcaaggaaccacttcagtaacttatttggtctacattctctgagatcagagagctcgaatttgacaagtgagaagcatccaggaaactggcaagaaagttcagagaccctcactaaagattttggaccatcagtgtttcatcagcagcagagtgcctttgtgagtaaattgcttgatcattcagatacacgacctcacatcttttctacacaatatgtcaattcacctgaaatggccaatacaactgttccattgatgaatgacactattggggaaagttccttctccttttcgcattatatgaatccttgcagaatcaatcttgattattttgattccgtgtggaatgaacaaaaaggtcttggataccaaactacagataagcagcatggaaaatggagtaaccctgatgacaaggcaacagtggggaactattccctcaattctcttggagagagtcaccttaatcctgagcatttagggaatgggagaccaatgcagggatcttctgaaatgaaacatgaattgggaagtttcagttccaaggtttcttcgtctgagtctggatttgttcagcctcgtgaatgttcatctgagtttcctgaggtcaataacaccagtgttgattcaccttgttggaagggcacaccagcccagtaccagccttcgtttgggattattgaaaataatggcgctcctcctgtggtgataggaacagtaggctacattaattcacatcaaaaccagaaactacctgagttgagttttgagtatccatggcgattctgtgaacaccaagtatcaggttctgaaaatgacccttttaaggcggtcaagttgcctgaaagatgtaaaatctccaaagatcataaagttctgccaattgatgtcagggttcttaatgacatgactacacatgctagttatttgcctgacaaacagcatcccacaacacagaaatgcaatgattctggagaagattctaagaatgtgataacttcaagtcaacaggaaagttcgtgttctggcagaaaaccaatacttttgggtgaacatggtggcagtcttacaggaagcataagtgaactaatgagtaaaacggtggagaaagaagaaagcactcacaagagaggtgaagacccttctcaatgttatccaggtgttgaggggaatatgctgaatatgtcttccgaatccagctctagcaatcaggaagatgaagaggaacttctccaatcagtgattcaaaatcttacagctgccagttccaaaagaagcaaggttgaacaaaaaaatgatgatggattgagtaactccagccaaatgaaattcaaagatattaattatgtgaggaaacacttttggaggtcaatgcatgaagactcagaacaggagaatgctgattcagaatttaaggccactgtttcacaggttcttactaatcaccaggaggataaggtgctcgacaacactgaagttcctcaggcatcaatctatagaaacttgtggattgaagcagaagcttcagcttgtaaactcaaatatgagcttcaacatgctctcctgaagctcgagacagcaaaaggcctcaacgacacaataaaagcccctgactcattggaagacagtaaaggctctaactcatacattttcagtaacaaaccacagaaccatgggaaaggaaccgtttcatgcgctgcggcctttcagggccacggaggagattctcgtgacaagcaatctcctgttgtaagtaggagcattttcaatggtgttgatgctgatgtgtttgcccgatttgaagttttgcagtcccgtattgataatataaactccttgagtgagattgactgtggggagcagaaagaagcaagcaagagaccatatgcagtcgaagatactgttatggcgagactgaaagttttgaagtctcgtcctgacaatataacctctttgagtcaaggaagcactaaacaccagctagatggaagcacaaacagtgcagataatgttgatgacactgttattgctaggctgggaattttggagtcccatcctaataatgaagccctattgggacaggaaagcagcaagcgacaactggatgcgagaacaaatagagaagatgggattgatgctgctgttatggctaggctgagaattttgaagtctcgacctgataatgaaacctcaatgggcgatgccaacaaggagcagcaagacgcatgtggtgaacaattaaatggggatgaccttggtattgtgtccaatggagccattagcaacaccctgagtgagaagtgctctaagtttacgcactctgatgatcatttaggagaaaaaaactcagtaggtgtcccggacacatttggtgatggaaacagtgctagggagaaaaaggaggttggtggttcagcagatgttgctacccccatgaggtgcaaaggtacatctgatggagtgagcgtcggaagcgcagtacatggtgaagataatcttggtgaaaaccatgtgtggcttcaaactgctggggactctcatgtttgcacagaagggtctcaggaagcgcacccaatctcctctccagttgaccagtatggtggttcacctacagagtgggagcacgtgctgaaggagaatttcttccatccaggcaaattggcgaattctgacccataaactggaaagcttttgtttcagctcatgttgcctcaaaatgctgatgcttcttgtaaatatatgatacgatattatacatcccctcccccgaacctttgtctctatgttcaataatctgcatatctggtgatcaaggaaacgcactgtgcccccgatggtgctatatggaactagtctggtttgtctgcttgggtctatcatgccatagtctatctgtaaatggcacatgtatgttctggaccgagagtgaattattgtatatatttacttccagcaaatttggatattgtggactgtgcagtctgttgaccctgcttggctgcttttgttcagcaggtgaaaactcgttttttt

SEQ ID NO: 8024 - DNA, 4302 bp, Zea Mays
atgcgccgtccccatgacgccagcgacggcgacgaggatcgcggctacccgtcgagctccgctgtcaacggggccggcgatgaggaggaggagcggcgccaggcggcgcggacgccggggaaggacggcccggtggacgcgctgtggcggtggagaagccagagcctctccgagatagtgctctcgtggtccgtggaccaaatcctcgacaaggacctgctccgcgacaaggtgtcgaagataccagagacatttagcagcatagagcagtacatgacatcgtattttgggccacttttagaagaggttagaggtgacatgtgttcaagcatggaggacatctccaacgctccatatgcagacctgctctctgttaattcaatgaggaaagggaaggggtcatacgagatcagtcttggcagatggaggggaacgtctcatggctgtgggattgataattataagccaaaatcggctgatgttctactgatttcagaaacgaaaccggcaaatcaatctgatatcctgaaacagtccaaatcctgtgtcatcgtatgggtcagtaaggttaatggtaacaagatgacagtcaaggcatcacagttgatggagactggggctcaaggaggtgaacggcgaccaattggggctaataaatacgataagttgtatgctgaatgtttggacaagtcttgggaaatgctagatcaagaagcaatggcttcgaaatgtagaaactcatctgtgcatcgcaatgtctggaaagagtcacacaaggttgaaaagcgcagcgatgtgcatggaagaaatgagaaagagacaggctcttggacattgtaaacactgcgtcaataaatcacatgatgaaatcaagggtgatctctgtgattttaagctgaatgactcacaacttgatgctgtagcaagttgcattttggcaagtgaatgcactcacaggtcttctatggggctagtttggggtccaccaggcacgggtaaaactacaacagttgcagtgatgctacaaatgcttctgatgaaggaacagagaactctcgcatgtgctccaactaacatggctgtcctgcaagttgcttctcgtcttcttgagctgattggggacttctctctaagacacaattattcattaggtgacatcattttattcggtaacaaggaccgtttgcaaattggcaagttactgtcagaaatatatttggatgaccgtgtccagaagttgttgagcagcttcaacagacaacatgggtggaagcattgtgtggattctgttgtaacattcctaaaaaattgcaattctcggtacagaatgtccgtggatatacagcaaggaagcagtgatgcacgcgaccttacctttaagaaatattttacaagtagattcagcactttagccgatggattggtcagatgtatcgatacattctatgaccatctaccaaggagttccctgggcaagaactttgataaaatgatgttcgtcaaaagattgctagataaattgcagcagtcgctgagcgcagatgatgtgtctgatgagcttctttttacaatctttaatcctgccgatgaagttcctgactcatctggtagtcatgatgatctgatagatgatgaagatgactttcatgactttcatttgagttgttcagactgcaaagtgtgaggcctataagcatcttagttattgatgaggcagcacaactaaaagaatgtgaatcactggttcctctattgctacaagggatagaacatgttttactaattggcgatgaaaaccagctatcatcattggtaaagagcaagattgctaaagatgctgactttggacgaagcctctatcagagattgtgcacgatgggctacagcaaacacttgctggaagtacaatatagaatgcaccctagcatcagtaaatttccaaactccaatttttatgataatcgaatttcagatggtcccattgtcaggcaggaggactatgccaagagttatctacctgggcctatttatggtgcttattcattcattcatattgacaacgacatggaaatgcttgatagccttggtcagagttccaaaaatatggctgaggttgctgtagcagccaatatagtcgaaagacttgcaaaagagtgcactgagaagaggcagagaacaagtgttgtaaaatctattgatggatttcaaggtggtgaggaggacattattttgatttcaacagttaggtccaataaagatgggaaagtaggctttctctctgattctgggagaatcaatgtggcgttgacaagagccaagtactgcctttggatccttggaaatggaaccactttactggctagcaattcaatatgggctgatttagtccgtgattcaaaaaggcgcagatgtttctttgatgcttttaaggataaggacttagcagaagtagtcatgtttgcaactaagcctgagcaatggaatcgaagagaacagaggaatagtcgtgcaaatgaagcgccatcttggccatcatcatgggatgtggtggctgacaggaacaacccaccaagaagatggaatggccgtccagcttctagcaatgcaaggagcgtgaccaaatcctatgatcagggaccaaatgcatgtcgatggaccaataatttctcagctagtagagaggaaagttacagaactcgctttcagcacggcgaacccttgcgcagtggtcactacaataatcaatctcgagttgcgcctgctaatcaaaatcggttcaacaactacaatgcttcgagtgagtggcatggctctgtggaagggtatagaggatggcccaagcagcatgttgggccagaaccacatgccaggttgtcacatgaatgcagtagtagttttcaagaaggcgatgtaaggcatactcctagatcagcttatggggaagaatcacatggccaaattagtgttcttggctcatggcaagctccaggaacctactacaattgtggacctcagaatagaactgtttgtcctgagtttcagaacagagggtcttttcaacaaaggtttggttcatatggagctgcagattctggatttggtagggccaatggagacagacaattcaatagtcttgagcgacgagtgccatatggtcgaattggtggtcaaggcagaggaagaacttcctgccaagggagaggagatacaagaggatggcatgaacggtttgtttgccgttggacagaacctcactgtcaggtgcagaatggcggtttggaaattgcatcccacaaactgctagctcctgggcagcaagggacgaagaggaactggtgtaaagcagaatcatcagattcaccgcaacaggacaacacaaaaaggatacttggaagtgtagatcaacctcctggccctgggccagtttgtcatggtggttctggagctccctcccctgaacagcatgcttctagacagggagcagtgaagagaggtgtatgtgaagctgaatcgtcagatttaccaatacaggatgagtcctcagaagtaacactaaaacaaagtgcagataaacctctttgtaccacagaggatggcaattctggagctggttcctgtgaactgcctgttcctgagcagggtggggtggggatagacttgcgtgaagcaggaccaccagatataccatgtcaggttccggatggcagttctgaagcattccttgaactccttgttcccgagcatagggggatggaagccggcttgtgtaaagtagagccatcagatgcaccttatcagggtcaggatggcagtcctggaaccgcttcacatgaacaacctgtccctgagcagcgagggatgggaagagcagactcgtgcgctacagaaccattgtcagtacaccaggacagcacagaaaataaacctgaaaccgtagaacaagatagctagacagtagacacttctgaattttgatatgttacctttctttttctgctctgtatagaaacctgtgcataataagcatgtagggcctgattggttggggtggtccaatcctgcctggctgctttttggagctagggtaagctggcaaggttcaagtagtgcaggctgagttgtttggtttcatttttgagctcgtcctgggtggatgaagaatctgattgatggtcggtttaatgtagggtgaaaacggtcggaaacgatgagtaaacactaaaataattttcgttttcatattttttttctccgaaacgagatcgaaaacggtaactccggaaacgaaaacgactttggtaa

SEQ ID NO: 8025 - DNA, 4441 bp, Zea Mays
cccaaatcccctgctaatcgcgaaacagcgcctcgtcgccttcgtctggcctcttgacccccctcgtgcacttccgagccgaggcaaaatgcgccgtccccatgacgccagcgacggcgacgaggatcgcggctacccgtcgagctccgctgtcaacggggccggcgatgaggaggaggagcggcgccaggcggcgcggacgccggggaaggacggcccggtggacgcgctgtggcggtggagaagccagagcctctccgagatagtgctctcgtggtccgtggaccaaatcctcgacaaggacctgctccgcgacaaggtgtcgaagataccagagacatttagcagcatagagcagtacatgacatcgtattttgggccacttttagaagaggttagaggtgacatgtgttcaagcatggaggacatctccaacgctccatatgcagacctgctctctgttaattcaatgaggaaagggaaggggtcatacgagatcagtcttggcagatggaggggaacgtctcatggctgtgggattgataattataagccaaaatcggctgatgttctactgatttcagaaacgaaaccggcaaatcaatctgatatcctgaaacagtccaaatcctgtgtcatcgtatgggtcagtaaggttaatggtaacaagatgacagtcaaggcatcacagttgatggagactggggctcaaggaggtgaacggcgaccaattggggctaataaatacgataagttgtatgctgaatgtttggacaagtcttgggaaatgctagatcaagaagcaatggcttcgaaatgtagaaactcatctgtgcatcgcaatgtctggaaagagtcacacaaggttgaaaagcgcagcgatgtgcatggaagaaatgagaaagagacaggtgaatcaaagcgatggtccttctatgccatgtacctgactaatatggtaacatatgaccgtgtttgggttgtgctccgaaggggtctgacaatggattcaaaaatcatccatagcatgttgggcagaaacaattatgctcttggacattgtaaacactgcgtcaataaatcacatgatgaaatcaagggtgatctctgtgattttaagctgaatgactcacaacttgatgctgtagcaagttgcattttggcaagtgaatgcactcacaggtcttctatggggctagtttggggtccaccaggcacgggtaaaactacaacagttgcagtgatgctacaaatgcttctgatgaaggaacagagaactctcgcatgtgctccaactaacatggctgtcctgcaagttgcttctcgtcttcttgagctgattggggacttctctctaagacacaattattcattaggtgacatcattttattcggtaacaaggaccgtttgcaaattggcaagttactgtcagaaatatatttggatgaccgtgtccagaagttgttgagcagcttcaacagacaacatgggtggaagcattgtgtggattctgttgtaacattcctaaaaaattgcaattctcggtacagaatgtccgtggatatacagcaaggaagcagtgatgcacgcgaccttacctttaagaaatattttacaagtagattcagcactttagccgatggattggtcagatgtatcgatacattctatgaccatctaccaaggagttccctgggcaagaactttgataaaatgatgttcgtcaaaagattgctagataaattgcagcagtcgctgagcgcagatgatgtgtctgatgagcttctttttacaatctttaatcctgccgatgaagttcctgactcatctggtagtcatgatgatctgatagatgatgaagatgactttcatgactttcatttgagttgttcagactgcaaagtgtgaggcctataagcatcttagttattgatgaggcagcacaactaaaagaatgtgaatcactggttcctctattgctacaagggatagaacatgttttactaattggcgatgaaaaccagctatcatcattggtaaagagcaagattgctaaagatgctgactttggacgaagcctctatcagagattgtgcacgatgggctacagcaaacacttgctggaagcaggaggactatgccaagagttatctacctgggcctatttatggtgcttattcattcattcatattgacaacgacatggaaatgcttgatagccttggtcagagttccaaaaatatggctgaggttgctgtagcagccaatatagtcgaaagacttgcaaaagagtgcactgagaagaggcagagaacaagtgttgtaaaatctattgatggatttcaaggtggtgaggaggacattattttgatttcaacagttaggtccaataaagatgggaaagtaggctttctctctgattctgggagaatcaatgtggcgttgacaagagccaagtactgcctttggatccttggaaatggaaccactttactggctagcaattcaatatgggctgatttagtccgtgattcaaaaaggcgcagatgtttctttgatgcttttaaggataaggacttagcagaagtagtcatgtttgcaactaagcctgagcaatggaatcgaagagaacagaggaatagtcgtgcaaatgaagcgccatcttggccatcatcatgggatgtggtggctgacaggaacaacccaccaagaagatggaatggccgtccagcttctagcaatgcaaggagcgtgaccaaatcctatgatcagggaccaaatgcatgtcgatggaccaataatttctcagctagtagagaggaaagttacagaactcgctttcagcacggcgaacccttgcgcagtggtcactacaataatcaatctcgagttgcgcctgctaatcaaaatcggttcaacaactacaatgcttcgagtgagtggcatggctctgtggaagggtatagaggatggcccaagcagcatgttgggccagaaccacatgccaggttgtcacatgaatgcagtagtagttttcaagaaggcgatgtaaggcatactcctagatcagcttatggggaagaatcacatggccaaattagtgttcttggctcatggcaagctccaggaacctactacaattgtggacctcagaatagaactgtttgtcctgagtttcagaacagagggtcttttcaacaaaggtttggttcatatggagctgcagattctggatttggtagggccaatggagacagacaattcaatagtcttgagcgacgagtgccatatggtcgaattggtggtcaaggcagaggaagaacttcctgccaagggagaggagatacaagaggatggcatgaacggtttgtttgccgttggacagaacctcactgtcaggtgcagaatggcggtttggaaattgcatcccacaaactgctagctcctgggcagcaagggacgaagaggaactggtgtaaagcagaatcatcagattcaccgcaacaggacaacacaaaaaggatacttggaagtgtagatcaacctcctggccctgggccagtttgtcatggtggttctggagctccctcccctgaacagcatgcttctagacagggagcagtgaagagaggtgtatgtgaagctgaatcgtcagatttaccaatacaggatgagtcctcagaagtaacactaaaacaaagtgcagataaacctctttgtaccacagaggatggcaattctggagctggttcctgtgaactgcctgttcctgagcagggtggggtggggatagacttgcgtgaagcaggaccaccagatataccatgtcaggttccggatggcagttctgaagcattccttgaactccttgttcccgagcatagggggatggaagccggcttgtgtaaagtagagccatcagatgcaccttatcagggtcaggatggcagtcctggaaccgcttcacatgaacaacctgtccctgagcagcgagggatgggaagagcagactcgtgcgctacagaaccattgtcagtacaccaggacagcacagaaaataaacctgaaaccgtagaacaagatagctagacagtagacacttctgaattttgatatgttacctttctttttctgctctgtatagaaacctgtgcataataagcatgtagggcctgattggttggggtggtccaatcctgcctggctgctttttggagctagggtaagctggcaaggttcaagtagtgcaggctgagttgtttggtttcatttttgagctcgtcctgggtggatgaagaatctgattgatggtcggtttaatgtagggtgaaaacggtcggaaacgatgagtaaacactaaaataattttcgttttcatattttttttctccgaaacgagatcgaaaacggtaactccggaaacgaaaacgactttggtaa

SEQ ID NO: 8026 - DNA, 2927 bp, Zea Mays
ctaatcgcgaaacagcgcctcgtcgccttcgtctggcctcttgacccccctcgtgcacttccgagccgaggcaaaatgcgccgtccccatgacgccagcgacggcgacgaggatcgcggctacccgtcgagctccgctgtcaacggggccggcgatgaggaggaggagcggcgccaggcggcgcggacgccggggaaggacggcccggtggacgcgctgtggcggtggagaagccagagcctctccgagatagtgctctcgtggtccgtggaccaaatcctcgacaaggacctgctccgcgacaaggtgtcgaagataccagagacatttagcagcatagagcagtacatgacatcgtattttgggccacttttagaagaggttagaggtgacatgtgttcaagcatggaggacatctccaacgctccatatgcagacctgctctctgttaattcaatgaggaaagggaaggggtcatacgagatcagtcttggcagatggaggggaacgtctcatggctgtgggattgataattataagccaaaatcggctgatgttctactgatttcagaaacgaaaccggcaaatcaatctgatatcctgaaacagtccaaatcctgtgtcatcgtatgggtcagtaaggttaatggtaacaagatgacagtcaaggcatcacagttgatggagactggggctcaaggaggtgaacggcgaccaattggggctaataaatacgataagttgtatgctgaatgtttggacaagtcttgggaaatgctagatcaagaagcaatggcttcgaaatgtagaaactcatctgtgcatcgcaatgtctggaaagagtcacacaaggttgaaaagcgcagcgatgtgcatggaagaaatgagaaagagacaggtgaatcaaagcgatggtccttctatgccatgtacctgactaatatggtaacatatgaccgtgtttgggttgtgctccgaaggggtctgacaatggattcaaaaatcatccatagcatgttgggcagaaacaattatgctcttggacattgtaaacactgcgtcaataaatcacatgatgaaatcaagggtgatctctgtgattttaagctgaatgactcacaacttgatgctgtagcaagttgcattttggcaagtgaatgcactcacaggtcttctatggggctagtttggggtccaccaggcacgggtaaaactacaacagttgcagtgatgctacaaatgcttctgatgaaggaacagagaactctcgcatgtgctccaactaacatggctgtcctgcaagttgcttctcgtcttcttgagctgattggggacttctctctaagacacaattattcattaggtgacatcattttattcggtaacaaggaccgtttgcaaattggcaagttactgtcagaaatatatttggatgaccgtgtccagaagttgttgagcagcttcaacagacaacatgggtggaagcattgtgtggattctgttgtaacattcctaaaaaattgcaattctcggtacagaatgtccgtggatatacagcaaggaagcagtgatgcacgcgaccttacctttaagaaatattttacaagtagattcagcactttagccgatggattggtcagatgtatcgatacattctatgaccatctaccaaggagttccctgggcaagaactttgataaaatgatgttcgtcaaaagattgctagataaattgcagcagtcgctgagcgcagatgatgtgtctgatgagcttctttttacaatctttaatcctgccgatgaagttcctgactcatctggtagtcatgatgatctgatagatgatgaagatgactttcatgactgtaagatttctctagatagccctttggacataaagtctctttgcataaaaattcttatgtctctttcaaacatgcggcttccttgtgaagacaatgagctttcaatccgggacttgtgtttgaaacatgcgaaacttatattttgcactgcttctagttcatttgagttgttcagactgcaaagtgtgaggcctataagcatcttagttattgatgaggcagcacaactaaaagaatgtgaatcactggttcctctattgctacaagggatagaacatgttttactaattggcgatgaaaaccagctatcatcattggtaaagagcaagattgctaaagatgctgactttggacgaagcctctatcagagattgtgcacgatgggctacagcaaacacttgctggaagtacaatatagaatgcaccctagcatcagtaaatttccaaactccaatttttatgataatcgaatttcagatggtcccattgtcaggcaggaggactatgccaagagttatctacctgggcctatttatggtgcttattcattcattcatattgacaacgacatggaaatgcttgatagccttggtcagagttccaaaaatatggctgaggttgctgtagcagccaatatagtcgaaagacttgcaaaagagtgcactgagaagaggcagagaacaagtgttgtaaaatctattgatggatttcaaggtggtgaggaggacattattttgatttcaacagttaggtccaataaagatgggaaagtaggctttctctctgattctgggagaatcaatgtggcgttgacaagagccaagtactgcctttggatccttggaaatggaaccactttactggctagcaattcaatatgggctgatttagtccgtgattcaaaaaggcgcagatgtttctttgatgcttttaaggataaggacttagcagaagtagtcatgtttgcaactaagcctgagcaatggaatcgaagagaacaggtccgtcctggtggtgccatcaggagccttctaatcttgttcgagtgctgctgccctgaaac

SEQ ID NO: 8027 - DNA, 417 bp, Zea Mays
agcgcaaaaacagctaggcagcagcaggtgctcactgaggtcgacaacaaggcccagggctgcgcagatccggagcggagctcgctgcggtatttcatcgagcacatcgagggcgcgacacgaaggggtttcatggctgttgttgttgtaccgcggccgggcatgaggataatctgcgcagggccaatcagcaagattcgagcgggaagagatggagtagaggtagcgcttgacaaacctagggcagtggagggagctcaccatgggagaagttgcaggcacgaccaagttgaaaccgagcagaggatggacgagctcggactgacgacagactccatagcaggggataggaacggcaagcagggaggagtagagccgaacaaggggctggcgcgcggcacaggaggagcgagctga

SEQ ID NO: 8028 - DNA, 2228 bp, Zea Mays
aaatcacacaccatcatttgcagtggaaataaattctctattgcaaaatgattacatgttacaataagtttacattatacaattatcggagtgattacaaaagagagtgattcaaaagaattataatttaaaatgaataaaatatttatagtttttaaaatacatgctagcttaattgacaatcctcaataaagaagctaaagatgtgatatacttatataaaaaggccgagcccaccggcacttagcaccatccacactatccacaacagaacaaacttataacctgaaaaacaatagggaataaagccctgagtacgcaattactcagcaagacttacccgactaaagaaaagactctcaaggatatgctggtttgttgggaatcaaggtaaagctcatcaaatttcaaagactcgtttttgcagaaaagcttactagtagtggatccttatgccaacttttacttcacaaattaagtacttttcctgaatctagatttgcctaatctagagcattcaattgttctacactagcttcattttaacatctttagtttcacttgttaattatgatgcagggcagtgatctagtcttcatatccgagaagtaacagcgatccgaatcgattaatactcagctgaggatctccaaccacacgacatatgtagcacttaacccttgcatatgtcaactcgcccacgggtttcttaagaccagaacaggtccccgctaaccgagagctcagtaccccaccatccagcctcttgccaggtggatacacgatactctcgccatctctccactcccattgcaggccggcctttctggtattggtccgaccgaggctaagcttacccatgatgaggcatgtggccagttaaagggtcctagatcagcaagcctactttcggtacggtccttaatcgacacaaacgggcgacctttcctgctcaacgtctggtctcatattaaaataattctgaaaatctggaacctattagaggtaccctaccgaaatgatgaagtcatcaagacctttgataccttcatcattccagcccctttttctttgtaaaaacatgattcatacatcaaaatattttgttccttgtctataagcaggctaagcatatctagattttcaaatcaggtatcaaggatgataatcaataattcaaggaagttatgcagcaaaggtttacccattcaactcctaccacctaatgcagcatataagtgataaaatgtttttaaaacagcaaggaggtggcaaatgcactggggcttgcctgggataacactaggttagtgttgttagacgatgaccacttggcgaccagccttgtgtgttggcactggttcagtctgtccatccttaagtttgttcattagcatcaccttgcgaagaaaccaatacttaacaccatcttgtggtcgaccgagctctagtccttcacatcacgtgatcacttatcgtacctaaatgatatgcataatgcacatgagcatggacataaaaaagcacaatatagataagctatactaaagaggataatacttaaaacaaacattacaacccttgggataactactagatacatttaattctatatcagtcatgactttctagtcaaatggacctaaccaaatatcaagaaaacaatacatcatatttagacaacaaggcatatttgattaagcatttatttgcaactacgtaagcataagggcatagccaaagctaattccaagtcacccgtattgtaatcaatgaattaccagttaattaagctgcatgatcattactacctggatactttactccccaaccaaaaactcaagtcacaacatgaaaaggcttagagatatataaatccaaaatactatcccttactaactttctattagcaatggagaacacttaaacgacatgacctgatagaatcaatatgacaaaccagtaataaccataaataaatctccatcctccgtgatttattaacttaagcaattaatatagaagatgaaactttttaagacaaggtatgcaagcaaccaaacaatagaaattcacacaaataacactaatacttaatggcaagatgtcacaaacagtcttaattaagcactagataggtttatataccccaacacaacgatcatgttctccaatttactcgaacctaatccgaacattaagaaacatccatatgcagttataagact

SEQ ID NO: 8029 - DNA, 2380 bp, Zea Mays
ggagacctcgaacggcgcgtcctcgtcggccatctcggcctggaccgccagcgcgtccacggccatggtctccagcttctgcagggagaaggcgaaaacttcgtccagcgtctccgggtcgtcaccggcgctccagatgcccgtggagacgcgctcgctccggccctcggacaaggccacggcgagcttccggacgagccgcacggaccgcgcggcgctcgagctcgcgccctcggtgcgtcgcccgccgatcacagccgccgcgatgccctcaaagcccacctgctcgggcgtcttccccgtaatgtcatccatgccgccgagcgacgccaccctgtcgcgcacctcgtcggcgccgcctgccgccgccatcttctggagcacgtcgaaccctgtggccgccgtggcgcccggcagcacgaaaggcctggacacctgcatggcgagctttgggggcccatctctgttccccagcggcaggtcgaacgggttcatggacaccaggaacccgccgtcacgcgtttgcacggcagggccaatgccccgccccaagtctggcaccacgggcggagtcgtcaccgccttccttgctggcgacgccggctcggatctcggcgtcaagggcagcctgagcttcttcttgtcgccgacaccgtccgcctcgagcttcctaagaaactccaccgtcaccatctcttcatccgcgtccagacgctgctgctgacccgccgccctgggcgacttcttcccgccgttggtcatcagcgcctcgatggcctcgatctgctcggcaatggagtcgagctcccgcagcacctcgcgttgagcctggtagtggacgacttctttaaccgtctcaacgcccttctccacgacctcgtactcggggaggctgttcacgtccccggcgtcggtggtggatgccgaaagctcgtcgtcgccgggcttccgaggcatcagagatcgtaccgcaggatgatgatcaggatctccattctcgtcgacacgaagcctatcgacaagctgcttgtaggccctcatggaaggtgagacggaagcgtcagatggcgaaagcttgggcgtgcttgaaatgctgaaggagttcctgttgtgagccctggcacgagaggagcccggagccggagacccgcggtccctctcctcggcctgcgtgtacaggctgagccctgcgtcttccatgagctgaaacccgagcttgagctgcagctctccgccggccgcagtgccggagagcgcgaacgtctcgtcgaaccacctgacgcggcgtccctcggagctgatcttgcggagagactcgagcacgagcgagctgacgtcgacggtgtgcgtgcccagaagggcgccccgtcctcgtccctcgacggcgacgacggttacgacgaacctccgcggctggagccggagcggcttccccgtgccggctccgccggcgaagtagaggttgcacctgacgaagagcgtctcgtcgaagtccgcggcgccaccgcgcacccggcacggcagggtctgcaccgagccgtccctggtctccgccttgcgcacggtgacggcgaggcggaacccttccatggacgccggcacgccgcgggcggcgtcgacctcgaccgagaacaggcaccccgcgcggcgcttcccgaggtgcgcgagcgcgcgcaccggcttccagctcctccacgccgtcgaggaccctttatccttggcaccccgcggcgcggcagcgcccgggacggagctgggtatcgagtcaacggccgccgtcttcgtggccggcgcccgagagcgccataacgacagcgaggctcgtcgggacgactgcgccctccggtcctcccgcccgggcccgtcgacgacgcgcgggccgtcccctgcccccgcgccggagcgcacgattgcgaccgacgcagcgcgccgttggatggcgtttgggccgtcgaggtagtcgctcattaggctggcgccggcggtcgctggagccccatcgcttcccgatccggccatggcaacaccccaatcaaatcacacaaacacacacggtcaccagtcgcttgtacgtactctgtctgttgagtgtccggctcttgagctggaacaggaactcgtacagttgctttttagcactgccgcgttggcgcgaacgcgggttgaaaacggaaaggctacctacctacctactgctcccacagtctaggagttccccggccggtccatccgacggctccggcagccgcgtcgttggtcctctggacggctcgcaatggcgccatgcccctccggacccgtcccatggctgtggcttatccacggagaagacccggccgggacgggaggacacggcgagcgagtgagtgacggaattgag

SEQ ID NO: 8030 - DNA, 372 bp, Zea Mays
ttagcgtaatattcgttgatatttttagattttttttcataaatatatttgtatatatagtgtatacgctggatacacggtgtatgcaaggcatttctggcataccactgatagcaacttaaaggaacactcaccaaaataacaatctaaagttgtaacactaccataccatacaaactgcaattccacaatactgacgttacttgtatgtctgcatactatgatactctatcatcatggaatctatgctcgatgctctcacgcagtcatactgcacgtagccaagaagcagactgcagatgacctcacgtgccgccgccgccgccgccaatccttacgtccgggttccgcaccgtcttaagccacatcccg

SEQ ID NO: 8031 - DNA, 3458 bp, Zea Mays
ccattgccgttccaattgcaaatgcactttccggccttcctcgccgaccagcgccgcctccgccgcgtcctctcctcctctcgcaccacgctcgcgacactcacccgcctacacgcgctcctcgtcgtttcctcctcccagcatatcctctcctcgctcgccgccgcatacgcccgcgctggcgcgctcgacgctgcggagtccaccctcgccgcctccccctcctccccctcctccatagccgcctggaacgggctcctctccgcgcactcccgcgccggtgcccccggtgccgcgctccgcgtctttcgcgcgctcccttcctccgcacggcccaacagcaccaccttcacgctcactctcaccgcgtgcgcgcgcctcggggacctcgacgccgctgagtccgtcagggtccgcgcgtttgcggccgggtacggtcacgacgtgttcgtctgctcggcgctgctccacctctactcgagatgcggcgccatggaagaagccatcagagtgttcgatggaatgccgaggaaggaccgcgtcgcgtggagtacgatggttgctgggttcgtgaccgctgggaggccggtggaggcgcttgcgatgtacagtaggatgagggagcatggcgtgtcggatgatgaggtggtcatggttggggttatacaagcgtgcatgtcaactgggaacgcccgaataggggcctccgttcacggccgtctcttacggcattgtatgaggatggatgttgttactaccacgagccttgtgagcatgtatgccaagaatgggcacttggatgtggcatgccaagtgtttagaatgatgccgtacagaaatgatgtcacatggagtgcgctgatttctgggtttgcacagaatggccgtgcagttgaggcacttgatttgttcagagagctgcaagctgatgggcttcagccttgttcatgggcacttgttagtgcactgcttgcttgcgctagtgttggattcctgaagctagggaagtcgatacatggtttcatcttgaggaggcttgagtggcaatgtattttgggtacagctgtccttgacatgtactccaaatgtggctccctggaaagtgcccgaaagcttttcaataagctttcctcaagagacttggttttgtggaatgcgataatcgcatgctgtggcactcatggatgtggtcatgatgcccttgctctgttccaagaactgaacgaaaccggaataaagcctgatcatgcaacatttgcttctcttctgtctgccctaagccactctggtcttgtggaggaagggaaattctggtttgatcgcatgattaaggagtttggcattgaacctgcagaaaagcactatgtatgtatagttgatctcttagcacgttctggtcttgtggaagaagccaatgacatgcttgcatcaatgcaaactgaaccaaccattgcaatttgggtcattctgctttcaggttgcttgaataacaagaagctagagcttggagaaaccatagcgaaaaagatccttgagttgcgacctgaagacattggtgtccttgcactggtatcgaatctctatgctgctgcaaagaagtgggacaaggtcagggaaatcagaaagctaatgaaggatagcggcagcaagaaagtgcctggctacagcttgatagaggtcaagggaacacgtcacgcattcgtgatggaagaccagagccaccctcagcatcgggagatcctgaaaatggtcgcaaaactcaattctgagatgaggaagctgggctatgttccaagaacagagtttgtgtaccatgatctggatgaagaccagcttctcagctaccatagcgagaggctggccattgcctttggtttgctgaacaccagccctggaacgaggctcgtgatcatcaagaacctcagggtttgtggtgattgccatgatgccatcaagtatatctcgaagattgtagatagagagattgttgtcagagacgcgaagaggttccaccatttcaaagacggagcctgttcttgtggagattactggtgattatgtgttgaggcacacatgtccacactgtagcttggacagttcacactcctagtgctgattttttggtcaagttggctgcagataaccagcagagcgaatatcagttatgtacaagtaaacttggcgcaatcttttgattcactggagagggagcctcaaatatcctttgatgcaaaacaaacagttctctgaaccttgtgctgattttggtcgagcatttataatgttcatgcaaatcattcctaaacaatcctttgattcactagtataacaaaaggataaagaaatgacaagatgaaatgctgaaacaatcttttgattcaaacgcatagttggccaggtctgtctctttcctgcaccatccacttacctaatgaatggagacatagcatatagctgtgcagccagggagaatcgcctggaccatgcattgtttttcctgtcctggaacgccaaactaagcatcttggaactcacggcagatgaagtgattgagatgcacacagttctgtgcttttctcctctcagcctacgtccaaaaccaaaagcatgggggacacgcaactcagcatgttgcactttctccacagctttactacaattgactgcaccatggacaaaggatgaaacaactgtatggttccgttgcaccttgggttccataattccacactccattgctatcctctcagcacagcatctgctgttccattcgggcaatttgtctgctccaacctcaggactatgaggacaacaaccatggtggtgaaggatcgtgctaaccgctgctggcgaagtgtggcccctgtgctgtgctcatgcagcttcaaacagtgagcgacacacggagatgctttaggagatgcgaagaatggtacgggcttgtttgagagcaagtgtaatggaggaatggaggagaccgaggaggccaaaatcccttattattcaattttgaatagtaagggattttggttgtctcaatcccttccatttcgcttgtcccaaacgagccctacaggagcaaaagatcacagttgtatagggagaatcaggagctcaatgagaagttcttttccctgacggcagtaacaagatttcgttctacagtccctgcaggaaagcttatgtatgcctaggacgtcatgtttgggatagtcttctgtgcaatctgtcgaatatgcatgttttatggttacacctcaggtccataaatgcattctgtcagtttgtgcgcctaagtggtacaccgtgacaatttcacggatagccttgcgtatttaacactttcaaatattagctgtagactactattgtgctaatgttttttttatttttatttttaacagatttagtctattaggttgttgagtctgagggtttttatatattttcttttgctg

SEQ ID NO: 8032 - DNA, 3009 bp, Zea Mays
ccattgccgttccaattgcaaatgcactttccggccttcctcgccgaccagcgccgcctccgccgcgtcctctcctcctctcgcaccacgctcgcgacactcacccgcctacacgcgctcctcgtcgtttcctcctcccagcatatcctctcctcgctcgccgccgcatacgcccgcgctggcgcgctcgacgctgcggagtccaccctcgccgcctccccctcctccccctcctccatagccgcctggaacgggctcctctccgcgcactcccgcgccggtgcccccggtgccgcgctccgcgtctttcgcgcgctcccttcctccgcacggcccaacagcaccaccttcacgctcactctcaccgcgtgcgcgcgcctcggggacctcgacgccgctgagtccgtcagggtccgcgcgtttgcggccgggtacggtcacgacgtgttcgtctgctcggcgctgctccacctctactcgagatgcggcgccatggaagaagccatcagagtgttcgatggaatgccgaggaaggaccgcgtcgcgtggagtacgatggttgctgggttcgtgaccgctgggaggccggtggaggcgcttgcgatgtacagtaggatgagggagcatggcgtgtcggatgatgaggtggtcatggttggggttatacaagcgtgcatgtcaactgggaacgcccgaataggggcctccgttcacggccgtctcttacggcattgtatgaggatggatgttgttactaccacgagccttgtgagcatgtatgccaagaatgggcacttggatgtggcatgccaagtgtttagaatgatgccgtacagaaatgatgtcacatggagtgcgctgatttctgggtttgcacagaatggccgtgcagttgaggcacttgatttgttcagagagctgcaagctgatgggcttcagccttgttcatgggcacttgttagtgcactgcttgcttgcgctagtgttggattcctgaagctagggaagtcgatacatggtttcatcttgaggaggcttgagtggcaatgtattttgggtacagctgtccttgacatgtactccaaatgtggctccctggaaagtgcccgaaagcttttcaataagctttcctcaagagacttggttttgtggaatgcgataatcgcatgctgtggcactcatggatgtggtcatgatgcccttgctctgttccaagaactgaacgaaaccggaataaagcctgatcatgcaacatttgcttctcttctgtctgccctaagccactctggtcttgtggaggaagggaaattctggtttgatcgcatgattaaggagtttggcattgaacctgcagaaaagcactatgttgcttgaataacaagaagctagagcttggagaaaccatagcgaaaaagatccttgagttgcgacctgaagacattggtgtccttgcactggtatcgaatctctatgctgctgcaaagaagtgggacaaggtcagggaaatcagaaagctaatgaaggatagcggcagcaagaaagtgcctggctacagcttgatagaggtcaagggaacacgtcacgcattcgtgatggaagaccagagccaccctcagcatcgggagatcctgaaaatggtcgcaaaactcaattctgagatgaggaagctgggctatgttccaagaacagagtttgtgtaccatgatctggatgaagaccagcttctcagctaccatagcgagaggctggccattgcctttggtttgctgaacaccagccctggaacgaggctcgtgatcatcaagaacctcagggtttgtggtgattgccatgatgccatcaagtatatctcgaagattgtagatagagagattgttgtcagagacgcgaagaggttccaccatttcaaagacggagcctgttcttgtggagattactggtgattatgtgttgaggcacacatgtccacactgtagcttggacagttcacactcctagtgctgattttttggtcaagttggctgcagataaccagcagagcgaatatcagttatgtacaagtaaacttggcgcaatcttttgattcactggagagggagcctcaaagcatctgctgttccattcgggcaatttgtctgctccaacctcaggactatgaggacaacaaccatggtggtgaaggatcgtgctaaccgctgctggcgaagtgtggcccctgtgctgtgctcatgcagcttcaagtgagctacttgctacagcctttgcttgctcccctcatttttttcggcttgacagtattttgttgatctgcatgggcatcatttggttttatccttcaagtccagatgcattagcatgcgtaggtactttagtccttcgtgtcaccattgcaaaaatggcccatttttacttccactgttctttgtgtgcttgagctagacagtgagcgacacacggagatgctttaggagatgcgaagaatggtacgggcttgtttgagagcaagtgtaatggaggaatggaggagaccgaggaggccaaaatcccttattattcaattttgaatagtaagggattttggttgtctcaatcccttccatttcgcttgtcccaaacgagccctacaggagcaaaagatcacagttgtatagggagaatcaggagctcaatgagaagttcttttccctgacggcagtaacaagatttcgttctacagtccctgcaggaaagcttatgtatgcctaggacgtcatgtttgggatagtcttctgtgcaatctgtcgaatatgcatgttttatggttacacctcaggtccataaatgcattctgtcagtttgtgcgcctaagtggtacaccgtgacaatttcacggatagccttgcgtatttaacactttcaaatattagctgtagactactattgtgctaatgttttttttatttttatttttaacagatttagtctattaggttgttgagtctgagggtttttatatattttcttttgctg

SEQ ID NO: 8033 - DNA, 3658 bp, Zea Mays
cccacgtcgcctcttccatcgccaaaaccgccgcgacccgctctctctccttcccacgcaacagcacctcgcgcccctgtgttgcgtcgtcgccggaggagcgcccatccaagcatccgaggctcgagggcaacgacatcacctgaggcggtgtcatctcctacaccaaaacaacgctacgggagtcgaatcagcaggtgcatccctttcctcttggttgcccgtgctcgtacaattcttcgatctgatcccgtcctccctgctttcctcaacgcccgcgcgctagccatgcctgctcctggcgtgcgctcgcgggccgtccagctcgctcgcgctgctacgcgaccgtagacgagccaccgcgccaagctccggtgcgagctgcgtccagcccctcccgcgagcgcccagcaaggccgtggccgagtccccgttgcgcccagccgctcccagtccggtcgtccctaaccccgcacctagcgatcgctgctgctcgccggccgagtagctgtggctccctgagctccctaacgcgcttccttgccgttcggtccgcgttccggcaagcctgcccgatcagcccctgtgcatcttctcggcgagcactcagcgccatggtcgacttcctgcccgcatgtgcgtgcgtgagccgtgaggaagaaaggtaacaactcgcccactactccactcgtgcgtgagttgtgcagagataggagggagaaaatgctaccggtggtatccacatgcatggggtttttcctcattggaaaactacttgggccctacacatgcatgtgcatgcaccccttgtgcacgcacaattccccgcatgtgtcgacatccaatacaaaactccctcatgatgatcttctatggttacaaactccgtggcccttcatgtgatttagctccgaccaatcacgtgcgccacttcgtaaataatctatgagctattaattattcaatatattcagtgttacgattcagtttcgattcatttcatatcgttagcttaataataatgtcgtcaatatattagtaacatcattttatcacgacacaagttttaattaattagttaattatttgttcatctgatatttattagaatgacaatttaaataaaactgatttatagtttatttgcgcttttataaatacaagttaatgtgattagtgcatattcaaatgttttaattaataagtgtttagtataaacacgacgtctgtagcgactctcgtgagtcttgcgcggcatcgtgttgttcgcgcgcgtagtcgcgttgactcgcgtgtgacatgcgctgtcgtgtacgttgttccgcgtgccgtccgcacgctgtttcacatagtgtcgcgtgtcgtcacgcgtatttcacgcgttgtcgcgcgtgttattaaattgttttcgtttatgatcattcatattaattaatcacctgtgtagctgttaactattagaatatcaaaataattgaaactaggcagttacgttaattcatattttataaatgtcttctaatatgatcatgctgaaaataagtattatagttaatacccacttagcataaatgcgatatcattagcgatccttgcgtgtcatgccttttcaagatttactgtttaaatgtagcaaatcctatacaatgtttataaatataatatgattacttttaaagttgtaattagtatttaacatgactaatattagcttaactactttttatttatttaatatttatttagtataaacgcgtcccctatttagtttttctcgcctatcgcgcagtctgttccacagcggtgtcgttctgtcgtgcgtgttgtttcgcacgcgatgcgcatcgccgcgcgtcgtccgcgcgctaagtcgcgtgtggctgtgcatcattcgcgcattatttttacacgtcgcgcatcttgtcgcgtgtcgttaatttcgcccgcttagaatctctcgtgttaattaaattacttatttatttgacagctgttagtgtagcatatttaatcaaaactacatatcagttataatttatattttataatgtagaattaaatgtcccgactattacttgcgtagcgtaaacgttataatttctcgaccgtagcttcgaccgtcgcactccttatccccgcgtgacagtagaagcgctctctattttatattgctcgtttttataatattttatcttgtatggtgtaatgttcttatgcaagtatatgtttgattgtgcctgtttgtattctttgcgcgttgcgaatggactgtgatccatttccgagcttcgaggaatcgacagttaagcttcggcgaccaagaggtcgaactcttcgagttctacaaagttgaagaccctaagcatctgtttggtgaaggcaggtgtcctctgacctattatgtcccatttactttataatttatcaacccgcatactatgaacaacataaggattgactagctttctatttatcttgtccttgattaccttttgagttactatggttagcttcatgctagcgctttactttaatcaatgaacatgatgagatacaatgataatactatgattttattctggatatgatgatatacttatgacatttaaggggactcgagctgtttctcgagtgcctctccgtaaggactggttcgttggatgaccgcccgggaaaacagtgcaatcatgatggtggaatgggatgcccttagctgaataattagaggaactggggtgtagttcgcttcgccgtcgtgccgttaatggggcttggtgtatgcggctcgctctgccaaggttggttcgccccttggggaggagtacggtgcatttaggaaacctaacgggcggctacagcctcagggaatctttgtaaaagcttcgtagtgaatccctggccatgtatcttgggagtaaataagggtcttgcaagcccgggctagagagggaatcacgacttgtgggtaaagtgcgcaacctctgcagagtgttatgaaactgatatatcagccgtgctcgcggttatgagcggccaagggagctccattgattagagacacattgaatcatgattactttgtttacagatgatgatgaggataatgatggtttttatgattatgatatggtaatggtttctagtattctttccgtttggaaagggtacttttgggttaacaacttgggttgatgctaaaacctggctctctactagtaataataacctgaccaactaaaagcaactgcttgactttaaccccacataaagctagtccactacagccaaacggtacatttgctgagtacgttgatgtgtactcacccttgctttcacaaaacaccaggttgtcatttgtgtaatctatgctcaagtaaagaagaaggtgtcgaggcagatctccaagagttccagaacgtcgacgagttcaaggattaggctagcgacctcccccagtcagctgcccgtggtgggtttatttacgttagctacatttcgattctgtgtactttgatttatattatgtaaatgactctagtctttaatatcattacttactctttattgtaattcgaagcattgtgctatgatgagtcatttatgtaatcactgtgtacgtgaatttctgatcctgacacgtacatggttcgcattcaat

SEQ ID NO: 8034 - DNA, 380 bp, Zea Mays
gttgcgtcgtcgccggaggagcgcccatccaagcatccgaggctcgagggcaacgacatcacctgaggcggtgtcatctcctacaccaaaacaacgctacgggagtcgaatcagcaggttgtcatttgtgtaatctatgctcaagtaaagaagaaggtgtcgaggcagatctccaagagttccagaacgtcgacgagttcaaggattaggctagcgacctcccccagtcagctgcccgtggtgggtttatttacgttagctacatttcgattctgtgtactttgatttatattatgtaaatgactctagtctttaatatcattacttactctttattgtaattcgaagcattgtgctatgatgagtcatttatgtaatca

SEQ ID NO: 8035 - DNA, 1901 bp, Zea Mays
ctccaatgacatttttcgatctttcagcttgttgctcaacaagaagcggaagaaggcgctgtttgacgctctggagaaggttaaatcggagctgatgactctggggttcatatcgctgctgctgaccgtgacgggaaggtacatcgcgcgcatctgcatcccggagggagccgcaaacaccatgctgccctgccgcctgtccggtcactcggtggcggaagagcccaagggccatggccgacggcacctatctgaagatccaaccaaccttttttcctgccgcaaaggcatggtgtcgcttgtttcagccgacggcatgcatcagctgcacattttcgtgttcttcttggccgtcttccatgttaccttcagtttcttcacaatgtccttgggtagagcaaagactcgtatatggaaggtgtgggaaaaggaaacttgctcccctcagtataattatttaaatgacccctcaaagttcaggcttacgcaccaaacatcttttgtgaggcaacatgcaagttgttggagcaaaagcacaatcacgctctattttgtgagcttctttaggcagttcttcagatccgtccgtaagacagactactttactttgcgacatggattcatttcagctcatttatctccggggactaggttcaattttcgaaagtacattaaaaggtccttggaggatgatttcaagacagttgttggcattagtccaccactatgggcttctgctttggctgtcatgctgttcaatgttcatggatggcacaacttattctggttctctgcaattccccttgtagttattctagcagttggaacaaagctgcaggctataattgctatgatggctattgaaattgcagagaggcatacagttatccaaggcatgccggtggtaaaactaagtgatgatcatttctggttcgggaagcctcgtttggttctccacctcattcatttcgcatcatttcagaacgcatttgaaattacatatttcttttggatctggtacgaatttggcctgaggtcctgcttccatgacaactttgagtttatcattgcaagagtctgccttggggctatcgtccagtttatgtgcagctacatcacccttccactctatgcccttgtttctcagatgggttcagaaatgaagcgaacaattttcgacgagcagacagcgaaggccctgaagaaatggcacaaggccgtggggaagcgggtgagtggcagcggctgcacgaggtgccggtccggcacctccaccggtacaagaccatcgcgcacgtcggcggcgtgaggagcccgttgtcggacccggactacagcgacacggacgacaccgagccgctgtcgttgcagactaggcacctgataccgccggcgaagcagcggagcctcgacaccgagcgcgcggaggtgcgcgtgaacgtcgtagagacagcggcggcgccaagcgacgtcctccaagacagcttctcgttcccaaggctgcttcctcctcgccatgtgccggacaagtaaagtggccagcagtctgcttagtactacagactgtcctatatagagatagtagaatagtagtttcaagttataagtcgatttggctagttatacaacttttgttatttatttagataaaggctatgtctatatagcaaaagttgtaaaactagaaaaatcaaaatgatttataatttgaattgtagtagtatagtagattagtagtcgaatctaacatgcatgagagcattttcttagtacagctgcctgtaagtgatgcctgggtcgatgacttggaatgtctgtcttctggggctaattcagggtttaaagcctatagcctggtacgtagcaaagcctgcataataaaatatcaaaacgagttaaag

SEQ ID NO: 8036 - DNA, 3247 bp, Zea Mays
cacaaagttccttcgaagaatctttgcatcctacagacaaaacataagagaacaaaacatattatcttatagaacgagatagctgaaatgtatgttttgaacataaaatgaacgtactacactcaccccaacaaatttcagtcatctgtcattcccccacatagccagcttgtagaacaaggtagctgatattaaacctatagaataatgtttgggtaactatgttttatacaatgattatcatagaaaaaatttaaactgctgagaaggtggtacgaagaaaataccctcttaagtcaattggaacaccagtatgaattgtatgttcccatttaaagatatcctctgcccatccagaacgtttcttgttgtaagcaatcttatatttttttgaggccatgataatcgcttccgcgaacctcttgtatggcatgtgtttacaccaatcttgagtcggtgtaaagttgataaaagtcacatgctttttaacatgatctattacgaaaagggtgtgacatccattgatgtactacttatgaactttggacaagtggagtttatgtatgaagtatgaactacttatgaacttatatggacttgattcgtcatgtatgacgagtcactaaaagccagatcaaccctggtagcatctggctaggtaaatatggttgttttatagtttgttccttcttggtttttcaaatcgttttcttttatgtaccttcccattctgtgccttggtatgaaagacaacactggctacctggtgattcttaaaaaaacactttctttctggaacttcacagcatgggagcatccatccttagatggcctgactacctttatgcatgtgtccatctagtggattttctgtttacttagtgctatgggattggggatcgcttatgctattatttttcaggaggaaatgatgcgagggaaggcaggatatgaacacctgaatgaacccctccatatattggttgaggcagagctacctgttgaaatcattgatgtgtgtttgatgcaagcccgcgagatccttgaaggtctgctaaagcctgtggatgaattccaggactacttcaagaagcagcagctacgggagcttgcgatgcttaatggcacccttcgtgaggaagggatgcagagatccggttcagcgtcccctttccacaacagccttgggatgaagagagccaagacaagagggtaatgaacaaagctgcaagcatcatgaaggaagaaccaaatgaatctattttgagactgatcctgtgtgcacatggggttgccttccttggctactgtactggcccagtacggcctcgagccaccagcatcggggcagccgtacccagacgagcaaatgcagcaacaagtgagcatgaagctgcaaagagaaaacacgccaatgctggcaagcaaggaacctcagtagcctcctaccctgatggtgatggatgcaaatcggtgttctcagaagttgcaggagctgagtagcaagaaagccaatgtgaaaaagaaacaaaagatgtagaatggtaagaaaatcagcacaaaaggtgtttgcaacatataaaatgaggtcaataaaattgagatgaagcaaagcagcagttcagttgatccaagaatagatgtcttggagttggttagcagaagggttgattctgaagaaaaggagaggcagaagagcagtaaacaggttgggttgaaagaaaagctgaagtcatggcctgtacctgaagtgtgcatagtatacacgaggagaaaccgcaagcaacacaagaaggaactgggagatgaagtaactggtgctactccgggaacagagtaccatatgcctgccagatatggctgtttgaaccaagtatgtcctgatgcaggctctgacaaaattcctgatcctgatgtagatttctacagtgttcctgatgcagatttttccagttttggtgatcattctgaaagttcatttcaaaatgatcaagtctgggccatgtatgatgaggaagatggtatgcctccctattatgctttgatcagaaaagtcatttccactcgcccttttaaaggtagactggtccacctcaaagcaaacgactctaatgggttcggagtctccagttggctctcgtgtggatactccaagacctgtggtgagttcaagtttgatgtgttcaagtttgatgcctcgctaaatggtgagctgtcggaagaattgagaaatcgactgatgaattaagcagaaaagatcaaggtgagctgtcggaacattttggttcaattccttgtgttttggtcactgctacacattttcatgtaattttaaataacaaaaaacatttgttactaatgaactgctaaccactgaagagagcaacaaaaattactcatctcagctaaatggtttcatgaagtggttagaaagagaactgttgcagttcggcatgcattctgagagtgccaatgattatttactggatcacatattcttttgcatatatttctattcaatcttgttaacgctttcttcgccataacttttagattaaagtacttcttttatggcggtgatgctgcttaaactatgagcattgtggatttattattggaatctgttgagctgtcttacaggcttggttagtattgatgaactttgccactcgtgttgggcatcttgtagcagtttcctgtgaagccgaactccttctcatgcaaaaggaatggggcacaacagaagctgaactacttctgccgagattttatttggagacgagcagcaaaataaggccttcgactctacagagataacgtctaatgcctccccacgcacaattttatctaaaaattagcatcaaccgatatataccggaagaatgcatataaactttataccccaataaaaacccccaatacacacaagctcattgtattatacttaacatatgtcatatatataaaagttatattaggggaagcattgaaaagaagtcagttcattttatgtttgagcgacaaattcactaacatatcacaggctactaaagaacagttgcagcaacaaattcgtttcaaagcttaccttggcctgagaagatgcggaagccgtcgctgcgttgcagcgaatccccgacggtgtcctgtcgtccggtccgggtcaaccaagcaccttatcccttccttcttgcgcaccggtcgctagccgaaacaacaaactactacaatgaaacccccataccca

SEQ ID NO: 8037 - DNA, 2905 bp, Zea Mays
ctattgtatgtttgcaggaatggcatatcggcacgaattgtcctcataacttaacagatcaatcacaaagttccttcgaagaatctttgcatcctacagacaaaacataagagaacaaaacatattatcttatagaacgagatagctgaaatgtatgttttgaacataaaatgaacgtactacactcaccccaacaaatttcagtcatctgtcattcccccacatagccagcttgtagaacaaggtagctgatattaaacctatagaataatgtttgggtaactatgttttatacaatgattatcatagaaaaaatttaaactgctgagaaggtggtacgaagaaaataccctcttaagtcaattggaacaccagtatgaattgtatgttcccatttaaagatatcctctgcccatccagaacgtttcttgttgtaagcaatcttatatttttttgaggccatgataatcgcttccgcgaacctcttgtatggcatgtgtttacaccaatcttgagtcggtgtaaagttgataaaagtcacatgctttttaacatgatctattacgaaaagggtgtgacatccattgatgtactacttatgaactttggacaagtggagtttatgtatgaagtatgaactacttatgaacttatatggacttgattcgtcatgtatgacgagtcactaaaagccagatcaaccctggtagcatctggctaggtaaatatggttgttttatagtttgttccttcttggtttttcaaatcgttttcttttatgtaccttcccattctgtgccttggtatgaaagacaacactggctacctggtgattcttaaaaaaacactttctttctggaacttcacagcatgggagcatccatccttagatggcctgactacctttatgcatgtgtccatctagtggattttctgtttacttagtgctatgggattggggatcgcttatgctattatttttcaggaggaaatgatgcgagggaaggcaggatatgaacacctgaatgaacccctccatatattggttgaggcagagctacctgttgaaatcattgatgtgtgtttgatgcaagcccgcgagatccttgaaggtctgctaaagcctgtggatgaattccaggactacttcaagaagcagcagctacgggagcttgcgatgcttaatggcacccttcgtgaggaagggatgcagagatccggttcagcgtcccctttccacaacagccttgggatgaagagagccaagacaagaggcagttcagttgatccaagaatagatgtcttggagttggttagcagaagggttgattctgaagaaaaggagaggcagaagagcagtaaacaggttgggttgaaagaaaagctgaagtcatggcctgtacctgaagtgtgcatagtatacacgaggagaaaccgcaagcaacacaagaaggaactgggagatgaagtaactggtgctactccgggaacagagtaccatatgcctgccagatatggctgtttgaaccaagtatgtcctgatgcaggctctgacaaaattcctgatcctgatgtagatttctacagtgttcctgatgcagatttttccagttttggtgatcattctgaaagttcatttcaaaatgatcaagtctgggccatgtatgatgaggaagatggtatgcctccctattatgctttgatcagaaaagtcatttccactcgcccttttaaaggtagactggtccacctcaaagcaaacgactctaatgggttcggagtctccagttggctctcgtgtggatactccaagacctgtggtgagttcaagtttgatgtgttcaagtttgatgcctcgctaaatggtgagctgtcggaagaattgagaaatcgactgatgaattaagcagaaaagatcaaggtgagctgtcggaacattttggttcaattccttgtgttttggtcactgctacacattttcatgtaattttaaataacaaaaaacatttgttactaatgaactgctaaccactgaagagagcaacaaaaattactcatctcagctaaatggtttcatgaagtggttagaaagagaactgttgcagttcggcatgcattctgagagtgccaatgattatttactggatcacatattcttttgcatatatttctattcaatcttgttaacgctttcttcgccataacttttagattaaagtacttcttttatggcggtgatgctgcttaaactatgagcattgtggatttattattggaatctgttgagctgtcttacaggcttggttagtattgatgaactttgccactcgtgttgggcatcttgtagcagtttcctgtgaagccgaactccttctcatgcaaaaggaatggggcacaacagaagctgaactacttctgccgagattttatttggagacgagcagcaaaataaggccttcgactctacagagataacgtctaatgcctccccacgcacaattttatctaaaaattagcatcaaccgatatataccggaagaatgcatataaactttataccccaataaaaacccccaatacacacaagctcattgtattatacttaacatatgtcatatatataaaagttatattaggggaagcattgaaaagaagtcagttcattttatgtttgagcgacaaattcactaacatatcacaggctactaaagaacagttgcagcaacaaattcgtttcaaagcttaccttggcctgagaagatgcggaagccgtcgctgcgttgcagcgaatccccgacggtgtcctgtcgtccggtccgggtcaaccaagcaccttatcccttccttcttgcgcaccggtcgctagccgaaacaacaaactactacaatgaaacccccataccca

SEQ ID NO: 8038 - DNA, 2045 bp, Zea Mays
acacgaccccttctcctctcgttctcgcccagtcgcaccgtccccgtctccaacccgactctgaaatccacgagctcttccccctcgtccacaccccgcccctccctgctctccgcctccccgtccccgcccccatcgctacccacaagcaccttcggaggctccaggcaacccacctcctgcacccggcgtccctcgcggcggcgacgcgcgaacgtcccgctccccggtgggaacgacggtagccagtgcaaaagttgcgccccctacgttacctttcatgaaccaaacgaacggcacctctgaaatgctttcgtttcctgtgctctccctgaccaccaacagagtaacggagagacggagccatgagcggaggggtggagccggataccccgcccggtagcagcagcagcagcagcaggagcgggggcagcacgcccgtgggcggcaagccgccacgccaccacctcacgtccatccgccactgcgccagcagtgcccgcatcgccgctgcctccgccgaattcgggctggagtcggggacgctcagcttgatttcacctaccgcagacatccgtccgggcttcttgcctgtgttcaggtcggggagtttcgcggatattggacccaaatccttcatggaggacgagcatgtctgtgtggacaacctcgtcgagcaccttggactccgtggcccgggcatccctgcaccgggtgccttctatggggtgtttgatggccatggtggtagtgatgctgcctgttttgtccggaagaatatactgaagttcataaccgaagattgccacttccccaacagcatcgagaaggcaatcagaagtgctttcgtaaaggctgaccatgcgattgcggattctcagtctcttgaccggaattctgggaccacggcgttgacggtccttatatctggcaggacactgcttgtcgcgaatgctggtgactgtagagccgtattaggaaagcgaggccgagcttttgaactctcgagagaccacaaacccagctgcagcgttgagaagctcagaatcgaaaaccttggcggtacggtcttcgatggctacctcaacggtcagctggctgtagcaagggcgatcggtgactggcacatgaaaggctccaaaggctctgcgtgccctctcacaccggaacctgagtttagggaggttaggcttaccgaggaagacgagttcttgataataggctgcgatggcctctgggacgtgatgagcagccagtttgctgtctccatggtcaggaaagagctgatggaacacaatgacccacagcggtgctcgcgggagcttgtccaggaagctcttaggcgcgactgctgtgataacctaaccgtagtcgtcgtgtgcttctcagatgacccgccccctcagatcgaggtcccgagattccgggtacggagaagcatctcaatggaagggctgcatacgctgaggggagctcttgacagtaacgtttgagctccgaaagtgtaccttcgcctgcaacttgtgtcgtggaggatttttctctcttctttgttgtttggtctgttggaagttttgctccgctcggctcatcggtgttttgcgatatagatctcggaataagttttgtagaattattttggaaggaaatttttgttgaggtgtaggctaattaatcttcctttgttgaggccaccattttgttgttggttgctcacaatgtaatcgagcaattaaccggcacgttgttctggtacgaatgagagttatagcagctgatcgtttttggtctttgttcagaattccacttgtatggttggacgagtcccctgttcattattatcagaaccaaaagagaataaagttatggtacagattttgttcatctttgtgcatgtgggaaaacatggtcacaacataccttgactccctgctatttgttgggagctgattggtctgcagtagatgcggaattcatttgatttaacaatgttctgaaaccttttaagtttatgctgttgtcatggagaaaaaacaaaaacaaga

SEQ ID NO: 8039 - DNA, 2364 bp, Zea Mays
acacgaccccttctcctctcgttctcgcccagtcgcaccgtccccgtctccaacccgactctgaaatccacgagctcttccccctcgtccacaccccgcccctccctgctctccgcctccccgtccccgcccccatcgctacccacaagcaccttcggaggctccaggcaacccacctcctgcacccggcgtccctcgcggcggcgacgcgcgaacgtcccgctccccggtgagtaacggagagacggagccatgagcggaggggtggagccggataccccgcccggtagcagcagcagcagcagcaggagcgggggcagcacgcccgtgggcggcaagccgccacgccaccacctcacgtccatccgccactgcgccagcagtgcccgcatcgccgctgcctccgccgaattcgtaagcaagctcgctgccacccaagccatctatccctaacacgaatttgatgtctgcccttctgttctcctgcaggggctggagtcggggacgctcagcttgatttcacctaccgcagacatccgtccgggcttcttgcctgtgttcaggtcggggagtttcgcggatattggacccaaatccttcatggaggacgagcatgtctgtgtggacaacctcgtcgagcaccttggactccgtggcccgggcatccctgcaccgggtgccttctatggggtgagttggaattgtatttgcatcagccctaaccactgactaactgcttctgttaaagtatttaacaatgtgtactctttatggatctatgatttgttcttttgtgagtggcaataatgttgccatgatagcttctaggcttactatgatggtagaaatgattgaactgaagaggaatcggttccacatggccaatgataaaaaacccagaggatgaatgcttttctttctattttggaccttttggtactgcacacagcagatacagatggggaattttgctagtgagaaataagtgtcttgtccttttgccacctggccttgcaaatctttactgttttgtttgtgaaaaattaggtgtttgatggccatggtggtagtgatgctgcctgttttgtccggaagaatatactgaagttcataaccgaagattgccacttccccaacagcatcgagaaggcaatcagaagtgctttcgtaaaggctgaccatgcgattgcggattctcagtctcttgaccggaattctgggaccacggcgttgacggtccttatatctggcaggacactgcttgtcgcgaatgctggtgactgtagagccgtattaggaaagcgaggccgagcttttgaactctcgagagaccacaaacccagctgcagcgttgagaagctcagaatcgaaaaccttggcggtacggtcttcgatggctacctcaacggtcagctggctgtagcaagggcgatcggtgactggcacatgaaaggctccaaaggctctgcgtgccctctcacaccggaacctgagtttagggaggttaggcttaccgaggaagacgagttcttgataataggctgcgatggcctctgggacgtgatgagcagccagtttgctgtctccatggtcaggaaagagctgatggaacacaatgacccacagcggtgctcgcgggagcttgtccaggaagctcttaggcgcgactgctgtgataacctaaccgtagtcgtcgtgtgcttctcagatgacccgccccctcagatcgaggtcccgagattccgggtacggagaagcatctcaatggaagggctgcatacgctgaggggagctcttgacagtaacgtttgagctccgaaagtgtaccttcgcctgcaacttgtgtcgtggaggatttttctctcttctttgttgtttggtctgttggaagttttgctccgctcggctcatcggtgttttgcgatatagatctcggaataagttttgtagaattattttggaaggaaatttttgttgaggtgtaggctaattaatcttcctttgttgaggccaccattttgttgttggttgctcacaatgtaatcgagcaattaaccggcacgttgttctggtacgaatgagagttatagcagctgatcgtttttggtctttgttcagaattccacttgtatggttggacgagtcccctgttcattattatcagaaccaaaagagaataaagttatggtacagattttgttcatctttgtgcatgtgggaaaacatggtcacaacataccttgactccctgctatttgttgggagctgattggtctgcagtagatgcggaattcatttgatttaacaatgttctgaaaccttttaagtttatgctgttgtcatggagaaaaaacaaaaacaaga

SEQ ID NO: 8040 - DNA, 1702 bp, Zea Mays
atgaagaaggcggttaacacctgcttattatcctggctgctgctgctcggcactctcacactggcagcacgtcctgacgcaggcggcggcctcgatgcagccacggtagccgcgcaggagctcgaccgcgtcctgtcgctgcccgggcagccgagctactcatccgcgtcgcccaagcagtactccgggtacgtcacgaccgacgagcacctaggcaaggcactgttctactggttcttcgaggccacggagacgcctgacgagaagccactggtgctgtggctcaacggagggcctggctgttcttccattgggttcgggcagtcgcaagaactcgggccgttcctggtgaagaaagatgtccctgagctcgagctcaacccgtatgcttggaaccaagctgccaatctgctgttcctggactccccagcgggcgtcgggttttcctacacaaacacatccttcgaaaaggatccaccgggagacaattccacagcacacggttcgtacgctttcctcgtcaggtggttccagaggttcccccagcacaaggccaaggagttctacatagctggagagagctacgcaggacactacgttccccagctcgcagacgtcattgtggaggggaacaagaaggcctccgaagaaaaccacatcaacttcaaaggcatcttgatcggaaacgcgtacatggacggcgacaccgatctggtgggcatcttcgactcggcgtggcaccacgccatcatctcggacgagctctacggcgacgtgcagaagaattgcgacttcagcttggtggagctgtccccggagtgcagcgcggacgtggaccagtacaccgcgctctacagggtcatcgacatctacagcctgtacaccgaccgctggatcttctcgaggtgcccgatgggctacgacccgtgcacgcagacgtacgcgactgagtacttcaaccgcgaggacgtgcagaaggcgctgcacgccaatgtcactggcgtgccttacccctactcgctttgccgtaattcgataaacgacgcgtggaaagattccgacttgacagtcgttccagtagtgaagaagctggtggaggcggggctccggatatggattttcagcggcgacacggacgcaagaatcccgaccacgtcaacccggtacacgctgaagaagctcggcctgcccatcaaagaggactggtcgccgtggttccatcgcaagcaggttggcggctggactgtggtgtacgacggcctgacattcgtcaccgtgagaggtgccgggcacatggtcccgtccacgcagccgcagcaagcgctcgagctgttcaagcacttcctggccaacacgaaactgccctccgagcccttctagatatataatagtgtgcaacaaagctctccactcctggataaacaagcaggagcgatcgtccgtgcaccacatttattagacctgttgtacctgcgttcttggaaggtgtaatggaacagtgctgtggctgtgatggtagtaccgttcaacaaatataaataattttagaaacttttacaacagattacagtttggatacacgtacgatctcattatacataaaccatattagtcgtttttttaattgttctgatcttttctaaaagggtgtggttcttccttcgtctccattcaactatgatctgctgccaaaagtattaat

SEQ ID NO: 8041 - DNA, 2205 bp, Zea Mays
gttcttcttccctcaatccattgcaagcaacaggaggagaaaaaacaaggagcgagacctcgcagctgacgcgcacaaggcaaaacccaatcggagccgtggaccgggccggagatagggctcgaggccatggcaagcggaggcgagggcgcagggagcggcgagtcccctcccgctgcctcagtggaggcggcagcgggggaggcgacgctgcacatccggtgcgcgaacggctctaagttcacggtgcagacggacctgggcgccacggtgggcgggttcaaggaggtcgtagccgggagctgcgacgtgccggcgccgcagcagcgtctgatctacaagggccgcatcctcaaggacgagcaaaccctagaaagctacggcgttgagacagatcacacaattcacttggtgcgtggtgttgccccaccagctgcatccagtgcacctgctgctgccagctcccttgcttcatctactcttagtagcgtcccggcaggtggcctgggagatctatttccaggtgttggtgctccaggaagtggcaggtcatcaggtatatttgggccaggatttccagagttagagcaagttgagcagcatttaagccagaatcccaacttgatgagggagataatgaatatgccagcgatgcaaaatctcatgaataaccctgatttaatacgcaatatgattatgagcaacccacaaatgcgcgagatcatggatcggaatcctgatcttgcccatgtgctcaatgacccaagtgtcctccgccaaaccctcgaagctgctaggaaccctgaaatcatgagagagatgatgcggaacacagacagagctatgagcaacattgagtcctctcctgaaggttttaatatgctccgtcgcatgtatgaaactgtccaggagccatttctaaatgcaacaacaatgagcggggaagggaacacagcctcaaacccatttgcagctcttctcggcaaccaggggtctaaccaacctggtcaaggtcaacctgcaacatatactccaactataggttcggagtcgacaactggaaccccagctccaaatactaatccacttccaaatccctggagcaccaatgctgggagtgcacaaggagcaacacggtccagtggcaacacaagaactggtgcttctggtcatgttggaggtactggtgccactggtggattgggagggcttggttcaccagatttgagtagtttgcttggtggtcttgctggcagtccaagaactggtgcttctggtggtttaggaggtttgggttcaccagatttggggaatatgcttggtggttctcctgatgtttctcttttcagtcagatgttgcaaaaccctgcaatgatgcagatgatgcagagcattatgtctgacccacagaccatgaaccattgcttagcttcaacccaaatgcacgcaacctgatggaatcaaaccctcagatgagggaaatatttcaaaatccagaatttcttcgccagctgacatcgcctgagactttgcagcaattactcttatttcagcagtctttattaggacagcttggtcaacatcaacctaaccagggtagaaacaattcaggcagtgccacaggtacgcctggaaaccctagccttgacaccttgatgagcatgctcagtgggcttggttcgggaggtggcataggtgttccaaatacttccaatgtgccaccggaggagctctatgccacacagcttactcagctccaagaaatgggtttcattgacactgcggagaacattcaagcactgctcgctaccgctgggaatgtacatgctgcggtggagcgtcttctcgggaaccttgggcagtagctaaaacgagcgagccacacaccgccagtaaatcttaaaatgtcgcgcatctgcaggagtgttcggcttaacgttcttcaagcccttgaatttgaagggggtggcgtccataatcccgaaaacaaaataatcaaaaagtcaggcagccattaacttttctcatacatggtggtcatgtctttgttttacagtgttgtatttgcaatttggattggtgtacatacatatcggtcggatattacctcatagaatgtatgtagttttgtgttttgaactgttgattcttgattcccaatcaatcaaatcaaactatctaatccaactgttggctttctcattc

SEQ ID NO: 8042 - DNA, 2176 bp, Zea Mays
gttcttcttccctcaatccattgcaagcaacaggaggagaaaaaacaaggagcgagacctcgcagctgacgcgcacaaggcaaaacccaatcggagccgtggaccgggccggagatagggctcgaggccatggcaagcggaggcgagggcgcagggagcggcgagtcccctcccgctgcctcagtggaggcggcagcgggggaggcgacgctgcacatccggtgcgcgaacggctctaagttcacggtgcagacggacctgggcgccacggtgggcgggttcaaggaggtcgtagccgggagctgcgacgtgccggcgccgcagcagcgtctgatctacaagggccgcatcctcaaggacgagcaaaccctagaaagctacggcgttgagacagatcacacaattcacttggtgcgtggtgttgccccaccagctgcatccagtgcacctgctgctgccagctcccttgcttcatctactcttagtagcgtcccggcaggtggcctgggagatctatttccaggtgttggtgctccaggaagtggcaggtcatcaggtatatttgggccaggatttccagagttagagcaagttgagcagcatttaagccagaatcccaacttgatgagggagataatgaatatgccagcgatgcaaaatctcatgaataaccctgatttaatacgcaatatgattatgagcaacccacaaatgcgcgagatcatggatcggaatcctgatcttgcccatgtgctcaatgacccaagtgtcctccgccaaaccctcgaagctgctaggaaccctgaaatcatgagagagatgatgcggaacacagacagagctatgagcaacattgagtcctctcctgaaggttttaatatgctccgtcgcatgtatgaaactgtccaggagccatttctaaatgcaacaacaatgagcggggaagggaacacagcctcaaacccatttgcagctcttctcggcaaccaggggtctaaccaacctggtcaaggtcaacctgcaacatatactccaactataggttcggagtcgacaactggaaccccagctccaaatactaatccacttccaaatccctggagcaccaatgctgggagtgcacaaggagcaacacggtccagtggcaacacaagaactggtgcttctggtcatgttggaggtactggtgccactggtggattgggagggcttggttcaccagatttgagtagtttgcttggtggtcttgctggcagtccaagaactggtgcttctggtggtttaggaggtttgggttcaccagatttggggaatatgcttggtggttctcctgatgtttctcttttcagtcagatgttgcaaaaccctgcaatgatgcagatgatgcagagcattatgtctgacccacagaccatgaaccagttgcttagcttcaacccaaatgcacgcaacctgatggaatcaaaccctcagatgagggaaatatttcaaaatccagaatttcttcgccagctgacatcgcctgagactttgcagcaattactcttatttcagcagtctttattaggacagcttggtcaacatcaacctaaccagggtagaaacaattcaggcagtgccacaggtacgcctggaaaccctagccttgacaccttgatgagcatgctcagtgggcttggttcgggagtgccaccggaggagctctatgccacacagcttactcagctccaagaaatgggtttcattgacactgcggagaacattcaagcactgctcgctaccgctgggaatgtacatgctgcggtggagcgtcttctcgggaaccttgggcagtagctaaaacgagcgagccacacaccgccagtaaatcttaaaatgtcgcgcatctgcaggagtgttcggcttaacgttcttcaagcccttgaatttgaagggggtggcgtccataatcccgaaaacaaaataatcaaaaagtcaggcagccattaacttttctcatacatggtggtcatgtctttgttttacagtgttgtatttgcaatttggattggtgtacatacatatcggtcggatattacctcatagaatgtatgtagttttgtgttttgaactgttgattcttgattcccaatcaatcaaatcaaactatctaatccaactgttggctttctcattc

SEQ ID NO: 8043 - DNA, 1651 bp, Zea Mays
gttcttcttccctcaatccattgcaagcaacaggaggagaaaaaacaaggagcgagacctcgcagctgacgcgcacaaggcaaaacccaatcggagccgtggaccgggccggagatagggctcgaggccatggcaagcggaggcgagggcgcagggagcggcgagtcccctcccgctgcctcagtggaggcggcagcgggggaggcgacgctgcacatccggtgcgcgaacggctctaagttcacggtgcagacggacctgggcgccacggtgggcgggttcaaggaggtcgtagccgggagctgcgacgtgccggcgccgcagcagcgtctgatctacaagggccgcatcctcaaggacgagcaaaccctagaaagctacggcgttgagacagatcacacaattcacttggtgcgtggtgttgccccaccagctgcatccagtgcacctgctgctgccagctcccttgcttcatctactcttagtagcgtcccggcaggtggcctgggagatctatttccaggtgttggtgctccaggaagtggcaggtcatcagctgggagtgcacaaggagcaacacggtccagtggcaacacaagaactggtgcttctggtcatgttggaggtactggtgccactggtggattgggagggcttggttcaccagatttgagtagtttgcttggtggtcttgctggcagtccaagaactggtgcttctggtggtttaggaggtttgggttcaccagatttggggaatatgcttggtggttctcctgatgtttctcttttcagtcagatgttgcaaaaccctgcaatgatgcagatgatgcagagcattatgtctgacccacagaccatgaaccagttgcttagcttcaacccaaatgcacgcaacctgatggaatcaaaccctcagatgagggaaatatttcaaaatccagaatttcttcgccagctgacatcgcctgagactttgcagcaattactcttatttcagcagtctttattaggacagcttggtcaacatcaacctaaccagggtagaaacaattcaggcagtgccacaggtacgcctggaaaccctagccttgacaccttgatgagcatgctcagtgggcttggttcgggaggtggcataggtgttccaaatacttccaatgtgccaccggaggagctctatgccacacagcttactcagctccaagaaatgggtttcattgacactgcggagaacattcaagcactgctcgctaccgctgggaatgtacatgctgcggtggagcgtcttctcgggaaccttgggcagtagctaaaacgagcgagccacacaccgccagtaaatcttaaaatgtcgcgcatctgcaggagtgttcggcttaacgttcttcaagcccttgaatttgaagggggtggcgtccataatcccgaaaacaaaataatcaaaaagtcaggcagccattaacttttctcatacatggtggtcatgtctttgttttacagtgttgtatttgcaatttggattggtgtacatacatatcggtcggatattacctcatagaatgtatgtagttttgtgttttgaactgttgattcttgattcccaatcaatcaaatcaaactatctaatccaactgttggctttctcattc

SEQ ID NO: 8044 - DNA, 2239 bp, Zea Mays
ttcctcttcagagttcagacttcgggcctgtttccttcagttcttcttccctcaatccattgcaagcaacaggaggagaaaaaacaaggagcgagacctcgcagctgacgcgcacaaggcaaaacccaatcggagccgtggaccgggccggagatagggctcgaggccatggcaagcggaggcgagggcgcagggagcggcgagtcccctcccgctgcctcagtggaggcggcagcgggggaggcgacgctgcacatccggtgcgcgaacggctctaagttcacggtgcagacggacctgggcgccacggtgggcgggttcaaggaggtcgtagccgggagctgcgacgtgccggcgccgcagcagcgtctgatctacaagggccgcatcctcaaggacgagcaaaccctagaaagctacggcgttgagacagatcacacaattcacttggtgcgtggtgttgccccaccagctgcatccagtgcacctgctgctgccagctcccttgcttcatctactcttagtagcgtcccggcaggtggcctgggagatctatttccaggtgttggtgctccaggaagtggcaggtcatcaggtatatttgggccaggatttccagagttagagcaagttgagcagcatttaagccagaatcccaacttgatgagggagataatgaatatgccagcgatgcaaaatctcatgaataaccctgatttaatacgcaatatgattatgagcaacccacaaatgcgcgagatcatggatcggaatcctgatcttgcccatgtgctcaatgacccaagtgtcctccgccaaaccctcgaagctgctaggaaccctgaaatcatgagagagatgatgcggaacacagacagagctatgagcaacattgagtcctctcctgaaggttttaatatgctccgtcgcatgtatgaaactgtccaggagccatttctaaatgcaacaacaatgagcggggaagggaacacagcctcaaacccatttgcagctcttctcggcaaccaggggtctaaccaacctggtcaaggtcaacctgcaacatatactccaactataggttcggagtcgacaactggaaccccagctccaaatactaatccacttccaaatccctggagcaccaatgctgggagtgcacaaggagcaacacggtccagtggcaacacaagaactggtgcttctggtcatgttggaggtactggtgccactggtggattgggagggcttggttcaccagatttgagtagtttgcttggtggtcttgctggcagtccaagaactggtgcttctggtggtttaggaggtttgggttcaccagatttggggaatatgcttggtggttctcctgatgtttctcttttcagtcagatgttgcaaaaccctgcaatgatgcagatgatgcagagcattatgtctgacccacagaccatgaaccagttgcttagcttcaacccaaatgcacgcaacctgatggaatcaaaccctcagatgagggaaatatttcaaaatccagaatttcttcgccagctgacatcgcctgagactttgcagcaattactcttatttcagcagtctttattaggacagcttggtcaacatcaacctaaccaaaacaattcaggcagtgccacaggtacgcctggaaaccctagccttgacaccttgatgagcatgctcagtgggcttggttcgggaggtggcataggtgttccaaatacttccaatgtgccaccggaggagctctatgccacacagcttactcagctccaagaaatgggtttcattgacactgcggagaacattcaagcactgctcgctaccgctgggaatgtacatgctgcggtggagcgtcttctcgggaaccttgggcagtagctaaaacgagcgagccacacaccgccagtaaatcttaaaatgtcgcgcatctgcaggagtgttcggcttaacgttcttcaagcccttgaatttgaagggggtggcgtccataatcccgaaaacaaaataatcaaaaagtcaggcagccattaacttttctcatacatggtggtcatgtctttgttttacagtgttgtatttgcaatttggattggtgtacatacatatcggtcggatattacctcatagaatgtatgtagttttgtgttttgaactgttgattcttgattcccaatcaatcaaatcaaactatctaatccaactgttggctttctcattc

SEQ ID NO: 8045 - DNA, 1250 bp, Zea Mays
cgctagcacgtcagtcggcctcatcctctgcactgcagtcattgagcgagctctgctcggccctctcctatgcgcatgttgccttgcttcttcccttgatgctcgccgtcgctagtactggacgttccctctctcttgtcgcgtcctggtagccactggtccggctgtcttttccctcggcgtccagatccaatcccaactccaagcgttgtccatggagctgctcgccgatcaccgcccacaatcgtgcccctttactgtgctcgcccatgtcgccgccgtcgcccagctcgatgccttccctgctcgccagcacttgttcagtcgtctcagctcgccggtgtcgtgttctagtcagcatcatgctctgcgcgatgcgctccaatgtcatttgtcgcgttttgcgcgttctcttctccgcaggttccatggagctcgcgccgtgatctctcagcttgccagctgtactcgtcttcctcgccagcgtgacctctcggcttgctcggcctcaatctccatcgcgccgcggcaacttcccgtttatctggtgccgcacacgctgctggtccttgcaagtccaccttggttcggccagtgatacctgtgtcggctctctaatgcttgcgcgtgtttgtccacgtcgccagtagctcggtctctacgtatgtctctctcagcatctcgacatcggaactccatcctgtctgtatgtgtgtggaagaacgagatcgatggagaagaaaggagttaaaggaagaaggaagcaacgcccaatgcaacgctcgctgcgtgttcggtagaattcctgagccaagagtcgtcgccgtttgcgtgaatgtcaagtttatgttggtcgcagtgcacgcggtggtgttcattaaggaagaatgtgaagccctgcggtgttcgatggactattcaaaccgaagagcgtggacgatttcgcgaagttaaatcgaattggtcatggtacgataattattcgtgtgatgcggaagacgagccgagtcgaccccaaaatgacgtagcgggtggactactccgcataatgaagcagatggatgaacctaaagatggatagacggagcaagtgatcgattaagagatgatcgccaagtggtcgccacttaacaaacactaacatagtgtttattccaggcaagccccggtgcatgcaaccccttccttgtgtttttaaataatttttgcacactttaagtctagtgaaatgtgcattaggtttataggag

SEQ ID NO: 8046 - DNA, 1583 bp, Zea Mays
ttgatactttacctcgataaacgcgaactgcatcagatgcttcggtagcaaggcaagggaagaacatatcctggacgtacagcaagaaacgactgacctacattgctacagctacccaacattagtatccaaatgtttttgtttttggtttggataatatatatatgtatgcagtagtgcacgacatgctctagcctctagctccaagtttaatgtaaattcacacgtgtggccactggccaagacaaaatttcaacaagtaatctgacctttaaccgttcaccgaggaagccaacaatgaaaaattcatgcacagcactgggatcgctggcagcactggttcgatctgtctttgtttcagcttttgtgaggagaatctaagtattgtgaggactacatgcggagaaagatgaagaaatctataagatttacgatctaaaagacaccatgatatggatcggggacagcatcgcagcaaacctgaggcgactcctttgaatcagcgctttgcctctttatgccccctttcgctttcggtgcgtaagggcagcaaggctttagctgcggcagatccaccggcggcgccccgagaatcgaagatgccggtgaaggtgttcggatcgccgacgtcggcggaggtcgcccgcgtcctggcctgcctgttcgagaaggacgtcgagttccagctcatccgcgtcgactccttccgcggcaccaagcgcctgccccagtacctcaagctccagccgcacggcgaggcgctcaccttcgaggacggcaacgtcaccctcgtcgagtcgaggaagatcctgcgccacatcgccgacaagtacaagaaccaggggtacagggacctgttcggcccgggcgcgctggagcgggcctccatcgagcagtggctgcagacggaggcgcagagcttcgacgtccccagcgccgacatggtctacagcctcgcctacctgccgcccgacatgcagctcgacggcaggggcgtcggcggcctcccggcggcgacggggacgatgaacccggcgcaccggcagaaggtggaggagatgctgcagctgttcgagaagagccgcaggcagctgggcaagctgctggacatctacgagcagcgccttggcgaggaggccttcctggccggaggcaagttcacgctcgccgacctgtcccacctgcccaacgccgaccgcctcgccggcgacccgcggtccgcacgcctcatggagtcgcgcaggaacgtcagcaagtggtgggacaccgtatcccgccgcgactcttgggtcagggtcaaggagttgcagcgcccgccgtccgcggaggcgcccttctgatgtcgatcgatcgcaaattaaggcggtggcctttgctcaagcctacgtgttcggtttctgcataattttttaataaataaacgccactggcccctctacgtcattggcgattgttcattgtgtaataaatcgttcaagagcatatgatgcttcttgccgtgagattgaactcgtcgcctccatgcttctctattgagcaatttgagcttaccgctcagagttcttgtttttttaacacgcgga

SEQ ID NO: 8047 - DNA, 893 bp, Zea Mays
aaccgcttcaccctttgtggcgtgcagcctcctcctctccccactctccccaatcaccatcaaaatgcgggtgggcgaggagcacctccagcaaggcggagatgtgcatgcagtccaccgccgaatctgcgacgtctcgagcggaggtagagcaccaccacagtccatagaggacctcgcccgagccaccaagtcggtcgctacctccccctccggctccacctcctacacgctgtcctctccagagccaccagtcctttcccggcggtagattcaaatccctgccacatagttctccattgctgcgacttctcgtgcgcgcatagccctgacagcagccacttccatggtgcaaccgctcatcgttggaggatctacagcttgatatatctgggagatgcatacctgactacatattgccaactaccttagctaagaaacttacctcatcttccatcaagactattgaggaatattgtcaagaattaacttccttggacctttgaaacttgaataggctgcgtgactaagcaatgaggtatcttcatggttgtaggctaataaggaaactaaagcttcaaagaaacacattctgaaccaaaaggatcatgaagctataatcaaacaactaaaccttgctaggtgagccagacagttactggaaatcagtgctcatcaatgcatgcagacttgtaaagtattatgatggtctgcccatggaatgttttgtaatttacctataagtgtttttagaagtgcttgacaccagttatgccaactacctagcacacctaggtggggtagacagatgtttctaagcagtgattctgttatgaccggcatgcagtacaaaaggaaacagcaggccagggggcatgcggcaggagaaggag

SEQ ID NO: 8048 - DNA, 1602 bp, Zea Mays
aaccgcttcaccctttgtggcgtgcagcctcctcctctccccactctccccaatcaccatcaaaatgcgggtgggcgaggagcacctccagcaaggcggagatgtgcatgcagtccaccgccgaatctgcgacgtctcgagcggaggtagagcaccaccacagtccatagaggacctcgcccgagccaccaagtcggtcgctacctccccctccggctccacctcctacacgctgtcctctccagagccaccagtcctttcccggcggtagattcaaatccctgccacatagttctccattgctgtaagctcccgcacctcctccccatctcttcactccaaatctaccgaggccaccgcttgggcctatgggaacccctcgcgagttatttgctattatagtactgatttcaataggcttctctcttttagtactttcattttagtcttttctgtaatagtatctacaagttgattcatccttcaaaatagtattctaaccattttcaatcatttttattttctttttttatttctcagaacataagttgaccctatcattaccctcgcagctatacaaataatagaaacacaaataatccaggcagagacgcaggagtgcagacgatgagcaacactgctatcttctgtctggtggttcagaccgtagcaaagggtggcagttggccgcacggtcaccatccagcagcaccggcgtgctgctgcaatgtttttttgtgtgccgtcggtgcgatgctgaatgcgagaagagagaggagtcgagccgacgatggggagcaaggagagaataaaatagagagatgcaatatggtcaatggtgagaaataaaaaaggaaatgattaaaaaaggttggagtactattttaaaggatgaatcaacttataaatattattacagagaagatcaaattgagagtactaaaggagagaagccccacaaaatcaatattataatagcaaaaaactcacccctcgcgccgtcattagctcaggcgacttctcgtgcgcgcatagccctgacagcagccacttccatggtgcaaccgctcatcgttggaggatctacagcttgatatatctgggagatgcatacctgactacatattgccaactaccttagctaagaaacttacctcatcttccatcaagactattgaggaatattgtcaagaattaacttccttggacctttgaaacttgaataggctgcgtgactaagcaatgaggtatcttcatggttgtaggctaataaggaaactaaagcttcaaagaaacacattctgaaccaaaaggatcatgaagctataatcaaacaactaaaccttgctaggtgagccagacagttactggaaatcagtgctcatcaatgcatgcagacttgtaaagtattatgatggtctgcccatggaatgttttgtaatttacctataagtgtttttagaagtgcttgacaccagttatgccaactacctagcacacctaggtggggtagacagatgtttctaagcagtgattctgttatgaccggcatgcagtacaaaaggaaacagcaggccagggggcatgcggcaggagaaggag

SEQ ID NO: 8049 - DNA, 1366 bp, Zea Mays
aaccgcttcaccctttgtggcgtgcagcctcctcctctccccactctccccaatcaccatcaaaatgcgggtgggcgaggagcacctccagcaaggcggagatgtgcatgcagtccaccgccgaatctgcgacgtctcgagcggaggtagagcaccaccacagtccatagaggacctcgcccgagccaccaagtcggtcgctacctccccctccggctccacctcctacacgctgtcctctccagagccaccagtcctttcccggcggtagattcaaatccctgccacatagttctccattgctaacataagttgaccctatcattaccctcgcagctatacaaataatagaaacacaaataatccaggcagagacgcaggagtgcagacgatgagcaacactgctatcttctgtctggtggttcagaccgtagcaaagggtggcagttggccgcacggtcaccatccagcagcaccggcgtgctgctgcaatgtttttttgtgtgccgtcggtgcgatgctgaatgcgagaagagagaggagtcgagccgacgatggggagcaaggagagaataaaatagagagatgcaatatggtcaatggtgagaaataaaaaaggaaatgattaaaaaaggttggagtactattttaaaggatgaatcaacttataaatattattacagagaagatcaaattgagagtactaaaggagagaagccccacaaaatcaatattataatagcaaaaaactcacccctcgcgccgtcattagctcaggcgacttctcgtgcgcgcatagccctgacagcagccacttccatggtgcaaccgctcatcgttggaggatctacagcttgatatatctgggagatgcatacctgactacatattgccaactaccttagctaagaaacttacctcatcttccatcaagactattgaggaatattgtcaagaattaacttccttggacctttgaaacttgaataggctgcgtgactaagcaatgaggtatcttcatggttgtaggctaataaggaaactaaagcttcaaagaaacacattctgaaccaaaaggatcatgaagctataatcaaacaactaaaccttgctaggtgagccagacagttactggaaatcagtgctcatcaatgcatgcagacttgtaaagtattatgatggtctgcccatggaatgttttgtaatttacctataagtgtttttagaagtgcttgacaccagttatgccaactacctagcacacctaggtggggtagacagatgtttctaagcagtgattctgttatgaccggcatgcagtacaaaaggaaacagcaggccagggggcatgcggcaggagaaggag

SEQ ID NO: 8050 - DNA, 1666 bp, Zea Mays
aaccgcttcaccctttgtggcgtgcagcctcctcctctccccactctccccaatcaccatcaaaatgcgggtgggcgaggagcacctccagcaaggcggagatgtgcatgcagtccaccgccgaatctgcgacgtctcgagcggaggtagagcaccaccacagtccatagaggacctcgcccgagccaccaagtcggtcgctacctccccctccggctccacctcctacacgctgtcctctccagagccaccagtcctttcccggcggtagattcaaatccctgccacatagttctccattgctgtaagctcccgcacctcctccccatctcttcactccaaatctaccgaggccaccgcttgggcctatgggaacccctcgcgagttatttgctattatagtactgatttcaataggcttctctcttttagtactttcattttagtcttttctgtaatagtatctacaagttgattcatccttcaaaatagtattctaaccattttcaatcatttttattttctttttttatttctcagaacataagttgaccctatcattaccctcgcagctatacaaataatagaaacacaaataatccaggcagagacgcaggagtgcagacgatgagcaacactgctatcttctgtctggtggttcagaccgtagcaaagggtggcagttggccgcacggtcaccatccagcagcaccggcgtgctgctgcaatgtttttttgtgtgccgtcggtgcgatgctgaatgcgagaagagagaggagtcgagccgacgatggggagcaaggagagaataaaatagagagatgcaatatggtcaatggtgagaaataaaaaaggaaatgattaaaaaaggttggagtactattttaaaggatgaatcaacttataaatattattacagagaagatcaaattgagagtactaaaggagagaagccccacaaaatcaatattataatagcaaaaaactcacccctcgcgccgtcattagctcaggcgacttctcgtgcgcgcatagccctgacagcagccacttccatggtgcaaccgctcatcgttggaggatctacagcttgatatatctgggagatgcatacctgactacatattgccaactaccttagctaagaaacttacctcatcttccatcaagactattgaggaatattgtcaagaattaacttccttggacctttgaaacttgaataggctgcgtgactaagcaatgaggtatcttcatggttgtaggctaataaggaaactaaagcttcaaagaaacacattctggtattgccccacttcccctgtttttttattggtccaagttttaatacctctttgctaagcagaaataggcgacaaatttttaatgtgtatcattgcatattattgttttccatactcagatgcataatgattgtcatgcatgtattatttagcttctttctagtgtccttaccattttacatagggatgaaaatgggtacctattcggataccagtttttggtcttttttctttgataatgcataaatatgatatagaatctactatgcaaattaatattcttgtttttaacaccgagcttgtaaatctatactactatattaaggctataagggtagcctgcctcctcctggttctgcctc

SEQ ID NO: 8051 - DNA, 962 bp, Zea Mays
aaccgcttcaccctttgtggcgtgcagcctcctcctctccccactctccccaatcaccatcaaaatgcgggtgggcgaggagcacctccagcaaggcggagatgtgcatgcagtccaccgccgaatctgcgacgtctcgagcggaggtagagcaccaccacagtccatagaggacctcgcccgagccaccaagtcggtcgctacctccccctccggctccacctcctacacgctgtcctctccagagccaccagtcctttcccggcggtagattcaaatccctgccacatagttctccattgctctcaggcgacttctcgtgcgcgcatagccctgacagcagccacttccatggtgcaaccgctcatcgttggaggatctacagcttgatatatctgggagatgcatacctgactacatattgccaactaccttagctaagaaacttacctcatcttccatcaagactattgaggaatattgtcaagaattaacttccttggacctttgaaacttgaataggctgcgtgactaagcaatgaggtatcttcatggttgtaggctaataaggaaactaaagcttcaaagaaacacattctggtattgccccacttcccctgtttttttattggtccaagttttaatacctctttgctaagcagaaataggcgacaaatttttaatgtgtatcattgcatattattgttttccatactcagatgcataatgattgtcatgcatgtattatttagcttctttctagtgtccttaccattttacatagggatgaaaatgggtacctattcggataccagtttttggtcttttttctttgataatgcataaatatgatatagaatctactatgcaaattaatattcttgtttttaacaccgagcttgtaaatctatactactatattaaggctataagggtagcctgcctcctcctggttctgcctc

SEQ ID NO: 8052 - DNA, 1398 bp, Zea Mays
aaccgcttcaccctttgtggcgtgcagcctcctcctctccccactctccccaatcaccatcaaaatgcgggtgggcgaggagcacctccagcaaggcggagatgtgcatgcagtccaccgccgaatctgcgacgtctcgagcggaggtagagcaccaccacagtccatagaggacctcgcccgagccaccaagtcggtcgctacctccccctccggctccacctcctacacgctgtcctctccagagccaccagtcctttcccggcggtagattcaaatccctgccacatagttctccattgctctatacaaataatagaaacacaaataatccaggcagagacgcaggagtgcagacgatgagcaacactgctatcttctgtctggtggttcagaccgtagcaaagggtggcagttggccgcacggtcaccatccagcagcaccggcgtgctgctgcaatgtttttttgtgtgccgtcggtgcgatgctgaatgcgagaagagagaggagtcgagccgacgatggggagcaaggagagaataaaatagagagatgcaatatggtcaatggtgagaaataaaaaaggaaatgattaaaaaaggttggagtactattttaaaggatgaatcaacttataaatattattacagagaagatcaaattgagagtactaaaggagagaagccccacaaaatcaatattataatagcaaaaaactcacccctcgcgccgtcattagctcaggcgacttctcgtgcgcgcatagccctgacagcagccacttccatggtgcaaccgctcatcgttggaggatctacagcttgatatatctgggagatgcatacctgactacatattgccaactaccttagctaagaaacttacctcatcttccatcaagactattgaggaatattgtcaagaattaacttccttggacctttgaaacttgaataggctgcgtgactaagcaatgaggtatcttcatggttgtaggctaataaggaaactaaagcttcaaagaaacacattctggtattgccccacttcccctgtttttttattggtccaagttttaatacctctttgctaagcagaaataggcgacaaatttttaatgtgtatcattgcatattattgttttccatactcagatgcataatgattgtcatgcatgtattatttagcttctttctagtgtccttaccattttacatagggatgaaaatgggtacctattcggataccagtttttggtcttttttctttgataatgcataaatatgatatagaatctactatgcaaattaatattcttgtttttaacaccgagcttgtaaatctatactactatattaaggctataagggtagcctgcctcctcctggttctgcctc

SEQ ID NO: 8053 - DNA, 1673 bp, Zea Mays
gagaatagcacaggctcagagcagcatatgaaaaataaaaagagagagagagaggatcgagtgatggagggtctggggcacctgctgctgttcgccttcctcttctggttctccaccttcatggtcgcaccggtgatgaccgacgtcaccatggcggcgctctgccccggccgcgacgagtgctccctcgccatctacctcaccgggctccagcaggcggtttcagggctgggggcgctggtcctgacgccggtggtcggcaacctgtccgacaggtacggccggaaggcactgctggcgctgcccgccacggcgtccatcgttcctctcggcatcctggcgtacggccggaccaagggttacttctacgcgtactacgtgaccaagacgctgacggcgatggtctgcgaaggcaccatgatgaccctctcgcttgcctacgtgtttgtccccctggatccctccctcccgcgcaggccgacagggtgccggagacgaggcgcgcggcggccttcggcgtcttctccggcgtctgcagcgccggcttcgtcggcggcaccgtggcagcccgcttcctccccgtctcatccacgtttcaggtctcagcggtggcagccgtcgcgacggccgtctacatgaaggccttcctccaggagacggacggcggagcctccgtatcctcctcttcctcctcctcctccggcagcggcagcgacgaggaggcggcctgccgccggccgctctgcctcccctcctccagcagtagcgaggaggcggcgtcgctgccaaggctcccgccacttcggaaggcgccgtcgctgtcggagattgcagccgctcttaccagcagctcgaccttctgctgtgcggccgtcgtcacgtttttccacggcctcggtgagacgggcctactgagcgcactactgtacttcctcaaggcgaaattccactacagcaagaaccagtatgccaatctgctacttatcatcggcatcacaggaagcttctcgcagctaactgtgatgccactcctagtgcgaaagctaggtgagcagaagctacttgtcatatcactagtggcgagctgcgggcaggcattcctatacagcatctcatggtcgtcctgggtcccatatcttgccgcaagcagtgtaatattaagcatgctggtcacaccttgtataagaagcatcgtatcaaagaaagtgggaccttttgaacagggaatggtccaagggtgcatgactggaataagctcgaccgcaagtgtcgtatctcctctaatctttactcctctcacagcctggtgtctatcagaagctacgcctttctacttaaaaggtttcagcgttgcctgtgctgggtttgcaacgctggtagcgttggcgacgagcataagtatgaggccagctgaagtgcagccagataggaaatagatgagctattgacctctgtttttatgggtaaaagaaggtagatacatgcctgtaaatagtatttacatcctacacttagtcttctactaccatttactattcaatgtcaaatgtagtagtattatgtaatttccttgccgggccacattattagttgatcaacactggtcctaacattttggaggtctgagtgaaaactaatatagagacctctctcatctctttctctctctatat

SEQ ID NO: 8054 - DNA, 1652 bp, Zea Mays
caagagggtagtagaagagagaatagcacaggctcagagcagcatatgaaaaataaaaagagagagagagaggatcgagtgatggagggtctggggcacctgctgctgttcgccttcctcttctggttctccaccttcatggtcgcaccggtgatgaccgacgtcaccatggcggcgctctgccccggccgcgacgagtgctccctcgccatctacctcaccgggctccagcaggcggtttcagggctgggggcgctggtcctgacgccggtggtcggcaacctgtccgacaggtacggccggaaggcactgctggcgctgcccgccacggcgtccatcgttcctctcggcatcctggcgtacggccggaccaagggttacttctacgcgtactacgtgaccaagacgctgacggcgatggtctgcgaaggcaccatgatgaccctctcgcttgcctacgtggccgacagggtgccggagacgaggcgcgcggcggccttcggcgtcttctccggcgtctgcagcgccggcttcgtcggcggcaccgtggcagcccgcttcctccccgtctcatccacgtttcaggtctcagcggtggcagccgtcgcgacggccgtctacatgaaggccttcctccaggagacggacggcggagcctccgtatcctcctcttcctcctcctcctccggcagcggcagcgacgaggaggcggcctgccgccggccgctctgcctcccctcctccagcagtagcgaggaggcggcgtcgctgccaaggctcccgccacttcggaaggcgccgtcgctgtcggagattgcagccgctcttaccagcagctcgaccttctgctgtgcggccgtcgtcacgtttttccacggcctcggtgagacgggcctactgagcgcactactgtacttcctcaaggcgaaattccactacagcaagaaccagtatgccaatctgctacttatcatcggcatcacaggaagcttctcgcagctaactgtgatgccactcctagtgcgaaagctaggtgagcagaagctacttgtcatatcactagtggcgagctgcgggcaggcattcctatacagcatctcatggtcgtcctgggtcccatatcttgccgcaagcagtgtaatattaagcatgctggtcacaccttgtataagaagcatcgtatcaaagaaagtgggaccttttgaacagggaatggtccaagggtgcatgactggaataagctcgaccgcaagtgtcgtatctcctctaatctttactcctctcacagcctggtgtctatcagaagctacgcctttctacttaaaaggtttcagcgttgcctgtgctgggtttgcaacgcgttggcgacgagcataagtatgaggccagctgaagtgcagccagataggaaatagatgagctattgacctctgtttttatgggtaaaagaaggtagatacatgcctgtaaatagtatttacatcctacacttagtcttctactaccatttactattcaatgtcaaatgtagtagtattatgtaatttccttgccgggccacattattagttgatcaacactggtcctaacattttggaggtctgagtgaaaactaatatagagacctctctcatctctttctctctctatat

SEQ ID NO: 8055 - DNA, 3072 bp, Zea Mays
atacaacacgcggtcgcctccggggacgctcatcatcactgccatctctctctgactctgtgtccgtctctaaactctagtctgtgcgaatctgctgccagcagcgaggaacagaacagtagccaatttgccatctcacagttgcgttcctccgattccccgtcccccgatggacctgtctcccagctcgtcggcgccatccgcgccgccggtgccgtgcgagtggtccggcgccgggctcggctccgcggcgtgcggcctcgcctgcagggtgctctgcgccgtcgccacctgcgtcttcgcggccgtggggtcgctggtcggggcggtgacggggtccatggtggggctggcgaccgagagcgggatgctgcgcggcgccggcatcggggccatctccggcgccgtcttctccatcgaggtcgccgagtcgtcccgcgacctctggcactcgggcgactccggcgtctggaccctcctctacatggtacgctacgcacattgatctgcgtccattccatcgtactctgccaaactggtcactggcacttcgggtcgtgtagtttggttgcaaatcgcagagagtacttgcccgcccgagcacaccacactcgtttccgcggcctgatggggggcttcagcttgatgttgaccaagacgattaggttaggtgtgccccatggattccgtgggggatggcctcattccgttcgtaaaagataaaatgattttcccccatttattatcttggcgcgctatccaaatggatgtgaaaatatcgtgttcttcacctgcatctgtgttgaatgtgctgaggtaggagtagctccggttttgctcggtgcctgtctctgacgtctgaccccaagtgtttttttgcgctctgcttctgtgcacgcaggtggacatcatctccagtctcttgagcggcaggctggtccgggagaaggtggggccggctgttcagagcgccgtgcagagccagatcagcgccatcagctcgccgttcgaggagacgagcgacctgttcgagaccggcagcgtgaggggcctccccgaggccgcggtgcgccggctgccggtgacggtggtcgcggaggacggcgccgtggacgcggcgggccaggcgctgtgctgctcggtgtgcctgcaggacttccgggtgggcgaccgcgcgcggaggctgcccggttgccgccacctgttccacgtgccctgcatcgactgctggctcctcaggcacggctcctgcccgctgtgccggcgagacatctgaaactcggtcgtctgctctgtgaaccgccacccacgtcgccggaaacgtggtgtagtgttgctgctttggacgagatggtcagttagttgagtagggttcctactttgtaggacggcaccctgatgcccgtaagggaaatggtgcgctctgacgctctgttaactaaaaaagaagaagagagaaaacagcccctcagcttcaaagaatcaaaaggggaaaaaaaccataatagtgaacaaacgttcaacgacaaaacggcacaactgacggtcgcatgcaggttcaggccgagcttatctgcggattcagaattattcgtagttagctatagttggagaatgaaaccctaatcagggtgattagggttgatagtgaatatatatagctgagtgttatgggtcaaagctaattaacgaaggtatatacagagacgtaaacaatactctaaaacccccgtagtctcaattatatcatgtacaagtgtcgataccggagcgaaactcagcgaaaacactcgacaacagtctcttggtggagatatcgtgaactctaaaacccccgtagtctcaattatattctgtacaggtgtcaataccggagctatatcctgtacaggtgtcaataccggagcgaaactcagcgaaaacactcgacgactgccccttggtgaagatatcgtgaactgtatggtggggatgctgagaacacgaacatcatcggcggcgacacggtcgtatgcgaagtgcaggttgatctccacgtgcttcgtgccctgatgctgaacgggattagtagagaggtagatcatgctaacgttgtcgcagtagacgagagtgatccactgaagagggttgtggagctcctcgagaagctggcgcacctaggaggtctccgccacgctgttgaccacatcgtagtacttagcctccgcgttgtagctgagagacgataggctgacgcttggcaatctaagagacaaggttgatggccagaaacatgtcataacagtaagtaagattgggtgtcagtgttgctttggacgagatggtcagtagggtttgtactttgtaggacggcaccctgttgctttggacgagatggtcggtagggtttgtactttgtaggacggcaccctgatgcccgttagggaaatggtgcgctctgttaactgaaaaacagagagaaagcagccccctcaaataacgaaaagaaaaaaaatatactccacaactgacggtcgcatgcaggttcaggccgcgcttatctgaggattcagaatttattcgtagttagctacacacctacacattcttcaagttacctacacctgaacaagcttgctattccagctgattggttagctggacgagtgcacccacgttctctcgatccaggctgaccggaaacgagtatttttggcgtaggagtggatgcagccaaagagactcaaaataatttgttttgcatccactcgtgcaacttatactccagatatgcaggcaaccaaacaaatactaacataaagtcaatacacgcagtgacgcaggatgagacgatacgaccaaccaatcagacatattgtgtctgccgacgagctggtttggagaaactgttagctcggttcaggtggcctggtgccgtgcccgattattaagggcttgtttgacatagcttccctccaatagagtgattttgagtaaatctctagcagaagtaaatctatttaacgaaaactgtttaggctgtaaagtgattcctgaggggttagagagtttggagtaggttgggagcggtgg

SEQ ID NO: 8056 - DNA, 3914 bp, Zea Mays
cgccaaaaaaaaaatctcgggggcggcagagcatggagccgggcaaaaagcggaagcggctaggggacaggacatggcagaggaacaaaaccagcggctgctccacaccacccgcgccagaccagaccacagttttatactccccgccactatttatacaacacgcggtcgcctccggggacgctcatcatcactgccatctctctctgactctgtgtccgtctctaaactctagtctgtgcgaatctgctgccagcagcgaggaacagaacagtagccaatttgccatctcacagttgcgttcctccgattccccgtcccccgatggacctgtctcccagctcgtcggcgccatccgcgccgccggtgccgtgcgagtggtccggcgccgggctcggctccgcggcgtgcggcctcgcctgcagggtgctctgcgccgtcgccacctgcgtcttcgcggccgtggggtcgctggtcggggcggtgacggggtccatggtggggctggcgaccgagagcgggatgctgcgcggcgccggcatcggggccatctccggcgccgtcttctccatcgaggtcgccgagtcgtcccgcgacctctggcactcgggcgactccggcgtctggaccctcctctacatggtacgctacgcacattgatctgcgtccattccatcgtactctgccaaactggtcactggcacttcgggtcgtgtagtttggttgcaaatcgcagagagtacttgcccgcccgagcacaccacactcgtttccgcggcctgatggggggcttcagcttgatgttgaccaagacgattaggttaggtgtgccccatggattccgtgggggatggcctcattccgttcgtaaaagataaaatgattttcccccatttattatcttggcgcgctatccaaatggatgtgaaaatatcgtgttcttcacctgcatctgtgttgaatgtgctgaggtaggagtagctccggttttgctcggtgcctgtctctgacgtctgaccccaagtgtttttttgcgctctgcttctgtgcacgcaggtggacatcatctccagtctcttgagcggcaggctggtccgggagaaggtggggccggctgttcagagcgccgtgcagagccaggtagccaccccccacccaacctcactcatctgatgaaataaactgagcgtgatctgatcagactttttttttatatctctgacgctctgatcctccttctggtgccgattgcttatgcttaatgcactgcaaaatcctaaatttggtctcggttggtccattggctggctctatcgatcaacaacaagtttaggtagcagcagcatactaaacaaacaaaggatatacatatggagatgcttgtgcgcataatctgactgagtggtggttagtccatgtcctccatgcattgccctgccctgaagccaacgcgtcgatttcttcctagatggagtaacaccagcaattcaaaggcgcgcgcgccctctttttagacctttaatacccttgttagttatagaagggagcaagaattgttaccttaaaaaatggggctgtgctggtgcctgccttctagatcactttcagagaggccatcaggctcaagtaaattaaagacacttcggcatcgatgacaaatgagatgacgtgtctcagttaattgcccccacctgctctcccgacccaaccgcgtgtattgcactgccagtgccagcaacgcaggagagaagctcatggtcagcgtcagcctgctgtaagcatgtaactgacctgtttcttccgtctgtttgtcgtggacgcacgcagatcagcgccatcagctcgccgttcgaggagacgagcgacctgttcgagaccggcagcgtgaggggcctccccgaggccgcggtgcgccggctgccggtgacggtggtcgcggaggacggcgccgtggacgcggcgggccaggcgctgtgctgctcggtgtgcctgcaggacttccgggtgggcgaccgcgcgcggaggctgcccggttgccgccacctgttccacgtgccctgcatcgactgctggctcctcaggcacggctcctgcccgctgtgccggcgagacatctgaaactcggtcgtctgctctgtgaaccgccacccacgtcgccggaaacgtggtgtagtgttgctgctttggacgagatggtcagttagttgagtagggttcctactttgtaggacggcaccctgatgcccgtaagggaaatggtgcgctctgacgctctgttaactaaaaaagaagaagagagaaaacagcccctcagcttcaaagaatcaaaaggggaaaaaaaccataatagtgaacaaacgttcaacgacaaaacggcacaactgacggtcgcatgcaggttcaggccgagcttatctgcggattcagaattattcgtagttagctatagttggagaatgaaaccctaatcagggtgattagggttgatagtgaatatatatagctgagtgttatgggtcaaagctaattaacgaaggtatatacagagacgtaaacaatactctaaaacccccgtagtctcaattatatcatgtacaagtgtcgataccggagcgaaactcagcgaaaacactcgacaacagtctcttggtggagatatcgtgaactctaaaacccccgtagtctcaattatattctgtacaggtgtcaataccggagctatatcctgtacaggtgtcaataccggagcgaaactcagcgaaaacactcgacgactgccccttggtgaagatatcgtgaactgtatggtggggatgctgagaacacgaacatcatcggcggcgacacggtcgtatgcgaagtgcaggttgatctccacgtgcttcgtgccctgatgctgaacgggattagtagagaggtagatcatgctaacgttgtcgcagtagacgagagtgatccactgaagagggttgtggagctcctcgagaagctggcgcacctaggaggtctccgccacgctgttgaccacatcgtagtacttagcctccgcgttgtagctgagagacgataggctgacgcttggcaatctaagagacaaggttgatggccagaaacatgtcataacagtaagtaagattgggtgtcagtgttgctttggacgagatggtcagtagggtttgtactttgtaggacggcaccctgttgctttggacgagatggtcggtagggtttgtactttgtaggacggcaccctgatgcccgttagggaaatggtgcgctctgttaactgaaaaacagagagaaagcagccccctcaaataacgaaaagaaaaaaaatatactccacaactgacggtcgcatgcaggttcaggccgcgcttatctgaggattcagaatttattcgtagttagctacacacctacacattcttcaagttacctacacctgaacaagcttgctattccagctgattggttagctggacgagtgcacccacgttctctcgatccaggctgaccggaaacgagtatttttggcgtaggagtggatgcagccaaagagactcaaaataatttgttttgcatccactcgtgcaacttatactccagatatgcaggcaaccaaacaaatactaacataaagtcaatacacgcagtgacgcaggatgagacgatacgaccaaccaatcagacatattgtgtctgccgacgagctggtttggagaaactgttagctcggttcaggtggcctggtgccgtgcccgattattaagggcttgtttgacatagcttccctccaatagagtgattttgagtaaatctctagcagaagtaaatctatttaacgaaaactgtttaggctgtaaagtgattcctgaggggttagagagtttggagtaggttgggagcggtgg

SEQ ID NO: 8057 - DNA, 2167 bp, Zea Mays
ctctctttcgcggcaagcgccagcgcggcaacttggcgcgttgacgctgcacgcaatttcaaccgtccgaccagcatcctagggcttcctctcacgagcggttggccctgaccggcccactcgtctaccacagatttggagttcgaccacgacgacagaacccgccgtccgacccattcacccccgtggaccgtgccggtgccgcggcacgccgccgccgcaacgccatggggaagcgatccggcggccggaagcttccgttcttcaccagatcctcctcgtcctcctccaagcggaatcgctccgggcgtcgcctcccttccccctccaagcaggacaacgcgacgagggctcttctcgcctcccccaccgccgcctcgccgtccgcgaccccggactctgcagcggcggggcagaccgcccagccgccctctcccctctcagtcaccgcgggcgccgggggtgccttgtcggggaagatcaccaagaagaagcccggcgcgcgcctgtggatgcggctggaccgctggggtgcctccgaggtcgtcgagctcgacaaggccaccataatccgccgcgctggccttccctcgcgcgacctacggatccttggtcccgtattctctcgctcctccagcatcctcgctagggagaagacaatggtgatcaacctcgaattcatcagagcgatagttactgccgaggaggtgctcctgttggaccctctcatgcacgaagtgctccctttcgttgatcaattgaggcagcacctgcctctgaggagccttgtgggtgggaatggtgaatgtgcccctgatggcaatggagaaaaacaggggggctcgcatggaggccaggtgccccgtcttaatgaggcgaccggggcagagcatgagtttccatttgagttccatgtgctggaggtcgcgctcgagattgtgtgctcatcgttggaccttagcgttgatgaccttgagaggcatgctactccagtgcttgacgaactgacaaagaatgtgagcacaaggaaccttgagcgagtgcggagccttaagagtcatcttacccgtttgcttgcccgtgtgcaaaaggtcagggatgaaatagaacatcttctggatgataatgaagacatggaacatctgtatctaacaaggaagcaagtacaaaaccaacaggttgaggctttaatgtcatctgctgcttccaacagcattgttcttgctggacctggtgtgcccaggttgaactctagcttccggcgtagcttgagcgttgctacgagcatgcatttggataatgatgtggaagacctagagatgttacttgaggcctacttcatgcagctggatggaattcgcaacagaatcttgttcgggagtatattgatgacacagaagactacgtcaacattcaacttgacaaccagcgtaatgaactaatccaactccagcttacactgaccattgcatcctttggcatagctgccaacactttcattgttggagcttttgcaatgaacatcccgagctctctgtacaacaccgataacaccctcttctggccatttgtcgggggtacctcatccggctgctttgtgatcaccatcctcttgtttgggtatgcctggtggaagaagttgctgggtccttgaacacgaaacaagatggcagagggccttgtcatgtttgcagaaagggagcaggcgctcgaaggatattagagaaccgtggggatagcatggaaaccgtatataacatctcactgagtggcccataagatgagtacatgtgatttctcattagcataaatgagatggtgttgatcgatatactttattgttaacatcattagattagatcttgctggcaatagaaaaatgttgccatgcgattttaagatccagcaacggttggttttgcttacagattgcttttctttctagtcttggaggtgccatcttcggtgcttcagtttttggggaatcggcaggtaatggttgtttagccgagtatagtcacatctagtgcccagtttactggtcggtctcccccacctgacgaattgtaataactctcatgatgagttggttgctcagttgagcccaatctttgttcaaaggatcagctcttcgaatatttttgtgagcgcgttggttgctcagttg

SEQ ID NO: 8058 - DNA, 1310 bp, Zea Mays
tgcactattaaatatattttttgtttgttttatttgaaaccaatgtatcactagacactggaacattttgaaatgtcatactaagataataaacacagaatcaagaagaatagaaattaaaaagagatcagaaaaagagaaattgctaaaaaagaaaacgcgaaacggcccaggacaaggcccgtgggccgtggtgagctctccgtgtccgtcggccgagccgaaccctcggactgggctaccgccgcatgccccgtcccgaatccattccgttcaccccgtccccctcgttctctctctcgttgcgacgactgtgtggagtaccgcccccgccccctcaccctcaccccccgacgccgacgccctaggcggctacgccaggtttcgtaatgatttgtgcaacaattgtaagcgtcctgggcattttgctagagagtgtcctagcgtggctgtctgccatacctgcgggcttcctgggcacattgcagccgaatgttcttccaaaggtgtttgctggaactgcaaagagcctggccacatggctaacagctgcccaaatgaagggatatgccgtaactgtggcaagtccggtcacattgcaagagactgcaccgctccaccagtgccgccaggagaagtgatcctttgcagcaactgctacaaaccagggcattttcgtgaggaatgcaccaatgagaaggcctgcaataattgccggcagagcggccaccttgcccgtaactgcaccaatgatcctgtttgcaacctgtgcaatgttgctggccatctggcccgtcagtgccccaagtctgatacattgggtgagaggggtgggcctcctcccttccgtggtgttggcgctcccttccatgatgttggcgctcccttccgtggtggcttcagtgacgtggtctgccgggcctgcaaccagattggccatacgagtcgtgattgcatggctggtgccttcatgatctgccacaactgtggcggccgtggccacatggcttatgagtgtccctctgccagtctcatggaccggttcccccctcgccgtttctgaaggaaggacatccaagggctgttcagatggctgttgttttcagcccattttgtcaggagcacctgttttgctttgctttatgtatttctaaacccgaatggattctagatatttcagattcataactcgtcagcgctatttgtaattctggatatgttacccgactccgatgttcttgatgataatgtttgaagacggggatacttgcccttacgaactcaaattcatctcatgagttttaaataat

SEQ ID NO: 8059 - DNA, 1372 bp, Zea Mays
tgcactattaaatatattttttgtttgttttatttgaaaccaatgtatcactagacactggaacattttgaaatgtcatactaagataataaacacagaatcaagaagaatagaaattaaaaagagatcagaaaaagagaaattgctaaaaaagaaaacgcgaaacggcccaggacaaggcccgtgggccgtggtgagctctccgtgtccgtcggccgagccgaaccctcggactgggctaccgccgcatgccccgtcccgaatccattccgttcaccccgtccccctcgttctctctctcgttgcgacgactgtgtggagtaccgcccccgccccctcaccctcaccccccgacgccgacgccctaggcggctacgccaggtcccgagggacgggcccttcatcttcgtcagtctattcgccgggcgacgagcacccgccaggtttcgtaatgatttgtgcaacaattgtaagcgtcctgggcattttgctagagagtgtcctagcgtggctgtctgccatacctgcgggcttcctgggcacattgcagccgaatgttcttccaaaggtgtttgctggaactgcaaagagcctggccacatggctaacagctgcccaaatgaagggatatgccgtaactgtggcaagtccggtcacattgcaagagactgcaccgctccaccagtgccgccaggagaagtgatcctttgcagcaactgctacaaaccagggcattttcgtgaggaatgcaccaatgagaaggcctgcaataattgccggcagagcggccaccttgcccgtaactgcaccaatgatcctgtttgcaacctgtgcaatgttgctggccatctggcccgtcagtgccccaagtctgatacattgggtgagaggggtgggcctcctcccttccgtggtgttggcgctcccttccatgatgttggcgctcccttccgtggtggcttcagtgacgtggtctgccgggcctgcaaccagattggccatacgagtcgtgattgcatggctggtgccttcatgatctgccacaactgtggcggccgtggccacatggcttatgagtgtccctctgccagtctcatggaccggttcccccctcgccgtttctgaaggaaggacatccaagggctgttcagatggctgttgttttcagcccattttgtcaggagcacctgttttgctttgctttatgtatttctaaacccgaatggattctagatatttcagattcataactcgtcagcgctatttgtaattctggatatgttacccgactccgatgttcttgatgataatgtttgaagacggggatacttgcccttacgaactcaaattcatctcatgagttttaaataat

SEQ ID NO: 8060 - DNA, 859 bp, Zea Mays
acccctctattttccctagccgccacttccttctccccctgtcttcttccacctcgcgcaggaatcctcccacggcagcagcagccagcgcagggagcttcctccacccatggcgcccaagcccttcttcttcctcaagccagcggcgccctcattcctccctgcgcagcgccccttttcttgtgcctccagcagcaagaagccatcgcccctctccattttcccccacgtctcttccctctgtttttcctgtacgtgcgcaggagtatggggcctcccatggcgccctcctccctggtctcccttgcgcagggcagccatggccgagctcgccctcgcctcctgctctccatgggcgtgggtccccatcctctccctcctcccaaagtgcaggtagcagtccagcagccatggacgcccaggctgggaaacgctggaactcgcgctctctctggtttgggtggagcagcgcctctccctgcgctcagcctccccaactcggtgcccttgctgcaggcgagcagtagctccctatccatggcgccattgcaatattccccttcctccccctcggccagccatggcgcagcgcctctgatccttcatcctcgcaacgcagcagccgagctcgccccacctcccctcgctgcgcagcccctcggcgaaacgccgctgttcctgcaagccccggcttcctcgctgctaccgctgcgcgtatgccaagtgctcggcataatgtcaagggagatgtgttgttgcagcacgttgtgacgctcgccgggtgttcactgtttttggcgcagccccgttcgcgatgtcgtcgaccctcggaccgagagaggatcatcgcgcaagtgat

SEQ ID NO: 8061 - DNA, 3161 bp, Zea Mays
gggaattttccattcccacccctctattttccctagccgccacttccttctccccctgtcttcttccacctcgcgcaggaatcctcccacggcagcagcagccagcgcagggagcttcctccacccatggcgcccaagcccttcttcttcctcaagccagcggcgccctcattcctccctgcgcagcgccccttttcttgtgcctccagcagcaagaagccatcgcccctctccattttcccccacgtctcttccctctgtttttcctgtacgtgcgcaggagtatggggcctcccatggcgccctcctccctggtctcccttgcgcagggcagccatggccgagctcgccctcgcctcctgctctccatgggcgtgggtccccatcctctccctcctcccaaagtgcaggtagcagtccagcagccatggacgcccaggctgggaaacgctggaactcgcgctctctctggtttgggtggagcagcgcctctccctgcgctcagcctccccaactcggtgcccttgctgcaggcgagcagtagctccctatccatggcgccattgcaatattccccttcctccccctcggccagccatggcgcagcgcctctgatccttcatcctcgcaacgcagcagccgagctcgccccacctcccctcgctgcgcagcccctcggcgaaacgccgctgttcctgcaagccccggcttcctcgctgctaccgctgcgcgtatgccaagtgctcggcataatgtcaagggagatgtgttgttgcagcacgttgtgacgctcgccgggtgttcactgtttttggcgcagccccgttcgcgatgtcgtcgaccctcgctagtggtcgacgccgcgcttcgcgccttgcccgttcgacaaaatgccgagccatgtgtatagcccatgcgtctagccacgattcgttcaggttgattgatttataataatacctatgctttggttgatgtcgggcagtgcatgtatatatgtgaatgtgtgtaatatgtttcggctatacacgttggtaggatcgcatttgcggttaaagaacaagaggttgttcaatgcgtgagatttgtagtttgtctaattatgttttggtcgatgtggtgtacatgggtgtttaattatgtgtgggtataaaatgtttgtttatacaccgtggcaaggtcgcattcatgttttggtaaataaatgtgtcgtgcttattttatgtgatgagtaagtctgcaaatacatgggatgcgaggatttaattagtgcacgtatgtgtgtgtgtgctgtggtgtgatatggtagtggtggcgtgagatatttgtttgaggtgtgcgggtatatgccgtgatatggttatactcgcaacaagaaaagatgtacacattgggtaacacgacgcttaggtcactgtggtataatcgaataaaggatgtattattgaccttgaatcaaaatgtggggtactagtggtacgctaggcggtgtccaaataaattaaccgggtcgatgtggtagtggtcgtgcgtaatttattgttagtgagtagttggaattccgagctatatgaggattatgttaaaaactagtaagcggcgggtaacctgcgttcgtatggtgaataataggtcggtaggtattgttgatgccagtagcaaatgtagtcttatggagttttacgccatgtgtaaatgcctccacgatagaccccaaaaatgtgctatttaggtgacttgtgtgttaactaattcaagttgagcaatggttgagaaacactgatcaatcggccccaacccatgttcttgagttacgatgtctaaaatggttcgctaggtcttctactgtgattagccaactcatgttaaataggagtcgatttcgttaagtgtttgatatatatgtgttgtttcggattgcaatgataagaggcaagccgacgtgtaggatgtatagcgggctatgccgttgctctagttagccgacttgttagatgacttggtcaagcgcgtaatcacggtaaattgcttgttgtggtctaaatgtgtatggttatggtcgcggatgaaaagtagtagtgctcatgggaggtctaagttaaaatgcaaattattgggtgaaaagcgcttcgatgttgatcatcgtggagagcgtgtggttaattgagtatggtaaatctagagcacgaaatgactcggataaaatttatgagtcaacttgatggtcctaatttgactaatttaactctaatcaacggtgaagtgttagaataattcaagtctctagaatgcggcaattcttgaattatatagaagctggaatttgttgattgctgttttggactgcacacgctgtttttgtcgtgctgtatgtttgataaactaaattgtgttttccgtagatatgtgctatagaaaagtggtagataaccttattatcttgctggtgttaaaatttgacagccacaggtctaacagtttaggagttgtgctttttacaaattcagtaactgaatctgtccaaattctgtacaaatttcagaaattgtattgtttgctcaatttaatgttgcaacctgttcatgatcattataagaaagttgtagaggcttttcttatcttgcttgtgtcaaaatttcataactataggcctgacggtttaagagttatgaattttacaaactggttgctgtgttctgtccaccgtcagaacagatttcgaaaactgtaatatttgatttagttaaacctggaatcacttcttggtgattataaaagttatgtattacttttgctaagcttttcaaaaagtcttagatcactctttttggtggtctgaagattaagttacatgtgtttgaagtgtgaagactgaatctgtccagttttggacagcaccgccttcatagtatattttaactttgatacatgctaaaccagccagggatgtttataaataatttgtagaacatttaattagctttccagaaagtctaggatcaccttgtttggatgcctgaatcttcagttatgaatttttaaagtcataagtctgaatctgtccaaatctggacagcgctgttgtattagcacgttttgaccttgctaagtgttgaattatgttgtgatgaaaataccaaagttgtagttcactttttaag

SEQ ID NO: 8062 - DNA, 782 bp, Zea Mays
tcttgtcgaggtcgtggccctgccagatgtcgttctgccaacccctcgaaacgcctccacccacgggacgccgccctccttgctccggcggctgacgccccaccagccggctgggacgatgctcccccaatccatggactcttggtttcccaccctcactcttcagcactacgccctcgacgaccatgtcctcggcaacaccgcttccccccgctctcgtcctagcatcgaatggacatcgtggtctctcgtggctccttggtaccctcaacgtcaagctccaggacgttgtccgcgagcagggggaccgcacgccaggcctgggttgccctcgaggcccaaatcctcaataaccgagaggcccacgccctccatctcaatgtctccttccaaatcttctcccagggtggcctctccatcactataatacctgaaggccctcatcaagcgctccacaccattcctgtccttcctcgacgtccgcaacgaactacttctcaaggaactcacctaaagcgtcgagtgcaccgagtttgccccaaccctctatggcgcatactcactaggggacttcctccgcggcctcctgccttcgctcctactctaggggggcctcatcaggctgccagctctgagggcggtcgccgccactgcaagggcggctgtgggggtggtggccctcacagcagtgcccctcttgggagtgggggtcccatgtggctgtccatctacaacccttggactggcaccatctctatgtggccagaccaagttgcgggtgc

SEQ ID NO: 8063 - DNA, 907 bp, Zea Mays
agatggtattggttatattgagactactgagttctatatctacaagtatttctgatcttaattgtgattcttttaaaatattgattaattcaatttgtggtttaaatatcttgtcaaaacaaaacaattcgcttgctgagatgtttcatctcactcttgcattactcaatgcaggtgcttgttgctcatcaagggaagtgggaagtagcagcacatccaccttcactctcataataacgctgcttaggcgtagtcatgatttaattagaaacttcttgtcaaaggatgttgtttctaactagttgtgcgcactggttgatttagttcatgccgttatggttgtctttccattgctagcagattattaatgtctattatgttttcttatcatgatatctatttatactttcttgcttccccgtttatgcaattttcaaaggggatgctgtcgaaattttatatatgaatgttagatgtgtagtttagtagcattctggggtgtttgtggatcccggggtgttacacaagttctttgatttaagggataaagataggagacaagttgctagacttagatccatgttcaatgatgtgatgtggaagatgatgatgagcaaacaaaaaatagcaagcaagcggatgactatgagaggtttgaagttctttggtggggagcttatggtggcctagcatatgaactataatgcttagcaaagatgattgtcagcgatgaactataatgcctatgttgttcaacatctagatgtgaacgaaattggagtgactttgcccaagtccatacaaaaagaaacatattagagcaccaaagattgaataagttggtgtatgtgagctacaaccagaaaatagaaaatcggtttgcaaaaataagagagctcagttccaa

SEQ ID NO: 8064 - DNA, 1099 bp, Zea Mays
ctaaccccttcaatatttaattttttatagcaatctcatccatttgtcatcgatgtttcttgtactttatacagaggcagtgttcacttccattaattttggcattgatgtcatgaccccacaaaacatttatgttaagttgttaatgttagtgacttttaatgattcaattctgtggctatccttttaaattagctgacagatgaaattagaatgtgcaggataacatgactcagttggtcattcactattagtatagcattattaagttaaattctggattgtactggtcttggaaatatttgagagctttatgcgtggttctagcctgagcaacatctcttatgataacttctacttgagaagttgatcgcttattttctttaaaaattggtaagggttttctgttggaaggagatactgctgctaatattttaggttaggttcatcagaggaaatggtcagagggtatacaaagccttcagcatggaatacgaggttacccaacatgtgcagatttatgggaggcacttggtctggcataccaccgtttgggcatgttcaccgcagcagtaaaggtttgctgttttcagtttcatatggacgagctattgaacttgatagttccagggtctttgcattgatagaaagtggaaacatccagttaatgcttggttactatagaaagggagtggagcagtttcgttctgctttggaaatggctccatgtaatcattcagcatactttggccttgcttctgcattgcttgcatgggcaaggaattgtgtaactactggggcctttggttgggctgctagcctgttgaaggaagcttcagaagcttccagaatttgtacttctttgactggaaacctttcatgcgtctggaaattgcatggagatgttcagctcacacttgcgagatgctttccatgggtggatgggaaaatcaaaagggtcatggatgcacagatgttcaaaaattctgttcaagagtggagaaatacatgtttgttagcagcaattgttcaaaactctcatatcaacgtgctttgcatcttactacctgacgaattcaagctgaatctccacaggtaa

SEQ ID NO: 8065 - DNA, 1157 bp, Zea Mays
cgtttcgccgccaccgtcttccgccgccctacctcgccgtcgccgacgacatgcccgaaaccgcggcggaggccaacctccgtaggcaactggagcaaaccctcgccgctgaaccctccagcccgctccaccactacaaccttggcgtcttcctatgggaccgcgccgaggcagagcaggagggtgatggggaagaggcgcggaagctccgcgcggaagcgtcggagcattttctcgcggcggccaagctgaatcccaacgatggcgtccccttccgcttccttggccaccactatgcgcgcggcggtgacaatcaacgagcggtcaagtgctatcaccgtgccgtgaccctcaaccctgacgactctgaggctggtgacacactctgtggcttgctagatgttgaagggaaggagagcttggagcttgctgtctgcaaggaggcagctggcaagtcaccgcgtgcgttctgggcttttcggagacttggctatttacaggttaggttcatcagaggaaatggtcagagggtatacaaagccttcagcatggaatacgaggttacccaacatgtgcagatttatgggaggcacttggtctggcataccaccgtttgggcatgttcaccgcagcagtaaagtttttgccggcagtcatatggacgagctattgaacttgatagttccagggtctttgcattgatagaaagtggaaacatccagttaatgcttggttactatagaaagggagtggagcagtttcgttctgctttggaaatggctccatgtaatcattcagcatactttggccttgcttctgcattgcttgcatgggcaaggaattgtgtaactactggggcctttggttgggctgctagcctgttgaaggaagcttcagaagcttccagaatttgtacttctttgactggaaacctttcatgcgtctggaaattgcatggagatgttcagctcacacttgcgagatgctttccatgggtggatgggaaaatcaaaagggtcatggatgcacagatgttcaaaaattctgttcaagagtggagaaatacatgtttgttagcagcaattgttcaaaactctcatatcaacgtgctttgcatcttactacctgacgaattcaagctgaatctccacaggtaa

SEQ ID NO: 8066 - DNA, 1165 bp, Zea Mays
cggccgctttcctccgctttccgtttcgccgccaccgtcttccgccgccctacctcgccgtcgccgacgacatgcccgaaaccgcggcggaggccaacctccgtaggcaactggagcaaaccctcgccgctgaaccctccagcccgctccaccactacaaccttggcgtcttcctatgggaccgcgccgaggcagagcaggagggtgatggggaagaggcgcggaagctccgcgcggaagcgtcggagcattttctcgcggcggccaagctgaatcccaacgatggcgtccccttccgcttccttggccaccactatgcgcgcggcggtgacaatcaacgagcggtcaagtgctatcaccgtgccgtgaccctcaaccctgacgactctgaggctggtgacacactctgtggcttgctagatgttgaagggaaggagagcttggagcttgctgtctgcaaggaggcagctggcaagtcaccgcgtgcgttctgggcttttcggagacttggctatttacaggttaggttcatcagaggaaatggtcagagggtatacaaagccttcagcatggaatacgaggttacccaacatgtgcagatttatgggaggcacttggtctggcataccaccgtttgggcatgttcaccgcagcagtaaagtcatatggacgagctattgaacttgatagttccagggtctttgcattgatagaaagtggaaacatccagttaatgcttggttactatagaaagggagtggagcagtttcgttctgctttggaaatggctccatgtaatcattcagcatactttggccttgcttctgcattgcttgcatgggcaaggaattgtgtaactactggggcctttggttgggctgctagcctgttgaaggaagcttcagaagcttccagaatttgtacttctttgactggaaacctttcatgcgtctggaaattgcatggagatgttcagctcacacttgcgagatgctttccatgggtggatgggaaaatcaaaagggtcatggatgcacagatgttcaaaaattctgttcaagagtggagaaatacatgtttgttagcagcaattgttcaaaactctcatatcaacgtgctttgcatcttactacctgacgaattcaagctgaatctccacaggtaa

SEQ ID NO: 8067 - DNA, 1138 bp, Zea Mays
cgcagtcctaggagttcggccgctttcctccgctttccgtttcgccgccaccgtcttccgccgccctacctcgccgtcgccgacgacatgcccgaaaccgcggcggaggccaacctccgtaggcaactggagcaaaccctcgccgctgaaccctccagcccgctccaccactacaaccttggcgtcttcctatgggaccgcgccgaggcagagcaggagggtgatggggaagaggcgcggaagctccgcgcggaagcgtcggagcattttctcgcggcggccaagctgaatcccaacgatggcgtccccttccgcttccttggccaccactatgcgcgcggcggtgacaatcaacgagcggtcaagtgctatcaccgtgccgtgaccctcaaccctgacgactctgaggctggtgacacactctgtggcttgctagatgttgaagggaaggagagcttggagcttgctgtctgcaaggaggcagctggcaagtcaccgcgtgcgttctgggcttttcggagacttggctatttacaggttcatcagaggaaatggtcagagggtatacaaagccttcagcatggaatacgaggttacccaacatgtgcagatttatgggagtttttgccggcagtcatatggacgagctattgaacttgatagttccagggtctttgcattgatagaaagtggaaacatccagttaatgcttggttactatagaaagggagtggagcagtttcgttctgctttggaaatggctccatgtaatcattcagcatactttggccttgcttctgcattgcttgcatgggcaaggaattgtgtaactactggggcctttggttgggctgctagcctgttgaaggaagcttcagaagcttccagaatttgtacttctttgactggaaacctttcatgcgtctggaaattgcatggagatgttcagctcacacttgcgagatgctttccatgggtggatgggaaaatcaaaagggtcatggatgcacagatgttcaaaaattctgttcaagagtggagaaatacatgtttgttagcagcaattgttcaaaactctcatatcaacgtgctttgcatcttactacctgacgaattcaagctgaatctccacaggtaa

SEQ ID NO: 8068 - DNA, 1252 bp, Zea Mays
ggacccacaattcatagacacagtggtaattataacaacaaaacaaatattgtgagtggcaaaaatccaattatctcgcagtcctaggagttcggccgctttcctccgctttccgtttcgccgccaccgtcttccgccgccctacctcgccgtcgccgacgacatgcccgaaaccgcggcggaggccaacctccgtaggcaactggagcaaaccctcgccgctgaaccctccagcccgctccaccactacaaccttggcgtcttcctatgggaccgcgccgaggcagagcaggagggtgatggggaagaggcgcggaagctccgcgcggaagcgtcggagcattttctcgcggcggccaagctgaatcccaacgatggcgtccccttccgcttccttggccaccactatgcgcgcggcggtgacaatcaacgagcggtcaagtgctatcaccgtgccgtgaccctcaaccctgacgactctgaggctggtgacacactctgtggcttgctagatgttgaagggaaggagagcttggagcttgctgtctgcaaggaggcagctggcaagtcaccgcgtgcgttctgggcttttcggagacttggctatttacaggttcatcagaggaaatggtcagagggtatacaaagccttcagcatggaatacgaggttacccaacatgtgcagatttatgggaggcacttggtctggcataccaccgtttgggcatgttcaccgcagcagtaaagtcatatggacgagctattgaacttgatagttccagggtctttgcattgatagaaagtggaaacatccagttaatgcttggttactatagaaagggagtggagcagtttcgttctgctttggaaatggctccatgtaatcattcagcatactttggccttgcttctgcattgcttgcatgggcaaggaattgtgtaactactggggcctttggttgggctgctagcctgttgaaggaagcttcagaagcttccagaatttgtacttctttgactggaaacctttcatgcgtctggaaattgcatggagatgttcagctcacacttgcgagatgctttccatgggtggatgggaaaatcaaaagggtcatggatgcacagatgttcaaaaattctgttcaagagtggagaaatacatgtttgttagcagcaattgttcaaaactctcatatcaacgtgctttgcatcttactacctgacgaattcaagctgaatctccacaggtaa

SEQ ID NO: 8069 - DNA, 1265 bp, Zea Mays
ggacccacaattcatagacacagtggtaattataacaacaaaacaaatattgtgagtggcaaaaatccaattatctcgcagtcctaggagttcggccgctttcctccgctttccgtttcgccgccaccgtcttccgccgccctacctcgccgtcgccgacgacatgcccgaaaccgcggcggaggccaacctccgtaggcaactggagcaaaccctcgccgctgaaccctccagcccgctccaccactacaaccttggcgtcttcctatgggaccgcgccgaggcagagcaggagggtgatggggaagaggcgcggaagctccgcgcggaagcgtcggagcattttctcgcggcggccaagctgaatcccaacgatggcgtccccttccgcttccttggccaccactatgcgcgcggcggtgacaatcaacgagcggtcaagtgctatcaccgtgccgtgaccctcaaccctgacgactctgaggctggtgacacactctgtggcttgctagatgttgaagggaaggagagcttggagcttgctgtctgcaaggaggcagctggcaagtcaccgcgtgcgttctgggcttttcggagacttggctatttacaggttcatcagaggaaatggtcagagggtatacaaagccttcagcatggaatacgaggttacccaacatgtgcagatttatgggaggcacttggtctggcataccaccgtttgggcatgttcaccgcagcagtaaagtttttgccggcagtcatatggacgagctattgaacttgatagttccagggtctttgcattgatagaaagtggaaacatccagttaatgcttggttactatagaaagggagtggagcagtttcgttctgctttggaaatggctccatgtaatcattcagcatactttggccttgcttctgcattgcttgcatgggcaaggaattgtgtaactactggggcctttggttgggctgctagcctgttgaaggaagcttcagaagcttccagaatttgtacttctttgactggaaacctttcatgcgtctggaaattgcatggagatgttcagctcacacttgcgagatgctttccatgggtggatgggaaaatcaaaagggtcatggatgcacagatgttcaaaaattctgttcaagagtggagaaatacatgtttgttagcagcaattgttcaaaactctcatatcaacgtgctttgcatcttactacctgacgaattcaagctgaatctccacaggtaa

SEQ ID NO: 8070 - DNA, 797 bp, Zea Mays
ccgctttcctccgctttccgtttcgccgccaccgtcttccgccgccctacctcgccgtcgccgacgacatgcccgaaaccgcggcggaggccaacctccgtaggcaactggagcaaaccctcgccgctgaaccctccagcccgctccaccactacaaccttggcgtcttcctatgggaccgcgccgaggcagagcaggagggtgatggggaagaggcgcggaagctccgcgcggaagcgtcggagcattttctcgcggcggccaagctgaatcccaacgatggcgtccccttccgcttccttggccaccactatgcgcgcggcggtgacaatcaacgagcggtcaagtgctatcaccgtgccgtgaccctcaaccctgacgactctgaggctggtgacacactctgtggcttgctagatgttgaagggaaggagagcttggagcttgctgtctgcaaggaggcagctggcaagtcaccgcgtgcgttctgggcttttcggagacttggctatttacaggttcatcagaggaaatggtcagagggtatacaaagccttcagcatggaatacgaggttacccaacatgtgcagatttatgggaggcacttggtctggcataccaccgtttgggcatgttcaccgcagcagtaaagtttttgccggcagtcatatggacgagctattgaacttgatagttccagggtctttgcattgatagaaagtggaaacatccagttaatgcttggttactatagaaagcactgatctctttcattgttaaaactatttaatttctc

SEQ ID NO: 8071 - DNA, 991 bp, Zea Mays
atggtcccgaggcttttcgaaaagctaaaggatgagtctccgaggagaaggaacacaattgtgactagggtgccaaatattgcgagagaagtctgcgtactttccattcgtaaaattgaaatgttccgattacaattaaatgacatgggaaccgctacgaggagtgatgatatatctggagatgttagagcggcggaggccaacctccgtaggcaactggagcaaaccctcgccgctgaaccctccagcccgctccaccactacaaccttggcgtcttcctatgggaccgcgccgaggcagagcaggagggtgatggggaagaggcgcggaagctccgcgcggaagcgtcggagcattttctcgcggcggccaagctgaatcccaacgatggcgtccccttccgcttccttggccaccactatgcgcgcggcggtgacaatcaacgagcggtcaagtgctatcaccgtgccgtgaccctcaaccctgacgactctgaggctggtgacacactctgtggcttgctagatgttgaagggaaggagagcttggagcttgctgtctgcaaggaggcagctggcaagtcaccgcgtgcgttctgggcttttcggagacttggctatttacaggttaggttcatcagaggaaatggtcagagggtatacaaagccttcagcatggaatacgaggttacccaacatgtgcagatttatgggaggcacttggtctggcataccaccgtttgggcatgttcaccgcagcagtaaaggtttgctgttttcagttgtgagcatccttaataactgttgcagtgcgctgtattgagccttctcaatgtgcttaattcagtttttgccggcagtcatatggacgagctattgaacttgatagttccagggtctttgcattgatagaaagtggaaacatccagttaatgcttggttactatagaaagcactgatctctttcattgttaaaactatttaatttctc

SEQ ID NO: 8072 - DNA, 1217 bp, Zea Mays
aaatattgttgtatgttgcatggttaagttgtgtgtattgttatcaaaccttacttggtggtgactaatgataaaaaggtggcttcctgtggagaattcagaagttaggaaggatggaataaaaggaacatacagagtggatgttgacattcctgctaatgattggataaacgtcaccaagttctatgatgttctaattttcaacactggacactggtgggatagatataaattcccaaaagacactccccttgttttctacaaagggggaaagccgattgaacctccacttgacatgcacaacggactgaaagtagtcctgaaaagtattgcttcttacatcgaaagggaggttcctaggaaaacactgaagctgtggcgcacgcagtcacctaggcacttctatggaggtgagtgggatcacaatggcagctgtgtatctgatagacgtcttgaagagcatgagctcaattcttggtttgatccccagtttgggggagtgaacaaagaagcgagaaccgtgaatttagcaattcaggaagccctggctggcacggaaatccagttgctcaacctcacttacatgagcgagttccgtgctgacgcccatccagctatctggctcggcaagaaggacgcggtggctgtctatggacaggactgcatgcattggtgcctgcctggcgtgccggacacttgggtcgacatcttggctgcacagatcatgcatcacttcaagcaggagaaaggctgatcacaatttctttaaatctgtagttttgcgataactacagcaactgtgctagaactttttagatttgtattttagggataacataacaaacattaaatagttttgcaaatattcattaggttaggtctcccataatgctatagtgatgcacaaaactaatgggcaccacaccgaacatcggaacatcccagtgctggagttttcaaataaggtcctctttaaatctgtagtgtttaaataagggtttggtagagtttctcttaattctgattcaccaaactaccaaagcatgttcttgccctgctataagttttacaggcatgaattagtgtcacataaaagcatgttcttgccctgctataagttttgcaggcatgaactagtgtcacttgccataggctgtatgcatgttatgttgtgcatggcctttaatatccttacaagcacataatgtggagttctt

SEQ ID NO: 8073 - DNA, 1453 bp, Zea Mays
ggaactggcagaaattgaatgggggcctaggcccctgatcagcttagcataggtccacggtccacccctgacatgcgggtgtgatggcaggagttggtagtatttcagtgggagttggaatgatgctaagtaaaaatctggatcagttgacttgtggttatctgttctggaagatcttttcttgatttcaggtaattttgatgtctaagggactaagctcctatgatagtgctgttcccttgaagaaaataggatgatatgtggcaaatattgttgtatgttgcatggttaagttgtgtgtattgttatcaaacgtggcttcctgtggagaattcagaagttaggaaggatggaataaaaggaacatacagagtggatgttgacattcctgctaatgattggataaacgtcaccaagttctatgatgttctaattttcaacactggacactggtgggatagatataaattcccaaaagacactccccttgttttctacaaagggggaaagccgattgaacctccacttgacatgcacaacggactgaaagtagtcctgaaaagtattgcttcttacatcgaaagggaggttcctaggaaaacactgaagctgtggcgcacgcagtcacctaggcacttctatggaggtgagtgggatcacaatggcagctgtgtatctgatagacgtcttgaagagcatgagctcaattcttggtttgatccccagtttgggggagtgaacaaagaagcgagaaccgtgaatttagcaattcaggaagccctggctggcacggaaatccagttgctcaacctcacttacatgagcgagttccgtgctgacgcccatccagctatctggctcggcaagaaggacgcggtggctgtctatggacaggactgcatgcattggtgcctgcctggcgtgccggacacttgggtcgacatcttggctgcacagatcatgcatcacttcaagcaggagaaaggctgatcacaatttctttaaatctgtagttttgcgataactacagcaactgtgctagaactttttagatttgtattttagggataacataacaaacattaaatagttttgcaaatattcattaggttaggtctcccataatgctatagtgatgcacaaaactaatgggcaccacaccgaacatcggaacatcccagtgctggagttttcaaataaggtcctctttaaatctgtagtgtttaaataagggtttggtagagtttctcttaattctgattcaccaaactaccaaagcatgttcttgccctgctataagttttacaggcatgaattagtgtcacataaaagcatgttcttgccctgctataagttttgcaggcatgaactagtgtcacttgccataggctgtatgcatgttatgttgtgcatggcctttaatatccttacaagcacataatgtggagttctt

SEQ ID NO: 8074 - DNA, 1129 bp, Zea Mays
ggagctcacttttagtgggtttgcgaactgttaggtgaaggccaaggtggcttcctgtggagaattcagaagttaggaaggatggaataaaaggaacatacagagtggatgttgacattcctgctaatgattggataaacgtcaccaagttctatgatgttctaattttcaacactggacactggtgggatagatataaattcccaaaagacactccccttgttttctacaaagggggaaagccgattgaacctccacttgacatgcacaacggactgaaagtagtcctgaaaagtattgcttcttacatcgaaagggaggttcctaggaaaacactgaagctgtggcgcacgcagtcacctaggcacttctatggagctcaattcttggtttgatccccagtttgggggagtgaacaaagaagcgagaaccgtgaatttagcaattcaggaagccctggctggcacggaaatccagttgctcaacctcacttacatgagcgagttccgtgctgacgcccatccagctatctggctcggcaagaaggacgcggtggctgtctatggacaggactgcatgcattggtgcctgcctggcgtgccggacacttgggtcgacatcttggctgcacagatcatgcatcacttcaagcaggagaaaggctgatcacaatttctttaaatctgtagttttgcgataactacagcaactgtgctagaactttttagatttgtattttagggataacataacaaacattaaatagttttgcaaatattcattaggttaggtctcccataatgctatagtgatgcacaaaactaatgggcaccacaccgaacatcggaacatcccagtgctggagttttcaaataaggtcctctttaaatctgtagtgtttaaataagggtttggtagagtttctcttaattctgattcaccaaactaccaaagcatgttcttgccctgctataagttttacaggcatgaattagtgtcacataaaagcatgttcttgccctgctataagttttgcaggcatgaactagtgtcacttgccataggctgtatgcatgttatgttgtgcatggcctttaatatccttacaagcacataatgtggagttctt

SEQ ID NO: 8075 - DNA, 1235 bp, Zea Mays
ccaccttgtcattgagaggctggagctcacttttagtgggtttgcgaactgttaggtgaaggccaagcttacttggtggtgactaatgataaaaaggtggcttcctgtggagaattcagaagttaggaaggatggaataaaaggaacatacagagtggatgttgacattcctgctaatgattggataaacgtcaccaagttctatgatgttctaattttcaacactggacactggtgggatagatataaattcccaaaagacactccccttgttttctacaaagggggaaagccgattgaacctccacttgacatgcacaacggactgaaagtagtcctgaaaagtattgcttcttacatcgaaagggaggttcctaggaaaacactgaagctgtggcgcacgcagtcacctaggcacttctatggaggtgagtgggatcacaatggcagctgtgtatctgatagacgtcttgaagagcatgagctcaattcttggtttgatccccagtttgggggagtgaacaaagaagcgagaaccgtgaatttagcaattcaggaagccctggctggcacggaaatccagttgctcaacctcacttacatgagcgagttccgtgctgacgcccatccagctatctggctcggcaagaaggacgcggtggctgtctatggacaggactgcatgcattggtgcctgcctggcgtgccggacacttgggtcgacatcttggctgcacagatcatgcatcacttcaagcaggagaaaggctgatcacaatttctttaaatctgtagttttgcgataactacagcaactgtgctagaactttttagatttgtattttagggataacataacaaacattaaatagttttgcaaatattcattaggttaggtctcccataatgctatagtgatgcacaaaactaatgggcaccacaccgaacatcggaacatcccagtgctggagttttcaaataaggtcctctttaaatctgtagtgtttaaataagggtttggtagagtttctcttaattctgattcaccaaactaccaaagcatgttcttgccctgctataagttttacaggcatgaattagtgtcacataaaagcatgttcttgccctgctataagttttgcaggcatgaactagtgtcacttgccataggctgtatgcatgttatgttgtgcatggcctttaatatccttacaagcacataatgtggagttctt

SEQ ID NO: 8076 - DNA, 1937 bp, Zea Mays
ccaaaccagcaagggtacgaggtacccaaatgccaagttagatccagactccagagggaaggccggaagggggactgggggagggaaaagaataactgaggaagcgggcggtgcctgcctgggtgcgcgtcgtcgccagacgcgggcgcaatgccgcgcctccgcctccctctggtcctcctcctccccatagccctcaccatcatcctcctcatcctgttcccattttccccaagcccgcgctcgcccccgcctcagccactcccctgcggcgccgcgctctccgatgcggcggacggccggtgggtgccgaccccatcgcccgcaccgccgccactatattctccgtcctgccccttccaccgcaatgcctggaactgcctccgcaacggcaggccccagctcgcggcgctctcctgggcgcccgcccgctgcggcggcgccgtcgtgccgagggtcgacgccgcggggttcctggccgctgccagggggcgacggattgggctcgtgggggactcgctgtctgagaacctcgttgtcgcgctcctctgcgcgctccgctcggcggacgacggcgcccgcaagtggaagcggcgtggcgcgtggcgcggaggctacttccccaaggaggacgtcgtcgtcgcttaccaccgtgccgtcctgctcgccaaatacacgatcattaggtaaatagggatggagagaagctttccaacctaggaggctgtcaaccaccttgtcattgagaggctggagctcacttttagtgggtttgcgaactgttaggtgaaggccaaggtggcttcctgtggagaattcagaagttaggaaggatggaataaaaggaacatacagagtggatgttgacattcctgctaatgattggataaacgtcaccaagttctatgatgttctaattttcaacactggacactggtgggatagatataaattcccaaaagacactccccttgttttctacaaagggggaaagccgattgaacctccacttgacatgcacaacggactgaaagtagtcctgaaaagtattgcttcttacatcgaaagggaggttcctaggaaaacactgaagctgtggcgcacgcagtcacctaggcacttctatggaggtgagtgggatcacaatggcagctgtgtatctgatagacgtcttgaagagcatgagctcaattcttggtttgatccccagtttgggggagtgaacaaagaagcgagaaccgtgaatttagcaattcaggaagccctggctggcacggaaatccagttgctcaacctcacttacatgagcgagttccgtgctgacgcccatccagctatctggctcggcaagaaggacgcggtggctgtctatggacaggactgcatgcattggtgcctgcctggcgtgccggacacttgggtcgacatcttggctgcacagatcatgcatcacttcaagcaggagaaaggctgatcacaatttctttaaatctgtagttttgcgataactacagcaactgtgctagaactttttagatttgtattttagggataacataacaaacattaaatagttttgcaaatattcattaggttaggtctcccataatgctatagtgatgcacaaaactaatgggcaccacaccgaacatcggaacatcccagtgctggagttttcaaataaggtcctctttaaatctgtagtgtttaaataagggtttggtagagtttctcttaattctgattcaccaaactaccaaagcatgttcttgccctgctataagttttacaggcatgaattagtgtcacataaaagcatgttcttgccctgctataagttttgcaggcatgaactagtgtcacttgccataggctgtatgcatgttatgttgtgcatggcctttaatatccttacaagcacataatgtggagttctt

SEQ ID NO: 8077 - DNA, 1899 bp, Zea Mays
gactgctgcactggattgtccgttttggattaagtcaactgtttggattgctgtaactttaatacacagatagaagcgtaagagagtcttgccagggagatttgctctatgccacttgcaaattgcaaagctcagaaacccaaaccagcaagggtacgaggtacccaaatgccaagttagatccagactccagagggaaggccggaagggggactgggggagggaaaagaataactgaggaagcgggcggtgcctgcctgggtgcgcgtcgtcgccagacgcgggcgcaatgccgcgcctccgcctccctctggtcctcctcctccccatagccctcaccatcatcctcctcatcctgttcccattttccccaagcccgcgctcgcccccgcctcagccactcccctgcggcgccgcgctctccgatgcggcggacggccggtgggtgccgaccccatcgcccgcaccgccgccactatattctccgtcctgccccttccaccgcaatgcctggaactgcctccgcaacggcaggccccagctcgcggcgctctcctgggcgcccgcccgctgcggcggcgccgtcgtgccgagggtcgacgccgcggggttcctggccgctgccagggggcgacggattgggctcgtgggggactcgctgtctgagaacctcgttgtcgcgctcctctgcgcgctccgctcggcggacgacggcgcccgcaagtggaagcggcgtggcgcgtggcgcggaggctacttccccaaggaggacgtcgtcgtcgcttaccaccgtgccgtcctgctcgccaaatacacgtggcttcctgtggagaattcagaagttaggaaggatggaataaaaggaacatacagagtggatgttgacattcctgctaatgattggataaacgtcaccaagttctatgatgttctaattttcaacactggacactggtgggatagatataaattcccaaaagacactccccttgttttctacaaagggggaaagccgattgaacctccacttgacatgcacaacggactgaaagtagtcctgaaaagtattgcttcttacatcgaaagggaggttcctaggaaaacactgaagctgtggcgcacgcagtcacctaggcacttctatggagctcaattcttggtttgatccccagtttgggggagtgaacaaagaagcgagaaccgtgaatttagcaattcaggaagccctggctggcacggaaatccagttgctcaacctcacttacatgagcgagttccgtgctgacgcccatccagctatctggctcggcaagaaggacgcggtggctgtctatggacaggactgcatgcattggtgcctgcctggcgtgccggacacttgggtcgacatcttggctgcacagatcatgcatcacttcaagcaggagaaaggctgatcacaatttctttaaatctgtagttttgcgataactacagcaactgtgctagaactttttagatttgtattttagggataacataacaaacattaaatagttttgcaaatattcattaggttaggtctcccataatgctatagtgatgcacaaaactaatgggcaccacaccgaacatcggaacatcccagtgctggagttttcaaataaggtcctctttaaatctgtagtgtttaaataagggtttggtagagtttctcttaattctgattcaccaaactaccaaagcatgttcttgccctgctataagttttacaggcatgaattagtgtcacataaaagcatgttcttgccctgctataagttttgcaggcatgaactagtgtcacttgccataggctgtatgcatgttatgttgtgcatggcctttaatatccttacaagcacataatgtggagttctt

SEQ ID NO: 8078 - DNA, 970 bp, Zea Mays
ggccggaagggggactgggggagggaaaagaataactgaggaagcgggcggtgcctgcctgggtgcgcgtcgtcgccagacgcgggcgcaatgccgcgcctccgcctccctctggtcctcctcctccccatagccctcaccatcatcctcctcatcctgttcccattttccccaagcccgcgctcgcccccgcctcagccactcccctgcggcgccgcgctctccgatgcggcggacggccggtgggtgccgaccccatcgcccgcaccgccgccactatattctccgtcctgccccttccaccgcaatgcctggaactgcctccgcaacggcaggccccagctcgcggcgctctcctgggcgcccgcccgctgcggcggcgccgtcgtgccgagggtcgacgccgcggggttcctggccgctgccagggggcgacggattgggctcgtgggggactcgctgtctgagaacctcgttgtcgcgctcctctgcgcgctccgctcggcggacgacggcgcccgcaagtggaagcggcgtggcgcgtggcgcggaggctacttccccaaggaggacgtcgtcgtcgcttaccaccgtgccgtcctgctcgccaaatacacgtggcttcctgtggagaattcagaagttaggaaggatggaataaaaggaacatacagagtggatgttgacattcctgctaatgattggataaacgtcaccaagttctatgatgttctaattttcaacactggacactggtgggatagatataaattcccaaaagacactccccttgttttctacaaagggggaaagccgattgaacctccacttgacatgcacaacggactgaaagtagtcctgaaaagtattgcttcttacatcgaaagggaggttcctaggaaaacactgaagctgtggcgcacgcagtcacctaggcacttctatggaggttatgcatttcaaagctgtg

SEQ ID NO: 8079 - DNA, 783 bp, Zea Mays
tctccttctccctctccctctccctgtggttcactaccgggtcgtcggtgaagggcgaacgacgccatgccggcggatccatgcagggctggatccacaaaagctggatccatggagggttggatctctttgtagggctggatccgtggagggagtgcacgtcgctcgtcgcctagctcgaggtgcgagggcatgtctacctacccgaggacctacgatctcatccatgcggactcgatgttcaccctatacaagaacaggtgcgagatggaccgcatccttctggagatggacaggatcctgaggcccaggggcacggtgatcatcagggaagacgtggacttgctggtgaaggtcaagagcctggcgaacgggatcagtagaaggactgtcaaatctattaatgatatgaaagaacactgcttctggtcccaaattatggagagaaagggtccaacagtcgagacggctgaatggggccaggaatgaattggtaatgtacagacacatttgataggacactaggccatgtaaacaagtctctggtctctccatgttgtttaattcagattattgcaaatcatatttagatgattgcaattagttcattttatgggtcaaaatcatatttttagttcaaatgtgttgtaatttgtttaatagcgcttaaagttttgaaatttggcggcagcttcattttactcatgaaaactagcggcaacctaatttggccaagctaaaaaaatgagaaccaaacaatgtataatataggcctggtttatt

SEQ ID NO: 8080 - DNA, 1164 bp, Zea Mays
aacaagccctcgggtggaaccgtttcaagtggaatggaggaaagccttcgaggtgtgcgtgtgcctaccgttcagaacatgtcgtcggggggtgcaacaatcagaacccaaggaataacaagtgatcctgcaccgaacagggataatcccaacgagtcgttgctggtgggatcgtccactgtgcatgtggaggaaatgatgctagacaccactgtcactgtgcagacggatacaaggagctcaggtgccttttctgggttcgttgagctagacgacgtttcaacggagagtatcaagatctcagctccgctgttcctacgcccgttcggtccgagagcaatcgtccagcacaagggttccccgctccagctcatctgtccaggtctggaagtcctctgggtcaacacaaaggggttcccaaacagcccacatcgaccaaaggtgggcataaaggtcgacatacctgagaaccttagtaaggtactagggttttgcgacgatctagcgcagagctcgtcgtcgtcgccaggaccaggagcaatatgcagtaattccagatggaaatccctgattgagagagacgcggatcggcgtccaacggtctggctgaagattcctacctttggcagtggcgacaccgcagcctgccggacacatgtatacgaaaaggagtgcgacggtgtcgttccaaggcttgtttccgaaagggtcgatccatcggaactggcctcgatgcttcaagggaacaaggtggtggatgcgttcgtctcggtggaaacattcgaccactaccaaagcgctggcattcggttggttgccaataggctggatgtgcacttcaaaaggcaacagcaggcctagctagttccttatggtgctctccggtcaggccgaggctggattgaaggggattgacccatccaattctcctgtgattctcttgttaccgaatcgatccaggactatataaataagtaagtttatgtcgtctccgtatgtgcttgcaaaacttccgaccatattttatatgtgttcagacttcttatttgatgacgctagctaggagaatgctaccgttactatcgacatggcatttttttgtttgtagtcgacgatgtcaaacatctttgcagacttcactccaaattccatggccgacgagac

SEQ ID NO: 8081 - DNA, 1683 bp, Zea Mays
cgcactgcggtgcggtggtggcgtcatgcgaacaccttgcaggaggagattgtgttcctggacgtggagacgtcaaccccgccgtgcgtgctcctcgagttcggtgccgtagtcgtgtgctcgcgcaggctcgtggacgtctcctccttcgccacgctcgtgcggcccgcgaacctcgacgcgctcccggacccgaccgcgcggagcaacggcatcacgcgcggcaccctcgctgacgcgccgccgttccgcgacgtcgccgacatggtctacgacgtcctgcacgggagggtgtgggcagggcacaacatcgtgcacttcgattccatgataatcatggacgcgttcgccgagattgggcgaccccctcctcaacccaaggccatgatcgacacccttccgttgcttacccagtgtttcgggccgagagcaggggacatgaagctggcaagcttggcaaactattttggtctagggaagcaaaggcacaggagcctggatgatgtgaaaatgaatattgacgttttcaagaactgtgctacagtcctgttcctggaggaaagccttcgaggtgtgcgtgtgcctaccgttcagaacatgtcgtcggggggtgcaacaatcagaacccaaggaataacaagtgatcctgcaccgaacagggataatcccaacgagtcgttgctggtgggatcgtccactgtgcatgtggaggaaatgatgctagacaccactgtcactgtgcagacggatacaaggagctcaggtgccttttctgggttcgttgagctagacgacgtttcaacggagagtatcaagatctcagctccgctgttcctacgcccgttcggtccgagagcaatcgtccagcacaagggttccccgctccagctcatctgtccaggtctggaagtcctctgggtcaacacaaaggggttcccaaacagcccacatcgaccaaaggtgggcataaaggtcgacatacctgagaaccttagtaaggtactagggttttgcgacgatctagcgcagagctcgtcgtcgtcgccaggaccaggagcaatatgcagtaattccagatggaaatccctgattgagagagacgcggatcggcgtccaacggtctggctgaagattcctacctttggcagtggcgacaccgcagcctgccggacacatgtatacgaaaaggagtgcgacggtgtcgttccaaggcttgtttccgaaagggtcgatccatcggaactggcctcgatgcttcaagggaacaaggtggtggatgcgttcgtctcggtggaaacattcgaccactaccaaagcgctggcattcggttggttgccaataggctggatgtgcacttcaaaaggcaacagcaggcctagctagttccttatggtgctctccggtcaggccgaggctggattgaaggggattgacccatccaattctcctgtgattctcttgttaccgaatcgatccaggactatataaataagtaagtttatgtcgtctccgtatgtgcttgcaaaacttccgaccatattttatatgtgttcagacttcttatttgatgacgctagctaggagaatgctaccgttactatcgacatggcatttttttgtttgtagtcgacgatgtcaaacatctttgcagacttcactccaaattccatggccgacgagac

SEQ ID NO: 8082 - DNA, 3443 bp, Zea Mays
ctattctctctatcgccgctgcctctctctccctccttccttttcctggtcgcgacagcgccgcgctaatcgatcccttttgcccacgccgccgttgcctccaactccaaccagccgtcgggtgtgatccatggagaacggcggtggcgtcggtgaagggcgctcggagaatcgggcgggcgagaacggcggagtcgccgaggcagccactgcggcggatgagggagattgtgatgtggtggtggagggcggagatgaaggggacatgccgcccggtgcggtggcggcgggcgatcaccagccaatggtgacgccgaacaccagagcggtgctggaaacaggacagcttgcggcagacaagtgggacgaggacgatactccccgtttcattgacgtggaggaaagctttgccgatgatgtgaatcaagatcacgtcgctgcacaatctgggagcgagtatgaagatgtaaaagatggtactttggtgtatcaaagcaaagagcagccagggacgagcacggaagatattgcttcctcacatagcaggccagggacagtcacacattctgcagctgagcctgctgttgccattgaggaattggatgactcaagctcctcagctgatgagaataccgccacctctgctcctcctgcacaattctcaagcggtagttctacacctgcgcaatccagcagtgctgcttctgctcgttctactaatggtccctctttgccatctcgtcctgctggccttggatcatcgtcttccctgtcacagcctcctgctcgttctgttcaacaggtccatgccaacaggccagccattgtggaaaggggaacccagggggctactgaggatgatggagacgagaatgatgaaatccatgaaaagcttcaaatgatccgggttaagtttcttcgccttgctaacaggtttgggcaaacatatcataatatggtcgtttcacaggttctgtaccggcttgggctggcagaacaacttagaagaactacttctaatgggtcatttagcattgaccgtgcaagagacatggcagaacgccttgaagctgctggaaatgcgccccttgatttttcatgcaccatcttggttcttggtaaaactggggtcggtaagagtgctaccattaattcagtttttgatgataccaggttggatacaaacgcttttgattctagtactaggaaggttcaagaagtagttggtatggttgagggaatcaaagtgaaagtgattgatacacctggactttcctgctcatctttagaacaacaccgcaaccagaaggttctcaactctgtcaagagacttattagcaaaaaccctccagatattgttctttattttgataggttggatatgcagagcagggacaattgtgacgtccctctgctgcaaaccatcacaaaagtgtttggagcatcggtttggtttaatgccattgtcgtgttaactcatgctgcatctgcgccaccagatgggcagaatggaattcctctgagctatgagatgtttgtcacccagagatctcatgtagtgcaacaagctataaggcaagctgctggtgatgtacgccttatgaatccagtatccctcgtggaaaaccactcagcatgcaggacaaatagggctggccagagggtattgccaaatggacaagtctggaagccacagttactgctgctttgttttgcttcaaaggtgttagcagaagccaatgtgctccttaagttgcaggatagtcccattggtaaactttctcgtacaaggattcctccactgcctttcctcctctcttcccttcttcagtctcgtgccccactgaagttaccagaggagcaatttggtggtgatgatgatgatcttgaagatgatttggcagatgattctgattcagatgatggttcagattatgatgatttacctccatttaagcgtctcacaaaagctcagcttgccaagctgaacagggagcagaggaaggcctatcttgaggagctagattacagagagaagttgttctatcaaaaacagctgaaagaggaaagaaaacgtcgtaaattgatgaagaaaatggcagcagaagccagtgctcgtgcaaatgatttcagcaacagcaacctagaagatgatgctactactccaactaatgtttcagtgcctatgcctgacatggtactgccctcatcttttgattctgactaccctagccatcgctatcgtttcctggatacaccaagtgaatggcttgtcagacctgtattggaaacacagggctgggaccatgatgttggttacgagggacttaatgttgaaagattgtttgccgtaaaaggtaaagttcctctatcagtgtctggccagcttacaaaagacaagaaggattgctccctgcaaatggaggttgcaagttcaattaagcatgctgaaggtaagactacttcacttgggcttgatttgcagtctgtcggcagggatatggcatacacaatccgtggcgaatcgagatttaagaacttcaggcgcaacaatacatctgctgggatatctgctacgcttcttggggattcagtatcagctggtatgaagattgaggacaaactgatagtgaacaagcagcttagggtcctggttagcagcggggccatgagtgggaggggagacatggcctatggaggccgccttgaagcaacgatgagagacaaagattacccgattgggcggatgctttccactgttgcattatctgttgtggattggcacggggatctggcaattggctgcaacatccagtctcagatccccgctggaagagctagcaacttggttggccacgctaatctaagcaacaaggggactggccaagtcgggattcgcctcaacagctcggagcatcttgagatcgcactcgtggccctcgtgccgatattccagaacatcatgaagctgttacagaattactcggaatctggctagtccctcgtgccgatgttccagaacatcatgaagctgttacagaattactgagaatccggctagtactttttttttcatgtaagcctgagaaaacagagcatcataggttaaaatctagcttaagctagaactttacttccaattattattttgttcttttgttgccaactttgtaactatgctctcctctgggcttttttttttttaagttggagtagcattcttagggctagtttgggagctacaaaaccgaataggattggagtgactaaaatccccttattcaaatttaaataagaagtggattttagcccctctaatccattttggttttgtagctcctagactagaccttataatgtaagattccccctgagctctttctgatgaagctggattggagaattcatcgtgtcagatttctgggcatgctactgagtttttc

SEQ ID NO: 8083 - DNA, 3391 bp, Zea Mays
aaatcggcggaggcatccaatccggcttgcgagtttgcgacttctttctattctctctatcgccgctgcctctctctccctccttccttttcctggtcgcgacagcgccgcgctaatcgatcccttttgcccacgccgccgttgcctccaactccaaccaggttggtttggtagccgccacctccttccggatccgttcaccacaatctttttgtatgtatttttgtctagatagattgttccagtccccgtccgcttgcaattgaacgtctgtatgtttgttttttttacctcctgttgttgtcgtttgatccgttccgtttcctcttgatgtcggactagggtttcgctccttccgcagccgtcgggtgtgatccatggagaacggcggtggcgtcggtgaagggcgctcggagaatcgggcgggcgagaacggcggagtcgccgaggcagccactgcggcggatgagggagattgtgatgtggtggtggagggcggagatgaaggggacatgccgcccggtgcggtggcggcgggcgatcaccagccaatggtgacgccgaacaccagagcggtgctggaaacaggacagcttgcggcagacaagtgggacgaggacgatactccccgtttcattgacgtggaggaaagctttgccgatgatgtgaatcaagatcacgtcgctgcacaatctgggagcgagtatgaagatgtaaaagatggtactttggtgtatcaaagcaaagagcagccagggacgagcacggaagatattgcttcctcacatagcaggccagggacagtcacacattctgcagctgagcctgctgttgccattgaggaattggatgactcaagctcctcagctgatgagaataccgccacctctgctcctcctgcacaattctcaagcggtagttctacacctgcgcaatccagcagtgctgcttctgctcgttctactaatggtccctctttgccatctcgtcctgctggccttggatcatcgtcttccctgtcacagcctcctgctcgttctgttcaacaggtccatgccaacaggccagccattgtggaaaggggaacccagggggctactgaggatgatggagacgagaatgatgaaatccatgaaaagcttcaaatgatccgggttaagtttcttcgccttgctaacaggtttgggcaaacatatcataatatggtcgtttcacaggttctgtaccggcttgggctggcagaacaacttagaagaactacttctaatgggtcatttagcattgaccgtgcaagagacatggcagaacgccttgaagctgctggaaatgcgccccttgatttttcatgcaccatcttggttcttggtaaaactggggtcggtaagagtgctaccattaattcagtttttgatgataccaggttggatacaaacgcttttgattctagtactaggaaggttcaagaagtagttggtatggttgagggaatcaaagtgaaagtgattgatacacctggactttcctgctcatctttagaacaacaccgcaaccagaaggttctcaactctgtcaagagacttattagcaaaaaccctccagatattgttctttattttgataggttggatatgcagagcagggacaattgtgacgtccctctgctgcaaaccatcacaaaagtgtttggagcatcggtttggtttaatgccattgtcgtgttaactcatgctgcatctgcgccaccagatgggcagaatggaattcctctgagctatgagatgtttgtcacccagagatctcatgtagtgcaacaagctataaggcaagctgctggtgatgtacgccttatgaatccagtatccctcgtggaaaaccactcagcatgcaggacaaatagggctggccagagggtattgccaaatggacaagtctggaagccacagttactgctgctttgttttgcttcaaaggtgttagcagaagccaatgtgctccttaagttgcaggatagtcccattggtaaactttctcgtacaaggattcctccactgcctttcctcctctcttcccttcttcagtctcgtgccccactgaagttaccagaggagcaatttggtggtgatgatgatgatcttgaagatgatttggcagatgattctgattcagatgatggttcagattatgatgatttacctccatttaagcgtctcacaaaagctcagcttgccaagctgaacagggagcagaggaaggcctatcttgaggagctagattacagagagaagttgttctatcaaaaacagctgaaagaggaaagaaaacgtcgtaaattgatgaagaaaatggcagcagaagccagtgctcgtgcaaatgatttcagcaacagcaacctagaagatgatgctactactccaactaatgtttcagtgcctatgcctgacatgggatatggcatacacaatccgtggcgaatcgagatttaagaacttcaggcgcaacaatacatctgctgggatatctgctacgcttcttggggattcagtatcagctggtatgaagattgaggacaaactgatagtgaacaagcagcttagggtcctggttagcagcggggccatgagtgggaggggagacatggcctatggaggccgccttgaagcaacgatgagagacaaagattacccgattgggcggatgctttccactgttgcattatctgttgtggattggcacggggatctggcaattggctgcaacatccagtctcagatccccgctggaagagctagcaacttggttggccacgctaatctaagcaacaaggggactggccaagtcgggattcgcctcaacagctcggagcatcttgagatcgcactcgtggccctcgtgccgatattccagaacatcatgaagctgttacagaattactcggaatctggctagtccctcgtgccgatgttccagaacatcatgaagctgttacagaattactgagaatccggctagtactttttttttcatgtaagcctgagaaaacagagcatcataggttaaaatctagcttaagctagaactttacttccaattattattttgttcttttgttgccaactttgtaactatgctctcctctgggcttttttttttttaagttggagtagcattcttagggctagtttgggagctacaaaaccgaataggattggagtgactaaaatccccttattcaaatttaaataagaagtggattttagcccctctaatccattttggttttgtagctcctagactagaccttataatgtaagattccccctgagctctttctgatgaagctggattggagaattcatcgtgtcagatttctgggcatgctactgagtttttc

SEQ ID NO: 8084 - DNA, 3754 bp, Zea Mays
gttatcgtaggacaatatgaaagcgccaagataagcatttggtcgccttgagttttcatttgtggtattatatttcatttgaaaataattacattactgcaaaattgttttcgcgattctaaatttattctttgagtcagcgggcccgaatttccttttaaaaagctgggcccgtaattagctgactgcttcaggccacggtgaattggccccgcagatctccagggttttagcagagcccagtaaaatcggcggaggcatccaatccggcttgcgagtttgcgacttctttctattctctctatcgccgctgcctctctctccctccttccttttcctggtcgcgacagcgccgcgctaatcgatcccttttgcccacgccgccgttgcctccaactccaaccagggtttcgctccttccgcagccgtcgggtgtgatccatggagaacggcggtggcgtcggtgaagggcgctcggagaatcgggcgggcgagaacggcggagtcgccgaggcagccactgcggcggatgagggagattgtgatgtggtggtggagggcggagatgaaggggacatgccgcccggtgcggtggcggcgggcgatcaccagccaatggtgacgccgaacaccagagcggtgctggaaacaggacagcttgcggcagacaagtgggacgaggacgatactccccgtttcattgacgtggaggaaagctttgccgatgatgtgaatcaagatcacgtcgctgcacaatctgggagcgagtatgaagatgtaaaagatggtactttggtgtatcaaagcaaagagcagccagggacgagcacggaagatattgcttcctcacatagcaggccagggacagtcacacattctgcagctgagcctgctgttgccattgaggaattggatgactcaagctcctcagctgatgagaataccgccacctctgctcctcctgcacaattctcaagcggtagttctacacctgcgcaatccagcagtgctgcttctgctcgttctactaatggtccctctttgccatctcgtcctgctggccttggatcatcgtcttccctgtcacagcctcctgctcgttctgttcaacaggtccatgccaacaggccagccattgtggaaaggggaacccagggggctactgaggatgatggagacgagaatgatgaaatccatgaaaagcttcaaatgatccgggttaagtttcttcgccttgctaacaggtttgggcaaacatatcataatatggtcgtttcacaggttctgtaccggcttgggctggcagaacaacttagaagaactacttctaatgggtcatttagcattgaccgtgcaagagacatggcagaacgccttgaagctgctggaaatgcgccccttgatttttcatgcaccatcttggttcttggtaaaactggggtcggtaagagtgctaccattaattcagtttttgatgataccaggttggatacaaacgcttttgattctagtactaggaaggttcaagaagtagttggtatggttgagggaatcaaagtgaaagtgattgatacacctggactttcctgctcatctttagaacaacaccgcaaccagaaggttctcaactctgtcaagagacttattagcaaaaaccctccagatattgttctttattttgataggttggatatgcagagcagggacaattgtgacgtccctctgctgcaaaccatcacaaaagtgtttggagcatcggtttggtttaatgccattgtcgtgttaactcatgctgcatctgcgccaccagatgggcagaatggaattcctctgagctatgagatgtttgtcacccagagatctcatgtagtgcaacaagctataaggcaagctgctggtgatgtacgccttatgaatccagtatccctcgtggaaaaccactcagcatgcaggacaaatagggctggccagagggtattgccaaatggacaagtctggaagccacagttactgctgctttgttttgcttcaaaggtgttagcagaagccaatgtgctccttaagttgcaggatagtcccattggtaaactttctcgtacaaggattcctccactgcctttcctcctctcttcccttcttcagtctcgtgccccactgaagttaccagaggagcaatttggtggtgatgatgatgatcttgaagatgatttggcagatgattctgattcagatgatggttcagattatgatgatttacctccatttaagcgtctcacaaaagctcagcttgccaagctgaacagggagcagaggaaggcctatcttgaggagctagattacagagagaagttgttctatcaaaaacagctgaaagaggaaagaaaacgtcgtaaattgatgaagaaaatggcagcagaagccagtgctcgtgcaaatgatttcagcaacagcaacctagaagatgatgctactactccaactaatgtttcagtgcctatgcctgacatggtactgccctcatcttttgattctgactaccctagccatcgctatcgtttcctggatacaccaagtgaatggcttgtcagacctgtattggaaacacagggctgggaccatgatgttggttacgagggacttaatgttgaaagattgtttgccgtaaaaggtaaagttcctctatcagtgtctggccagcttacaaaagacaagaaggattgctccctgcaaatggaggttgcaagttcaattaagcatgctgaaggtaagactacttcacttgggcttgatttgcagtctgtcggcagggatatggcatacacaatccgtggcgaatcgagatttaagaacttcaggcgcaacaatacatctgctgggatatctgctacgcttcttggggattcagtatcagctggtatgaagattgaggacaaactgatagtgaacaagcagcttagggtcctggttagcagcggggccatgagtgggaggggagacatggcctatggaggccgccttgaagcaacgatgagagacaaagattacccgattgggcggatgctttccactgttgcattatctgttgtggattggcacggggatctggcaattggctgcaacatccagtctcagatccccgctggaagagctagcaacttggttggccacgctaatctaagcaacaaggggactggccaagtcgggattcgcctcaacagctcggagcatcttgagatcgcactcgtggccctcgtgccgatattccagaacatcatgaagctgttacagaattactcggaatctggctagtccctcgtgccgatgttccagaacatcatgaagctgttacagaattactgagaatccggctagtactttttttttcatgtaagcctgagaaaacagagcatcataggttaaaatctagcttaagctagaactttacttccaattattattttgttcttttgttgccaactttgtaactatgctctcctctgggcttttttttttttaagttggagtagcattcttagggctagtttgggagctacaaaaccgaataggattggagtgactaaaatccccttattcaaatttaaataagaagtggattttagcccctctaatccattttggttttgtagctcctagactagaccttataatgtaagattccccctgagctctttctgatgaagctggattggagaattcatcgtgtcagatttctgggcatgctactgagtttttc

SEQ ID NO: 8085 - DNA, 1479 bp, Zea Mays
atggcggcagcggtggtggataaggtgttcgtcgcgctgccggcggaggtgaaggcggggcagtccacgctggcgtgggctctcgaccgtttcggcggcggcggcggcggcagaaccacggttgtgatcgcacatgtgcatgtcccgccacagatgattccagtgatgggggtcaagttccactctagtaaactgagccccgagcaagtgaaactgttcagaaggattgagcatgagagggtggacaaacagctagacggttatgttcgccagtgctcaaaaatgaaggacgaagctaagtcggagctggggttatacgatgagctgaaagaggcatgcatagcagctgagaacctgatgaagagagccctaaacgaatcttccaggcgccaaaaggcagatggagaagtggcctccgcgcttcagaaagcaaaggaataccaggagttgtactttgaggagacgaggaagcgtgaagagctcgaaggagctcttgcaagagcgcaccgagagatcgcgcggttaatgcaggcgaagcaggtgttcgtggtcgagcgaaacacggcagcggacgaactccaggaggccatgtcagagaggtcgtccctggaaggccacgacgtcgacgaggatgccgttttgcgaacagccggcggtcaagcgactgagcaacaggaggaggaggaggagcatgtccagacacaacacgatctgggcaccggtgaaagggacctggaactggaagcgcggctcaaccagagcaagctggccgcgttctcgccgtcgtccgtcatccagtcgccgtacgacgaagaccgcgtcccggcctgcttcctctgcccgatccttcaggagcccatgagggatccccacgtcgcggcagacgggttcacgtacgagggcgacgccatcagaggctggctggacggagggaacggcgcctcccccgtgaccggccagccgctcgcgcaccgggagctggcaccgaatctcgcgcttggcgccgtgatccaagattacacggtgatgaggcggcggcagtgccggttctgcgattcgcacgacggcgttgctgcgcttcaattttttccatcgcctgtgggctgccagcggtgagctgcgcttggcaggcccagatcacgccgcaccccatttgtgtttggttccaatggtaggactagacgggaggggaggatccattaggtacgattatttggttcagagttaagatttggatcagatcattctagcaccatctcctgttccgttagaattggagggacgaaggagacctcgtggacgtgactgttcccagctgtaatgtaaccaaacacatttgcagtctcgtatacaatttgtgtgtacaagcctacaagacgaggtacttgtatatcggtgattgaataagatgaagaacatgctaataatgcttgtttgaatgtagttgaattcaccttaattcatatatattgttggagg

SEQ ID NO: 8086 - DNA, 1958 bp, Zea Mays
cgcgacctcgcacggtgtcgctgtcccgcgtccaaagtctcttgtgttgtactatcttatacaagtccaacgtctgcgtgttccttatgccaccggacgacaaggaggagctcttctaaaccgaggctcttcacggcgaactctttgcgaagaagatggcggcagcggtggtggataaggtgttcgtcgcgctgccggcggaggtgaaggcggggcagtccacgctggcgtgggctctcgaccgtttcggcggcggcggcggcggcagaaccacggttgtgatcgcacatgtgcatgtcccgccacagatgattccagtgatgggggtcaagttccactctagtaaactgagccccgagcaagtgaaactgttcagaaggattgagcatgagagggtggacaaacagctagacggttatgttcgccagtgctcaaaaatgaaggtcaaatgtgagaaactagtttttgagaaggacgacgttgtggccggtctggttgaactcgtcgtcttgcataaagtcactaggctagttattgcagctgctgcagacaggcaatattcaagaaagatggatagacccaagtgtaggacagcaacagaaatcatgcagagagctgatccatcgtgcaagatctggtttgtttgcaagggacaactgatctgtaccaggggtgtggaagaggaggttgcgccatcagctacaccttttgtccctgatgatcttgatcaccaggctctgcagttagtagtgtctcaccagaaagaggacgaagctaagtcggagctggggttatacgatgagctgaaagaggcatgcatagcagctgagaacctgatgaagagagccctaaacgaatcttccaggcgccaaaaggcagatggagaagtggcctccgcgcttcagaaagcaaaggaataccaggagttgtactttgaggagacgaggaagcgtgaagagctcgaaggagctcttgcaagagcgcaccgagagatcgcgcggttaatgcaggcgaagcaggtgttcgtggtcgagcgaaacacggcagcggacgaactccaggaggccatgtcagagaggtcgtccctggaaggccacgacgtcgacgaggatgccgttttgcgaacagccggcggtcaagcgactgagcaacaggaggaggaggaggagcatgtccagacacaacacgatctgggcaccggtgaaagggacctggaactggaagcgcggctcaaccagagcaagctggccgcgttctcgccgtcgtccgtcatccagtcgccgtacgacgaagaccgcgtcccggcctgcttcctctgcccgatccttcaggagcccatgagggatccccacgtcgcggcagacgggttcacgtacgagggcgacgccatcagaggctggctggacggagggaacggcgcctcccccgtgaccggccagccgctcgcgcaccgggagctggcaccgaatctcgcgcttggcgccgtgatccaagattacacggtgatgaggcggcggcagtgccggttctgcgattcgcacgacggcgttgctgcgcttcaattttttccatcgcctgtgggctgccagcggtgagctgcgcttggcaggcccagatcacgccgcaccccatttgtgtttggttccaatggtaggactagacgggaggggaggatccattaggtacgattatttggttcagagttaagatttggatcagatcattctagcaccatctcctgttccgttagaattggagggacgaaggagacctcgtggacgtgactgttcccagctgtaatgtaaccaaacacatttgcagtctcgtatacaatttgtgtgtacaagcctacaagacgaggtacttgtatatcggtgattgaataagatgaagaacatgctaataatgcttgtttgaatgtagttgaattcaccttaattcatatatattgttggagg

SEQ ID NO: 8087 - DNA, 2737 bp, Zea Mays
catcatcacacctctcgaccgcccccttctctttcatcaatcaaggatcacagagctgccaaagccagaggagcgttatcagagcagggaggaagaagagcgttgtgttcgacgcaggagaatttcgagggacagcgactcgactcgactcgaagctctggagagatctagcggggctccggtgcagccgatgcatggcaactcgcaagggctgagctgctcgtcactggcgtaggaaagaagccgagccgagtaacccaaggcgtgcttgtttctttccatgcctttgcatttggagatggaaatcacatgcgccgtcgcagggctggatagaattcgttttggctctgcgtctaaagaaggttcaaaagagaagggcgtctggatctttagccgtttcaaaaaaaaaaacttccgtctcgtcctttttcagctgctctgcatctttatcagcatgccatgatgtagccatgatttttagtatggagtcgtcgcctcaccgatcccctcaaaagcagcagagctcgtgcagcagcaccatagccatagacaacacacaacaggggcgtttcgccaagtttctcgatcctcacccaagcacaaatgctttcaaaaaataccgcatctgctactacacggattatatatcccttccctggcctacctatgccgtcgtcgccatggacagggacagcagctcgtcggtctcggcgtcggacgggagctcggaggcgggggagcgcggcgggtgctgctcgtcgccgccgtccacgcggagcctcgtcgacacggcgggcaacaacctcatcagccgcaccgcgtccgacgcgtccacgtccctctcggaccggtgcagcagcgtcgacgtcgaccacagcgggccgttccagcccgccgccgccgtggccaagctcatcggccggtcgtccccgccgtccgccgccgcgtcgctcagacggctcagcatcaagccccgcgccgacgtgctcgaccgccgctccaccgaggacgagatggagctggtgaaggagcgcttctctaagctcctgctgggcgaggacatgtccggcggcggcaagggcgtctgcaccgccgtcgccatctccaacgccatcaccaacctctacgcgacggtgttcgggagctgccacaagttggagccgctgccggcggggaagaaggcgatgtggacaagagagatggactgcctcctctccgtctgcgactacatcgtccagttctacccgtccacgcagaccctgcccgatgggaccaaagttgaggtcatggcgaccagaccaaggtcggacatctacatcaaccttcccgcgctcgagaagctcgacgccatgctcatcgacattctggacagcttccagaaggcggagttctggtacgcggacgccgggacgaggtcgttcggctcggtcacctcgtcctcgtcgtcgaggatgtcgtgttcgtcgtcattcaggaggtcggctcaccggaacgacgataagtggtggctgccggtgccctgcgtcccggacgccggcctcaccgacaaggcgcgcaaggacctgcagcagaggcgcgactgcgccaaccagatccacaaggccgctgtctccatcaacagcggcgtcctcggagacatggaggtgccggagtcgttcatggccgtgctccccaagagcggtcgggcaagcgtgggggactcggtgtaccgcgtcatgcttggcgccgacaagttctcgccggagttcctgctcgacacgcttgacatctcgtcggagcacgacgcgctggcgatggccgaccgggtggaggccgccatgtacgtgtggcggcgcaaggctagcggcagccacggcaagctgccgtggagcaaggtcaaggagctcgcggccgacgacgacgacaagaacgtgacgctggccaacagggccgagagcctcctgctctgcatcaagcaccgcttccctggcctgtcgcagaccaccctggacaccagcaagatccagttcaacaaggatgttgggcaagcgatcctggagagctactcgagggtgttggagagcttggctttcaacattgtttcgtggatcgatgatgtccttttcgtcgacaggtcgataaggaaactgagtgataacctcaagtcctgagttctttatcctgcactgaagcttcccagcaaaaaggttttagatgtctgttggtgaagctgcagaagaagggtgcgtgactgtagtagcggtagtagggtgattttgctgacctagagagatgcaagcctctagctttgcaagaatgcacaatgcagagtagcgtgtctgaccaacagtgaacgtgtgtgattttcgtgtcctttttatttttcagctctcgcgctcttagcttggcagcacgaagattggtgaaagggatcaaaatgtccaatagcataaatggagtcattctatttcagttttattgttgtttggttacaaagtaactagaacggagtgactccaattagagaatattctcctcaaattcgaaaccatcccactccaaaaaatcaaccggacggagtcgctccgttctcagcccgctcacacagtcacgctccgcttgcacagtctgcaaccaaaaaaaatagagccgctctgttctagcttaccaaacacagaacagagcggctccgtcctagaattagggatagaacggttccgttctacttggctccttaaccaaacactaccttaaagtc

SEQ ID NO: 8088 - DNA, 2343 bp, Zea Mays
aacaacaaaaaccaagcctggttcaaggtaacgcatcatcacacctctcgaccgcccccttctctttcatcaatcaaggatcacagagctgccaaagccagaggagcgttatcagagcagggaggaagaagagcgttgtgttcgacgcaggagaatttcgagggacagcgactcgactcgactcgaagctctggagagatctagcggggctccggtgcagccgatgcatggcaactcgcaagggctgagctgctcgtcactggcgtaggaaagtgccgtcgtcgccatggacagggacagcagctcgtcggtctcggcgtcggacgggagctcggaggcgggggagcgcggcgggtgctgctcgtcgccgccgtccacgcggagcctcgtcgacacggcgggcaacaacctcatcagccgcaccgcgtccgacgcgtccacgtccctctcggaccggtgcagcagcgtcgacgtcgaccacagcgggccgttccagcccgccgccgccgtggccaagctcatcggccggtcgtccccgccgtccgccgccgcgtcgctcagacggctcagcatcaagccccgcgccgacgtgctcgaccgccgctccaccgaggacgagatggagctggtgaaggagcgcttctctaagctcctgctgggcgaggacatgtccggcggcggcaagggcgtctgcaccgccgtcgccatctccaacgccatcaccaacctctacgcgacggtgttcgggagctgccacaagttggagccgctgccggcggggaagaaggcgatgtggacaagagagatggactgcctcctctccgtctgcgactacatcgtccagttctacccgtccacgcagaccctgcccgatgggaccaaagttgaggtcatggcgaccagaccaaggtcggacatctacatcaaccttcccgcgctcgagaagctcgacgccatgctcatcgacattctggacagcttccagaaggcggagttctggtacgcggacgccgggacgaggtcgttcggctcggtcacctcgtcctcgtcgtcgaggatgtcgtgttcgtcgtcattcaggaggtcggctcaccggaacgacgataagtggtggctgccggtgccctgcgtcccggacgccggcctcaccgacaaggcgcgcaaggacctgcagcagaggcgcgactgcgccaaccagatccacaaggccgctgtctccatcaacagcggcgtcctcggagacatggaggtgccggagtcgttcatggccgtgctccccaagagcggtcgggcaagcgtgggggactcggtgtaccgcgtcatgcttggcgccgacaagttctcgccggagttcctgctcgacacgcttgacatctcgtcggagcacgacgcgctggcgatggccgaccgggtggaggccgccatgtacgtgtggcggcgcaaggctagcggcagccacggcaagctgccgtggagcaaggtcaaggagctcgcggccgacgacgacgacaagaacgtgacgctggccaacagggccgagagcctcctgctctgcatcaagcaccgcttccctggcctgtcgcagaccaccctggacaccagcaagatccagttcaacaaggatgttgggcaagcgatcctggagagctactcgagggtgttggagagcttggctttcaacattgtttcgtggatcgatgatgtccttttcgtcgacaggtcgataaggaaactgagtgataacctcaagtcctgagttctttatcctgcactgaagcttcccagcaaaaaggttttagatgtctgttggtgaagctgcagaagaagggtgcgtgactgtagtagcggtagtagggtgattttgctgacctagagagatgcaagcctctagctttgcaagaatgcacaatgcagagtagcgtgtctgaccaacagtgaacgtgtgtgattttcgtgtcctttttatttttcagctctcgcgctcttagcttggcagcacgaagattggtgaaagggatcaaaatgtccaatagcataaatggagtcattctatttcagttttattgttgtttggttacaaagtaactagaacggagtgactccaattagagaatattctcctcaaattcgaaaccatcccactccaaaaaatcaaccggacggagtcgctccgttctcagcccgctcacacagtcacgctccgcttgcacagtctgcaaccaaaaaaaatagagccgctctgttctagcttaccaaacacagaacagagcggctccgtcctagaattagggatagaacggttccgttctacttggctccttaaccaaacactaccttaaagtc

SEQ ID NO: 8089 - DNA, 3898 bp, Zea Mays
cttttccctgcaccatgcatcgggaattttgcacagcgcagccttttgtaccaaaacgagagctacacagtgccaaagcctccctccctttgagcatttttttatttgttcctaaggaaatctttactcctctactactgcatggacggagggataaagcgatgtagagagagatgatagagagaggccagtaggaggaggaggaaggcaagtcctcggcggggacggggaggccacccccaactttattgcctttttcatgttgtacgctatcatttcgagatcaagacgctgccaggagaataaaaaactctctcctcccccacatccctcctcacaccccctctcatcacaaattcacaagacgagagacagaagaggaggtagtagagagagaagggccgagtaagtaggtgggtagtacgggagcgtaccgaatgatgatgagtccttggactctacaacagccaagcgctatctgaagcgagaagagaagcaaccagcccgtaggacaagacgtgtcgggaggaggaagaacaagtagccagggagcagcagccatcgccattcctgcctggttttgctcctgctgttatgaggagctggactagatgaggggaatgctctttgctggtagcgcacgagaagggcacgcggggacactgctgcaactgcaactgcaacaccaacgacaggggctcgccgccggcaaagtctcaggcgccggcgacctctgggagcccacctcggtgcttgaccgccgacacagccccagcccgagcccgccgacctcggttcccacgctgtcgtcgcccctgggcgccgcgaccgccggtgtggcggccctcgccggtgctaacgccaagaacgtctccccgccgccggtggcggcggcggcatggccagggggaggaggggcggaggaggccgtggcggggggcaaggaggagtggcagctcacaccgcttgacatgggccttggcgccggcgaggggtgggacgcggccgacgccgcggcgccgccggggctcgcccccgaccacaccttcctcaggtggatcatcggcggcgaggacgcgtctgcggccatggggtctgtcatggacccgccggtccttgagctggaccacgcgccgtccatgatgtcgccggcgtttgggtccaccatgccgttcgcgccggccatggaggacgccaagccggtgcccttcggccacacgcccaacttcctgctccaccactgccaccagcaccacccccagccgcacgccgccttcttcggctcgcacccgtccctggacgcggcgccgcagccgaagcgaccacacccgatggccggggcgccggcgccgaagctgccgtctttccctgggcctgtcgcccaggcgggcggcgggttcgcgtcggccttgaagcccaaggcggaggcgggtaacgacgaggcggccgctgcggtggaccagcttgccgaggcggccagacttgccgaggccggcgacgccttcggcgcccgcgagatattggcgcggctcaattatcggctccccgccgtgcccacggccgggacgccgctgctccgctcggccttctacttcaaggaggccctgcgcgttgcgctctccccgaccggcgaggcccttgcgcccccggcggtgtcgacgccgtacgacgtggtcctgaagctcggcgcgtacaaggccttctccgaggtgtcccccgtgctccagttcgcgcacctgacctgcgtgcaggcggtgctggacgagctcggggccgccgggcgcatccacgtgctggacctggacatcggcatgggcgagcagtgggcgtcgctgatgcaggagctggcgcagcgcagccccgcggcgacgctcaaggtgaccgcattggtgtcgccggcgtcgcaccacccgctggagctgaacctcatccacgagaacctgtcgggcttcgcccgcgagctcggcgtgttcctccagttcgcggcgtacaacgtggacgccctggaccccgcggagctggtggccatcaccagcggcgacgccgtggccgtccacctccccgtggggtcggcccacgtggccgcaatgccggccgtgctccgcctcgtgaagcggctcggcgccaaggtggtggtgtccgtggaccgcggctgcgaccgcacggagctgtcgttcagcacgcacctgttacaggcgttccagtcctgcgtgtccctgctggactccatcgacgccgtggggggcgcggacgccgaggcggtcggcaggatcgagcgcttcatggtccagcccgacgtggagcggcgcgtagtgtcgcgccaccgcgcggcagtggccgtggacaagccgccgccgctgccgtggcggaccgtgctcgcgtcggcggggttcgtgccggtgcaggccagcacgttcgccgagtcgcaggccgaggccctactcaagcggatggcgctgatggggttccgcgtcgagaagcgcggcggcgcgctctgcctctactggcagcgcggcgagctggtctccgtgtcggcgtggcggtgctgaccgccgggagtacgccgccgccgccgcaaccaagagccagccgtgaatctaccacaagcccgggttagctaggactaatgatcctactactgcaagcaaaaaaaatattttccaccgtcgtcgtttgtaacgatctcatctggtctggtctcgtctgtctgcttattagtgtgtcctacccgattaatcgtggagtacgtcgtccgttgcctggctttgcagcctcggtgggctctgctcatgttgatttgcggagcgcgccgtggtttgcaggttgtaaaacgtaggcgtggtgcagtgcagtgaccagcgcatcctaccgcccgtcgtgttgctactcttttttttccattgctgtgaaatcaattaatggttatggcgtttgaaaatgtcccgttttctgcaaatcccgcaactaccaaggcatgaatctgaaactagcaaggcgtgttcatacgaaacccatgcaaaaaaaaggtcgtctgagttacagaggaaaaaaaagatcgttcgagaacgcgcgggagcagacacctggcgacgaagaagggcgggtccgggaccggaagagagagaggggtctccctgcaactagacaagtggacggcggagaagaagagtctcccgcagcaatggcgcgagcgaaacagaaaaaacaacaacgatcgggaataaagcggccaccacatgagcgcccccgccggaagagcaagcataaaggcggccggcaaaattttgttcttcacacacggtgagattccgatctgcacttggcggcgagatatatacaggctaggactaggacgctccggttgcttagcctccctcctaagcaagctgtggcatcgggtggcttcagcgaggctctgaatctacctgtccattatcttccccccctcccccgttgattgttccggtatcatcagtcagccagacagaagctgtgcttttcgctaatgctccaggctgacagaagtgtttacgaccattatcttgttccatcagatgctgctggtaccccccctcccccccaaaaaaaagaagctaggatcattcgcaccgctaggatgcaagttctaatcccttgaggttatgttgtatgatctgacagaaagaaagaaataagataaactcgtgcagttaaccctctggcttggtgtgtgcactgcacccaccgctcctcgtcctccacgggctgcccaccgcgaagctcaaaagtgagcgcattacaggcgaagcagagatgctaaaccaagcaagttcccgcgtctactggactcctgccaagacaaacggaggaaccccgtgggagcgagtgtacgttcccggtgtccgtccatgacactgtc

SEQ ID NO: 8090 - DNA, 1438 bp, Zea Mays
gccgtacatgtctgccaccagcacacataaacggctgaatatgttctacacagttcatcagctggaggtgattgataaatgcttcagccatgacacagttgaagagattgttgatgccttggtgagtactgattaagctgttttttactgttcttacatacatcattgtttgattgatttgataatgaatgaaacatgaaatattattcattcatatatactattttgtggcttggtttgtgaccttttgctagcgtctcactatttactgtgaaactttcatgaatcttataattaacctttgatggaaacttaccatatcttcttgatatgattctcatcattgcaattttactgccctgtatggtgttggagtgttctggacttctggtcaacttggtacgatttaaaactaagttccggcataatcaggaaagtgaagcagccagctcaaatgaagaatggtgtatcttggcgctgaaacgattgaaagaggcctctccgttagctttgaaggtttcactgcgatcgatacgcgagggtagatatcagacacttgatgagtgccttgtccgtgagtaccgcatgtccatgaatggaatctcaaagcaattttctcatgaattctgcgagggagtcagagcacgactagtcgacaaggacttcactcctaagtgggatcctcctgcccttgagtatgttacgaatgacatggttgacgcatacttcgcacctcttggcgattcggagcctgagttgaagctgcctatagaatcgcgagaggcatttgtatgatcacaaatcattccaagaaccggatcattgcaaggaccggactgggacctgataaacgtgttataatctgtgtagccattatttttggcagcacaaccagcccgattggaccaactattcacgtgccgtatactcattcagactatcttcgctagcttacctatacatatattcaaactatactttagaaacagtgcaatgtactatgcaaaacggtgcaacagtgttttggttgaccatatgggtgtaacgtacagtagttcatctataaggtcaccaaaaacaccgtttttatactgtatattgtactgtctgtagagtatagtttgaatatcggtataagtacgagtaagctaccagagatgaggttttctgcggtgtgaaactcagcatatcatctgctgatttgttcacatgaatggaaacgaccagtggagtacgcgaatcatttctgatttggagtctgttcttcacgagggaaaccccgtctacaattctctggctctgtattccactgccactcacttgtcagcaatagcaggctgttgcagatgtttttccttttctttttgtttgtgcgactccttgcatcgaatcactagctaggatgacctaggtgcaacgttgataacatgaatataac

SEQ ID NO: 8091 - DNA, 1296 bp, Zea Mays
cttatccctgctactttttaggggaatatgtggccttgaccggtgaaaagcttaatggaacagatatgattgctcttggccttgctacacactatttcatgagtggccatctggatctgatcgatgaacgacttgcaaagttagtaactgatgatccatcagttattgattcgtcccttgcacaatatggagacatggtttatccggacaaaaaaagcattgttcataggctggaggtgattgataaatgcttcagccatgacacagttgaagagattgttgatgccttggaaagtgaagcagccagctcaaatgaagaatggtgtatcttggcgctgaaacgattgaaagaggcctctccgttagctttgaaggtttcactgcgatcgatacgcgagggtagatatcagacacttgatgagtgccttgtccgtgagtaccgcatgtccatgaatggaatctcaaagcaattttctcatgaattctgcgagggagtcagagcacgactagtcgacaaggacttcactcctaagtgggatcctcctgcccttgagtatgttacgaatgacatggttgacgcatacttcgcacctcttggcgattcggagcctgagttgaagctgcctatagaatcgcgagaggcatttgtatgatcacaaatcattccaagaaccggatcattgcaaggaccggactgggacctgataaacgtgttataatctgtgtagccattatttttggcagcacaaccagcccgattggaccaactattcacgtgccgtatactcattcagactatcttcgctagcttacctatacatatattcaaactatactttagaaacagtgcaatgtactatgcaaaacggtgcaacagtgttttggttgaccatatgggtgtaacgtacagtagttcatctataaggtcaccaaaaacaccgtttttatactgtatattgtactgtctgtagagtatagtttgaatatcggtataagtacgagtaagctaccagagatgaggttttctgcggtgtgaaactcagcatatcatctgctgatttgttcacatgaatggaaacgaccagtggagtacgcgaatcatttctgatttggagtctgttcttcacgagggaaaccccgtctacaattctctggctctgtattccactgccactcacttgtcagcaatagcaggctgttgcagatgtttttccttttctttttgtttgtgcgactccttgcatcgaatcactagctaggatgacctaggtgcaacgttgataacatgaatataac

SEQ ID NO: 8092 - DNA, 2254 bp, Zea Mays
cttccactggagggccacacttctcttttgaggaccagtccaccgtccactcccagagtccaaaaccctacgatccgcgccaccatgccgcgcctcgccgccgccgccgccgtctcacgccgcgccggcgaggccctgcgccgcggcgcgtttgggggactgcggcctctctcctccctgcaaccgttaaacgccgcctccagcgacgaggtgctcgttgaaggaaagacaagtgcgcgcgctgccgtgctcaaccgccctggctacctcaacgccctcaccaccaccatgggagctaggctcaataaattttatcaatcatgggaggacaacccagacattggctttgtcatgatgaagcggccgagcattctgtgctggtggggatgttgttagattacatgaacttatcagtgaaggcaagctggaggaatgtaaggattttttcaagactttgtacatgttcatttattttctgggcacgtacttgaaaccacatgttgccattcttgatggcattactatgggtggtggtggaggtgtttccatccctggaacattccgtgttgcaactgataggacagtctttgcaactccagaagttcatattggattccatcctgatgctgcagcctccttttatttgtcgcatctaactggccatgttggggaatatgtggccttgaccggtgaaaagcttaatggaacagatatgattgctcttggccttgctacacactatttcatgagtggccatctggatctgatcgatgaacgacttgcaaagttagtaactgatgatccatcagttattgattcgtcccttgcacaatatggagacatggtttatccggacaaaaaaagcattgttcataggctggaggtgattgataaatgcttcagccatgacacagttgaagagattgttgatgccttggtgagtactgattaagctgttttttactgttcttacatacatcattgtttgattgatttgataatgaatgaaacatgaaatattattcattcatatatactattttgtggcttggtttgtgaccttttgctagcgtctcactatttactgtgaaactttcatgaatcttataattaacctttgatggaaacttaccatatcttcttgatatgattctcatcattgcaattttactgccctgtatggtgttggagtgttctggacttctggtcaacttggtacgatttaaaactaagttccggcataatcaggaaagtgaagcagccagctcaaatgaagaatggtgtatcttggcgctgaaacgattgaaagaggcctctccgttagctttgaaggtttcactgcgatcgatacgcgagggtagatatcagacacttgatgagtgccttgtccgtgagtaccgcatgtccatgaatggaatctcaaagcaattttctcatgaattctgcgagggagtcagagcacgactagtcgacaaggacttcactcctaagtgggatcctcctgcccttgagtatgttacgaatgacatggttgacgcatacttcgcacctcttggcgattcggagcctgagttgaagctgcctatagaatcgcgagaggcatttgtatgatcacaaatcattccaagaaccggatcattgcaaggaccggactgggacctgataaacgtgttataatctgtgtagccattatttttggcagcacaaccagcccgattggaccaactattcacgtgccgtatactcattcagactatcttcgctagcttacctatacatatattcaaactatactttagaaacagtgcaatgtactatgcaaaacggtgcaacagtgttttggttgaccatatgggtgtaacgtacagtagttcatctataaggtcaccaaaaacaccgtttttatactgtatattgtactgtctgtagagtatagtttgaatatcggtataagtacgagtaagctaccagagatgaggttttctgcggtgtgaaactcagcatatcatctgctgatttgttcacatgaatggaaacgaccagtggagtacgcgaatcatttctgatttggagtctgttcttcacgagggaaaccccgtctacaattctctggctctgtattccactgccactcacttgtcagcaatagcaggctgttgcagatgtttttccttttctttttgtttgtgcgactccttgcatcgaatcactagctaggatgacctaggtgcaacgttgataacatgaatataac

SEQ ID NO: 8093 - DNA, 2259 bp, Zea Mays
cttccactggagggccacacttctcttttgaggaccagtccaccgtccactcccagagtccaaaaccctacgatccgcgccaccatgccgcgcctcgccgccgccgccgccgtctcacgccgcgccggcgaggccctgcgccgcggcgcgtttgggggactgcggcctctctcctccctgcaaccgttaaacgccgcctccagcgacgaggtgctcgttgaaggaaagacaagtgcgcgcgctgccgtgctcaaccgccctggctacctcaacgccctcaccaccaccatgggagctaggctcaataaattttatcaatcatgggaggacaacccagacattggctttgtcatgatgaagggcagcggccgagcattctgtgctggtggggatgttgttagattacatgaacttatcagtgaaggcaagctggaggaatgtaaggattttttcaagactttgtacatgttcatttattttctgggcacgtacttgaaaccacatgttgccattcttgatggcattactatgggtggtggtggaggtgtttccatccctggaacattccgtgttgcaactgataggacagtctttgcaactccagaagttcatattggattccatcctgatgctgcagcctccttttatttgtcgcatctaactggccatgttggggaatatgtggccttgaccggtgaaaagcttaatggaacagatatgattgctcttggccttgctacacactatttcatgagtggccatctggatctgatcgatgaacgacttgcaaagttagtaactgatgatccatcagttattgattcgtcccttgcacaatatggagacatggtttatccggacaaaaaaagcattgttcataggctggaggtgattgataaatgcttcagccatgacacagttgaagagattgttgatgccttggtgagtactgattaagctgttttttactgttcttacatacatcattgtttgattgatttgataatgaatgaaacatgaaatattattcattcatatatactattttgtggcttggtttgtgaccttttgctagcgtctcactatttactgtgaaactttcatgaatcttataattaacctttgatggaaacttaccatatcttcttgatatgattctcatcattgcaattttactgccctgtatggtgttggagtgttctggacttctggtcaacttggtacgatttaaaactaagttccggcataatcaggaaagtgaagcagccagctcaaatgaagaatggtgtatcttggcgctgaaacgattgaaagaggcctctccgttagctttgaaggtttcactgcgatcgatacgcgagggtagatatcagacacttgatgagtgccttgtccgtgagtaccgcatgtccatgaatggaatctcaaagcaattttctcatgaattctgcgagggagtcagagcacgactagtcgacaaggacttcactcctaagtgggatcctcctgcccttgagtatgttacgaatgacatggttgacgcatacttcgcacctcttggcgattcggagcctgagttgaagctgcctatagaatcgcgagaggcatttgtatgatcacaaatcattccaagaaccggatcattgcaaggaccggactgggacctgataaacgtgttataatctgtgtagccattatttttggcagcacaaccagcccgattggaccaactattcacgtgccgtatactcattcagactatcttcgctagcttacctatacatatattcaaactatactttagaaacagtgcaatgtactatgcaaaacggtgcaacagtgttttggttgaccatatgggtgtaacgtacagtagttcatctataaggtcaccaaaaacaccgtttttatactgtatattgtactgtctgtagagtatagtttgaatatcggtataagtacgagtaagctaccagagatgaggttttctgcggtgtgaaactcagcatatcatctgctgatttgttcacatgaatggaaacgaccagtggagtacgcgaatcatttctgatttggagtctgttcttcacgagggaaaccccgtctacaattctctggctctgtattccactgccactcacttgtcagcaatagcaggctgttgcagatgtttttccttttctttttgtttgtgcgactccttgcatcgaatcactagctaggatgacctaggtgcaacgttgataacatgaatataac

SEQ ID NO: 8094 - DNA, 1883 bp, Zea Mays
cttccactggagggccacacttctcttttgaggaccagtccaccgtccactcccagagtccaaaaccctacgatccgcgccaccatgccgcgcctcgccgccgccgccgccgtctcacgccgcgccggcgaggccctgcgccgcggcgcgtttgggggactgcggcctctctcctccctgcaaccgttaaacgccgcctccagcgacgaggtgctcgttgaaggaaagacaagtgcgcgcgctgccgtgctcaaccgccctggctacctcaacgccctcaccaccaccatgggagctaggctcaataaattttatcaatcatgggaggacaacccagacattggctttgtcatgatgaagggcagcggccgagcattctgtgctggtggggatgttgttagattacatgaacttatcagtgaaggcaagctggaggaatgttgccattcttgatggcattactatgggtggtggtggaggtgtttccatccctggaacattccgtgttgcaactgataggacagtctttgcaactccagaagttcatattggattccatcctgatgctgcagcctccttttatttgtcgcatctaactggccatgttggggaatatgtggccttgaccggtgaaaagcttaatggaacagatatgattgctcttggccttgctacacactatttcatgagtggccatctggatctgatcgatgaacgacttgcaaagttagtaactgatgatccatcagttattgattcgtcccttgcacaatatggagacatggtttatccggacaaaaaaagcattgttcataggctggaggtgattgataaatgcttcagccatgacacagttgaagagattgttgatgccttggaaagtgaagcagccagctcaaatgaagaatggtgtatcttggcgctgaaacgattgaaagaggcctctccgttagctttgaaggtttcactgcgatcgatacgcgagggtagatatcagacacttgatgagtgccttgtccgtgagtaccgcatgtccatgaatggaatctcaaagcaattttctcatgaattctgcgagggagtcagagcacgactagtcgacaaggacttcactcctaagtgggatcctcctgcccttgagtatgttacgaatgacatggttgacgcatacttcgcacctcttggcgattcggagcctgagttgaagctgcctatagaatcgcgagaggcatttgtatgatcacaaatcattccaagaaccggatcattgcaaggaccggactgggacctgataaacgtgttataatctgtgtagccattatttttggcagcacaaccagcccgattggaccaactattcacgtgccgtatactcattcagactatcttcgctagcttacctatacatatattcaaactatactttagaaacagtgcaatgtactatgcaaaacggtgcaacagtgttttggttgaccatatgggtgtaacgtacagtagttcatctataaggtcaccaaaaacaccgtttttatactgtatattgtactgtctgtagagtatagtttgaatatcggtataagtacgagtaagctaccagagatgaggttttctgcggtgtgaaactcagcatatcatctgctgatttgttcacatgaatggaaacgaccagtggagtacgcgaatcatttctgatttggagtctgttcttcacgagggaaaccccgtctacaattctctggctctgtattccactgccactcacttgtcagcaatagcaggctgttgcagatgtttttccttttctttttgtttgtgcgactccttgcatcgaatcactagctaggatgacctaggtgcaacgttgataacatgaatataac

SEQ ID NO: 8095 - DNA, 2005 bp, Zea Mays
cttccactggagggccacacttctcttttgaggaccagtccaccgtccactcccagagtccaaaaccctacgatccgcgccaccatgccgcgcctcgccgccgccgccgccgtctcacgccgcgccggcgaggccctgcgccgcggcgcgtttgggggactgcggcctctctcctccctgcaaccgttaaacgccgcctccagcgacgaggtgctcgttgaaggaaagacaagtgcgcgcgctgccgtgctcaaccgccctggctacctcaacgccctcaccaccaccatgggagctaggctcaataaattttatcaatcatgggaggacaacccagacattggctttgtcatgatgaagggcagcggccgagcattctgtgctggtggggatgttgttagattacatgaacttatcagtgaaggcaagctggaggaatgtaaggattttttcaagactttgtacatgttcatttattttctgggcacgtacttgaaaccacatgttgccattcttgatggcattactatgggtggtggtggaggtgtttccatccctggaacattccgtgttgcaactgataggacagtctttgcaactccagaagttcatattggattccatcctgatgctgcagcctccttttatttgtcgcatctaactggccatgttggggaatatgtggccttgaccggtgaaaagcttaatggaacagatatgattgctcttggccttgctacacactatttcatgagtggccatctggatctgatcgatgaacgacttgcaaagttagtaactgatgatccatcagttattgattcgtcccttgcacaatatggagacatggtttatccggacaaaaaaagcattgttcataggctggaggtgattgataaatgcttcagccatgacacagttgaagagattgttgatgccttgtgttctggacttctggtcaacttggtacgatttaaaactaagttccggcataatcaggaaagtgaagcagccagctcaaatgaagaatggtgtatcttggcgctgaaacgattgaaagaggcctctccgttagctttgaaggtttcactgcgatcgatacgcgagggtagatatcagacacttgatgagtgccttgtccgtgagtaccgcatgtccatgaatggaatctcaaagcaattttctcatgaattctgcgagggagtcagagcacgactagtcgacaaggacttcactcctaagtgggatcctcctgcccttgagtatgttacgaatgacatggttgacgcatacttcgcacctcttggcgattcggagcctgagttgaagctgcctatagaatcgcgagaggcatttgtatgatcacaaatcattccaagaaccggatcattgcaaggaccggactgggacctgataaacgtgttataatctgtgtagccattatttttggcagcacaaccagcccgattggaccaactattcacgtgccgtatactcattcagactatcttcgctagcttacctatacatatattcaaactatactttagaaacagtgcaatgtactatgcaaaacggtgcaacagtgttttggttgaccatatgggtgtaacgtacagtagttcatctataaggtcaccaaaaacaccgtttttatactgtatattgtactgtctgtagagtatagtttgaatatcggtataagtacgagtaagctaccagagatgaggttttctgcggtgtgaaactcagcatatcatctgctgatttgttcacatgaatggaaacgaccagtggagtacgcgaatcatttctgatttggagtctgttcttcacgagggaaaccccgtctacaattctctggctctgtattccactgccactcacttgtcagcaatagcaggctgttgcagatgtttttccttttctttttgtttgtgcgactccttgcatcgaatcactagctaggatgacctaggtgcaacgttgataacatgaatataac

SEQ ID NO: 8096 - DNA, 1941 bp, Zea Mays
cttccactggagggccacacttctcttttgaggaccagtccaccgtccactcccagagtccaaaaccctacgatccgcgccaccatgccgcgcctcgccgccgccgccgccgtctcacgccgcgccggcgaggccctgcgccgcggcgcgtttgggggactgcggcctctctcctccctgcaaccgttaaacgccgcctccagcgacgaggtgctcgttgaaggaaagacaagtgcgcgcgctgccgtgctcaaccgccctggctacctcaacgccctcaccaccaccatgggagctaggctcaataaattttatcaatcatgggaggacaacccagacattggctttgtcatgatgaaggcaagctggaggaatgtaaggattttttcaagactttgtacatgttcatttattttctgggcacgtacttgaaaccacatgttgccattcttgatggcattactatgggtggtggtggaggtgtttccatccctggaacattccgtgttgcaactgataggacagtctttgcaactccagaagttcatattggattccatcctgatgctgcagcctccttttatttgtcgcatctaactggccatgttggggaatatgtggccttgaccggtgaaaagcttaatggaacagatatgattgctcttggccttgctacacactatttcatgagtggccatctggatctgatcgatgaacgacttgcaaagttagtaactgatgatccatcagttattgattcgtcccttgcacaatatggagacatggtttatccggacaaaaaaagcattgttcataggctggaggtgattgataaatgcttcagccatgacacagttgaagagattgttgatgccttgtgttctggacttctggtcaacttggtacgatttaaaactaagttccggcataatcaggaaagtgaagcagccagctcaaatgaagaatggtgtatcttggcgctgaaacgattgaaagaggcctctccgttagctttgaaggtttcactgcgatcgatacgcgagggtagatatcagacacttgatgagtgccttgtccgtgagtaccgcatgtccatgaatggaatctcaaagcaattttctcatgaattctgcgagggagtcagagcacgactagtcgacaaggacttcactcctaagtgggatcctcctgcccttgagtatgttacgaatgacatggttgacgcatacttcgcacctcttggcgattcggagcctgagttgaagctgcctatagaatcgcgagaggcatttgtatgatcacaaatcattccaagaaccggatcattgcaaggaccggactgggacctgataaacgtgttataatctgtgtagccattatttttggcagcacaaccagcccgattggaccaactattcacgtgccgtatactcattcagactatcttcgctagcttacctatacatatattcaaactatactttagaaacagtgcaatgtactatgcaaaacggtgcaacagtgttttggttgaccatatgggtgtaacgtacagtagttcatctataaggtcaccaaaaacaccgtttttatactgtatattgtactgtctgtagagtatagtttgaatatcggtataagtacgagtaagctaccagagatgaggttttctgcggtgtgaaactcagcatatcatctgctgatttgttcacatgaatggaaacgaccagtggagtacgcgaatcatttctgatttggagtctgttcttcacgagggaaaccccgtctacaattctctggctctgtattccactgccactcacttgtcagcaatagcaggctgttgcagatgtttttccttttctttttgtttgtgcgactccttgcatcgaatcactagctaggatgacctaggtgcaacgttgataacatgaatataac

SEQ ID NO: 8097 - DNA, 2213 bp, Zea Mays
gtttcttctcatcacggcacttccactggagggccacacttctcttttgaggaccagtccaccgtccactcccagagtccaaaaccctacgatccgcgccaccatgccgcgcctcgccgccgccgccgccgtctcacgccgcgccggcgaggccctgcgccgcggcgcgtttgggggactgcggcctctctcctccctgcaaccgttaaacgccgcctccagcgacgaggtgctcgttgaaggaaagacaagtgcgcgcgctgccgtgctcaaccgccctggctacctcaacgccctcaccaccaccatgggagctaggctcaataaattttatcaatcatgggaggacaacccagacattggctttgtcatgatgaagggcagcggccgagcattctgtgctggtggggatgttgttagattacatgaacttatcagtgaaggcaagctggaggaatgttgccattcttgatggcattactatgggtggtggtggaggtgtttccatccctggaacattccgtgttgcaactgataggacagtctttgcaactccagaagttcatattggattccatcctgatgctgcagcctccttttatttgtcgcatctaactggccatgttggggaatatgtggccttgaccggtgaaaagcttaatggaacagatatgattgctcttggccttgctacacactatttcatgagtggccatctggatctgatcgatgaacgacttgcaaagttagtaactgatgatccatcagttattgattcgtcccttgcacaatatggagacatggtttatccggacaaaaaaagcattgttcataggctggaggtgattgataaatgcttcagccatgacacagttgaagagattgttgatgccttggtgagtactgattaagctgttttttactgttcttacatacatcattgtttgattgatttgataatgaatgaaacatgaaatattattcattcatatatactattttgtggcttggtttgtgaccttttgctagcgtctcactatttactgtgaaactttcatgaatcttataattaacctttgatggaaacttaccatatcttcttgatatgattctcatcattgcaattttactgccctgtatggtgttggagtgttctggacttctggtcaacttggtacgatttaaaactaagttccggcataatcaggaaagtgaagcagccagctcaaatgaagaatggtgtatcttggcgctgaaacgattgaaagaggcctctccgttagctttgaaggtttcactgcgatcgatacgcgagggtagatatcagacacttgatgagtgccttgtccgtgagtaccgcatgtccatgaatggaatctcaaagcaattttctcatgaattctgcgagggagtcagagcacgactagtcgacaaggacttcactcctaagtgggatcctcctgcccttgagtatgttacgaatgacatggttgacgcatacttcgcacctcttggcgattcggagcctgagttgaagctgcctatagaatcgcgagaggcatttgtatgatcacaaatcattccaagaaccggatcattgcaaggaccggactgggacctgataaacgtgttataatctgtgtagccattatttttggcagcacaaccagcccgattggaccaactattcacgtgccgtatactcattcagactatcttcgctagcttacctatacatatattcaaactatactttagaaacagtgcaatgtactatgcaaaacggtgcaacagtgttttggttgaccatatgggtgtaacgtacagtagttcatctataaggtcaccaaaaacaccgtttttatactgtatattgtactgtctgtagagtatagtttgaatatcggtataagtacgagtaagctaccagagatgaggttttctgcggtgtgaaactcagcatatcatctgctgatttgttcacatgaatggaaacgaccagtggagtacgcgaatcatttctgatttggagtctgttcttcacgagggaaaccccgtctacaattctctggctctgtattccactgccactcacttgtcagcaatagcaggctgttgcagatgtttttccttttctttttgtttgtgcgactccttgcatcgaatcactagctaggatgacctaggtgcaacgttgataacatgaatataac

SEQ ID NO: 8098 - DNA, 2231 bp, Zea Mays
aatcaggcaactcaacttgatagatcaaaggatgaaggtgagaatgaatcttacagttcaaccatatatcctcttccggacaatgtaaatatcaactccagtagatcgatcagtcggtgtcctagccatggcatcagaatagcaatggacagctgcgacagaaactcaactagcagaatcacagggaaggatattaagcaggcgattatgttcagtgcctctttgaacaagctcacattaaaccaagatgaggccaccgaatacacaaatttgatcctagaagaacttcagacaggtcaaggagtcctccagatgaatgtcatgagcaagggcctgtcaagggatctccaaccaacctgcgggccaataccagtgccaatgaaatgcagccgacagcgacatatacttactgcaaccgtagtcttcttccaagctcactggaggcgtatatttgtggttttcttgtggctcatggcatgtgctgcactcttcacatggaagttcatgcagtacagacagcggttggctttcgaggtaatggggtactgcctgtcgacagccaagggggctgcagagacgctcaagctcaacatggccattgtgctcctacctgtttgccgcaacacggtcacttggctcaggagaagccgtgttatcaactcggtcatcccatttaatgacaatattaacttccacaagcttgttgcagcgggaattgtgatcggtgtaatccttcatggaggcatccacctggcatgcgacttcccaaggatcacaaggacagataaggccttctttggacgcacaattgccgctgactttgggtaccaccagccatcctacctggagatagtggtatcaaccgaggggacaactggtatagcaatggtggtactaatgtttgtcgcattcttgcttgctagtagtccttcgagaagaaatccaggaatgctgccacctctcgtcagacagttagctgggttcaatgccttctggtactcgcaccatgtgttcatcgctgtctatgtgctcctcattgtgcattccatgttcctattcctagcaaaggatgtagcagagaagacgacgtggatgtatgtcgcaattcctgtggtgatctacattggagaacggatgttcaggatggtcagatctatggtgttcgatgtcaagatcctcaatgccacagtttatccagggatggtacttgcactcaaggtgacaaagcctccaggttttcggtatcaaagtggaatgtatgtatttgtccaatgtccagaagtatcaaagtttgaatggcacccattttcccttacatctgctccagacgatgatcacttgagcatccatataagatctcttggtgattggagctaccaaatgtatgatgtcttccaacagatgctactttccagcaactccagcatgcctaaaatattctttgatggtccctacggtgcagcgtcacaggatcactcaaagggcatggcaacttaaattatcactctgaccgactgaagaaggcctacttttattgggtgacaagagagcaaggatcctttgagtggttcagggatatcatgaaagaggtttcggttctagacagcaagcagggtgtgatagaaatgtataactacctgacaagtgtctaccaagaaggtgataagcggtcgatgctaataagtgcgattcaagcacttcattttgcacgccatggcattgatatcatctcaaaaactcctgggttttctactgtggtccggacgatttgggaaggcagctggagaagctctgccacaaagtgaacacaaaaacattcacgcgatttgtgttccacaaggagcatttctaataatagagactagcatagatcaactccttaggaacaaacctgtcaagtatgatctcaaagctgccaagcacttcatttttttcgcatcactccttcctatcttttgctttagtatctctgtcttcatttaaccattataaagctgatcttacttgaggagctttgtatctaactagaaaaaaacagcgccctatcgggcgcttagacgatttcttgaatgtgatctttgtgatttttttttcttttcagctttcagtgtgcaccctaatactcagaacaagtctactattatagagatggacgatgaaactttaccaatatagccattctaccgctgtccaaacagtgtaatggacatatgttcacaaatagaccgggg

SEQ ID NO: 8099 - DNA, 2330 bp, Zea Mays
ctggcagctggcattgggaaaatcaggcaactcaacttgatagatcaaaggatgaaggtgagaatgaatcttacagttcaaccatatatcctcttccggacaatgtaaatatcaactccagtagatcgatcagtcggtgtcctagccatggcatcagaatagcaatggacagctgcgacagaaactcaactagcagaatcacagggaaggatattaagcaggcgattatgttcagtgcctctttgaacaagctcacattaaaccaagatgaggccaccgaatacacaaatttgatcctagaagaacttcagacaggtcaaggagtcctccagatgaatgtcatgagcaagggcctgtcaagggatctccaaccaacctgcgggccaataccagtgccaatgaaatgcagccgacagcgacatatacttactgcaaccgtagtcttcttccaagctcactggaggcgtatatttgtggttttcttgtggctcatggcatgtgctgcactcttcacatggaagttcatgcagtacagacagcggttggctttcgaggtaatggggtactgcctgtcgacagccaagggggctgcagagacgctcaagctcaacatggccattgtgctcctacctgtttgccgcaacacggtcacttggctcaggagaagccgtgttatcaactcggtcatcccatttaatgacaatattaacttccacaagcttgttgcagcgggaattgtgatcggtgtaatccttcatggaggcatccacctggcatgcgacttcccaaggatcacaaggacagataaggccttctttggacgcacaattgccgctgactttgggtaccaccagccatcctacctggagatagtggtatcaaccgaggggacaactggtatagcaatggtggtactaatgtttgtcgcattcttgcttgctagtagtccttcgagaagaaatccaggaatgctgccacctctcgtcagacagttagctgggttcaatgccttctggtactcgcaccatgtgttcatcgctgtctatgtgctcctcattgtgcattccatgttcctattcctagcaaaggatgtagcagagaagacgacgtggatgtatgtcgcaattcctgtggtgatctacattggagaacggatgttcaggatggtcagatctatggtgttcgatgtcaagatcctcaatgccacagtttatccagggatggtacttgcactcaaggtgacaaagcctccaggttttcggtatcaaagtggaatgtatgtatttgtccaatgtccagaagtatcaaagtttgaatggcacccattttcccttacatctgctccagacgatgatcacttgagcatccatataagatctcttggtgattggagctaccaaatgtatgatgtcttccaacagatgctactttccagcaactccagcatgcctaaaatattctttgatggtccctacggtgcagcgtcacaggatcactcaaagggcatggcaacttaaattatcactctgaccgactgaagaaggcctacttttattgggtgacaagagagcaaggatcctttgagtggttcagggatatcatgaaagaggtttcggttctagacagcaagcagggtgtgatagaaatgtataactacctgacaagtgtctaccaagaaggtgataagcggtcgatgctaataagtgcgattcaagcacttcattttgcacgccatggcattgatatcatctcaaaaactcctgttcatacgcacttttcgaggccaaactggcctagagtgctacatggccttgcaagaaggcatatcggggagaggataggggttttctactgtggtccggacgatttgggaaggcagctggagaagctctgccacaaagtgaacacaaaaacattcacgcgatttgtgttccacaaggagcatttctaataatagagactagcatagatcaactccttaggaacaaacctgtcaagtatgatctcaaagctgccaagcacttcatttttttcgcatcactccttcctatcttttgctttagtatctctgtcttcatttaaccattataaagctgatcttacttgaggagctttgtatctaactagaaaaaaacagcgccctatcgggcgcttagacgatttcttgaatgtgatctttgtgatttttttttcttttcagctttcagtgtgcaccctaatactcagaacaagtctactattatagagatggacgatgaaactttaccaatatagccattctaccgctgtccaaacagtgtaatggacatatgttcacaaatagaccgggg

SEQ ID NO: 8100 - DNA, 2408 bp, Zea Mays
ctggcagctggcattgggaaaatcaggcaactcaacttgatagatcaaaggatgaaggtgagaatgaatcttacagttcaaccatatatcctcttccggacaatgtaaatatcaactccagtagatcgatcagtcggtgtcctagccatggcatcagaatagcaatggacagctgcgacagaaactcaactagcagaatcacagggaaggatattaagcaggcgattatgttcagtgcctctttgaacaagctcacattaaaccaagatgaggccaccgaatacacaaatttgatcctagaagaacttcagacaggtcaaggagtcctccagatgaatgtcatgagcaagggcctgtcaagggatctccaaccaacctgcgggccaataccagtgccaatgaaatgcagccgacagcgacatatacttactgcaaccgtagtcttcttccaagctcactggaggcgtatatttgtggttttcttgtggctcatggcatgtgctgcactcttcacatggaagttcatgcagtacagacagcggttggctttcgaggtaatggggtactgcctgtcgacagccaagggggctgcagagacgctcaagctcaacatggccattgtgctcctacctgtttgccgcaacacggtcacttggctcaggagaagccgtgttatcaactcggtcatcccatttaatgacaatattaacttccacaagcgggaattgtgatcggtgtaatccttcatggaggcatccacctggcatgcgacttcccaaggatcacaaggacagataaggccttctttggacgcacaattgccgctgactttgggtaccaccagccatcctacctggagatagtggtatcaaccgaggggacaactggtatagcaatggtggtactaatgtttgtcgcattcttgcttgctagtagtccttcgagaagaaatccaggaatgctgccacctctcgtcagacagttagctgggttcaatgccttctggtactcgcaccatgtgttcatcgctgtctatgtgctcctcattgtgcattccatgttcctattcctagcaaaggatgtagcagagaagacgacgtggatgtatgtcgcaattcctgtggtgatctacattggagaacggatgttcaggatggtcagatctatggtgttcgatgtcaagatcctcaatgccacagtttatccagggatggtacttgcactcaaggtgacaaagcctccaggttttcggtatcaaagtggaatgtatgtatttgtccaatgtccagaagtatcaaagtttgaatggcacccattttcccttacatctgctccagacgatgatcacttgagcatccatataagatctcttggtgattggagctaccaaatgtatgatgtcttccaacagatgctactttccagcaactccagcatgcctaaaatattctttgatggtccctacggtgcagcgtcacaggatcactcaaagtacgaaattatattgttaattggacttggaataggagcaacgcctttcataagtgttctcaaagacattgccaatggattagataaggggcatggcaacttaaattatcactctgaccgactgaagaaggcctacttttattgggtgacaagagagcaaggatcctttgagtggttcagggatatcatgaaagaggtttcggttctagacagcaagcagggtgtgatagaaatgtataactacctgacaagtgtctaccaagaaggtgataagcggtcgatgctaataagtgcgattcaagcacttcattttgcacgccatggcattgatatcatctcaaaaactcctgttcatacgcacttttcgaggccaaactggcctagagtgctacatggccttgcaagaaggcatatcggggagaggataggggttttctactgtggtccggacgatttgggaaggcagctggagaagctctgccacaaagtgaacacaaaaacattcacgcgatttgtgttccacaaggagcatttctaataatagagactagcatagatcaactccttaggaacaaacctgtcaagtatgatctcaaagctgccaagcacttcatttttttcgcatcactccttcctatcttttgctttagtatctctgtcttcatttaaccattataaagctgatcttacttgaggagctttgtatctaactagaaaaaaacagcgccctatcgggcgcttagacgatttcttgaatgtgatctttgtgatttttttttcttttcagctttcagtgtgcaccctaatactcagaacaagtctactattatagagatggacgatgaaactttaccaatatagccattctaccgctgtccaaacagtgtaatggacatatgttcacaaatagaccgggg

SEQ ID NO: 8101 - DNA, 2486 bp, Zea Mays
atcatggatagaggaggcgtggcgggggcgcatgcgtccgcggtgagaatgaatcttacagttcaaccatatatcctcttccggacaatgtaaatatcaactccagtagatcgatcagtcggtgtcctagccatggcatcagaatagcaatggacagctgcgacagaaactcaactagcagaatcacagggaaggatattaagcaggcgattatgttcagtgcctctttgaacaagctcacattaaaccaagatgaggccaccgaatacacaaatttgatcctagaagaacttcagacaggtcaaggagtcctccagatgaatgtcatgagcaagggcctgtcaagggatctccaaccaacctgcgggccaataccagtgccaatgaaatgcagccgacagcgacatatacttactgcaaccgtagtcttcttccaagctcactggaggcgtatatttgtggttttcttgtggctcatggcatgtgctgcactcttcacatggaagttcatgcagtacagacagcggttggctttcgaggtaatggggtactgcctgtcgacagccaagggggctgcagagacgctcaagctcaacatggccattgtgctcctacctgtttgccgcaacacggtcacttggctcaggagaagccgtgttatcaactcggtcatcccatttaatgacaatattaacttccacaagcttgttgcagcgggaattgtgatcggtgtaatccttcatggaggcatccacctggcatgcgacttcccaaggatcacaaggacagataaggccttctttggacgcacaattgccgctgactttgggtaccaccagccatcctacctggagatagtggtatcaaccgaggggacaactggtatagcaatggtggtactaatgtttgtcgcattcttgcttgctagtagtccttcgagaagaaatccaggaatgctgccacctctcgtcagacagttagctgggttcaatgccttctggtactcgcaccatgtgttcatcgctgtctatgtgctcctcattgtgcattccatgttcctattcctagcaaaggatgtagcagagaagacgacgtggatgtatgtcgcaattcctgtggtgatctacattggagaacggatgttcaggatggtcagatctatggtgttcgatgtcaagatcctcaatgccacagtttatccagggatggtacttgcactcaaggtgacaaagcctccaggttttcggtatcaaagtggaatgtatgtatttgtccaatgtccagaagtatcaaagtttgaatggcacccattttcccttacatctgctccagacgatgatcacttgagcatccatataagatctcttggtgattggagctaccaaatgtatgatgtcttccaacagatgctactttccagcaactccagcatgcctaaaatattctttgatggtccctacggtgcagcgtcacaggatcactcaaagtacgaaattatattgttaattggacttggaataggagcaacgcctttcataagtgttctcaaagacattgccaatggattagataaggcaatgactgcaccttcatgatatgcaatttacgtctatcatatcagctgaaaatctatcatatttatctgaaactatctcaggggcatggcaacttaaattatcactctgaccgactgaagaaggcctacttttattgggtgacaagagagcaaggatcctttgagtggttcagggatatcatgaaagaggtttcggttctagacagcaagcagggtgtgatagaaatgtataactacctgacaagtgtctaccaagaaggtgataagcggtcgatgctaataagtgcgattcaagcacttcattttgcacgccatggcattgatatcatctcaaaaactcctgttcatacgcacttttcgaggccaaactggcctagagtgctacatggccttgcaagaaggcatatcggggagaggataggggttttctactgtggtccggacgatttgggaaggcagctggagaagctctgccacaaagtgaacacaaaaacattcacgcgatttgtgttccacaaggagcatttctaataatagagactagcatagatcaactccttaggaacaaacctgtcaagtatgatctcaaagctgccaagcacttcatttttttcgcatcactccttcctatcttttgctttagtatctctgtcttcatttaaccattataaagctgatcttacttgaggagctttgtatctaactagaaaaaaacagcgccctatcgggcgcttagacgatttcttgaatgtgatctttgtgatttttttttcttttcagctttcagtgtgcaccctaatactcagaacaagtctactattatagagatggacgatgaaactttaccaatatagccattctaccgctgtccaaacagtgtaatggacatatgttcacaaatagaccgggg

SEQ ID NO: 8102 - DNA, 1352 bp, Zea Mays
cacaaatataacctgtgatcgcgttaatttgagcttctaagcacggataggatctggaatgaactgcctgacctgtgactcctccacggcaacctcttcctgggtagatgcttggccagggaagcagatgcatagccacaattaccgtgtgccggagccattccttgatcaagtagtgatcataattggggcctcggcaagtgcagttgacatttcgagagacatcgcaagcatggcggaagaggtacatattgctgatagatcagcaccggcttccacctgtaacaagcagcctggctatgataatctgtggcttcattccatggtaaactaccttttatgagtttatcctggtgaatcaagatatggaagcttttatctactggaggagctgccacagttagtgttgtggcgaatctaatgctcgggctgcagattgaccatgcgcaggaggatggcactgtggtgttccaggatggcagctcaatcaaagctgatgttatcatgcactgcactggctacctgtatgactttccattccttggagatgacagcactatcaccgtggacgacaaccgtgtcgatccactatacaagcatatttttccacccgaagtggcacctcatttgtccttcatcggattgccttggaaagtcagttttgctgcaaattgatgccccagttaagatgcacctgtaacctaccctgtgaagctcaaagatcttgaacattccaacctctgttctttccaggttatccccttcccactgtttgaactccaaagtaagtgggttgctagagttctatcaggacggattaatcttccatccgaagacaggatgatggaagatgtgaaggctttctatttgaaactagaagcacatggatggcctaagagatacacacataattttgcaaattaccagtttgagtatgatgattggctcgctgagcaatgtggccatccaccagtcgaagaatggaggaagcagatgtatgctgtaacttcaatgaacaaggcagctcgtcctgagagttaccgtgatgaatgggatgacgagcatctggtggccgaagcaaatgaatacttcaagaaattcttgtaaattctttcttactattctcatcccatattctttcggcatacccgaggctgatctcaactgcaatatgcaaatatgaataaccatttaagtgatgtggattggatacacttctgggttagcatttcatcgatcattcgatcgatgtatatatatgagactgttctggtagtaaacaatcttgtagtaaactgtggattggtcatcaattaacaacaatgattaaaaaaataatgggaaaaagcaaa

SEQ ID NO: 8103 - DNA, 2041 bp, Zea Mays
gaatgttgttgctgggctggctacagtacagtacaggtgcaggcttcattcctccagtggcggcggacaacgccgaacagacagaagaatactgtagagaagatcgtcgcacccaccggaggacgagacgggccctaggcacaccacgcaatcagccgccccgcgcccccgcccgcggttggcgatgttgccgtgacgtcttccagggaggagaagccaacatcacaaactccacgacgaataactggcagtagaagccgagaaggtaggcccgctcgttccaacatcacaaactccacacggctctcctgtctccgctgcccgctccacctccctccatgccgtcggcttccctccgcctcgccgtcgtcggcgcgggcgcggcgggcctggttgccgcccgcgagctacgccgcgagggccatgcgcccgtcgtcttcgagcgcgccgccgccgttgggggcacttggctctacacgcctcccgccacgtcctccgacccgctcggcgccgcggcgacgcattccagcctctacgcatcgctccgcaccaacctgccacgcgagaccatgggcttcctcgacttccccttcgccgctggcgccgcgggctcccgagacccccgccggtttcccgggcacgaggaggtgctccgctacctggaggcgttcgcgcgccggttcgacctgctccggctcgtccgcttcgagacggaggtgctcagtgtgaggagggaagacggagggaggtgggctgtgacgtcgaggaagctcggggataaggggagcggcgaggaggagttctatgatgccgtcgtggtctgcaatggtcactacacggagccacgcctcgccgtcattcccggggtagatgcttggccagggaagcagatgcatagccacaattaccgtgtgccggagccattccttgatcaagtagtgatcataattggggcctcggcaagtgcagttgacatttcgagagacatcgcaagcatggcggaagaggtacatattgctgatagatcagcaccggcttccacctgtaacaagcagcctggctatgataatctgtggcttcattccatgattgaccatgcgcaggaggatggcactgtggtgttccaggatggcagctcaatcaaagctgatgttatcatgcactgcactgggtatagtgatctgcagtatcacttgcatcccgtttcctacaaaagcatgccattttgcgttaatttggaatctgataatgtgcttcttgcatttgtatgttgcctagctacctgtatgactttccattccttggagatgacagcactatcaccgtggacgacaaccgtgtcgatccactatacaagcatatttttccacccgaagtggcacctcatttgtccttcatcggattgccttggaaagtcagttttgctgcaaattgatgccccagttatccccttcccactgtttgaactccaaagtaagtgggttgctagagttctatcaggacggattaatcttccatccgaagacaggatgatggaagatgtgaaggctttctatttgaaactagaagcacatggatggcctaagagatacacacataattttgcaaattaccagtttgagtatgatgattggctcgctgagcaatgtggccatccaccagtcgaagaatggaggaagcagatgtatgctgtaacttcaatgaacaaggcagctcgtcctgagagttaccgtgatgaatgggatgacgagcatctggtggccgaagcaaatgaatacttcaagaaattcttgtaaattctttcttactattctcatcccatattctttcggcatacccgaggctgatctcaactgcaatatgcaaatatgaataaccatttaagtgatgtggattggatacacttctgggttagcatttcatcgatcattcgatcgatgtatatatatgagactgttctggtagtaaacaatcttgtagtaaactgtggattggtcatcaattaacaacaatgattaaaaaaataatgggaaaaagcaaa

SEQ ID NO: 8104 - DNA, 2619 bp, Zea Mays
atggtcatcctatcaccaaagaaaggcaaccaaaacaataatttcgcaatcaaggccatcctttcaccaaagacaggcaaccaaacagtaacaattttgccaccaagcaattgccggttgcattacttaacactggcttgggctgacctcgtcagagatcgtctacttcgtgaagcaacgggagatttgacgcatctccgtccccaagcccacctcgctccttgcatgcatatgcagcagcagtcacaggtaagcagatcccctagagaagattagactaacgagaggtatcaatccctatctccatccccatctcccactacccatgcggccatgcatcagtaaatcaaaatcatagcaggtgaaaaaaaagagagcatgtgagccgagagagaaacaggaaaggagcaggaaaaaaaaagagagagagaagaagccgcaggggctggcctgacggtacggacagccgcctgcctccagcagtatccagccgcgaaagaattgagaagatccagaccgagctcgacgaggggaggcgcgacaaagaagtatcgccgccacggaaagagcttttcccgttgcttcggtagctaaaggagtggttgttctccacggggacaacagaaaaatgatatggagatttggttgcttgtccaattaagatggaggatctgaagaagttttatccttctttctggaagcaatctagcagttcacgaagtagcctgcactcgatccgtgagcataagctgatggatttgggttcgaggcgcaatcaaacccaagaagtttccaccaatttcaataaacgcaaaccgttctccgaatctgtggaactgacttcagatgttaggacttcagtttggagaaaatccgatgcttatcacggagtgattgacttggagaagccatcgatttctggtgatgcgattgaagctattggttgttctggctttggcaaccctgccaaccaaaatggcaagtctcaggatggttcatgctgtatttcaccagagaacacctcacttgcagagtcgcttcagtcgtgtagagactggaacatatcgcgtgtaagcgttgttggatctagtgacactccggattgccagtcccctatcaaaacaagtaacaatgaagcaagacattcactgtttgacctgaatgttcctcaagaagaaagtctttttatgtcttctactctggttccttcttcttcaacgtattgtggaattttttcagacaaccgtagagaaacttctgagaaagagcatatcgctggtatcagatcaatgaaaggatcttccatcactgtggtcacccccaactcagttgcagacagttcaagggatgtggtaactgaatcgccagttcaaccgaagtttctttttgaccttaatgtgtcacttgaaaacaccgacatgccatcagaaatctgtgattatagagataaggatgtaaataatgatgtaagtaaaggaacagcaccccgtcgttctttctccaataaagatagtctgcatgcagaaacttccacaaaacatgcggttcttggacatgatcatatgttggcgcacgaggatgatagtaaggtgcttctcacatccccaacagctaatggtatcaataaggttcagttgacacagtctggaaccattaacaaggagtttttgatccctggatctcctcttgttgatacaagtttccctccaagacttgagatatccgacaatggagcatcgaatattcaagagttaagcatgcttcaagacaaggtcgatggtgatggcacaacagctgatactgcagctagaacccttctttccattttccagcatagttctgaacgcattgctcattgctttggaagcagcaaccagacagcagctcagaacgtgaacgatgagcctcagccttcattggactcgttcgagcaaaccgtgttgaacttagaggagatccaagatgacggtcaatcgatcaatgtggcaccaccctatatcgaaggaccagcatgtcggatcaagctaaagagagggaggggtatgagaaattttcagagggagatcattcctggcctccttctagggaggcaagagatatgcgaggacttggaagttataggctatgcgccaaagaaagctcggtccaggaaaccccgcaagggtccaggcgcatcctcagctcaaccgaggccgtgcaaacgtggagctgtcaagcgctgaccaggagcatctgcattccgtggcagggtgccataaggcaggcgattcagaacaggagagtccattctaaaccatgtgaatattcgtgtgtatcaagcctagcttcaaactctggtttgctggtgaccatttagttggggatattctttcctttcccctcttgttatatctttcctggagtgatcaggttgttagattcaagattttttttttttgcctttatatttgaaagtctagcggcgaagacagtcatagtgccacaatgatcagtctcgaaattccaggcttagatcagagtcgacgaagaaggcaagatggttgttcctgatgataacctagcactttctatcttgggttataccttggattaatgcgaaaacagtatacttgcttagat

SEQ ID NO: 8105 - DNA, 2602 bp, Zea Mays
atggtcatcctatcaccaaagaaaggcaaccaaaacaataatttcgcaatcaaggccatcctttcaccaaagacaggcaaccaaacagtaacaattttgccaccaagcaattgccggttgcattacttaacactggcttgggctgacctcgtcagagatcgtctacttcgtgaagcaacgggagatttgacgcatctccgtccccaagcccacctcgctccttgcatgcatatgcagcagcagtcacaggtaagcagatcccctagagaagattagactaacgagaggtatcaatccctatctccatccccatctcccactacccatgcggccatgcatcagtaaatcaaaatcatagcaggtgaaaaaaaagagagcatgtgagccgagagagaaacaggaaaggagcaggaaaaaaaaagagagagagaagaagccgcaggggctggcctgacggtacggacagccgcctgcctccagcagtatccagccgcgaaagaattgagaagatccagaccgagctcgacgaggggaggcgcgacaaagaagtatcgccgccacggaaagctaaaggagtggttgttctccacggggacaacagaaaaatgatatggagatttggttgcttgtccaattaagatggaggatctgaagaagttttatccttctttctggaagcaatctagcagttcacgaagtagcctgcactcgatccgtgagcataagctgatggatttgggttcgaggcgcaatcaaacccaagaagtttccaccaatttcaataaacgcaaaccgttctccgaatctgtggaactgacttcagatgttaggacttcagtttggagaaaatccgatgcttatcacggagtgattgacttggagaagccatcgatttctggtgatgcgattgaagctattggttgttctggctttggcaaccctgccaaccaaaatggcaagtctcaggatggttcatgctgtatttcaccagagaacacctcacttgcagagtcgcttcagtcgtgtagagactggaacatatcgcgtgtaagcgttggttcagttggatctagtgacactccggattgccagtcccctatcaaaacaagtaacaatgaagcaagacattcactgtttgacctgaatgttcctcaagaagaaagtctttttatgtcttctactctggttccttcttcttcaacgtattgtggaattttttcagacaaccgtagagaaacttctgagaaagagcatatcgctggtatcagatcaatgaaaggatcttccatcactgtggtcacccccaactcagttgcagacagttcaagggatgtggtaactgaatcgccagttcaaccgaagtttctttttgaccttaatgtgtcacttgaaaacaccgacatgccatcagaaatctgtgattatagagataaggatgtaaataatgatgtaagtaaaggaacagcaccccgtcgttctttctccaataaagatagtctgcatgcagaaacttccacaaaacatgcggttcttggacatgatcatatgttggcgcacgaggatgatagtaaggtgcttctcacatccccaacagctaatggtatcaataaggttcagttgacacagtctggaaccattaacaaggagtttttgatccctggatctcctcttgttgatacaagtttccctccaagacttgagatatccgacaatggagcatcgaatattcaagagttaagcatgcttcaagacaaggtcgatggtgatggcacaacagctgatactgcagctagaacccttctttccattttccagcatagttctgaacgcattgctcattgctttggaagcagcaaccagacagcagctcagaacgtgaacgatgagcctcagccttcattggactcgttcgagcaaaccgtgttgaacttagaggagatccaagatgacggtcaatcgatcaatgtggcaccaccctatatcgaaggaccagcatgtcggatcaagctaaagagagggaggggtatgagaaattttcagagggagatcattcctggcctccttctagggaggcaagagatatgcgaggacttggaagttataggctatgcgccaaagaaagctcggtccaggaaaccccgcaagggtccaggcgcatcctcagctcaaccgaggccgtgcaaacgtggagctgtcaagcgctgaccaggagcatctgcattccgtggcagggtgccataaggcaggcgattcagaacaggagagtccattctaaaccatgtgaatattcgtgtgtatcaagcctagcttcaaactctggtttgctggtgaccatttagttggggatattctttcctttcccctcttgttatatctttcctggagtgatcaggttgttagattcaagattttttttttttgcctttatatttgaaagtctagcggcgaagacagtcatagtgccacaatgatcagtctcgaaattccaggcttagatcagagtcgacgaagaaggcaagatggttgttcctgatgataacctagcactttctatcttgggttataccttggattaatgcgaaaacagtatacttgcttagat

SEQ ID NO: 8106 - DNA, 2625 bp, Zea Mays
atggtcatcctatcaccaaagaaaggcaaccaaaacaataatttcgcaatcaaggccatcctttcaccaaagacaggcaaccaaacagtaacaattttgccaccaagcaattgccggttgcattacttaacactggcttgggctgacctcgtcagagatcgtctacttcgtgaagcaacgggagatttgacgcatctccgtccccaagcccacctcgctccttgcatgcatatgcagcagcagtcacaggtaagcagatcccctagagaagattagactaacgagaggtatcaatccctatctccatccccatctcccactacccatgcggccatgcatcagtaaatcaaaatcatagcaggtgaaaaaaaagagagcatgtgagccgagagagaaacaggaaaggagcaggaaaaaaaaagagagagagaagaagccgcaggggctggcctgacggtacggacagccgcctgcctccagcagtatccagccgcgaaagaattgagaagatccagaccgagctcgacgaggggaggcgcgacaaagaagtatcgccgccacggaaagagcttttcccgttgcttcggtagctaaaggagtggttgttctccacggggacaacagaaaaatgatatggagatttggttgcttgtccaattaagatggaggatctgaagaagttttatccttctttctggaagcaatctagcagttcacgaagtagcctgcactcgatccgtgagcataagctgatggatttgggttcgaggcgcaatcaaacccaagaagtttccaccaatttcaataaacgcaaaccgttctccgaatctgtggaactgacttcagatgttaggacttcagtttggagaaaatccgatgcttatcacggagtgattgacttggagaagccatcgatttctggtgatgcgattgaagctattggttgttctggctttggcaaccctgccaaccaaaatggcaagtctcaggatggttcatgctgtatttcaccagagaacacctcacttgcagagtcgcttcagtcgtgtagagactggaacatatcgcgtgtaagcgttggttcagttggatctagtgacactccggattgccagtcccctatcaaaacaagtaacaatgaagcaagacattcactgtttgacctgaatgttcctcaagaagaaagtctttttatgtcttctactctggttccttcttcttcaacgtattgtggaattttttcagacaaccgtagagaaacttctgagaaagagcatatcgctggtatcagatcaatgaaaggatcttccatcactgtggtcacccccaactcagttgcagacagttcaagggatgtggtaactgaatcgccagttcaaccgaagtttctttttgaccttaatgtgtcacttgaaaacaccgacatgccatcagaaatctgtgattatagagataaggatgtaaataatgatgtaagtaaaggaacagcaccccgtcgttctttctccaataaagatagtctgcatgcagaaacttccacaaaacatgcggttcttggacatgatcatatgttggcgcacgaggatgatagtaaggtgcttctcacatccccaacagctaatggtatcaataaggttcagttgacacagtctggaaccattaacaaggagtttttgatccctggatctcctcttgttgatacaagtttccctccaagacttgagatatccgacaatggagcatcgaatattcaagagttaagcatgcttcaagacaaggtcgatggtgatggcacaacagctgatactgcagctagaacccttctttccattttccagcatagttctgaacgcattgctcattgctttggaagcagcaaccagacagcagctcagaacgtgaacgatgagcctcagccttcattggactcgttcgagcaaaccgtgttgaacttagaggagatccaagatgacggtcaatcgatcaatgtggcaccaccctatatcgaaggaccagcatgtcggatcaagctaaagagagggaggggtatgagaaattttcagagggagatcattcctggcctccttctagggaggcaagagatatgcgaggacttggaagttataggctatgcgccaaagaaagctcggtccaggaaaccccgcaagggtccaggcgcatcctcagctcaaccgaggccgtgcaaacgtggagctgtcaagcgctgaccaggagcatctgcattccgtggcagggtgccataaggcaggcgattcagaacaggagagtccattctaaaccatgtgaatattcgtgtgtatcaagcctagcttcaaactctggtttgctggtgaccatttagttggggatattctttcctttcccctcttgttatatctttcctggagtgatcaggttgttagattcaagattttttttttttgcctttatatttgaaagtctagcggcgaagacagtcatagtgccacaatgatcagtctcgaaattccaggcttagatcagagtcgacgaagaaggcaagatggttgttcctgatgataacctagcactttctatcttgggttataccttggattaatgcgaaaacagtatacttgcttagat

SEQ ID NO: 8107 - DNA, 462 bp, Zea Mays
ctcaataagagtgctcatggtctccatggttgctagccaagttcatcgtagtgacctgggctcgaatccctgcagccacacggctacctgcgacatgtagccactgctggtgttaatcctctccccagcccaggttagcactgtcatgtgctgcgcgtgctaagtctggtgaccacgctcaccggttcctcacctcgttgtgaccaagacatctcagggagtgaccagttcgtatgacccgcgttccacgttctcctaagaacgcgaagaagaagtggaagtacctgaagagaagacaacaccacctttggagtctcaggcagggtctcgtctctactttaacatctgcgggcctgagactaactcatctataaacaaaggcaagccccggtgcatacaaccccttccttgtgtttttaaatacttttcgcacactttaagtctagtgaaatgtgcattaag

SEQ ID NO: 8108 - DNA, 1488 bp, Zea Mays
cccctctcgctcgctcctgctgcctgcctgtgcctgcctccacacccctggccttgtgcttcgtgcgtgcgtgcctctgcctccctccctataagtacacacgccgcctccgtctcggacacttgcagaaccatccatcactagttgagtggcctgcaaagacacgtacgcacggcacgcgaccacagcagcagctggtctgaggcagctagcttggaaccacaggacggcgcgatgcagaagcgctggaagccgagagacgccgctgccgcccatggagtacctctctcggtcgtggagcgtgtcggcgtcggagatctccaagatcctcgtcgccggaggcaacaagcccagcagcgttgccgccgcggcgtgccgccttccggaggcggctatgtctataccggagcaggcgcctgtgctcgccacgtcctccaccgtccatctcccgtctcctcagcagcatagagatgcgaggaggtactccacgagcggcggccaccaccaatcgatcggcaggtggttccagcaggctcaccacagggaaacgtgccgggcgaagcagagcggcaaggagaagcagcgcgccgagaaggcccacgtgcacgccatggtgtccgtggcccgggtggcggccgcggtcgccgccgtcgcgggctccggcgacacccagacccaggccaccaagatggccagggccatggcgtcggccaccgagctgctagcctcccactgcgtcgaggcggcccagcacgcgggcgcgcgccacgatcaggtggctgccgcggtgcaggccgcggtcggcgtcggaagccccggcgatctggtcacgctcacggcggccgccgcgaccgctctgcgaggagcggcgacgctgaagcagagggtgcagcgagagacggcgaggagcaacgcgagcgtcctcccgtacgagagagggagttcgtggagcccggacatctggtgcaaggagggggacctgctgaaacgcacgaggaaagggggtttgcacaggataagagtatctatctacatcaacaagaggtcacaggtgatactgaagctgaaaagcaaacaccttggaggcgcgctgtcaaagaacaacaagagcgtggtttacggcgtgtacagcgagcttccgacgtgggctgggaagggctccgtagaggagacatgctgcttcggccttagcaccgcgcaaggtctcgtggagttggagtgcgagggcagcgcgagcaagcggaagtgggttgacgacgtgcagagcctgcttcgtgaggcggctctgcatggccatggtcaagtagggaatggaatgggactagtaaaactcagctagtgcagcctcagtatatccactttcatggtagcagattggtcgtgctcttgtttgtcactgacttacacgctataccacatactatgtaatgatgacatttatacggaatatttttatatgtttgtaaaaaaaactcagttaggaaagac

SEQ ID NO: 8109 - DNA, 850 bp, Zea Mays
caaacacattctactaggattctgcatgcaaattgaatggaccaaattcagctatagattgattagcatctaccttcaaatcattctcttggtatttattgagcactgcaagtggttgaggacttgaggtaaacatgctgaagtgcatcttgagccagtcatggaagagaggagcacatatgctacatgcaggaaattcagcaccagctgtactaacttgctggagtcaatttcacagtgggcaggtctggagttcttccaggagcttcttcggcgtggaggacttcgtggacgaggacaacagtaggccatacacgtacaagaaggagaagaggtccaagaacccccacaagcacatctcgttcaagcagcgcaccatcgcccacatggagccgttcacgctggacgtgttcatctccaagcgcttcgtctcggcgtccctcacgcaccggtcgacctgcaggcaggtcgcggtcgccgggaccaactccaaggacatcaaggcggcgctcaggtcgaggtccgacgtgccggcctgcctggccgtcgggcggttcctggccgagagggcgaaggaggccgacgtgtacacctgcacgtacacgccgagggaacgggacaagttcgaggggaagatcagggcggttgttcagtcgctgatcgataacgggatcaatgtgaaactttaccttgactgagttcggtgctgtatgagtatgagtagtagttctgttggaacttgcgcgtgggtttatctgttgccagggttgcaggtcgaattattttgtgtccttatgttgatattttttttgctcaaatgaacatcattggatacccagttgcatttgca

SEQ ID NO: 8110 - DNA, 1224 bp, Zea Mays
gtcgttgccaagcaagagaacttccaggaacaaaattgattagcatctaccttcaaatcattctcttggtatttattgagcactgcaagtggttgaggacttgaggtaaacatgctgaagtgcatcttgagccagtcatggaagagaggagcacatatgctacatgcaggaaattcagcaccagctgtactaacttgctggagtcaatttcacagtgggcaggccttgttagtgtggtaccaacacagcagaaacaatcaagcaccagtaggatggggatgatcgctgctgtgccacctgaatatttgcatggatgtgtgcccttacagcacagcttcatgttgaggaacaatggacattgactgtataagcactactacaaagtcgtataagcactactacaaagtccgaacttcattcgtgctggcatattgttgggaatgtcgttgatattgccagcaacattgacagacccatcaactttgacatttgcctcaacggctgagtatgcagtttggctggctcctttctaggcctggttagctgtgacatggcaagcaggctgcagggtttgcctttattctggcacggtgaactctcgtggttcttcaatttgatggtctggagttcttccaggagcttcttcggcgtggaggacttcgtggacgaggacaacagtaggccatacacgtacaagaaggagaagaggtccaagaacccccacaagcacatctcgttcaagcagcgcaccatcgcccacatggagccgttcacgctggacgtgttcatctccaagcgcttcgtctcggcgtccctcacgcaccggtcgacctgcaggcaggtcgcggtcgccgggaccaactccaaggacatcaaggcggcgctcaggtcgaggtccgacgtgccggcctgcctggccgtcgggcggttcctggccgagagggcgaaggaggccgacgtgtacacctgcacgtacacgccgagggaacgggacaagttcgaggggaagatcagggcggttgttcagtcgctgatcgataacgggatcaatgtgaaactttaccttgactgagttcggtgctgtatgagtatgagtagtagttctgttggaacttgcgcgtgggtttatctgttgccagggttgcaggtcgaattattttgtgtccttatgttgatattttttttgctcaaatgaacatcattggatacccagttgcatttgca

SEQ ID NO: 8111 - DNA, 821 bp, Zea Mays
cctgccgctgctggatcacttcctcaagattgattagcatctaccttcaaatcattctcttggtatttattgagcactgcaagtggttgaggacttgaggtaaacatgctgaagtgcatcttgagccagtcatggaagagaggagcacatatgctacatgcaggaaattcagcaccagctgtactaacttgctggagtcaatttcacagtgggcaggtctggagttcttccaggagcttcttcggcgtggaggacttcgtggacgaggacaacagtaggccatacacgtacaagaaggagaagaggtccaagaacccccacaagcacatctcgttcaagcagcgcaccatcgcccacatggagccgttcacgctggacgtgttcatctccaagcgcttcgtctcggcgtccctcacgcaccggtcgacctgcaggcaggtcgcggtcgccgggaccaactccaaggacatcaaggcggcgctcaggtcgaggtccgacgtgccggcctgcctggccgtcgggcggttcctggccgagagggcgaaggaggccgacgtgtacacctgcacgtacacgccgagggaacgggacaagttcgaggggaagatcagggcggttgttcagtcgctgatcgataacgggatcaatgtgaaactttaccttgactgagttcggtgctgtatgagtatgagtagtagttctgttggaacttgcgcgtgggtttatctgttgccagggttgcaggtcgaattattttgtgtccttatgttgatattttttttgctcaaatgaacatcattggatacccagttgcatttgca

SEQ ID NO: 8112 - DNA, 1582 bp, Zea Mays
tcccatttgatttggcccactgcagcccactaaaccgtcctgtacgcagagcccatgcacggttttgagacgagagcagctcagcagcagagcgccagccgccggactcccacgcagcacgtacggacgccatcgaggaaccctaacaagagcacatcacacggggcgacggtttggcgccgcgccaccggcgactggcggctggtgccccctctcggtccccactccccagcacggtgacggcctgctgcagcagttggactttgtacttttttgctggacaacctgcagcaatgcagttttactaatatggtaaattatttctcagactcagagtgcaagaaagttggttcgtccagggaagaggaatagaggttatggttttgtgtgagattgattagcatctaccttcaaatcattctcttggtatttattgagcactgcaagtggttgaggacttgaggtaaacatgctgaagtgcatcttgagccagtcatggaagagaggagcacatatgctacatgcaggaaattcagcaccagctgtactaacttgctggagtcaatttcacagtgggcaggccttgttagtgtggtaccaacacagcagaaacaatcaagcaccagtaggatggggatgatcgctgctgtgccacctgaatatttgcatggatgtgtgcccttacagcacagcttcatgttgaggaacaatggacattgactgtataagcactactacaaagtcgtataagcactactacaaagtccgaacttcattcgtgctggcatattgttgggaatgtcgttgatattgccagcaacattgacagacccatcaactttgacatttgcctcaacggctgagtatgcagtttggctggctcctttctaggcctggttagctgtgacatggcaagcaggctgcagggtttgcctttattctggcacggtgaactctcgtggttcttcaatttgatggtctggagttcttccaggagcttcttcggcgtggaggacttcgtggacgaggacaacagtaggccatacacgtacaagaaggagaagaggtccaagaacccccacaagcacatctcgttcaagcagcgcaccatcgcccacatggagccgttcacgctggacgtgttcatctccaagcgcttcgtctcggcgtccctcacgcaccggtcgacctgcaggcaggtcgcggtcgccgggaccaactccaaggacatcaaggcggcgctcaggtcgaggtccgacgtgccggcctgcctggccgtcgggcggttcctggccgagagggcgaaggaggccgacgtgtacacctgcacgtacacgccgagggaacgggacaagttcgaggggaagatcagggcggttgttcagtcgctgatcgataacgggatcaatgtgaaactttaccttgactgagttcggtgctgtatgagtatgagtagtagttctgttggaacttgcgcgtgggtttatctgttgccagggttgcaggtcgaattattttgtgtccttatgttgatattttttttgctcaaatgaacatcattggatacccagttgcatttgca

SEQ ID NO: 8113 - DNA, 1606 bp, Zea Mays
tcccatttgatttggcccactgcagcccactaaaccgtcctgtacgcagagcccatgcacggttttgagacgagagcagctcagcagcagagcgccagccgccggactcccacgcagcacgtacggacgccatcgaggaaccctaacaagagcacatcacacggggcgacggtttggcgccgcgccaccggcgactggcggctggtgccccctctcggtccccactccccagcacggtgacggcctgctgcagcagttggactttgtacttttttgctggacaacctgcagcaatgcagttttactaatgtaatggcttattaacccgttcctatggtaaattatttctcagactcagagtgcaagaaagttggttcgtccagggaagaggaatagaggttatggttttgtgtgagattgattagcatctaccttcaaatcattctcttggtatttattgagcactgcaagtggttgaggacttgaggtaaacatgctgaagtgcatcttgagccagtcatggaagagaggagcacatatgctacatgcaggaaattcagcaccagctgtactaacttgctggagtcaatttcacagtgggcaggccttgttagtgtggtaccaacacagcagaaacaatcaagcaccagtaggatggggatgatcgctgctgtgccacctgaatatttgcatggatgtgtgcccttacagcacagcttcatgttgaggaacaatggacattgactgtataagcactactacaaagtcgtataagcactactacaaagtccgaacttcattcgtgctggcatattgttgggaatgtcgttgatattgccagcaacattgacagacccatcaactttgacatttgcctcaacggctgagtatgcagtttggctggctcctttctaggcctggttagctgtgacatggcaagcaggctgcagggtttgcctttattctggcacggtgaactctcgtggttcttcaatttgatggtctggagttcttccaggagcttcttcggcgtggaggacttcgtggacgaggacaacagtaggccatacacgtacaagaaggagaagaggtccaagaacccccacaagcacatctcgttcaagcagcgcaccatcgcccacatggagccgttcacgctggacgtgttcatctccaagcgcttcgtctcggcgtccctcacgcaccggtcgacctgcaggcaggtcgcggtcgccgggaccaactccaaggacatcaaggcggcgctcaggtcgaggtccgacgtgccggcctgcctggccgtcgggcggttcctggccgagagggcgaaggaggccgacgtgtacacctgcacgtacacgccgagggaacgggacaagttcgaggggaagatcagggcggttgttcagtcgctgatcgataacgggatcaatgtgaaactttaccttgactgagttcggtgctgtatgagtatgagtagtagttctgttggaacttgcgcgtgggtttatctgttgccagggttgcaggtcgaattattttgtgtccttatgttgatattttttttgctcaaatgaacatcattggatacccagttgcatttgca

SEQ ID NO: 8114 - DNA, 2162 bp, Zea Mays
tcccatttgatttggcccactgcagcccactaaaccgtcctgtacgcagagcccatgcacggttttgagacgagagcagctcagcagcagagcgccagccgccggactcccacgcagcacgtacggacgccatcgaggaaccctaacaagagcacatcacacggggcgacggtttggcgccgcgccaccggcgactggcggctggtgccccctctcggtccccactccccagcacggtgacggcctgctgcagcaggtgatctctgatgtctgattctcttctccagttctccccagtccccgtctccccgacttcctgttcagtgttcaccgttgagtggcctgctgccctgctgtgctcatgtgatgtgctcgttgtgaatttgtgatccgatccgagccagtccccacccagttattaatgaaaatgagatccttgaagatgatgaagaatctgaggaaggaaatgcaaatgaatgaggaagatggttctgggccttctagctcatttgggactgaaaatgcatttcaagtggatgaagatttactttagctagtagatcatttatcacttatcaagtggatgaagatttgctcatttgtttcatgtttgactttgctgcagttggactttgtacttttttgctggacaacctgcagcaatgcagttttactaatgtaatggcttattaacccgttcctgtgagtttgcaatggctgtactgttttttactatgttttacttttacctatggtaatgtctgacagccatacagtgcaggagaaagcagatggtacacttatcctgtgatttttgttgtgttcctaactttgctgggatttttgtttgattaattgattccattgttttgtgtggttgttgctgcagatggtaaattatttctcagactcagagtgcaagaaagttggttcgtccagggaagaggaatagaggttatggttttgtgtgagattgattagcatctaccttcaaatcattctcttggtatttattgagcactgcaagtggttgaggacttgaggtaaacatgctgaagtgcatcttgagccagtcatggaagagaggagcacatatgctacatgcaggaaattcagcaccagctgtactaacttgctggagtcaatttcacagtgggcaggccttgttagtgtggtaccaacacagcagaaacaatcaagcaccagtaggatggggatgatcgctgctgtgccacctgaatatttgcatggatgtgtgcccttacagcacagcttcatgttgaggaacaatggacattgactgtataagcactactacaaagtcgtataagcactactacaaagtccgaacttcattcgtgctggcatattgttgggaatgtcgttgatattgccagcaacattgacagacccatcaactttgacatttgcctcaacggctgagtatgcagtttggctggctcctttctaggcctggttagctgtgacatggcaagcaggctgcagggtttgcctttattctggcacggtgaactctcgtggttcttcaatttgatggtctggagttcttccaggagcttcttcggcgtggaggacttcgtggacgaggacaacagtaggccatacacgtacaagaaggagaagaggtccaagaacccccacaagcacatctcgttcaagcagcgcaccatcgcccacatggagccgttcacgctggacgtgttcatctccaagcgcttcgtctcggcgtccctcacgcaccggtcgacctgcaggcaggtcgcggtcgccgggaccaactccaaggacatcaaggcggcgctcaggtcgaggtccgacgtgccggcctgcctggccgtcgggcggttcctggccgagagggcgaaggaggccgacgtgtacacctgcacgtacacgccgagggaacgggacaagttcgaggggaagatcagggcggttgttcagtcgctgatcgataacgggatcaatgtgaaactttaccttgactgagttcggtgctgtatgagtatgagtagtagttctgttggaacttgcgcgtgggtttatctgttgccagggttgcaggtcgaattattttgtgtccttatgttgatattttttttgctcaaatgaacatcattggatacccagttgcatttgca

SEQ ID NO: 8115 - DNA, 1529 bp, Zea Mays
tcccatttgatttggcccactgcagcccactaaaccgtcctgtacgcagagcccatgcacggttttgagacgagagcagctcagcagcagagcgccagccgccggactcccacgcagcacgtacggacgccatcgaggaaccctaacaagagcacatcacacggggcgacggtttggcgccgcgccaccggcgactggcggctggtgccccctctcggtccccactccccagcacggtgacggcctgctgcagcagatggtaaattatttctcagactcagagtgcaagaaagttggttcgtccagggaagaggaatagaggttatggttttgtgtgagattgattagcatctaccttcaaatcattctcttggtatttattgagcactgcaagtggttgaggacttgaggtaaacatgctgaagtgcatcttgagccagtcatggaagagaggagcacatatgctacatgcaggaaattcagcaccagctgtactaacttgctggagtcaatttcacagtgggcaggccttgttagtgtggtaccaacacagcagaaacaatcaagcaccagtaggatggggatgatcgctgctgtgccacctgaatatttgcatggatgtgtgcccttacagcacagcttcatgttgaggaacaatggacattgactgtataagcactactacaaagtcgtataagcactactacaaagtccgaacttcattcgtgctggcatattgttgggaatgtcgttgatattgccagcaacattgacagacccatcaactttgacatttgcctcaacggctgagtatgcagtttggctggctcctttctaggcctggttagctgtgacatggcaagcaggctgcagggtttgcctttattctggcacggtgaactctcgtggttcttcaatttgatggtctggagttcttccaggagcttcttcggcgtggaggacttcgtggacgaggacaacagtaggccatacacgtacaagaaggagaagaggtccaagaacccccacaagcacatctcgttcaagcagcgcaccatcgcccacatggagccgttcacgctggacgtgttcatctccaagcgcttcgtctcggcgtccctcacgcaccggtcgacctgcaggcaggtcgcggtcgccgggaccaactccaaggacatcaaggcggcgctcaggtcgaggtccgacgtgccggcctgcctggccgtcgggcggttcctggccgagagggcgaaggaggccgacgtgtacacctgcacgtacacgccgagggaacgggacaagttcgaggggaagatcagggcggttgttcagtcgctgatcgataacgggatcaatgtgaaactttaccttgactgagttcggtgctgtatgagtatgagtagtagttctgttggaacttgcgcgtgggtttatctgttgccagggttgcaggtcgaattattttgtgtccttatgttgatattttttttgctcaaatgaacatcattggatacccagttgcatttgca

SEQ ID NO: 8116 - DNA, 1185 bp, Zea Mays
tcccatttgatttggcccactgcagcccactaaaccgtcctgtacgcagagcccatgcacggttttgagacgagagcagctcagcagcagagcgccagccgccggactcccacgcagcacgtacggacgccatcgaggaaccctaacaagagcacatcacacggggcgacggtttggcgccgcgccaccggcgactggcggctggtgccccctctcggtccccactccccagcacggtgacggcctgctgcagcagttggactttgtacttttttgctggacaacctgcagcaatgcagttttactaatatggtaaattatttctcagactcagagtgcaagaaagttggttcgtccagggaagaggaatagaggttatggttttgtgtgagattgattagcatctaccttcaaatcattctcttggtatttattgagcactgcaagtggttgaggacttgaggtaaacatgctgaagtgcatcttgagccagtcatggaagagaggagcacatatgctacatgcaggaaattcagcaccagctgtactaacttgctggagtcaatttcacagtgggcaggtctggagttcttccaggagcttcttcggcgtggaggacttcgtggacgaggacaacagtaggccatacacgtacaagaaggagaagaggtccaagaacccccacaagcacatctcgttcaagcagcgcaccatcgcccacatggagccgttcacgctggacgtgttcatctccaagcgcttcgtctcggcgtccctcacgcaccggtcgacctgcaggcaggtcgcggtcgccgggaccaactccaaggacatcaaggcggcgctcaggtcgaggtccgacgtgccggcctgcctggccgtcgggcggttcctggccgagagggcgaaggaggccgacgtgtacacctgcacgtacacgccgagggaacgggacaagttcgaggggaagatcagggcggttgttcagtcgctgatcgataacgggatcaatgtgaaactttaccttgactgagttcggtgctgtatgagtatgagtagtagttctgttggaacttgcgcgtgggtttatctgttgccagggttgcaggtcgaattattttgtgtccttatgttgatattttttttgctcaaatgaacatcattggatacccagttgcatttgca

SEQ ID NO: 8117 - DNA, 1113 bp, Zea Mays
tcccatttgatttggcccactgcagcccactaaaccgtcctgtacgcagagcccatgcacggttttgagacgagagcagctcagcagcagagcgccagccgccggactcccacgcagcacgtacggacgccatcgaggaaccctaacaagagcacatcacacggggcgacggtttggcgccgcgccaccggcgactggcggctggtgccccctctcggtccccactccccagcacggtgacggcctgctgcagcagactcagagtgcaagaaagttggttcgtccagggaagaggaatagaggttatggttttgtgtgagattgattagcatctaccttcaaatcattctcttggtatttattgagcactgcaagtggttgaggacttgaggtaaacatgctgaagtgcatcttgagccagtcatggaagagaggagcacatatgctacatgcaggaaattcagcaccagctgtactaacttgctggagtcaatttcacagtgggcaggtctggagttcttccaggagcttcttcggcgtggaggacttcgtggacgaggacaacagtaggccatacacgtacaagaaggagaagaggtccaagaacccccacaagcacatctcgttcaagcagcgcaccatcgcccacatggagccgttcacgctggacgtgttcatctccaagcgcttcgtctcggcgtccctcacgcaccggtcgacctgcaggcaggtcgcggtcgccgggaccaactccaaggacatcaaggcggcgctcaggtcgaggtccgacgtgccggcctgcctggccgtcgggcggttcctggccgagagggcgaaggaggccgacgtgtacacctgcacgtacacgccgagggaacgggacaagttcgaggggaagatcagggcggttgttcagtcgctgatcgataacgggatcaatgtgaaactttaccttgactgagttcggtgctgtatgagtatgagtagtagttctgttggaacttgcgcgtgggtttatctgttgccagggttgcaggtcgaattattttgtgtccttatgttgatattttttttgctcaaatgaacatcattggatacccagttgcatttgca

SEQ ID NO: 8118 - DNA, 1396 bp, Zea Mays
tcccatttgatttggcccactgcagcccactaaaccgtcctgtacgcagagcccatgcacggttttgagacgagagcagctcagcagcagagcgccagccgccggactcccacgcagcacgtacggacgccatcgaggaaccctaacaagagcacatcacacggggcgacggtttggcgccgcgccaccggcgactggcggctggtgccccctctcggtccccactccccagcacggtgacggcctgctgcagcagttggactttgtacttttttgctggacaacctgcagcaatgcagttttactaatgtaatggcttattaacccgttcctgtgagtttgcaatggctgtactgttttttactatgttttacttttacctatggtaatgtctgacagccatacagtgcaggagaaagcagatggtacacttatcctgtgatttttgttgtgttcctaactttgctgggatttttgtttgattaattgattccattgttttgtgtggttgttgctgcagatggtaaattatttctcagactcagagtgcaagaaagttggttcgtccagggaagaggaatagaggttatggttttgtgtgagattgattagcatctaccttcaaatcattctcttggtatttattgagcactgcaagtggttgaggacttgaggtaaacatgctgaagtgcatcttgagccagtcatggaagagaggagcacatatgctacatgcaggaaattcagcaccagctgtactaacttgctggagtcaatttcacagtgggcaggtctggagttcttccaggagcttcttcggcgtggaggacttcgtggacgaggacaacagtaggccatacacgtacaagaaggagaagaggtccaagaacccccacaagcacatctcgttcaagcagcgcaccatcgcccacatggagccgttcacgctggacgtgttcatctccaagcgcttcgtctcggcgtccctcacgcaccggtcgacctgcaggcaggtcgcggtcgccgggaccaactccaaggacatcaaggcggcgctcaggtcgaggtccgacgtgccggcctgcctggccgtcgggcggttcctggccgagagggcgaaggaggccgacgtgtacacctgcacgtacacgccgagggaacgggacaagttcgaggggaagatcagggcggttgttcagtcgctgatcgataacgggatcaatgtgaaactttaccttgactgagttcggtgctgtatgagtatgagtagtagttctgttggaacttgcgcgtgggtttatctgttgccagggttgcaggtcgaattattttgtgtccttatgttgatattttttttgctcaaatgaacatcattggatacccagttgcatttgca

SEQ ID NO: 8119 - DNA, 1072 bp, Zea Mays
ctagccgtcaacatcgcagcatcaacgagacatttacatctagccatcagaatggctgcgccacagcgatcagatgtctttctccagcggaaacggggccagacggcaacagctgcgatgcgaggagtgcgactgtgcgaggcgaagcagctagcagtgtggcttgtcgaccatgctcctggcgaaggcatagcggaatctggtggcgtacggcagccactctacggcctgcacggccttgcgccggctccccacgccccgctgggcggcctcctgctgcggccggtcgtcgacgacggcgacggccccctcgcgctgcgcccacgggaggacgctgtcggggccaacgcacgcctccctcgcgtaccgctccaccaggcgcggcaggaacagcttcttcgtggacttgcgcaccaccaccgtcgcctgcaggaactctcgcttggcgcgctccagctcctccatcacgttcttcgccgtgtacacccgcagctgcaaacgtgttgctcgacgcccaccaacggttagagatcagatcatggtgtgtgtatcagatagagatagaacaggcatcgtaggatgtgagtaccatggggtcagacgaagcgccggtgcacagggcgaagagggccagaggctggcactcctgcaggccgaacttgagctggaccagctgcttctcgtccgggcatttcttccgcatagccgtcgagaggatggactcgaaccactgcagatggattatattcgttgggttctcagtttagcaggtggtcatgtatcccatgtcatttaaaaaacgatctttttctcggagtgatgaaagtgttcttggggttgtttcagttaactgatagtcgattaccatcacaaaaattgccagtgtagttaagtgatccagtagttcaggtgctaacgtaattttattttatttttccctgcttagaattgtagtctcaactttccaactttgcatcaataaccaaccaaaaactgtaattcgggatgaaattgctgatctacgtacacgaccgatccgtggagacctgaagcacagcaaggcgtgctcgat

SEQ ID NO: 8120 - DNA, 6801 bp, Zea Mays
cgtcgctgctgcaggagctagggtttccggcgtgggcaaccggggtatgtgcagcagctgccgcactgcaggatctagggttccgacgactccgctcacggatggagggtggtagaagggcgagcgaatccctctcggcatacacccatggatcatgatgatactgattttcagagccaaaactttcaactagctggtgaaggcagtaacaaattctcatcaggtttgcgaccatttgcactaccaaaacttgatattgaggaccaattacaaggccatcttcgatttgataatttgatagatacagaagcatttttcagtgtacaagggcacgggaatagttggattgaggttctgtccactggaagcagtgttgttgattttagctctagcgcagctgaatcttgctcaatatctaaaactaataatgtctggtcagaggcaacatccactgaatctgtcgaaatgctattgaaatcggtgggagaaaatgagacaactggtgacatggataataatgcccaccttaagttaagtggtatggacagtcaaattgatcaatcgagtgtccatcctaaatctagtaactccctgccagatagtactgtagtgccaactgaggaagatcagtctttgagtactcattctagaatgacagacgatcttgatcgttctcagatatctcattctataatgactgccgacctttcaaacaccgagagtcagcttgaacattttcggcctttcttaatggacaagaaagctgagcaggcagtggattctgttggtgagaagtgcattgcaggtgagaagttgtcctcttcaaacaacgcaccaggaagctacccagccattgacaactattttggggcaggtcatgatgatcgttctttggacaaacttaatataccctcaactggagtagattcaaagaacttgaataatgaacctttcccagagttggctcccctgcagaacatatatactgattcatatcacttcaaggaagatactacagaatccgaggctggtgttactcctcaagattcaaagtttcgtcatatcaacgaaaataaagttgaaggtggactacaagaactgcaaagtttgtcatgtgctggtcagtccttgggcgctgtaaacttgtctagtcaagcaagcaatgaaactcttttgtcagaaagttctgatggattgctagaggccataacaaatccagttaagatgctgcacaggagtgatgatacttgcaataaagtgaacagcactcctcaaccatctttttcagcagtgcaacatggagctgaaggcctggaaaattcagttcacaggagcaatgagttcgttgttaaggagtttagtatcggttcaaattctcttttatctcaccaacctgaggcagacccaaaattttttaatccacatcctattagttctctgtctccgaaaagtaaaatttccgatgccacttgtgttcctgaagaaacaaagaatgttggatccaatagtataaacacctgctgtacaggtgatgaatcaaaacatgtagtgttggagaaccgacaatattctgttgacaacctaaaaagtggtgacatgggagaaaagatgtctggggaggaaatacccgcagtttcagggaacattgatcaaatgatagagaatgatcatgaagaaaaggctgccaatgctactggtacatccaaagataaggttgacccttctgacagtattgcacttgaaaactttgcagctgacactttcaatgcttcagaggattcagacattccgtcactaaatcataagaggtcatttgaggaacatgaatcttctgctttaggagtggagcctaaaaacacaaatttactccaatctacttctgggcttcaagagaaaatttcagcatcagtgatcagttctagtagtggcatcacacctaccattgttactgacaactttgatatttctgaggataaaaatggctgttcaataggtgtttcttctgttgattctcctgctttactagctgagaaggatttgaatatgtccacagtgaatactgaggagccattcaaggaaggggttaagtccgctttaggagatcaacacaatggtatttcttctggctctggacaaggaggggaaatgccagctgtcccaatggactcaaagattgccgtgtatagtggtactgtttctgctacagaaagggagaaattcaaggagcagcctaattctttgggttgtttgaccacaggagaaactcaggataaatcagatagtatggatccaaccacagcatctacattgggtggaaaggtggctgtgaagattgtaaaaactccactgaatgcaagtgatgatttgaatgcacatatgcaagatatagtgttaaatcaaggtacagattgtagttctggtactgtgccatctcaaggaaacgaaggctcaagcttattggaacctggtaatggtgatggaatctgcactggggttacatgtgggtccccttcagtgattagttgtgctgaatcctgtccccaagaaggtggacatggcagcactgctttacttcatcacacactatgtgggcaatctgaggatcctgaagatcatggggcctcagttgatggtatccagagctcaaaacaatgcaataccagaaatatagaatctgcacctggttctcaggagactagtgcagcaggaggtgatagaagcttctcatttgaggtgggagctccaccaaatgttgctgagaaagcccatagccctgtttggagccctttccctaaatacattacttctcagagtagcaagatggccacagaaaatactcaagctggaggttctttgaaggatactagtgatgatagtaagaaaatatctactgtggagtctggtaaagaacagctatcagaaaggaaagtaactgaaagttctgggggtggcctctcagacaactgcaatatagacgacatcattaagggtagaagttcaccgccgcggcagcatccaatccctgagtgttctgatttagtgaattttccattcacagatccacagcatttgcagctacgtgcacagatatttgtttatggagctcttattcaaggaacaccaccaggagaggcttacatggtggcggcttttggagaacctgtaggtggtggcaaacctacatgggaggctgcttggcgagctgcttttgaaagatttcagtataaaaaatcacctcatgtcagtttagagactcccacaagttcacttataggtagttctgtgcctgagaaagctagcaaaggtacagcaattacaactgtgccagctagcaaaaaagttggtaaaactgtggcgccagcacatcctgctgtaaccctacactctccaacttctgattttccttttggtagttctacatttaatctgcaacgaggcactcatctggattttagccaggcagtatcaccatttgcgtataattcacacatgagacatccgtctcctggtgttgccccctggtatacgcagagccctggtccacgccctgcagcctggttaattccaccacaaaacttaatatttgattcatcaatgcaaccggttattcctacaaatgaaactgcgaagggtgcatcatccaaaaacatatccgtttcacatactgtttcatctggtgttcttcccagcctggcaccttctattgtttcttctccaatagcagttgtgagtgatggaaaacagaaggctgcttctagctctaagcgtggcacaacatcacaaaagtcaagaaaaaaaaagaaagcttcagcaagttcagaacagcaacctgtaattgcttctcctcatctcaaaatgaacatgccatcttttactcctgccattaagcacacagcaggattgaccttatgcggtagcaagcctgttcctaacatgggccagattgcctctgaacataactaccagatcactggtggtatggatagtgatcaaagaatcatcttttcagaacagatccgtggtgcagtagaacaatcagctgcacaagctaaaagtgcaagcattgactcagtggaggcagttaagcacaaggagggcatatggagccatctatctacaatctcaaggaataagttacctccaaaagttgaagagaaacttacctcagttgcagctgctgctgaagcagcagtttctgttgcaaaggcagctgcagaagctgccaagatggcgtcagaggctgcattgcaggcaaaaatgatggcagatgaagctcttagctcttctatatctgtaatgtccatgcatcacgaagctgatcaatataatgtcattagcagtccgcctatcttgtcaagttcaacgccagcatcatctctgaaaaccaagaacaagagtcatgccccaggttccatcatttctgtggcacgggaggctgctagaaagagggttgaagaggcatctgcagctgcaaaacgtgctgaaaacttggatgccatattgaaagctgcagagcttgctgcggaagctgtgttcagggcaggaaccattattggaatgggagaaccactaccttttaccctaagagagcttttggaagctgggccgaatggctactggaagtctgcgagtgcgagaaataaatctggaagttgtaatgataatccagtaacagaaacattggaggtagatgcacctgctaactttaacaaatctggcagaaagcgcggtcggaaacctaaatatgatcaagcactaccaaattcggagccatcttcaagctgcaaagaattacagtcatatggaatacactcaggagtaggacatggagttgttgaagatgttcccattactgtgtcacctaatggtaacaatgttacatcaccaataaacattatctggaatggcattgaaaagggatctgcagttgaggttttatctgacaaaggtgggtttggagtagcttggttttctgctaaggttattgatataaatggaaataatgtttttgtcaactatgacaaccacaatggatctggtcctcatgaagaatgggtgccattgcgacaagagggggataagccgcctcagatacgtcttgcgcaccctgctaccctctcaaaattcaaaactaggaaacgactcagggaaacagcaggaagttgtttatgggttatcggagatcatgtagacgcttgggtcaacaatagctgttggcgagagggagttatttctcagaattatgagactgatgagacgaaatatgatgtacatttttcagttggaggtggtggtgagtccttagtagttgatgcttggagccttcgtccatcgcgtgtttggaaagatggtcaatgggtagagtggtcccatgcaagagaaaggaaatccaaatctaataagggcgattcacctcctgagaaacgccaaagaatcgacttgcttcaaactggtggcaatctatctgttcttggcgaagtggggggttcttcgaaggacaataatataaacaatgcaaaaaacccggaggaattaaagccattgtctttgtctcagggggaaattgttttcaacattgggaaaagtgtagttgagaataaatctgattctcttgcattcagacgtcctggactacaaaaagaaggatcaaaggtcgtctatggtgttccaaaacatggaaagaagaagaagtttatggaagtaagcaaacattatgatgcaggccaatctgacaagatttctgagggcaattcatctaacagattcgtgaaacatctgatgccacaattgccaaggccacgtgaaaatgcttccaaagttgaccctattagaggaaggagagtaggtgaaacaaggtctagattacctaaacctacgaagtcccacaatgttggagctagcagtgttcctggaaaggattccttgcctatgcaaatgcatgttccaaattctggtgtttctgaaaggagttctagttttgcaggaagttcgacaagcacttccaacaatgagaagcccacttcagaaaataataatccggtgcttggtgtgggccttagaactgaagtttcttctggtcctgaactgcaaactgcatctactgttcctagttccaagccaaatgtatccactactaatcgagctaaaaggaaatatgttcccactgtcagtaacacaaacagaggtatactaaaaacctctgaaaagtcgagttctgattctgctgagccccgaaggactacttctgattctgctgaacctagacgatctaacaggcgaattcaaccaacttcaaggttactagagggcttgcaaagttccctcgtaatctcgaaagttcctggcgagaaggttcataggagcaattacaaaagtgcatcctcaagagggagaactcaagctcatgggtgagtgaaggcaccacatagctcatagctgcttttggtgggatagctctcgtgtacatagctgtagccgtccagtatggaaggaggatagggttggagtaggaagtctttattggagcgcaaggattcagatgtattataaactagcttaagtgcattgtgttaaccttttcttttacttgctcgaattatacttttccgtgttgtagaatacctggaaatatccttttagtatgtgtggatacaccgggaaagaaattgggtgccgtttaaattcatccgataatttaacgtgagtctgaacgtcaatttgactcgctactatcgtttgatcatatcattccttttctaagtcgtctacctgcagttgcagaagctggatggtgctctgctt

SEQ ID NO: 8121 - DNA, 6813 bp, Zea Mays
cgtcgctgctgcaggagctagggtttccggcgtgggcaaccggggtatgtgcagcagctgccgcactgcaggatctagggttccgacgactccgctcacggatggagggtggtagaagggcgagcgaatccctctcggcatacacccatggatcatgatgatactgattttcagagccaaaactttcaactagctggtgaaggcagtaacaaattctcatcaggtttgcgaccatttgcactaccaaaacttgatattgaggaccaattacaaggccatcttcgatttgataatttgatagatacagaagcatttttcagtgtacaagggcacgggaatagttggattgaggttctgtccactggaagcagtgttgttgattttagctctagcgcagctgaatcttgctcaatatctaaaactaataatgtctggtcagaggcaacatccactgaatctgtcgaaatgctattgaaatcggtgggagaaaatgagacaactggtgacatggataataatgcccaccttaagttaagtggtatggacagtcaaattgatcaatcgagtgtccatcctaaatctagtaactccctgccagatagtactgtagtgccaactgaggaagatcagtctttgagtactcattctagaatgacagacgatcttgatcgttctcagatatctcattctataatgactgccgacctttcaaacaccgagagtcagcttgaacattttcggcctttcttaatggacaagaaagctgagcaggcagtggattctgttggtgagaagtgcattgcaggtgagaagttgtcctcttcaaacaacgcaccaggaagctacccagccattgacaactattttggggcaggtcatgatgatcgttctttggacaaacttaatataccctcaactggagtagattcaaagaacttgaataatgaacctttcccagagttggctcccctgcagaacatatatactgattcatatcacttcaaggaagatactacagaatccgaggctggtgttactcctcaagattcaaagtttcgtcatatcaacgaaaataaagttgaaggtggactacaagaactgcaaagtttgtcatgtgctggtcagtccttgggcgctgtaaacttgtctagtcaagcaagcaatgaaactcttttgtcagaaagttctgatggattgctagaggccataacaaatccagttaagatgctgcacaggagtgatgatacttgcaataaagtgaacagcactcctcaaccatctttttcagcagtgcaacatggagctgaaggcctggaaaattcagttcacaggagcaatgagttcgttgttaaggagtttagtatcggttcaaattctcttttatctcaccaacctgaggcagacccaaaattttttaatccacatcctattagttctctgtctccgaaaagtaaaatttccgatgccacttgtgttcctgaagaaacaaagaatgttggatccaatagtataaacacctgctgtacaggtgatgaatcaaaacatgtagtgttggagaaccgacaatattctgttgacaacctaaaaagtggtgacatgggagaaaagatgtctggggaggaaatacccgcagtttcagggaacattgatcaaatgatagagaatgatcatgaagaaaaggctgccaatgctactggtacatccaaagataaggttgacccttctgacagtattgcacttgaaaactttgcagctgacactttcaatgcttcagaggattcagacattccgtcactaaatcataagaggtcatttgaggaacatgaatcttctgctttaggagtggagcctaaaaacacaaatttactccaatctacttctgggcttcaagagaaaatttcagcatcagtgatcagttctagtagtggcatcacacctaccattgttactgacaactttgatatttctgaggataaaaatggctgttcaataggtgtttcttctgttgattctcctgctttactagctgagaaggatttgaatatgtccacagtgaatactgaggagccattcaaggaaggggttaagtccgctttaggagatcaacacaatggtatttcttctggctctggacaaggaggggaaatgccagctgtcccaatggactcaaagattgccgtgtatagtggtactgtttctgctacagaaagggagaaattcaaggagcagcctaattctttgggttgtttgaccacaggagaaactcaggataaatcagatagtatggatccaaccacagcatctacattgggtggaaaggtggctgtgaagattgtaaaaactccactgaatgcaagtgatgatttgaatgcacatatgcaagatatagtgttaaatcaaggtacagattgtagttctggtactgtgccatctcaaggaaacgaaggctcaagcttattggaacctggtaatggtgatggaatctgcactggggttacatgtgggtccccttcagtgattagttgtgctgaatcctgtccccaagaaggtggacatggcagcactgctttacttcatcacacactatgtgggcaatctgaggatcctgaagatcatggggcctcagttgatggtatccagagctcaaaacaatgcaataccagaaatatagaatctgcacctggttctcaggagactagtgcagcaggaggtgatagaagcttctcatttgaggtgggagctccaccaaatgttgctgagaaagcccatagccctgtttggagccctttccctaaatacattacttctcagagtagcaagatggccacagaaaatactcaagctggaggttctttgaaggatactagtgatgatagtaagaaaatatctactgtggagtctggtaaagaacagctatcagaaaggaaagtaactgaaagttctgggggtggcctctcagacaactgcaatatagacgacatcattaagggtagaagttcaccgccgcggcagcatccaatccctgagtgttctgtttcttctgcagatttagtgaattttccattcacagatccacagcatttgcagctacgtgcacagatatttgtttatggagctcttattcaaggaacaccaccaggagaggcttacatggtggcggcttttggagaacctgtaggtggtggcaaacctacatgggaggctgcttggcgagctgcttttgaaagatttcagtataaaaaatcacctcatgtcagtttagagactcccacaagttcacttataggtagttctgtgcctgagaaagctagcaaaggtacagcaattacaactgtgccagctagcaaaaaagttggtaaaactgtggcgccagcacatcctgctgtaaccctacactctccaacttctgattttccttttggtagttctacatttaatctgcaacgaggcactcatctggattttagccaggcagtatcaccatttgcgtataattcacacatgagacatccgtctcctggtgttgccccctggtatacgcagagccctggtccacgccctgcagcctggttaattccaccacaaaacttaatatttgattcatcaatgcaaccggttattcctacaaatgaaactgcgaagggtgcatcatccaaaaacatatccgtttcacatactgtttcatctggtgttcttcccagcctggcaccttctattgtttcttctccaatagcagttgtgagtgatggaaaacagaaggctgcttctagctctaagcgtggcacaacatcacaaaagtcaagaaaaaaaaagaaagcttcagcaagttcagaacagcaacctgtaattgcttctcctcatctcaaaatgaacatgccatcttttactcctgccattaagcacacagcaggattgaccttatgcggtagcaagcctgttcctaacatgggccagattgcctctgaacataactaccagatcactggtggtatggatagtgatcaaagaatcatcttttcagaacagatccgtggtgcagtagaacaatcagctgcacaagctaaaagtgcaagcattgactcagtggaggcagttaagcacaaggagggcatatggagccatctatctacaatctcaaggaataagttacctccaaaagttgaagagaaacttacctcagttgcagctgctgctgaagcagcagtttctgttgcaaaggcagctgcagaagctgccaagatggcgtcagaggctgcattgcaggcaaaaatgatggcagatgaagctcttagctcttctatatctgtaatgtccatgcatcacgaagctgatcaatataatgtcattagcagtccgcctatcttgtcaagttcaacgccagcatcatctctgaaaaccaagaacaagagtcatgccccaggttccatcatttctgtggcacgggaggctgctagaaagagggttgaagaggcatctgcagctgcaaaacgtgctgaaaacttggatgccatattgaaagctgcagagcttgctgcggaagctgtgttcagggcaggaaccattattggaatgggagaaccactaccttttaccctaagagagcttttggaagctgggccgaatggctactggaagtctgcgagtgcgagaaataaatctggaagttgtaatgataatccagtaacagaaacattggaggtagatgcacctgctaactttaacaaatctggcagaaagcgcggtcggaaacctaaatatgatcaagcactaccaaattcggagccatcttcaagctgcaaagaattacagtcatatggaatacactcaggagtaggacatggagttgttgaagatgttcccattactgtgtcacctaatggtaacaatgttacatcaccaataaacattatctggaatggcattgaaaagggatctgcagttgaggttttatctgacaaaggtgggtttggagtagcttggttttctgctaaggttattgatataaatggaaataatgtttttgtcaactatgacaaccacaatggatctggtcctcatgaagaatgggtgccattgcgacaagagggggataagccgcctcagatacgtcttgcgcaccctgctaccctctcaaaattcaaaactaggaaacgactcagggaaacagcaggaagttgtttatgggttatcggagatcatgtagacgcttgggtcaacaatagctgttggcgagagggagttatttctcagaattatgagactgatgagacgaaatatgatgtacatttttcagttggaggtggtggtgagtccttagtagttgatgcttggagccttcgtccatcgcgtgtttggaaagatggtcaatgggtagagtggtcccatgcaagagaaaggaaatccaaatctaataagggcgattcacctcctgagaaacgccaaagaatcgacttgcttcaaactggtggcaatctatctgttcttggcgaagtggggggttcttcgaaggacaataatataaacaatgcaaaaaacccggaggaattaaagccattgtctttgtctcagggggaaattgttttcaacattgggaaaagtgtagttgagaataaatctgattctcttgcattcagacgtcctggactacaaaaagaaggatcaaaggtcgtctatggtgttccaaaacatggaaagaagaagaagtttatggaagtaagcaaacattatgatgcaggccaatctgacaagatttctgagggcaattcatctaacagattcgtgaaacatctgatgccacaattgccaaggccacgtgaaaatgcttccaaagttgaccctattagaggaaggagagtaggtgaaacaaggtctagattacctaaacctacgaagtcccacaatgttggagctagcagtgttcctggaaaggattccttgcctatgcaaatgcatgttccaaattctggtgtttctgaaaggagttctagttttgcaggaagttcgacaagcacttccaacaatgagaagcccacttcagaaaataataatccggtgcttggtgtgggccttagaactgaagtttcttctggtcctgaactgcaaactgcatctactgttcctagttccaagccaaatgtatccactactaatcgagctaaaaggaaatatgttcccactgtcagtaacacaaacagaggtatactaaaaacctctgaaaagtcgagttctgattctgctgagccccgaaggactacttctgattctgctgaacctagacgatctaacaggcgaattcaaccaacttcaaggttactagagggcttgcaaagttccctcgtaatctcgaaagttcctggcgagaaggttcataggagcaattacaaaagtgcatcctcaagagggagaactcaagctcatgggtgagtgaaggcaccacatagctcatagctgcttttggtgggatagctctcgtgtacatagctgtagccgtccagtatggaaggaggatagggttggagtaggaagtctttattggagcgcaaggattcagatgtattataaactagcttaagtgcattgtgttaaccttttcttttacttgctcgaattatacttttccgtgttgtagaatacctggaaatatccttttagtatgtgtggatacaccgggaaagaaattgggtgccgtttaaattcatccgataatttaacgtgagtctgaacgtcaatttgactcgctactatcgtttgatcatatcattccttttctaagtcgtctacctgcagttgcagaagctggatggtgctctgctt

SEQ ID NO: 8122 - DNA, 6791 bp, Zea Mays
cgtcgctgctgcaggagctagggtttccggcgtgggcaaccggggtatgtgcagcagctgccgcactgcaggatctagggttccgacgactccgctcacggatggagggtggtagaagggcgagcgaatccctctcggcatacacccatggatcatgatgatactgattttcagagccaaaactttcaactagctggtgaaggcagtaacaaattctcatcaggtttgcgaccatttgcactaccaaaacttgatattgaggaccaattacaaggccatcttcgatttgataatttgatagatacagaagcatttttcagtgtacaagggcacgggaatagttggattgaggttctgtccactggaagcagtgttgttgattttagctctagcgcagctgaatcttgctcaatatctaaaactaataatgtctggtcagaggcaacatccactgaatctgtcgaaatgctattgaaatcggtgggagaaaatgagacaactggtgacatggataataatgcccaccttaagttaagtggtatggacagtcaaattgatcaatcgagtgtccatcctaaatctagtaactccctgccagatagtactgtagtgccaactgaggaagatcagtctttgagtactcattctagaatgacagacgatcttgatcgttctcagatatctcattctataatgactgccgacctttcaaacaccgagagtcagcttgaacattttcggcctttcttaatggacaagaaagctgagcaggcagtggattctgttggtgagaagtgcattgcaggtgagaagttgtcctcttcaaacaacgcaccaggaagctacccagccattgacaactattttggggcaggtcatgatgatcgttctttggacaaacttaatataccctcaactggagtagattcaaagaacttgaataatgaacctttcccagagttggctcccctgcagaacatatatactgattcatatcacttcaaggaagatactacagaatccgaggctggtgttactcctcaagattcaaagtttcgtcatatcaacgaaaataaagttgaaggtggactacaagaactgcaaagtttgtcatgtgctggtcagtccttgggcgctgtaaacttgtctagtcaagcaagcaatgaaactcttttgtcagaaagttctgatggattgctagaggccataacaaatccagttaagatgctgcacaggagtgatgatacttgcaataaagtgaacagcactcctcaaccatctttttcagcagtgcaacatggagctgaaggcctggaaaattcagttcacaggagcaatgagttcgttgttaaggagtttagtatcggttcaaattctcttttatctcaccaacctgaggcagacccaaaattttttaatccacatcctattagttctctgtctccgaaaagtaaaatttccgatgccacttgtgttcctgaagaaacaaagaatgttggatccaatagtataaacacctgctgtacaggtgatgaatcaaaacatgtagtgttggagaaccgacaatattctgttgacaacctaaaaagtggtgacatgggagaaaagatgtctggggaggaaatacccgcagtttcagggaacattgatcaaatgatagagaatgatcatgaagaaaaggctgccaatgctactggtacatccaaagataaggttgacccttctgacagtattgcacttgaaaactttgcagctgacactttcaatgcttcagaggattcagacattccgtcactaaatcataagaggtcatttgaggaacatgaatcttctgctttaggagtggagcctaaaaacacaaatttactccaatctacttctgggcttcaagagaaaatttcagcatcagtgatcagttctagtagtggcatcacacctaccattgttactgacaactttgatatttctgaggataaaaatggctgttcaataggtgtttcttctgttgattctcctgctttactagctgagaaggatttgaatatgtccacagtgaatactgaggagccattcaaggaaggggttaagtccgctttaggagatcaacacaatggtatttcttctggctctggacaaggaggggaaatgccagctgtcccaatggactcaaagattgccgtgtatagtggtactgtttctgctacagaaagggagaaattcaaggagcagcctaattctttgggttgtttgaccacaggagaaactcaggataaatcagatagtatggatccaaccacagcatctacattgggtggaaaggtggctgtgaagattgtaaaaactccactgaatgcaagtgatgatttgaatgcacatatgcaagatatagtgttaaatcaaggtacagattgtagttctggtactgtgccatctcaaggaaacgaaggctcaagcttattggaacctggtaatggtgatggaatctgcactggggttacatgtgggtccccttcagtgattagttgtgctgaatcctgtccccaagaaggtggacatggcagcactgctttacttcatcacacactatgtgggcaatctgaggatcctgaagatcatggggcctcagttgatggtatccagagctcaaaacaatgcaataccagaaatatagaatctgcacctggttctcaggagactagtgcagcaggaggtgatagaagcttctcatttgaggtgggagctccaccaaatgttgctgagaaagcccatagccctgtttggagccctttccctaaatacattacttctcagagtagcaagaaaatactcaagctggaggttctttgaaggatactagtgatgatagtaagaaaatatctactgtggagtctggtaaagaacagctatcagaaaggaaagtaactgaaagttctgggggtggcctctcagacaactgcaatatagacgacatcattaagggtagaagttcaccgccgcggcagcatccaatccctgagtgttctgatttagtgaattttccattcacagatccacagcatttgcagctacgtgcacagatatttgtttatggagctcttattcaaggaacaccaccaggagaggcttacatggtggcggcttttggagaacctgtaggtggtggcaaacctacatgggaggctgcttggcgagctgcttttgaaagatttcagtataaaaaatcacctcatgtcagtttagagactcccacaagttcacttataggtagttctgtgcctgagaaagctagcaaaggtacagcaattacaactgtgccagctagcaaaaaagttggtaaaactgtggcgccagcacatcctgctgtaaccctacactctccaacttctgattttccttttggtagttctacatttaatctgcaacgaggcactcatctggattttagccaggcagtatcaccatttgcgtataattcacacatgagacatccgtctcctggtgttgccccctggtatacgcagagccctggtccacgccctgcagcctggttaattccaccacaaaacttaatatttgattcatcaatgcaaccggttattcctacaaatgaaactgcgaagggtgcatcatccaaaaacatatccgtttcacatactgtttcatctggtgttcttcccagcctggcaccttctattgtttcttctccaatagcagttgtgagtgatggaaaacagaaggctgcttctagctctaagcgtggcacaacatcacaaaagtcaagaaaaaaaaagaaagcttcagcaagttcagaacagcaacctgtaattgcttctcctcatctcaaaatgaacatgccatcttttactcctgccattaagcacacagcaggattgaccttatgcggtagcaagcctgttcctaacatgggccagattgcctctgaacataactaccagatcactggtggtatggatagtgatcaaagaatcatcttttcagaacagatccgtggtgcagtagaacaatcagctgcacaagctaaaagtgcaagcattgactcagtggaggcagttaagcacaaggagggcatatggagccatctatctacaatctcaaggaataagttacctccaaaagttgaagagaaacttacctcagttgcagctgctgctgaagcagcagtttctgttgcaaaggcagctgcagaagctgccaagatggcgtcagaggctgcattgcaggcaaaaatgatggcagatgaagctcttagctcttctatatctgtaatgtccatgcatcacgaagctgatcaatataatgtcattagcagtccgcctatcttgtcaagttcaacgccagcatcatctctgaaaaccaagaacaagagtcatgccccaggttccatcatttctgtggcacgggaggctgctagaaagagggttgaagaggcatctgcagctgcaaaacgtgctgaaaacttggatgccatattgaaagctgcagagcttgctgcggaagctgtgttcagggcaggaaccattattggaatgggagaaccactaccttttaccctaagagagcttttggaagctgggccgaatggctactggaagtctgcgagtgcgagaaataaatctggaagttgtaatgataatccagtaacagaaacattggaggtagatgcacctgctaactttaacaaatctggcagaaagcgcggtcggaaacctaaatatgatcaagcactaccaaattcggagccatcttcaagctgcaaagaattacagtcatatggaatacactcaggagtaggacatggagttgttgaagatgttcccattactgtgtcacctaatggtaacaatgttacatcaccaataaacattatctggaatggcattgaaaagggatctgcagttgaggttttatctgacaaaggtgggtttggagtagcttggttttctgctaaggttattgatataaatggaaataatgtttttgtcaactatgacaaccacaatggatctggtcctcatgaagaatgggtgccattgcgacaagagggggataagccgcctcagatacgtcttgcgcaccctgctaccctctcaaaattcaaaactaggaaacgactcagggaaacagcaggaagttgtttatgggttatcggagatcatgtagacgcttgggtcaacaatagctgttggcgagagggagttatttctcagaattatgagactgatgagacgaaatatgatgtacatttttcagttggaggtggtggtgagtccttagtagttgatgcttggagccttcgtccatcgcgtgtttggaaagatggtcaatgggtagagtggtcccatgcaagagaaaggaaatccaaatctaataagggcgattcacctcctgagaaacgccaaagaatcgacttgcttcaaactggtggcaatctatctgttcttggcgaagtggggggttcttcgaaggacaataatataaacaatgcaaaaaacccggaggaattaaagccattgtctttgtctcagggggaaattgttttcaacattgggaaaagtgtagttgagaataaatctgattctcttgcattcagacgtcctggactacaaaaagaaggatcaaaggtcgtctatggtgttccaaaacatggaaagaagaagaagtttatggaagtaagcaaacattatgatgcaggccaatctgacaagatttctgagggcaattcatctaacagattcgtgaaacatctgatgccacaattgccaaggccacgtgaaaatgcttccaaagttgaccctattagaggaaggagagtaggtgaaacaaggtctagattacctaaacctacgaagtcccacaatgttggagctagcagtgttcctggaaaggattccttgcctatgcaaatgcatgttccaaattctggtgtttctgaaaggagttctagttttgcaggaagttcgacaagcacttccaacaatgagaagcccacttcagaaaataataatccggtgcttggtgtgggccttagaactgaagtttcttctggtcctgaactgcaaactgcatctactgttcctagttccaagccaaatgtatccactactaatcgagctaaaaggaaatatgttcccactgtcagtaacacaaacagaggtatactaaaaacctctgaaaagtcgagttctgattctgctgagccccgaaggactacttctgattctgctgaacctagacgatctaacaggcgaattcaaccaacttcaaggttactagagggcttgcaaagttccctcgtaatctcgaaagttcctggcgagaaggttcataggagcaattacaaaagtgcatcctcaagagggagaactcaagctcatgggtgagtgaaggcaccacatagctcatagctgcttttggtgggatagctctcgtgtacatagctgtagccgtccagtatggaaggaggatagggttggagtaggaagtctttattggagcgcaaggattcagatgtattataaactagcttaagtgcattgtgttaaccttttcttttacttgctcgaattatacttttccgtgttgtagaatacctggaaatatccttttagtatgtgtggatacaccgggaaagaaattgggtgccgtttaaattcatccgataatttaacgtgagtctgaacgtcaatttgactcgctactatcgtttgatcatatcattccttttctaagtcgtctacctgcagttgcagaagctggatggtgctctgctt

SEQ ID NO: 8123 - DNA, 6444 bp, Zea Mays
cgtcgctgctgcaggagctagggtttccggcgtgggcaaccggggtatgtgcagcagctgccgcactgcaggatctagggttccgacgactccgctcacggatggagggtggtagaagggcgagcgaatccctctcggcatacacccatggatcatgatgatactgattttcagagccaaaactttcaactagctggtgaaggcagtaacaaattctcatcaggtttgcgaccatttgcactaccaaaacttgatattgaggaccaattacaaggccatcttcgatttgataatttgatagatacagaagcatttttcagtgtacaagggcacgggaatagttggattgaggttctgtccactggaagcagtgttgttgattttagctctagcgcagctgaatcttgctcaatatctaaaactaataatgtctggtcagaggcaacatccactgaatctgtcgaaatgctattgaaatcggtgggagaaaatgagacaactggtgacatggataataatgcccaccttaagttaagtggtatggacagtcaaattgatcaatcgagtgtccatcctaaatctagtaactccctgccagatagtactgtagtgccaactgaggaagatcagtctttgagtactcattctagaatgacagacgatcttgatcgttctcagatatctcattctataatgactgccgacctttcaaacaccgagagtcagcttgaacattttcggcctttcttaatggacaagaaagctgagcaggcagtggattctgttggtgagaagtgcattgcaggtgagaagttgtcctcttcaaacaacgcaccaggaagctacccagccattgacaactattttggggcaggtcatgatgatcgttctttggacaaacttaatataccctcaactggagtagattcaaagaacttgaataatgaacctttcccagagttggctcccctgcagaacatatatactgattcatatcacttcaaggaagatactacagaatccgaggctggtgttactcctcaagattcaaagtttcgtcatatcaacgaaaataaagttgaaggtggactacaagaactgcaaagtttgtcatgtgctggtcagtccttgggcgctgtaaacttgtctagtcaagcaagcaatgaaactcttttgtcagaaagttctgatggattgctagaggccataacaaatccagttaagatgctgcacaggagtgatgatacttgcaataaagtgaacagcactcctcaaccatctttttcagcagtgcaacatggagctgaaggcctggaaaattcagttcacaggagcaatgagttcgttgttaaggagtttagtatcggttcaaattctcttttatctcaccaacctgaggcagacccaaaattttttaatccacatcctattagttctctgtctccgaaaagtaaaatttccgatgccacttgtgttcctgaagaaacaaagaatgttggatccaatagtataaacacctgctgtacaggtgatgaatcaaaacatgtagtgttggagaaccgacaatattctgttgacaacctaaaaagtggtgacatgggagaaaagatgtctggggaggaaatacccgcagtttcagggaacattgatcaaatgatagagaatgatcatgaagaaaaggctgccaatgctactggtacatccaaagataaggttgacccttctgacagtattgcacttgaaaactttgcagctgacactttcaatgcttcagaggattcagacattccgtcactaaatcataagaggtcatttgaggaacatgaatcttctgctttaggagtggagcctaaaaacacaaatttactccaatctacttctgggcttcaagagaaaatttcagcatcagtgatcagttctagtagtggcatcacacctaccattgttactgacaactttgatatttctgaggataaaaatggctgttcaataggtgtttcttctgttgattctcctgctttactagctgagaaggatttgaatatgtccacagtgaatactgaggagccattcaaggaaggggttaagtccgctttaggagatcaacacaatggtatttcttctggctctggacaaggaggggaaatgccagctgtcccaatggactcaaagattgccgtgtatagtggtactgtttctgctacagaaagggagaaattcaaggagcagcctaattctttgggttgtttgaccacaggagaaactcaggataaatcagatagtatggatccaaccacagcatctacattgggtggaaaggtggctgtgaagattgtaaaaactccactgaatgcaagtgatgatttgaatgcacatatgcaagatggccacagaaaatactcaagctggaggttctttgaaggatactagtgatgatagtaagaaaatatctactgtggagtctggtaaagaacagctatcagaaaggaaagtaactgaaagttctgggggtggcctctcagacaactgcaatatagacgacatcattaagggtagaagttcaccgccgcggcagcatccaatccctgagtgttctggtatgaaaatctcttacgttttgacagttttgaagctattaacaatttaattgactagaatatttcagtttcttctgcagatttagtgaattttccattcacagatccacagcatttgcagctacgtgcacagatatttgtttatggagctcttattcaaggaacaccaccaggagaggcttacatggtggcggcttttggagaacctgtaggtggtggcaaacctacatgggaggctgcttggcgagctgcttttgaaagatttcagtataaaaaatcacctcatgtcagtttagagactcccacaagttcacttataggtagttctgtgcctgagaaagctagcaaaggtacagcaattacaactgtgccagctagcaaaaaagttggtaaaactgtggcgccagcacatcctgctgtaaccctacactctccaacttctgattttccttttggtagttctacatttaatctgcaacgaggcactcatctggattttagccaggcagtatcaccatttgcgtataattcacacatgagacatccgtctcctggtgttgccccctggtatacgcagagccctggtccacgccctgcagcctggttaattccaccacaaaacttaatatttgattcatcaatgcaaccggttattcctacaaatgaaactgcgaagggtgcatcatccaaaaacatatccgtttcacatactgtttcatctggtgttcttcccagcctggcaccttctattgtttcttctccaatagcagttgtgagtgatggaaaacagaaggctgcttctagctctaagcgtggcacaacatcacaaaagtcaagaaaaaaaaagaaagcttcagcaagttcagaacagcaacctgtaattgcttctcctcatctcaaaatgaacatgccatcttttactcctgccattaagcacacagcaggattgaccttatgcggtagcaagcctgttcctaacatgggccagattgcctctgaacataactaccagatcactggtggtatggatagtgatcaaagaatcatcttttcagaacagatccgtggtgcagtagaacaatcagctgcacaagctaaaagtgcaagcattgactcagtggaggcagttaagcacaaggagggcatatggagccatctatctacaatctcaaggaataagttacctccaaaagttgaagagaaacttacctcagttgcagctgctgctgaagcagcagtttctgttgcaaaggcagctgcagaagctgccaagatggcgtcagaggctgcattgcaggcaaaaatgatggcagatgaagctcttagctcttctatatctgtaatgtccatgcatcacgaagctgatcaatataatgtcattagcagtccgcctatcttgtcaagttcaacgccagcatcatctctgaaaaccaagaacaagagtcatgccccaggttccatcatttctgtggcacgggaggctgctagaaagagggttgaagaggcatctgcagctgcaaaacgtgctgaaaacttggatgccatattgaaagctgcagagcttgctgcggaagctgtgttcagggcaggaaccattattggaatgggagaaccactaccttttaccctaagagagcttttggaagctgggccgaatggctactggaagtctgcgagtgcgagaaataaatctggaagttgtaatgataatccagtaacagaaacattggaggtagatgcacctgctaactttaacaaatctggcagaaagcgcggtcggaaacctaaatatgatcaagcactaccaaattcggagccatcttcaagctgcaaagaattacagtcatatggaatacactcaggagtaggacatggagttgttgaagatgttcccattactgtgtcacctaatggtaacaatgttacatcaccaataaacattatctggaatggcattgaaaagggatctgcagttgaggttttatctgacaaaggtgggtttggagtagcttggttttctgctaaggttattgatataaatggaaataatgtttttgtcaactatgacaaccacaatggatctggtcctcatgaagaatgggtgccattgcgacaagagggggataagccgcctcagatacgtcttgcgcaccctgctaccctctcaaaattcaaaactaggaaacgactcagggaaacagcaggaagttgtttatgggttatcggagatcatgtagacgcttgggtcaacaatagctgttggcgagagggagttatttctcagaattatgagactgatgagacgaaatatgatgtacatttttcagttggaggtggtggtgagtccttagtagttgatgcttggagccttcgtccatcgcgtgtttggaaagatggtcaatgggtagagtggtcccatgcaagagaaaggaaatccaaatctaataagggcgattcacctcctgagaaacgccaaagaatcgacttgcttcaaactggtggcaatctatctgttcttggcgaagtggggggttcttcgaaggacaataatataaacaatgcaaaaaacccggaggaattaaagccattgtctttgtctcagggggaaattgttttcaacattgggaaaagtgtagttgagaataaatctgattctcttgcattcagacgtcctggactacaaaaagaaggatcaaaggtcgtctatggtgttccaaaacatggaaagaagaagaagtttatggaagtaagcaaacattatgatgcaggccaatctgacaagatttctgagggcaattcatctaacagattcgtgaaacatctgatgccacaattgccaaggccacgtgaaaatgcttccaaagttgaccctattagaggaaggagagtaggtgaaacaaggtctagattacctaaacctacgaagtcccacaatgttggagctagcagtgttcctggaaaggattccttgcctatgcaaatgcatgttccaaattctggtgtttctgaaaggagttctagttttgcaggaagttcgacaagcacttccaacaatgagaagcccacttcagaaaataataatccggtgcttggtgtgggccttagaactgaagtttcttctggtcctgaactgcaaactgcatctactgttcctagttccaagccaaatgtatccactactaatcgagctaaaaggaaatatgttcccactgtcagtaacacaaacagaggtatactaaaaacctctgaaaagtcgagttctgattctgctgagccccgaaggactacttctgattctgctgaacctagacgatctaacaggcgaattcaaccaacttcaaggttactagagggcttgcaaagttccctcgtaatctcgaaagttcctggcgagaaggttcataggagcaattacaaaagtgcatcctcaagagggagaactcaagctcatgggtgagtgaaggcaccacatagctcatagctgcttttggtgggatagctctcgtgtacatagctgtagccgtccagtatggaaggaggatagggttggagtaggaagtctttattggagcgcaaggattcagatgtattataaactagcttaagtgcattgtgttaaccttttcttttacttgctcgaattatacttttccgtgttgtagaatacctggaaatatccttttagtatgtgtggatacaccgggaaagaaattgggtgccgtttaaattcatccgataatttaacgtgagtctgaacgtcaatttgactcgctactatcgtttgatcatatcattccttttctaagtcgtctacctgcagttgcagaagctggatggtgctctgctt

SEQ ID NO: 8124 - DNA, 6725 bp, Zea Mays
cgtcgctgctgcaggagctagggtttccggcgtgggcaaccggggtatgtgcagcagctgccgcactgcaggatctagggttccgacgactccgctcacggatggagggtggtagaagggcgagcgaatccctctcggcatacacccatggatcatgatgatactgattttcagagccaaaactttcaactagctggtgaaggcagtaacaaattctcatcaggtttgcgaccatttgcactaccaaaacttgatattgaggaccaattacaaggccatcttcgatttgataatttgatagatacagaagcatttttcagtgtacaagggcacgggaatagttggattgaggttctgtccactggaagcagtgttgttgattttagctctagcgcagctgaatcttgctcaatatctaaaactaataatgtctggtcagaggcaacatccactgaatctgtcgaaatgctattgaaatcggtgggagaaaatgagacaactggtgacatggataataatgcccaccttaagttaagtggtatggacagtcaaattgatcaatcgagtgtccatcctaaatctagtaactccctgccagatagtactgtagtgccaactgaggaagatcagtctttgagtactcattctagaatgacagacgatcttgatcgttctcagatatctcattctataatgactgccgacctttcaaacaccgagagtcagcttgaacattttcggcctttcttaatggacaagaaagctgagcaggcagtggattctgttggtgagaagtgcattgcaggtgagaagttgtcctcttcaaacaacgcaccaggaagctacccagccattgacaactattttggggcaggtcatgatgatcgttctttggacaaacttaatataccctcaactggagtagattcaaagaacttgaataatgaacctttcccagagttggctcccctgcagaacatatatactgattcatatcacttcaaggaagatactacagaatccgaggctggtgttactcctcaagattcaaagtttcgtcatatcaacgaaaataaagttgaaggtggactacaagaactgcaaagtttgtcatgtgctggtcagtccttgggcgctgtaaacttgtctagtcaagcaagcaatgaaactcttttgtcagaaagttctgatggattgctagaggccataacaaatccagttaagatgctgcacaggagtgatgatacttgcaataaagtgaacagcactcctcaaccatctttttcagcagtgcaacatggagctgaaggcctggaaaattcagttcacaggagcaatgagttcgttgttaaggagtttagtatcggttcaaattctcttttatctcaccaacctgaggcagacccaaaattttttaatccacatcctattagttctctgtctccgaaaagtaaaatttccgatgccacttgtgttcctgaagaaacaaagaatgttggatccaatagtataaacacctgctgtacaggtgatgaatcaaaacatgtagtgttggagaaccgacaatattctgttgacaacctaaaaagtggtgacatgggagaaaagatgtctggggaggaaatacccgcagtttcagggaacattgatcaaatgatagagaatgatcatgaagaaaaggctgccaatgctactggtacatccaaagataaggttgacccttctgacagtattgcacttgaaaactttgcagctgacactttcaatgcttcagaggattcagacattccgtcactaaatcataagaggtcatttgaggaacatgaatcttctgctttaggagtggagcctaaaaacacaaatttactccaatctacttctgggcttcaagagaaaatttcagcatcagtgatcagttctagtagtggcatcacacctaccattgttactgacaactttgatatttctgaggataaaaatggctgttcaataggtgtttcttctgttgattctcctgctttactagctgagaaggatttgaatatgtccacagtgaatactgaggagccattcaaggaaggggttaagtccgctttaggagatcaacacaatggtatttcttctggctctggacaaggaggggaaatgccagctgtcccaatggactcaaagattgccgtgtatagtggtactgtttctgctacagaaagggagaaattcaaggagcagcctaattctttgggttgtttgaccacaggagaaactcaggataaatcagatagtatggatccaaccacagcatctacattgggtggaaaggtggctgtgaagattgtaaaaactccactgaatgcaagtgatgatttgaatgcacatatgcaagatatagtgttaaatcaaggtacagattgtagttctggtactgtgccatctcaaggaaacgaaggctcaagcttattggaacctggtaatggtgatggaatctgcactggggttacatgtgggtccccttcagtgattagttgtgctgaatcctgtccccaagaaggtggacatggcagcactgctttacttcatcacacactatgtgggcaatctgaggatcctgaagatcatggggcctcagttgatggtatccagagctcaaaacaatgcaataccagaaatatagaatctgcacctggttctcaggagactagtgcagcaggaggtgatagaagcttctcatttgaggtgggagctccaccaaatgttgctgagaaagcccatagccctgtttggagccctttccctaaatacattacttctcagagtagcaagatggccacagaaaatactcaagctggaggttctttgaaggatactagtgatgatagtaagaaaatatctactgtggagtctggtaaagaacagctatcagaaaggaaagtaactgaaagttctgggggtggcctctcagacaactgcaatatagacgacatcattaagggtagaagttcaccgccgcggcagcatccaatccctgagtgttctgtcaaggaacaccaccaggagaggcttacatggtggcggcttttggagaacctgtaggtggtggcaaacctacatgggaggctgcttggcgagctgcttttgaaagatttcagtataaaaaatcacctcatgtcagtttagagactcccacaagttcacttataggtagttctgtgcctgagaaagctagcaaaggtacagcaattacaactgtgccagctagcaaaaaagttggtaaaactgtggcgccagcacatcctgctgtaaccctacactctccaacttctgattttccttttggtagttctacatttaatctgcaacgaggcactcatctggattttagccaggcagtatcaccatttgcgtataattcacacatgagacatccgtctcctggtgttgccccctggtatacgcagagccctggtccacgccctgcagcctggttaattccaccacaaaacttaatatttgattcatcaatgcaaccggttattcctacaaatgaaactgcgaagggtgcatcatccaaaaacatatccgtttcacatactgtttcatctggtgttcttcccagcctggcaccttctattgtttcttctccaatagcagttgtgagtgatggaaaacagaaggctgcttctagctctaagcgtggcacaacatcacaaaagtcaagaaaaaaaaagaaagcttcagcaagttcagaacagcaacctgtaattgcttctcctcatctcaaaatgaacatgccatcttttactcctgccattaagcacacagcaggattgaccttatgcggtagcaagcctgttcctaacatgggccagattgcctctgaacataactaccagatcactggtggtatggatagtgatcaaagaatcatcttttcagaacagatccgtggtgcagtagaacaatcagctgcacaagctaaaagtgcaagcattgactcagtggaggcagttaagcacaaggagggcatatggagccatctatctacaatctcaaggaataagttacctccaaaagttgaagagaaacttacctcagttgcagctgctgctgaagcagcagtttctgttgcaaaggcagctgcagaagctgccaagatggcgtcagaggctgcattgcaggcaaaaatgatggcagatgaagctcttagctcttctatatctgtaatgtccatgcatcacgaagctgatcaatataatgtcattagcagtccgcctatcttgtcaagttcaacgccagcatcatctctgaaaaccaagaacaagagtcatgccccaggttccatcatttctgtggcacgggaggctgctagaaagagggttgaagaggcatctgcagctgcaaaacgtgctgaaaacttggatgccatattgaaagctgcagagcttgctgcggaagctgtgttcagggcaggaaccattattggaatgggagaaccactaccttttaccctaagagagcttttggaagctgggccgaatggctactggaagtctgcgagtgcgagaaataaatctggaagttgtaatgataatccagtaacagaaacattggaggtagatgcacctgctaactttaacaaatctggcagaaagcgcggtcggaaacctaaatatgatcaagcactaccaaattcggagccatcttcaagctgcaaagaattacagtcatatggaatacactcaggagtaggacatggagttgttgaagatgttcccattactgtgtcacctaatggtaacaatgttacatcaccaataaacattatctggaatggcattgaaaagggatctgcagttgaggttttatctgacaaaggtgggtttggagtagcttggttttctgctaaggttattgatataaatggaaataatgtttttgtcaactatgacaaccacaatggatctggtcctcatgaagaatgggtgccattgcgacaagagggggataagccgcctcagatacgtcttgcgcaccctgctaccctctcaaaattcaaaactaggaaacgactcagggaaacagcaggaagttgtttatgggttatcggagatcatgtagacgcttgggtcaacaatagctgttggcgagagggagttatttctcagaattatgagactgatgagacgaaatatgatgtacatttttcagttggaggtggtggtgagtccttagtagttgatgcttggagccttcgtccatcgcgtgtttggaaagatggtcaatgggtagagtggtcccatgcaagagaaaggaaatccaaatctaataagggcgattcacctcctgagaaacgccaaagaatcgacttgcttcaaactggtggcaatctatctgttcttggcgaagtggggggttcttcgaaggacaataatataaacaatgcaaaaaacccggaggaattaaagccattgtctttgtctcagggggaaattgttttcaacattgggaaaagtgtagttgagaataaatctgattctcttgcattcagacgtcctggactacaaaaagaaggatcaaaggtcgtctatggtgttccaaaacatggaaagaagaagaagtttatggaagtaagcaaacattatgatgcaggccaatctgacaagatttctgagggcaattcatctaacagattcgtgaaacatctgatgccacaattgccaaggccacgtgaaaatgcttccaaagttgaccctattagaggaaggagagtaggtgaaacaaggtctagattacctaaacctacgaagtcccacaatgttggagctagcagtgttcctggaaaggattccttgcctatgcaaatgcatgttccaaattctggtgtttctgaaaggagttctagttttgcaggaagttcgacaagcacttccaacaatgagaagcccacttcagaaaataataatccggtgcttggtgtgggccttagaactgaagtttcttctggtcctgaactgcaaactgcatctactgttcctagttccaagccaaatgtatccactactaatcgagctaaaaggaaatatgttcccactgtcagtaacacaaacagaggtatactaaaaacctctgaaaagtcgagttctgattctgctgagccccgaaggactacttctgattctgctgaacctagacgatctaacaggcgaattcaaccaacttcaaggttactagagggcttgcaaagttccctcgtaatctcgaaagttcctggcgagaaggttcataggagcaattacaaaagtgcatcctcaagagggagaactcaagctcatgggtgagtgaaggcaccacatagctcatagctgcttttggtgggatagctctcgtgtacatagctgtagccgtccagtatggaaggaggatagggttggagtaggaagtctttattggagcgcaaggattcagatgtattataaactagcttaagtgcattgtgttaaccttttcttttacttgctcgaattatacttttccgtgttgtagaatacctggaaatatccttttagtatgtgtggatacaccgggaaagaaattgggtgccgtttaaattcatccgataatttaacgtgagtctgaacgtcaatttgactcgctactatcgtttgatcatatcattccttttctaagtcgtctacctgcagttgcagaagctggatggtgctctgctt

SEQ ID NO: 8125 - DNA, 4813 bp, Zea Mays
cgtcgctgctgcaggagctagggtttccggcgtgggcaaccggggtatgtgcagcagctgccgcactgcaggatctagggttccgacgactccgctcacggatggagggtggtagaagggcgagcgaatccctctcggcatacacccatggatcatgatgatactgattttcagagccaaaactttcaactagctggtgaaggcagtaacaaattctcatcaggtttgcgaccatttgcactaccaaaacttgatattgaggaccaattacaaggccatcttcgatttgataatttgatagatacagaagcatttttcagtgtacaagggcacgggaatagttggattgaggttctgtccactggaagcagtgttgttgattttagctctagcgcagctgaatcttgctcaatatctaaaactaataatgtctggtcagaggcaacatccactgaatctgtcgaaatgctattgaaatcggtggacatggcagcactgctttacttcatcacacactatgtgggcaatctgaggatcctgaagatcatggggcctcagttgatggtatccagagctcaaaacaatgcaataccagaaatatagaatctgcacctggttctcaggagactagtgcagcaggaggtgatagaagcttctcatttgaggtgggagctccaccaaatgttgctgagaaagcccatagccctgtttggagccctttccctaaatacattacttctcagagtagcaagatggccacagaaaatactcaagctggaggttctttgaaggatactagtgatgatagtaagaaaatatctactgtggagtctggtaaagaacagctatcagaaaggaaagtaactgaaagttctgggggtggcctctcagacaactgcaatatagacgacatcattaagggtagaagttcaccgccgcggcagcatccaatccctgagtgttctggtatgaaaatctcttacgttttgacagttttgaagctattaacaatttaattgactagaatatttcagtttcttctgcagatttagtgaattttccattcacagatccacagcatttgcagctacgtgcacagatatttgtttatggagctcttattcaaggaacaccaccaggagaggcttacatggtggcggcttttggagaacctgtaggtggtggcaaacctacatgggaggctgcttggcgagctgcttttgaaagatttcagtataaaaaatcacctcatgtcagtttagagactcccacaagttcacttataggtagttctgtgcctgagaaagctagcaaaggtacagcaattacaactgtgccagctagcaaaaaagttggtaaaactgtggcgccagcacatcctgctgtaaccctacactctccaacttctgattttccttttggtagttctacatttaatctgcaacgaggcactcatctggattttagccaggcagtatcaccatttgcgtataattcacacatgagacatccgtctcctggtgttgccccctggtatacgcagagccctggtccacgccctgcagcctggttaattccaccacaaaacttaatatttgattcatcaatgcaaccggttattcctacaaatgaaactgcgaagggtgcatcatccaaaaacatatccgtttcacatactgtttcatctggtgttcttcccagcctggcaccttctattgtttcttctccaatagcagttgtgagtgatggaaaacagaaggctgcttctagctctaagcgtggcacaacatcacaaaagtcaagaaaaaaaaagaaagcttcagcaagttcagaacagcaacctgtaattgcttctcctcatctcaaaatgaacatgccatcttttactcctgccattaagcacacagcaggattgaccttatgcggtagcaagcctgttcctaacatgggccagattgcctctgaacataactaccagatcactggtggtatggatagtgatcaaagaatcatcttttcagaacagatccgtggtgcagtagaacaatcagctgcacaagctaaaagtgcaagcattgactcagtggaggcagttaagcacaaggagggcatatggagccatctatctacaatctcaaggaataagttacctccaaaagttgaagagaaacttacctcagttgcagctgctgctgaagcagcagtttctgttgcaaaggcagctgcagaagctgccaagatggcgtcagaggctgcattgcaggcaaaaatgatggcagatgaagctcttagctcttctatatctgtaatgtccatgcatcacgaagctgatcaatataatgtcattagcagtccgcctatcttgtcaagttcaacgccagcatcatctctgaaaaccaagaacaagagtcatgccccaggttccatcatttctgtggcacgggaggctgctagaaagagggttgaagaggcatctgcagctgcaaaacgtgctgaaaacttggatgccatattgaaagctgcagagcttgctgcggaagctgtgttcagggcaggaaccattattggaatgggagaaccactaccttttaccctaagagagcttttggaagctgggccgaatggctactggaagtctgcgagtgcgagaaataaatctggaagttgtaatgataatccagtaacagaaacattggaggtagatgcacctgctaactttaacaaatctggcagaaagcgcggtcggaaacctaaatatgatcaagcactaccaaattcggagccatcttcaagctgcaaagaattacagtcatatggaatacactcaggagtaggacatggagttgttgaagatgttcccattactgtgtcacctaatggtaacaatgttacatcaccaataaacattatctggaatggcattgaaaagggatctgcagttgaggttttatctgacaaaggtgggtttggagtagcttggttttctgctaaggttattgatataaatggaaataatgtttttgtcaactatgacaaccacaatggatctggtcctcatgaagaatgggtgccattgcgacaagagggggataagccgcctcagatacgtcttgcgcaccctgctaccctctcaaaattcaaaactaggaaacgactcagggaaacagcaggaagttgtttatgggttatcggagatcatgtagacgcttgggtcaacaatagctgttggcgagagggagttatttctcagaattatgagactgatgagacgaaatatgatgtacatttttcagttggaggtggtggtgagtccttagtagttgatgcttggagccttcgtccatcgcgtgtttggaaagatggtcaatgggtagagtggtcccatgcaagagaaaggaaatccaaatctaataagggcgattcacctcctgagaaacgccaaagaatcgacttgcttcaaactggtggcaatctatctgttcttggcgaagtggggggttcttcgaaggacaataatataaacaatgcaaaaaacccggaggaattaaagccattgtctttgtctcagggggaaattgttttcaacattgggaaaagtgtagttgagaataaatctgattctcttgcattcagacgtcctggactacaaaaagaaggatcaaaggtcgtctatggtgttccaaaacatggaaagaagaagaagtttatggaagtaagcaaacattatgatgcaggccaatctgacaagatttctgagggcaattcatctaacagattcgtgaaacatctgatgccacaattgccaaggccacgtgaaaatgcttccaaagttgaccctattagaggaaggagagtaggtgaaacaaggtctagattacctaaacctacgaagtcccacaatgttggagctagcagtgttcctggaaaggattccttgcctatgcaaatgcatgttccaaattctggtgtttctgaaaggagttctagttttgcaggaagttcgacaagcacttccaacaatgagaagcccacttcagaaaataataatccggtgcttggtgtgggccttagaactgaagtttcttctggtcctgaactgcaaactgcatctactgttcctagttccaagccaaatgtatccactactaatcgagctaaaaggaaatatgttcccactgtcagtaacacaaacagaggtatactaaaaacctctgaaaagtcgagttctgattctgctgagccccgaaggactacttctgattctgctgaacctagacgatctaacaggcgaattcaaccaacttcaaggttactagagggcttgcaaagttccctcgtaatctcgaaagttcctggcgagaaggttcataggagcaattacaaaagtgcatcctcaagagggagaactcaagctcatgggtgagtgaaggcaccacatagctcatagctgcttttggtgggatagctctcgtgtacatagctgtagccgtccagtatggaaggaggatagggttggagtaggaagtctttattggagcgcaaggattcagatgtattataaactagcttaagtgcattgtgttaaccttttcttttacttgctcgaattatacttttccgtgttgtagaatacctggaaatatccttttagtatgtgtggatacaccgggaaagaaattgggtgccgtttaaattcatccgataatttaacgtgagtctgaacgtcaatttgactcgctactatcgtttgatcatatcattccttttctaagtcgtctacctgcagttgcagaagctggatggtgctctgctt

SEQ ID NO: 8126 - DNA, 1900 bp, Zea Mays
gtaatccccttccccctcctattttcgtgtatctcatgaccaccgaacctcaaggatcacatcaacatggttcaaaacgtgatttgccttcatgccgaaaaaatgtgcccggcacatcatttgtctcagatttgagagatcacatccacgagttcatcaacgcctcttctgatgaacacatgacatgcttcacaaagactatcaagaagatgttcgggatgtcaatgactgtcgcacataaatcctcgaaagcagaggaagctgggcccgcatgactgcatctcaccatttcatatttgactaggtagcagccagtaaacatatcttgtgtagataacactttgtccacacttttgactgataagattatgtacacttttgactgataagattatgtacagttacatgggccatgtatgtaataattttactgtccaaataccaaactataaaaggagaggcacaagtctcacacaatttgtgtgcaaaaacaaagataaaatcccacaagagattctctcctgtagcaggatcattgtgttttttcattctgtttctgttcttatcctttttgtgtattatagacatgtctatctacaagtgcgtcactagcatgaccagaactgcacaaactaatctagccgaggcaggaagccaactgctccctcccgacgccatggaggagtcctgctggtaaagcgagctgaggctgaatcccgggttggacccatacagccactggacgccttcgatgtcgtcgacggtgagctccgccttcttttcccgcgggctgaggctcgggtacatgaccgccttgggtgacgacgagtgccccagcccgaggacgtgcccaatctcgtgcgtggccacggactccaagtcgacggccgagtgcaccgtttccgtgtccatgtcaaccgcccacctctctgcggcgtcgaggtggaggcgcccgttcttcggggagaaggcatggccgagcacgccgagcggtccgtcgaaggggatcccatcaccgtggctgcccacgtagaagcccaccctgatgtcggccgcctcgtagtcttcggtctcgacgaagcccacggggatgacccgcgcccaccgcgcgaacgcgcgccggaacaccgcgcgcacggtcccggcaggcaggtagtcgacggtggcggtcggcgagatggcgtacgtgagcacgagcgggtccggctgcgtccaccgcggctcacccttgaagaacgtgaaccggctgacggcgccgtccgggctcgccgccgccgaccccgagagggataccggcacagcgtggccgccgtcgccgacgccgcagcgcggggccatgatccggtccagcgtggtggagtcgagctgccccgtgaccggcaggctaagcatggactggtaccgccgtacggcggcctccatgtgcgcgtcgaacgcgtccgtcgtcggctcgtgctccgcccccgccccaggcatgtacccgaacctcgccaggtagcgcttgagctcgccgaggccctcaacgtggctgcctcgccgcgcgtccagcagctgcttgaacgagcgccacgcggtgccgtcctgccggtgaaccgtcgccgtcacgggcccgtcggcggtcacgtggaccaaggagacggggagggggccaagcaacaggaacagcaccgatacgatacgaggcgcgcgcgacatggcagcatcagagccaagcaagctgccccgttaggctatgcgcggggcgggcggttattcccgttgcaggccggcctagttgtcgcggaggcggcaaagaattttgtgctcgccgcacgagacgaaactaaaaggctgcggtgcggataggggaagcgggtcagacgatggcgccccggttggccatcggctgacctcgtcgtct

SEQ ID NO: 8127 - DNA, 2039 bp, Zea Mays
acgagagcgatgcatgaagtgttcgagtaacatcgaaggaaccctaattcgctaggccaactttaaaaccctagccgccgctcccagctccggagctgtctgttgccaccccgtccttggctaccgtagcagttcctattgaagaaaaaaacttcaccggtggatttctatctcatgaccaccgaacctcaaggatcacatcaacatggttcaaaacgtgatttgccttcatgccgaaaaaatgtgcccggcacatcatttgtctcagatttgagagatcacatccacgagttcatcaacgcctcttctgatgaacacatgacatgcttcacaaagactatcaagaagatgttcgggatgtcaatgactgtcgcacataaatcctcgaaagcagaggaagctgggcccgcatgactgcatctcaccatttcatatttgactaggtagcagccagtaaacatatcttgtgtagataacactttgtccacacttttgactgataagattatgtacacttttgactgataagattatgtacagttacatgggccatgtatgtaataattttactgtccaaataccaaactataaaaggagaggcacaagtctcacacaatttgtgtgcaaaaacaaagataaaatcccacaagagattctctcctgtagcaggatcattgtgttttttcattctgtttctgttcttatcctttttgtgtattatagacatgtctatctacaagtgcgtcactagcatgaccagaactgcacaaactaatctagccgaggcaggaagccaactgctccctcccgacgccatggaggagtcctgctggtaaagcgagctgaggctgaatcccgggttggacccatacagccactggacgccttcgatgtcgtcgacggtgagctccgccttcttttcccgcgggctgaggctcgggtacatgaccgccttgggtgacgacgagtgccccagcccgaggacgtgcccaatctcgtgcgtggccacggactccaagtcgacggccgagtgcaccgtttccgtgtccatgtcaaccgcccacctctctgcggcgtcgaggtggaggcgcccgttcttcggggagaaggcatggccgagcacgccgagcggtccgtcgaaggggatcccatcaccgtggctgcccacgtagaagcccaccctgatgtcggccgcctcgtagtcttcggtctcgacgaagcccacggggatgacccgcgcccaccgcgcgaacgcgcgccggaacaccgcgcgcacggtcccggcaggcaggtagtcgacggtggcggtcggcgagatggcgtacgtgagcacgagcgggtccggctgcgtccaccgcggctcacccttgaagaacgtgaaccggctgacggcgccgtccgggctcgccgccgccgaccccgagagggataccggcacagcgtggccgccgtcgccgacgccgcagcgcggggccatgatccggtccagcgtggtggagtcgagctgccccgtgaccggcaggctaagcatggactggtaccgccgtacggcggcctccatgtgcgcgtcgaacgcgtccgtcgtcggctcgtgctccgcccccgccccaggcatgtacccgaacctcgccaggtagcgcttgagctcgccgaggccctcaacgtggctgcctcgccgcgcgtccagcagctgcttgaacgagcgccacgcggtgccgtcctgccggtgaaccgtcgccgtcacgggcccgtcggcggtcacgtggaccaaggagacggggagggggccaagcaacaggaacagcaccgatacgatacgaggcgcgcgcgacatggcagcatcagagccaagcaagctgccccgttaggctatgcgcggggcgggcggttattcccgttgcaggccggcctagttgtcgcggaggcggcaaagaattttgtgctcgccgcacgagacgaaactaaaaggctgcggtgcggataggggaagcgggtcagacgatggcgccccggttggccatcggctgacctcgtcgtct

SEQ ID NO: 8128 - DNA, 2474 bp, Zea Mays
ggctaggacggctgcgaggccccggctcgatcgactagccagtccaggccatgtgcgccccaaccaacatggcacgttctccctcgctcctcctctctgctgctaactgcgtacacacacagacctctccctctccctcccctccctcgccgccgctgcccagtgcccactgctcgccgctagaggaatctgagagagagaggggaaagggcgaaggaggcgcaggcaggcatgggctccccttcctccctccccgccgcggcggcgctcgtgctcctggccctgctcgccggagcccagtgccgcgaggcccagttcgacgccgcggacgccggcgcggagaacttcaacaccagcgaggccgccgtgtactggggcccctggcagaaggcccgggccacctggtacggccagcccaacggcgccggcccggacgacaacggtggtgcgtgcggcttcaagcacaccaaccagtaccccttcatgtccatgggctcctgcggaaaccagccattgttcaaggacggcaagggatgcggctcctgctacaaggtacagtgaaacacagccagtatatatggatcttttttttaccagaaacctctatcaaaaatcagtagtataacagtatgatctatgttttctttagcggaaacatttttttctactggttctccacttgttttagaaaggaaaaaaatcgttctagcaaaatttcaagagcgccataaaaaaaattatacactaataacagggagtaggagttgtaggaccagtaactgttagagtagcacgccaaccgtacagtacagtgcaggccggtcagcacagcagctgcatgtggccccccgcgtacatgtgcgcgtctctcactcgatctccgtgacagtaccatttgtatttttttttctcttaccctgcattgactcttgcttggactgacatgcatagctgacggttgccgcggatgggcgcagattcggtgcaggaaggacccgtcctgctccgggcggacggagacggtgatcatcaccgacatgaactactacccggtgtccaagtaccacttcgacctcagcggcacggcgttcggcaggctggccaagcccggcctcaacgacaagctccgccactcgggcatcatcgacatcgagttcaccagggtgccgtgcgagttccctggcctcaagatcgggttccacgtggaggagtactcgagccccgtctacttcgcggtgctggtggagtacgaggacggcgacggcgacgtggtgcaggtggacctgatggagtccaagacggcgcgcgggccgccgacggggcggtgggcgccgatgcgcgagtcctggggctccatctggcgcatggacaccaaccaccgcatgcagccgcccttctccatccgcatccgcaacgagtccggcaagacgctcgtcgccaggaacgtcatcccggccaactggaggcccaacaccttctaccgctccttcgtccagtacagctagctagctggtttgcgccctcgggccgctcggtcaccaccacccaccactactaccaccaccacccactagactactgcttctgctaccaaatactacggcggaacggaacggctggttgccgccgccgccgtcgtccttggaaaggttgaggcgtctcttggtcatccgtatcgttaccgttgtcatggtcctttgagtcgttgcaaccctgattgcaagccggcaagggggaaaaaaccaacaaagccgtgtgggaaaatggaggaggcaggcgtacaatgtacgctctcccgcccactgttgctttataatctctatatcatcatcatcttcttcttctccattccgatcggtgattaatcgaaaagtatattgtaatgtataaacaccatttcctgtttcccggagctgagctaccctgttcacacccctgtgcagggttgaggcttctgcatgttaattgttctttcgtcactaatgttttcttctgtgacaatgacatggaatgtcgacggttggcttgagcattcagcatcgctgagctgacggggagaaaactcccataggcacaccacacccccacatctcccatcccatgtccggtgccatatggggaggaaactccatatgccgtatattaattatgttatttatttgtgatattaatattcatttaacctttctaatatgataccaatgtatactatagtagtataaatacaaatactctactatttaaaaaaaattaaactccgatgttaaatgctaaataactaagttatactgtaaggggagctgaataaaaaaatggcacgagacactctatgtggagaagtatcttttaggggatataaggttgtctccagcaacgtcctctatatctagtatctatatccgtcctttacagtctcatctaaaagatttcatcctctatatctccttcttctccaacaacgtcatctaaatcac

SEQ ID NO: 8129 - DNA, 570 bp, Zea Mays
ggctaggacggctgcgaggccccggctcgatcgactagccagtccaggccatgtgcgccccaaccaacatggcacgttctccctcgctcctcctctctgctgctaactgcgtacacacacagacctctccctctccctcccctccctcgccgccgctgcccagtgcccactgctcgccgctagaggaatctgagagagagaggggaaagggcgaaggaggcgcaggcaggcatgggctccccttcctccctccccgccgcggcggcgctcgtgctcctggccctgctcgccggagcccagtgccgcgaggcccagttcgacgccgcggacgccggcgcggagaacttcaacaccagcgaggccgccgtgtactggggcccctggcagaaggcccgggccacctggtacggccagcccaacggcgccggcccggacgacaacggtggtgcgtgcggcttcaagcacaccaaccagtaccccttcatgtccatgggctcctgcggaaaccagccattgttcaaggacggcaagggatgcggctcctgctacaagctgacggttgccgcggat

SEQ ID NO: 8130 - DNA, 2736 bp, Zea Mays
atggaggcaatcctcatggaaagccacatttttagcactaagtaccagtacgttaccaacaactgctcagtttattttttagtaggtgaggtgatctctgaagaaaattctctggaatttggcactgataagatagaaatgcatgttggggctgtacaggccaacgatcgagctcttgtagtcgatgatcttattgccaccagtgtgcagctgtcaaacttatcagtgagctcattttgtgctatattttttactgtgttgtaggctaccacagttatctaaatgcttttttatcgttggaaaacatttgagacgatggtttgattttttctgaagttgtgtatttttaaattcgtggtgacaattctcttctcacaactgtagcttttagtaaacattgcactgaactgaatcttctttttgtttcaatatttattctgatattaaaaagctcgtcctgcccccacctcatttatttagcaagctctgctgttgtatatgcctttcaaggaattgtactttttggcaatctaagtatcatttgacatctctttgttgtggtttgttgtatgaaggggaatcgtatccgccagtgtgcaatgttaaatagctatcacggtgattgacctctcttggaattgattattatcccatatttaagataatggttagttattcttcagaaaatgagacctctatatgcacaaatagatgtttctgttcaaaacaggtcatgttagactcataaagagtgtcacaacaactgttcctactaatgcatataaaagaaaaaccgtgccacattcccttatcttatgcataaaaactgtaataggaccgtctgaaaatgtttatgtactcatgcgttgcgtgtaaaaaaactctaggttctctttttttgcatttaggtggtaatgcagatgaattggtaaaccgatgtttttaaagtcaaacccgagaacctggtatgtggtaggagatataatgtcgttatttttcatgcgtgtgtgaggacatgcttccactggcataaataaagcattatgggtagacatggggactgtttaatttaatccactgcccaggtcacctaaaattagctctttttctattatggtatgttgttgtgcacgtaatatccttgtgcagtttagtcatcatgaaaatgaaagaaaacgcctacaccacatttttgacatagtggagctatatgtttgttttactgtgtatacataaccttttgaatgctctggtttctgatgttcctatcagggctctgactattttgtgttttttatgattaatgtcccactcagaggtttcttccaaactgttgctaccaggcctgaaggaaaaaattttatgcgacttcattttgactctatgtatgcccatatctgcaatctaactaaaatctgaactactcttgtatacaagaggaggaagaatttgtttgacgtggtgcagatcctgccagagtggggcataggatacaaggttgccaataccacctggtgtgacgtctcctgccagatcacgaagatcaacctatacaagttgaagtatcataatgttttgttcctcagcttctattctttgatttgtagcaaatttggggggctcacatttctagagctatttgttggtttagaataccatttgcaggaaacgacacttaatcatgtgaagaccgctgggctgctaggtgatggattcggctccacaccagagatgagtaaacggaacttgttctgggtggttagccagatgcaggctatcgtcgagcgttatccatgctggggtgatactgttgaagtaaatacatgggttagtgctaatggtaaaaatggaatgcgtagggattggcatatacgtgattctatgacaggccacacaacactgaaggcgacaagtaaatgggttatgatgaacaaactcactaggaagcttgcaagaattccagatgaagtgcatactgatatagagccatactttgttgggcgttctgctattgttgacgaagacaacagcaagcttccaaaactgccagagggtcaaagcacttgtgcagctaaatatgtgaggacaggcctgactttgacctttggcgagcaaaacacaaagaagcaagcacatggcattctcgcttattctttggatcaaggtgtcagtatcctagacacagtagaaattgcattgatggttgtcttgaagaagatgatggtaaatacttcccaccaccagcagctacagaggaaggggaagtctgtagctgacaagggcccgccgccgcaactgtggtggcagagaatgtggtggtcgcggttagggcagccacatgacgcccatcatctgggtgttgagtgcaagaaatcacatgcaagctggattgtgttggacaagatttgaagcatgagaagcgttgtgggagagaagcgtcagtgcaacattgttgttatatagggatcaacgtcctcaagatcacttggaaaactttcacgaaaaactcgtaatgcaagcatatgttttattggaaaagttttctaagctgaatttctgaaagcctcctcactgctttagttatgctgaattggaatttgcaactaggggtttctcacaagtaaatttcttagctaaaggtggattttggtctgttcatcgacatgtcatttctaatggtggtggtatctgttagctacaaaatcatcaatcaaagattgtaattatattgcatca

SEQ ID NO: 8131 - DNA, 2139 bp, Zea Mays
atggaggcaatcctcatggaaagccacatttttagcactaagtaccagtacgttaccaacaactgctcagtttattttttagtaggtgaggtgatctctgaagaaaattctctggaatttggcactgataagatagaaatgcatgttggggctgtacaggccaacgatcgagctcttgtagtcgatgatcttattgccaccagtgtgcagctgtcaaacttatcagtgagctcattttgtgctatattttttactgtgttgtaggctaccacagttatctaaatgcttttttatcgttggaaaacatttgagacgatggtttgattttttctgaagttgtgtatttttaaattcgtggtgacaattctcttctcacaactgtagcttttagtaaacattgcactgaactgaatcttctttttgtttcaatatttattctgatattaaaaagctcgtcctgcccccacctcatttatttagcaagctctgctgttgtatatgcctttcaaggaattgtactttttggcaatctaagtatcatttgacatctctttgttgtggtttgttgtatgaaggggaatcgtatccgccagtgtgcaatgttaaatagctatcacggtgattgacctctcttggaattgattattatcccatatttaagataatggttagttattcttcagaaaatgagacctctatatgcacaaatagatgtttctgttcaaaacaggtcatgttagactcataaagagtgtcacaacaactgttcctactaatgcatataaaagaaaaaccgtgccacattcccttatcttatgcataaaaactgtaataggaccgtctgaaaatgtttatgtactcatgcgttgcgtgtaaaaaaactctaggttctctttttttgcatttaggtggtaatgcagatgaattggtaaaccgatgtttttaaagtcaaacccgagaacctggtatgtggtaggagatataatgtcgttatttttcatgcgtgtgtgaggacatgcttccactggcataaataaagcattatgggtagacatggggactgtttaatttaatccactgcccaggtcacctaaaattagctctttttctattatggtatgttgttgtgcacgtaatatccttgtgcagtttagtcatcatgaaaatgaaagaaaacgcctacaccacatttttgacatagtggagctatatgtttgttttactgtgtatacataaccttttgaatgctctggtttctgatgttcctatcagggctctgactattttgtgttttttatgattaatgtcccactcagaggtttcttccaaactgttgctaccaggcctgaaggaaaaaattttatgcgacttcattttgactctatgtatgcccatatctgcaatctaactaaaatctgaactactcttgtatacaagaggaggaagaatttgtttgacgtggtgcagatcctgccagagtggggcataggatacaaggttgccaataccacctggtgtgacgtctcctgccagatcacgaagatcaacctatacaagttgaagtatcataatgttttgttcctcagcttctattctttgatttgtagcaaatttggggggctcacatttctagagctatttgttggtttagaataccatttgcaggaaacgacacttaatcatgtgaagaccgctgggctgctaggtgatggattcggctccacaccagagatgagtaaacggaacttgttctgggtggttagccagatgcaggctatcgtcgagcgttatccatgctggggtgatactgttgaagtaaatacatgggttagtgctaatggtaaaaatggaatgcgtagggattggcatatacgtgattctatgacaggccacacaacactgaaggcgacaagtaaatgggttatgatgaacaaactcactaggaagcttgcaagaattccagatgaagtgcatactgatatagagccatactttgttgggcgttctgctattgttgacgaagacaacagcaagcttccaaaactgccagagggtcaaagcacttgtgcagctaaatatgtgaggacaggcctgactccgaccgtggcagatgttatcggtatcgatctaggcacatcg

SEQ ID NO: 8132 - DNA, 1188 bp, Zea Mays
ccatttccctgtcctgtgtctgcctataaataccaccccagtcgatgccctccacctcacacaccatcgaaacacaaaccagcagcaggcagagcaacgactagctgccaggcaagccggccgggggtgctgcaagagtgcaacaaacaatggccaccgcgctctccttcaaggccttggcactggccgcgctcctctccatggtcgtcgcctctggcgctcgcgccgagcaacagttcaagcgcaacgccaccaccgcctcgcaggacagatccttgttgtcctacagcagtggctggctgccggccaaggccacctggtacggcgcccccaccggcgccggccccctcgacaacgtacccgttctcgtccatgacgtcctgtggcaacgagcccatcttcaaggacggcaagggttgcggctcatgctaccagatacggtgcctgaagagcaaccacccggcctgctccggcgtggctcagacggtgatcatcacggacatgaactactacccggtggccaagtaccacttcgacctgagcggcacggcgttcgggtccatggccagctggggcctgaacgacaagctccggcacgccgggatcatcgacatgcagttcaggcgggtgccgtgcaacttcccgggcctgaccatcaccttccgcgtccagcacggctccaaccccatgtacctggccgtgctcatcgagcacgagaacaaggacggcgacgtggtgcaggcggacatcatgcagagcaactccggccactgggagcccatgcacgagtcctggggctccatctggaggatcgaccccaaccgcccgctccgtggccccttctccatgcgcatcaccaacgagtccggcaggcagctggtggccaagaacgtcatcccggccaactacatccccgacgtcgactaccgctccttcgtccagtactaatgatcgagctagcttggtcattgcttaagcgtttaattgtttcttctttatttaattagtggctgccgttgccgacatgcatgtgggggaaattggaggaggcaagcatcaatgcaatgtgtgctctcccgcccactgtcactataccgttattaattaccagtgtgtaaccagcaaatcatactacatatatggttatataatttcatactatacagtataatgctgtctggcctgtct

SEQ ID NO: 8133 - DNA, 3309 bp, Zea Mays
taactcctttcccctatccaaggcaacgaatcagctgcacgaccgccgaatcgccttgccatgacaaccgcagcggcagtggagccggcgccgctcgtgcgggcccgcgcgtgcgcggcctccgcttccttcccgcccccgcgccgtcgaagagctgctggagctatcagggcatctcccgtaccaggccggacggaagccgccgccgagctccccgccccgctccagccaaacgcgcggcggcggggacgcgacccgctctggcacggcggcgggttcagcctcggcgtcgacctcggtgacgcccgcaccggcctcgccatcgggagggggatcaccttccctcgacccctcactgttctgaggctccgcgggcagaagctagagcttgcgctgctcgacgtggctcggcagcaggaggcggacgagctcatcatcgggcttcccgtgtccgctgatgggtcggagacaccgcagtccaacaaagtgcggagcgtcgtcgggaggctcgccgtccaagctgcccaaagtggatttgttttcacggcagcaggggcttgagggtttatctgcaggatgaatatggaacgtccacggacgccctagattacatgatctccaggggtgtcaagaagtctgctcgtgacaccaaatctgatgcatatgctgctgtggtatttgatgctacctagtatatctttctacttagtgtttatttcctcctgtttatgattgcttctggctaaagttacagctgattacttttgttgtagatgattttgaagagatatttcacgtcttcaggtcgaggggctaagattgttctccccaggcaaccagagttacaggacaagctaatggttcagtctagacaagatgctgaagtttagagaggcatgtcttctattttctccatagtagagaacatgtccagttgagggcacctcattttctataccatgtcatccgctgtgatgtagatgattgtttgagatattgtaattgtactgcatcaaaaacacaagctgtttttaaacctggtcctgtttgcaaattgagtatcatcccaaaacaaaactcagtaacatattcattgttgcatttcatgattttttcccctgggtatcctacctagattacttctttctgaactctagtgtaacttagctctgttaagcaaatctgtgacatattttaccttatatagcactttatcagatcatgtatttacatagtttacatcatggagagtgcaaaaaagaatttgctcaaaaatagtctggacagtccaagtgggcatgaaataaggtacgtagtacttcacaacaatcccctatcccgtctcatgcagcaaatatgctttttttcaattcagtacaactgacctgtctttcctggatctgcatctatcatggttgctgcaggcaatgtttatacattactatgagtacacaatggaatgcctgagcaaaaaccaccagcatcaatcgagaattaactgatccggatcatctgttcatatggtgatgaagcatcccaaatctgtgcgtaaaagaatcagtacagcttgctgaattcagtctcctgtgctggttcaccaatccgggggaagaatgaatccctctcaagcatcgtctgcagtgagtccatcatcctcaccatggatgcccacaagattggcgcagagcaaaatgcatatccaaagaccgccagagccctcacaacaccatcatggtaccatgggaatgccataacgatgagcatgcccacaattgcaagccacgttgtaagcacatcaagtggcgggagcagaaaaacattgataacgagcactgacaaggcaagcgcgccaaataggtagacggaccagcccatgatcgggtggactgtgcgtgggaccacaaagaatggaatggaatatgcagccaccatagccgcaattgcagccagcttgatcagccactgcaccagggcactttgcttctcaggccgtcggttatagcacagtttggtgatccctggccttgccaatctggtgactgctatgataactatgtacatcaaaagctccatcagaatcactggcatttcagcagcatacctgtgaaatgtaagcaggtaattgtttagtggatagaacataaaatgaattttctgtcggctcaggtacacatatttgcttctgtgctgttttattgactcacccaagatcgtcccagcgctgcttgtgccaggaaagacctaatggcaagaccggccaggaccaccagtaccaaggtttaaaccaaggtgcgctggggaatgtgatgacactgtttggcccacaggggacatgccaatgtagcttgagatctgcagtgttaaatcaaaagggtggttgaaattttcagaagcaatagctgcaggcaggtgcattggtattgaagctgtgtagctgcagcactcacagtagtatgacgcatccatttgatagccaagaggaaggcgataggtcccattgagctttgtgccattctcaggagggtgaaacattggtttgtcgagcaagtctgggtagcacccaaccaaaaagccttggtcagcaccatcagagttttcacggccagtctccaggtcatgaagcatgcttctgaatacatcaatagaaggctgcagattgaagaagagtccaatattagtctggttggccattacatgtctgagcacaacatatctcagtgtgtgagtttaacaagaatcaagttatggatggtgggaattttcttttcaatggatcattcatactggaagaagacgtatacttcagctttgggggtcacaagtggaacaacgaaagttcagtacatacctggagcacgaaaagaccggtgtggaagtagcacgggttgatgaaaacagcacagaactgtccacattggaatagctcgtctgtgttctggaggaagatgttatcggaatcaatcatgacgacacgctcgtagtccaccagggtccaggcataaagcttgttcagtgtcagcttgaacctcttgttggtccctcctaggttgctctcgtaaggattcctgaggttctccactatcaacaccctcatgccatcctcttctgtcctgcatacgtccccttgtattgtcaataggtgtctcgtttcatttcgcattttgcattcaaaattcctagttcgttgaaacaagtcttcgtacgaaagtaaaacaagtaagaaaaaaaatgtcccgttgacccttgtgaaacgatgaagccatgtcttgggggacattcaccgatcgctattaatcgtttgggactgac

SEQ ID NO: 8134 - DNA, 3088 bp, Zea Mays
taactcctttcccctatccaaggcaacgaatcagctgcacgaccgccgaatcgccttgccatgacaaccgcagcggcagtggagccggcgccgctcgtgcgggcccgcgcgtgcgcggcctccgcttccttcccgcccccgcgccgtcgaagagctgctggagctatcagggcatctcccgtaccaggccggacggaagccgccgccgagctccccgccccgctccagccaaacgcgcggcggcggggacgcgacccgctctggcacggcggcgggttcagcctcggcgtcgacctcggtgacgcccgcaccggcctcgccatcgggagggggatcaccttccctcgacccctcactgttctgaggctccgcgggcagaagctagagcttgcgctgctcgacgtggctcggcagcaggaggcggacgagctcatcatcgggcttcccgtgtccgctgatgggtcggagacaccgcagtccaacaaagtgcggagcgtcgtcgggaggctcgccgtccaagctgcccaaaggggcttgagggtttatctgcaggatgaatatggaacgtccacggacgccctagattacatgatctccaggggtgtcaagaagtctgctcgtgacaccaaatctgatgcatatgctgctgtggtatttgatgctacctaatgattttgaagagatatttcacgtcttcaggtcgaggggctaagattgttctccccaggcaaccagagttacaggacaagctaatggttcagtctagacaagatgctgaagtttagagaggcatgtcttctattttctccatagtagagaacatgtccagttgagggcacctcattttctataccatgtcatccgctgtgatgtagatgattgtttgagatattgtaattgtactgcatcaaaaacacaagctgtttttaaacctggtcctgtttgcaaattgagtatcatcccaaaacaaaactcagtaacatattcattgttgcatttcatgattttttcccctgggtatcctacctagattacttctttctgaactctagtgtaacttagctctgttaagcaaatctgtgacatattttaccttatatagcactttatcagatcatgtatttacatagtttacatcatggagagtgcaaaaaagaatttgctcaaaaatagtctggacagtccaagtgggcatgaaataaggcaatgtttatacattactatgagtacacaatggaatgcctgagcaaaaaccaccagcatcaatcgagaattaactgatccggatcatctgttcatatggtgatgaagcatcccaaatctgtgcgtaaaagaatcagtacagcttgctgaattcagtctcctgtgctggttcaccaatccgggggaagaatgaatccctctcaagcatcgtctgcagtgagtccatcatcctcaccatggatgcccacaagattggcgcagagcaaaatgcatatccaaagaccgccagagccctcacaacaccatcatggtaccatgggaatgccataacgatgagcatgcccacaattgcaagccacgttgtaagcacatcaagtggcgggagcagaaaaacattgataacgagcactgacaaggcaagcgcgccaaataggtagacggaccagcccatgatcgggtggactgtgcgtgggaccacaaagaatggaatggaatatgcagccaccatagccgcaattgcagccagcttgatcagccactgcaccagggcactttgcttctcaggccgtcggttatagcacagtttggtgatccctggccttgccaatctggtgactgctatgataactatgtacatcaaaagctccatcagaatcactggcatttcagcagcatacctgtgaaatgtaagcaggtaattgtttagtggatagaacataaaatgaattttctgtcggctcaggtacacatatttgcttctgtgctgttttattgactcacccaagatcgtcccagcgctgcttgtgccaggaaagacctaatggcaagaccggccaggaccaccagtaccaaggtttaaaccaaggtgcgctggggaatgtgatgacactgtttggcccacaggggacatgccaatgtagcttgagatctgcagtgttaaatcaaaagggtggttgaaattttcagaagcaatagctgcaggcaggtgcattggtattgaagctgtgtagctgcagcactcacagtagtatgacgcatccatttgatagccaagaggaaggcgataggtcccattgagctttgtgccattctcaggagggtgaaacattggtttgtcgagcaagtctgggtagcacccaaccaaaaagccttggtcagcaccatcagagttttcacggccagtctccaggtcatgaagcatgcttctgaatacatcaatagaaggctgcagattgaagaagagtccaatattagtctggttggccattacatgtctgagcacaacatatctcagtgtgtgagtttaacaagaatcaagttatggatggtgggaattttcttttcaatggatcattcatactggaagaagacgtatacttcagctttgggggtcacaagtggaacaacgaaagttcagtacatacctggagcacgaaaagaccggtgtggaagtagcacgggttgatgaaaacagcacagaactgtccacattggaatagctcgtctgtgttctggaggaagatgttatcggaatcaatcatgacgacacgctcgtagtccaccagggtccaggcataaagcttgttcagtgtcagcttgaacctcttgttggtccctcctaggttgctctcgtaaggattcctgaggttctccactatcaacaccctcatgccatcctcttctgtcctgcatacgtccccttgtattgtcaataggtgtctcgtttcatttcgcattttgcattcaaaattcctagttcgttgaaacaagtcttcgtacgaaagtaaaacaagtaagaaaaaaaatgtcccgttgacccttgtgaaacgatgaagccatgtcttgggggacattcaccgatcgctattaatcgtttgggactgac

SEQ ID NO: 8135 - DNA, 2758 bp, Zea Mays
taactcctttcccctatccaaggcaacgaatcagctgcacgaccgccgaatcgccttgccatgacaaccgcagcggcagtggagccggcgccgctcgtgcgggcccgcgcgtgcgcggcctccgcttccttcccgcccccgcgccgtcgaagagctgctggagctatcagggcatctcccgtaccaggccggacggaagccgccgccgagctccccgccccgctccagccaaacgcgcggcggcggggacgcgacccgctctggcacggcggcgggttcagcctcggcgtcgacctcggtgacgcccgcaccggcctcgccatcgggagggggatcaccttccctcgacccctcactgttctgaggctccgcgggcagaagctagagcttgcgctgctcgacgtggctcggcagcaggaggcggacgagctcatcatcgggcttcccgtgtccgctgatgggtcggagacaccgcagtccaacaaagtgcggagcgtcgtcgggaggctcgccgtccaagctgcccaaaggggcttgagggtttatctgcaggatgaatatggaacgtccacggacgccctagattacatgatctccaggggtgtcaagaagtctgctcgtgacaccaaatctgatgcatatgctgctgtgatgattttgaagagatatttcacgtcttcaggtcgaggggctaagattgttctccccaggcaaccagagttacaggacaagctaatggttcagtctagacaagatgctgaagtttagagagcactttatcagatcatgtatttacatagtttacatcatggagagtgcaaaaaagaatttgctcaaaaatagtctggacagtccaagtgggcatgaaataaggcaatgtttatacattactatgagtacacaatggaatgcctgagcaaaaaccaccagcatcaatcgagaattaactgatccggatcatctgttcatatggtgatgaagcatcccaaatctgtgcgtaaaagaatcagtacagcttgctgaattcagtctcctgtgctggttcaccaatccgggggaagaatgaatccctctcaagcatcgtctgcagtgagtccatcatcctcaccatggatgcccacaagattggcgcagagcaaaatgcatatccaaagaccgccagagccctcacaacaccatcatggtaccatgggaatgccataacgatgagcatgcccacaattgcaagccacgttgtaagcacatcaagtggcgggagcagaaaaacattgataacgagcactgacaaggcaagcgcgccaaataggtagacggaccagcccatgatcgggtggactgtgcgtgggaccacaaagaatggaatggaatatgcagccaccatagccgcaattgcagccagcttgatcagccactgcaccagggcactttgcttctcaggccgtcggttatagcacagtttggtgatccctggccttgccaatctggtgactgctatgataactatgtacatcaaaagctccatcagaatcactggcatttcagcagcatacctgtgaaatgtaagcaggtaattgtttagtggatagaacataaaatgaattttctgtcggctcaggtacacatatttgcttctgtgctgttttattgactcacccaagatcgtcccagcgctgcttgtgccaggaaagacctaatggcaagaccggccaggaccaccagtaccaaggtttaaaccaaggtgcgctggggaatgtgatgacactgtttggcccacaggggacatgccaatgtagcttgagatctgcagtgttaaatcaaaagggtggttgaaattttcagaagcaatagctgcaggcaggtgcattggtattgaagctgtgtagctgcagcactcacagtagtatgacgcatccatttgatagccaagaggaaggcgataggtcccattgagctttgtgccattctcaggagggtgaaacattggtttgtcgagcaagtctgggtagcacccaaccaaaaagccttggtcagcaccatcagagttttcacggccagtctccaggtcatgaagcatgcttctgaatacatcaatagaaggctgcagattgaagaagagtccaatattagtctggttggccattacatgtctgagcacaacatatctcagtgtgtgagtttaacaagaatcaagttatggatggtgggaattttcttttcaatggatcattcatactggaagaagacgtatacttcagctttgggggtcacaagtggaacaacgaaagttcagtacatacctggagcacgaaaagaccggtgtggaagtagcacgggttgatgaaaacagcacagaactgtccacattggaatagctcgtctgtgttctggaggaagatgttatcggaatcaatcatgacgacacgctcgtagtccaccagggtccaggcataaagcttgttcagtgtcagcttgaacctcttgttggtccctcctaggttgctctcgtaaggattcctgaggttctccactatcaacaccctcatgccatcctcttctgtcctgcatacgtccccttgtattgtcaataggtgtctcgtttcatttcgcattttgcattcaaaattcctagttcgttgaaacaagtcttcgtacgaaagtaaaacaagtaagaaaaaaaatgtcccgttgacccttgtgaaacgatgaagccatgtcttgggggacattcaccgatcgctattaatcgtttgggactgac

SEQ ID NO: 8136 - DNA, 2840 bp, Zea Mays
taactcctttcccctatccaaggcaacgaatcagctgcacgaccgccgaatcgccttgccatgacaaccgcagcggcagtggagccggcgccgctcgtgcgggcccgcgcgtgcgcggcctccgcttccttcccgcccccgcgccgtcgaagagctgctggagctatcagggcatctcccgtaccaggccggacggaagccgccgccgagctccccgccccgctccagccaaacgcgcggcggcggggacgcgacccgctctggcacggcggcgggttcagcctcggcgtcgacctcggtgacgcccgcaccggcctcgccatcgggagggggatcaccttccctcgacccctcactgtacgcacctctcgcactcagctccaccgcccaaagtaaacctcactaaattgaggtagagttggaatggcaccaggttctgaggctccgcgggcagaagctagagcttgcgctgctcgacgtggctcggcagcaggaggcggacgagctcatcatcgggcttcccgtgtccgctgatgggtcggagacaccgcagtccaacaaagtgcggagcgtcgtcgggaggctcgccgtccaagctgcccaaaggggcttgagggtttatctgcaggatgaatatggaacgtccacggacgccctagattacatgatctccaggggtgtcaagaagtctgctcgtgacaccaaatctgatgcatatgctgctgtggtatttgatgctacctaatgattttgaagagatatttcacgtcttcaggtcgaggggctaagattgttctccccaggcaaccagagttacaggacaagctaatggttcagtctagacaagatgctgaagtttagagagatcatgtatttacatagtttacatcatggagagtgcaaaaaagaatttgctcaaaaatagtctggacagtccaagtgggcatgaaataaggcaatgtttatacattactatgagtacacaatggaatgcctgagcaaaaaccaccagcatcaatcgagaattaactgatccggatcatctgttcatatggtgatgaagcatcccaaatctgtgcgtaaaagaatcagtacagcttgctgaattcagtctcctgtgctggttcaccaatccgggggaagaatgaatccctctcaagcatcgtctgcagtgagtccatcatcctcaccatggatgcccacaagattggcgcagagcaaaatgcatatccaaagaccgccagagccctcacaacaccatcatggtaccatgggaatgccataacgatgagcatgcccacaattgcaagccacgttgtaagcacatcaagtggcgggagcagaaaaacattgataacgagcactgacaaggcaagcgcgccaaataggtagacggaccagcccatgatcgggtggactgtgcgtgggaccacaaagaatggaatggaatatgcagccaccatagccgcaattgcagccagcttgatcagccactgcaccagggcactttgcttctcaggccgtcggttatagcacagtttggtgatccctggccttgccaatctggtgactgctatgataactatgtacatcaaaagctccatcagaatcactggcatttcagcagcatacctgtgaaatgtaagcaggtaattgtttagtggatagaacataaaatgaattttctgtcggctcaggtacacatatttgcttctgtgctgttttattgactcacccaagatcgtcccagcgctgcttgtgccaggaaagacctaatggcaagaccggccaggaccaccagtaccaaggtttaaaccaaggtgcgctggggaatgtgatgacactgtttggcccacaggggacatgccaatgtagcttgagatctgcagtgttaaatcaaaagggtggttgaaattttcagaagcaatagctgcaggcaggtgcattggtattgaagctgtgtagctgcagcactcacagtagtatgacgcatccatttgatagccaagaggaaggcgataggtcccattgagctttgtgccattctcaggagggtgaaacattggtttgtcgagcaagtctgggtagcacccaaccaaaaagccttggtcagcaccatcagagttttcacggccagtctccaggtcatgaagcatgcttctgaatacatcaatagaaggctgcagattgaagaagagtccaatattagtctggttggccattacatgtctgagcacaacatatctcagtgtgtgagtttaacaagaatcaagttatggatggtgggaattttcttttcaatggatcattcatactggaagaagacgtatacttcagctttgggggtcacaagtggaacaacgaaagttcagtacatacctggagcacgaaaagaccggtgtggaagtagcacgggttgatgaaaacagcacagaactgtccacattggaatagctcgtctgtgttctggaggaagatgttatcggaatcaatcatgacgacacgctcgtagtccaccagggtccaggcataaagcttgttcagtgtcagcttgaacctcttgttggtccctcctaggttgctctcgtaaggattcctgaggttctccactatcaacaccctcatgccatcctcttctgtcctgcatacgtccccttgtattgtcaataggtgtctcgtttcatttcgcattttgcattcaaaattcctagttcgttgaaacaagtcttcgtacgaaagtaaaacaagtaagaaaaaaaatgtcccgttgacccttgtgaaacgatgaagccatgtcttgggggacattcaccgatcgctattaatcgtttgggactgac

SEQ ID NO: 8137 - DNA, 3079 bp, Zea Mays
acggcccgtaactcctttcccctatccaaggcaacgaatcagctgcacgaccgccgaatcgccttgccatgacaaccgcagcggcagtggagccggcgccgctcgtgcgggcccgcgcgtgcgcggcctccgcttccttcccgcccccgcgccgtcgaagagctgctggagctatcagggcatctcccgtaccaggccggacggaagccgccgccgagctccccgccccgctccagccaaacgcgcggcggcggggacgcgacccgctctggcacggcggcgggttcagcctcggcgtcgacctcggtgacgcccgcaccggcctcgccatcgggagggggatcaccttccctcgacccctcactgttctgaggctccgcgggcagaagctagagcttgcgctgctcgacgtggctcggcagcaggaggcggacgagctcatcatcgggcttcccgtgtccgctgatgggtcggagacaccgcagtccaacaaagtgcggagcgtcgtcgggaggctcgccgtccaagctgcccaaaggggcttgagggtttatctgcaggatgaatatggaacgtccacggacgccctagattacatgatctccaggggtgtcaagaagtctgctcgtgacaccaaatctgatgcatatgctgctgtgatgattttgaagagatatttcacgtcttcaggtcgaggggctaagattgttctccccaggcaaccagagttacaggacaagctaatggttcagtctagacaagatgctgaagtttagagaggcatgtcttctattttctccatagtagagaacatgtccagttgagggcacctcattttctataccatgtcatccgctgtgatgtagatgattgtttgagatattgtaattgtactgcatcaaaaacacaagctgtttttaaacctggtcctgtttgcaaattgagtatcatcccaaaacaaaactcagtaacatattcattgttgcatttcatgattttttcccctgggtatcctacctagattacttctttctgaactctagtgtaacttagctctgttaagcaaatctgtgacatattttaccttatatagcactttatcagatcatgtatttacatagtttacatcatggagagtgcaaaaaagaatttgctcaaaaatagtctggacagtccaagtgggcatgaaataaggcaatgtttatacattactatgagtacacaatggaatgcctgagcaaaaaccaccagcatcaatcgagaattaactgatccggatcatctgttcatatggtgatgaagcatcccaaatctgtgcgtaaaagaatcagtacagcttgctgaattcagtctcctgtgctggttcaccaatccgggggaagaatgaatccctctcaagcatcgtctgcagtgagtccatcatcctcaccatggatgcccacaagattggcgcagagcaaaatgcatatccaaagaccgccagagccctcacaacaccatcatggtaccatgggaatgccataacgatgagcatgcccacaattgcaagccacgttgtaagcacatcaagtggcgggagcagaaaaacattgataacgagcactgacaaggcaagcgcgccaaataggtagacggaccagcccatgatcgggtggactgtgcgtgggaccacaaagaatggaatggaatatgcagccaccatagccgcaattgcagccagcttgatcagccactgcaccagggcactttgcttctcaggccgtcggttatagcacagtttggtgatccctggccttgccaatctggtgactgctatgataactatgtacatcaaaagctccatcagaatcactggcatttcagcagcatacctgtgaaatgtaagcaggtaattgtttagtggatagaacataaaatgaattttctgtcggctcaggtacacatatttgcttctgtgctgttttattgactcacccaagatcgtcccagcgctgcttgtgccaggaaagacctaatggcaagaccggccaggaccaccagtaccaaggtttaaaccaaggtgcgctggggaatgtgatgacactgtttggcccacaggggacatgccaatgtagcttgagatctgcagtgttaaatcaaaagggtggttgaaattttcagaagcaatagctgcaggcaggtgcattggtattgaagctgtgtagctgcagcactcacagtagtatgacgcatccatttgatagccaagaggaaggcgataggtcccattgagctttgtgccattctcaggagggtgaaacattggtttgtcgagcaagtctgggtagcacccaaccaaaaagccttggtcagcaccatcagagttttcacggccagtctccaggtcatgaagcatgcttctgaatacatcaatagaaggctgcagattgaagaagagtccaatattagtctggttggccattacatgtctgagcacaacatatctcagtgtgtgagtttaacaagaatcaagttatggatggtgggaattttcttttcaatggatcattcatactggaagaagacgtatacttcagctttgggggtcacaagtggaacaacgaaagttcagtacatacctggagcacgaaaagaccggtgtggaagtagcacgggttgatgaaaacagcacagaactgtccacattggaatagctcgtctgtgttctggaggaagatgttatcggaatcaatcatgacgacacgctcgtagtccaccagggtccaggcataaagcttgttcagtgtcagcttgaacctcttgttggtccctcctaggttgctctcgtaaggattcctgaggttctccactatcaacaccctcatgccatcctcttctgtcctgcatacgtccccttgtattgtcaataggtgtctcgtttcatttcgcattttgcattcaaaattcctagttcgttgaaacaagtcttcgtacgaaagtaaaacaagtaagaaaaaaaatgtcccgttgacccttgtgaaacgatgaagccatgtcttgggggacattcaccgatcgctattaatcgtttgggactgac

SEQ ID NO: 8138 - DNA, 681 bp, Zea Mays
gtactgaggtcgataataaggccggggctgcgcagatccggggctgctgctcggaggaaaaagtgcacacgcggcggtgagcagcaggtccacagcgaggtcggagaggcagccaacgttgaggaagatcgagccactggcatggatctcggcgtctggtgtggggatgtttcctgccgctgccgtggggaaccatggaaaggaggaacagggggcatgatctcccgttctggcttttcgtcgagcacatggggagcatcgctctgggcttttcttcttcttccatgtaacctccctgggcgcgacgcaaggatcggacagcacgcgaggctgacggggtctccacaacgacggaagagaggttgtggccgtggtgatgacgaggtcgacggagagtatggcgaggacctaggacgtccatggagggaggtgctgctgtttcctacgccatgggagaggtcggctagggcaaccataggaagtagcaagggaaggggtgtgtccagggagatggctcggtcaccagcagagaggggctgggcgagctcctgcagaggggagtacgccgagcagggggagccgccatgggcgaggtcaccatgggaggaggtgagggcgcagctggctgccatctatggagagctagagacgttctgtgcatctaacagcagggagggatga

SEQ ID NO: 8139 - DNA, 1102 bp, Zea Mays
agaccgtgcgacccgttaaaaataataacgcgtccgctcccctctcgagtcccttgccccacccaagtacccaactcgagcggtggagccttgcgtgtgtctaaaaatagcgcccgaatcgcggcggcagccacatcgagtaatttatcgagtcaggtgagagggcggagcagatctcgccggccggggccatgggtgctgccggcgcgatccggcgggcggcggcgtcggtggtcgacagggcgtgcgcggggacgcggggcttccgccgcgcgctggcgcggttcgcgccgcggccgtcggcgttcgaagacaactctagtcaacaattacgtgaaaatgtgaaaccttctgcattagaacctacatatatggaggagtcacaagccaagcgtgatgacgtggagagcaccttcatcatgatcaagcctgacggcgtccagaggggcctcattggtgagatcatcagccgttttgagaagaagggcttctacctcaaggccttgaagcttgtgaacgtggagaggtcgtttgctgagaagcactacgccgatctcgcctccaagcccttcttccagggcctcgtggactacatcatctctggccctgtggtggccatggtctgggagggcaagagcgtcgtcacaactggccgcaagatcattggcgccaccaaccccctggcttctgagcccggcaccatccgtggcgactttgctgtcgacattggcaggaatgtcattcatggaagtgacagcattgagagtgctaataaggagattgccctgtggttccccgagggccctgctgattggcagagcagccagcacccctggatctacgagaagtaaacatggaaagtttcacatcaaaccttgagagccagaggaagcatgtcaccatttgtgctttagcaatgttttcgaaaagattatgatctgtatcttggaaccttatttcaatggaccaaatttctttcttaaacgaacaacaaacttgttattccttatttacttcataattttgacaattggtgaatgtatcagtaatcggtgagagtgttgcttgcttgctattatagtttttactagcgttatatatg

SEQ ID NO: 8140 - DNA, 1595 bp, Zea Mays
gccgatctcgcgtcgcttggcctccaagtccaggtccatgtccaacagacaaaaaaaaaaccccgcccccggttcgtcacttcgtcgctttctcgtcgagccgcgactgccgactgcgaccgagagaattctctatccggtccccgtccggtttggttagagttcgcactcgtgattgggttggtcgcttggttcttccctgccggaagatacctttcgttcggtgtcgccaactcgccattcttgggaggtcttggtcgggaccggtgctgatggaggagaggtacgaggcgctgaaggagctgggggccggcaacttcggcgtggcgaggctggtcagggacaagcggaccaaggagctggtagccgtcaagtacatcgagaggggcaagaagattgatgagaacgtgcagagggagatcatcaatcaccagtcgctccggcaccctaacatcgtacggttcaaggaggtttgtctaacacccacacatcttgctattgtcatggaatatgctgctggtggagagctatttgagaaaatctgctcagcagggcgattcagtgaagatgagtccaggtatttcttccaacagctgatatcaggggtcagctactgccattctatggaaatttgtcaccgtgatcttaaacttgagaacaccctccttgatgggagtccaacacctcgtgtgaaaatttgcgactttggttactcaaagtctgctttgctgcattccaaaccaaaatcaacagttggaactccagcatacatagcccccgaggttctttccagaaaagagtatgatggaaaggtagcagacgtttggtcctgtggtgtcacgctgtacgtgatgctcgtgggatcatatccatttgaagatcctgaggatccaaggaacttccggaaaacgatcagcagaattcttggcgtgcaatactccatcccggattatgtgagagtgtcttcagactgcagacgccttctgtctcagatattcgttgccgatccttcaaaggatcacgatcccggagataaagcatcacccgtggttcttgaagaacctcccgagggagatctcggagagggagaaggccaactacaaggacgcggatgccgccgagccggcgcaggccgtggacgagatcatgcggattgttgaggaggccaagacccccggtgacatgtccaaggtggttgacccggcgctgctggccgagatggcagagctggagagcgacgaggaagaggcagacgccgatgacacctactgatcgctcctgcatgcagctcagcagctgctcagtcatggtgtccagtcctttgtgctgcagacatggcgccgccgagcgcccgagcttaacccgtgcgtgtgatgacggatgttgtattgcactctttacgctgtttgtataataaaagtctgtacaacgctgtacaattgcagattgccttgtacagatgaactagcgtgcagtgatatactcagtcccaaattctatgttccaaaacggtttaaataattttattttttagagagatcaaaatagttttaagtatgattaaatttatataataaaataatactaattatgat

SEQ ID NO: 8141 - DNA, 1543 bp, Zea Mays
caccaaccctctctcctcatgaaatcgagccagcaccagccacgccaacagcctgccacccgtgtcatccctgcatgcgcgaagcaggtgagactggacaggagcagccagccccatgacgccctcttaagacgaggacgaggaggaggcggtggaccagttcgttcgcgttgcccgcgactctctccgtcctcctactgcccacccgactcacacgcttggcacgcgcgtgcttccacccgtccgtcgcctctctctcggctgcctgattgatttggttgccccggttccagcaatggcggtccaggcgcattatcaccaccactaccaccgcgagtcccctttcctcgtcagccggttggcggcggcgatggagctgcatcatcaggcgcagaaggaggctatggcgccgcagcaggctcaggctccgcccctcttcttggacttctcgcatggagattacggcggcgggaggaagcggcagcgcgaggcggagcccatgtcgtcgcagttcttctctctgcagcagcaaccgcaggcgcaggggcccaaggtgatcaacctggcgcaacttcagaagcggacggcgatgggcctccggctcgacttcgacgagggctcggagcacgtgtcgtgcacgtccccggcctcggcctcggcctcatgtctcctctctaaagagctcgccgcgcagcgcgatcagcacaggaacgagatggaccggctgatccaggaacatgcggacaggctccggcgcgcgctggccgacactcggcggcggcactaccgttcgctggtcggcgcggcggaggcggcggctgctcaacgggtaagggagaaggaggcggcggcgtggcaggccaaggacgcagcggatcagtccacagccgcggcgctccacgcgcagctgcagaaggcggcggcggcgcaggcgaggggcaaggccgaggaggaggacaacgtgggcgccgcggcggacgacgccgggtcctgcttcgtcgacccggacagggtcgtggaggtcgccccgccgcgcccgctggccaggccgtgccggacgtgcgggcagcgttcggcctccgtcgtgctgctcccgtgccgccacctctgcgtctgcgccgagtgcgagcccgccgtccccgctgccggcgccgtcgcggctgcctgccccatgtgccgtggcgcggtgaccggcaccgtgcaagtgttcttctcctagcaagctttaggaaaggggaaaatgctaaaagaaaaagcaagacaaaatcgttgctcctgccaaaaggaatgatccgtgaaaatggggaattgttcatgatagtccgttctctgcttcttttttttttctctccctctctcagttgtttattataatccttctattagtatataagtcgatctcttctagtactgctaggaataggattaggttcctgctttattttcccttggtttcttctggaaggcatatgatcgaccatggaccccagtacgtacattttggaaggcaatgaatgattgtgcaaaattttcacttttttac

SEQ ID NO: 8142 - DNA, 1629 bp, Zea Mays
gctgcggggccggccctccgcctaaacccccgccgccgtccttccgaccgccatgcttctccccctatgctccatcccaccacccacctccgccgcctcaccagtaaatcctcccgctccacgacaacgaccaccggccgccactccctctcgtatccctccgtctcctcgtcaacatccgacgacgaatccccgctcgccgcggagctcttccccaccgccggcgcacccacactcctctccgtcgcacgctccctcgccgtcgcctccccggccccttccgccgcagctgtcctcaacttcctccggcgcctgccccacgacgcctccccacacgtcttcccccacctcatcgccgccctcgctcgctcgcccctcccaatcctcgcgctccgcctcttcctgtccccacccacctcagccgccaccacccaccactgcttcaactcctcgctccttcggttttccctcccgcagcatctcctaccagccttctttgcccactccctgcgccgcttctccggcctcacccccactctgctctccttcaacctcctccttaagtgcatctgttcctctggttccaaggagcagaggcctgtatcttccaattgcgttgcaaatcctccacgatgtcattccggcttggaatcttacgccagataagttcacctactccactatcgtgtcggccctggctgatgcagggcgtgtggacgacgcgttggcgctggttcatgaaatggtggttgatggcattttggcggcagaggcatttaacccggtgctcaaggcgatgctgcgtacaggtgatgtgaatggggcggccaagctgtttcggtttatgcagctgaagggttgcacactgacggaatcaacatacaatgtgctgctgcatggtttattattgtgtgggcgggcgagggacgcagcgggcatgatgagaagaatggagagtgaggggatgccgccagggttgatgacttacggggcagtagtggatggactgctgaagtgtgggagaatggaggatgcatggaaggtgtctgaggaaatgggaaggaaggggcttacacctagtgattttgtgttttcctctgtgatcaccggtttttgcaagtcaggtgaggttgacagggcattgaaggtgtgggagacaatggtggctgccaagggaaatttggatgttgttgggaccatgcttcgtcgccgaaggtcctgcaggaggaaatagcttcggctaaagctgcttatacatgatgaccgaagctaccactcgtgaagcttcggcgttataacatatccgaagatgaagtatcgaaccgacttaaagatagaatgaccttttagtccataagggtctgagtcattgttgtaaacttttataaggggtatgattgtaattttttacgggatgtgtcctgtgcttataaatagttaacagtattcctttactgttcacggattcctgtaattgcaaacacattgtgtgatgtacggaaatacgtacacacgtcggcacagggcacgcgacgtgcggcgcgcggctgagcgcgcaggacgcctgatccagcaggcagtgcctgatccagcaggcagccaggcctagcggctagatctggaaagaat

SEQ ID NO: 8143 - DNA, 2492 bp, Zea Mays
gctgcggggccggccctccgcctaaacccccgccgccgtccttccgaccgccatgcttctccccctatgctccatcccaccacccacctccgccgcctcaccagtaaatcctcccgctccacgacaacgaccaccggccgccactccctctcgtatccctccgtctcctcgtcaacatccgacgacgaatccccgctcgccgcggagctcttccccaccgccggcgcacccacactcctctccgtcgcacgctccctcgccgtcgcctccccggccccttccgccgcagctgtcctcaacttcctccggcgcctgccccacgacgcctccccacacgtcttcccccacctcatcgccgccctcgctcgctcgcccctcccaatcctcgcgctccgcctcttcctgtccccacccacctcagccgccaccacccaccactgcttcaactcctcgctccttcggttttccctcccgcagcatctcctaccagccttctttgcccactccctgcgccgcttctccggcctcacccccactctgctctccttcaacctcctccttaagtgcatctgttcctctggttccaaggagcagaggcctgtatcttccaattgcgttgcaaatcctccacgatgtcattccggcttggaatcttacgccagataagttcacctactccactatcgtgtcggccctggctgatgcagggcgtgtggacgacgcgttggcgctggttcatgaaatggtggttgatggcattttggcggcagaggcatttaacccggtgctcaaggcgatgctgcgtacaggtgatgtgaatggggcggccaagctgtttcggtttatgcagctgaagggttgcacactgacggaatcaacatacaatgtgctgctgcatggtttattattgtgtgggcgggcgagggacgcagcgggcatgatgagaagaatggagagtgaggggatgccgccagggttgatgacttacggggcagtagtggatggactgctgaagtgtgggagaatggaggatgcatggaaggtgtctgaggaaatgggaaggaaggggcttacacctagtgattttgtgttttcctctgtgatcaccggtttttgcaagtcaggtgaggttgacagggcattgaaggtgtgggagacaatggtggctgccaaggtaaacccaaacactgttttgtattcagcaatgattgatggcctggcccgttgtgggaggatgactgaagctaaaatgttatttggagatatggttgatgcaaaatgtttaccaaatgtcatgacatatagctcaattatttatggatattttttcattggtgactcatcgtgtgctctctctacatgggaggagatggaaaaggttggttgtgtgccaaatgccattagttacagcatattgatcaatgcgttatgcaatgtagggagattaaaagatgctatgatggtttggaaaaacatgcttggtcgtggctgtgtgcctgatacaattgcttatacttcaatggtcaaggggttatgcatgtctggaatggtagatggtggtgtccgtttatttaatgacatgttggcaaagggtgatgccaggccagatgccatcagttataatattctattggatgggctgatacgcacaaacaaccttcctcgggcaatggacttgcttaaccagatgcttgatcaactgtgtgatccagacacagtaacatgcaacattttcttgcgggagattggggtcgtagaggggaaagggagataatttttagagggattggtcgtgaggctatgctgtagagacagatatagggcagcaggagatgttgtgatggccatgctggctaagtacattgtgccagaggctgccatttggtaatactgtagtgaaaggagtttgtcagacaaatagaattcagaaagtggttgacaattgttggactgagatttggaggccttgaaggttatttatatttgttcaatacatcgatgggcacatgttggagtcatttttatactcgatctgttggaaatttggatgttgttgggaccatgcttcgtcgccgaaggtcctgcaggaggaaatagcttcggctaaagctgcttatacatgatgaccgaagctaccactcgtgaagcttcggcgttataacatatccgaagatgaagtatcgaaccgacttaaagatagaatgaccttttagtccataagggtctgagtcattgttgtaaacttttataaggggtatgattgtaattttttacgggatgtgtcctgtgcttataaatagttaacagtattcctttactgttcacggattcctgtaattgcaaacacattgtgtgatgtacggaaatacgtacacacgtcggcacagggcacgcgacgtgcggcgcgcggctgagcgcgcaggacgcctgatccagcaggcagtgcctgatccagcaggcagccaggcctagcggctagatctggaaagaat

SEQ ID NO: 8144 - DNA, 1871 bp, Zea Mays
atcgatagccgttagatcggtccatcacggccgtccgtttatttgaattagcaacgatccaacaaccaccatccgcagccctgtccgagctctgcacggccgcaccccaatgcccgtccccggcgagccgtctcctccggcctcgcctcgacaatactcgggcctcctcgccgctctccacagctgtatatctggcgggaacgcccccgcggctgtctcccttctgcccaccctcgctcgcgccggcctgcgcgcgccgttcccgctcctctcctccctcgccggtctcctcctgctccgcccagccgcgccgtccttcccctccctagctggccgcctcctcctctacgtccgcctcgccggcctcaagcacctcgtcccctgctccactcagctagccgaccaactcctctcgcttaacttcctcctcggccgaccgcgtgacgcccgccggctgttcaccaaaatgccccgccccagcgtccactcctataacgccatgctcgctgggtacgcccgtctgtcactcgccgcacccgcttctgaggaagctgtttggcgagatgcatatcaaggatgtgcgtatgtggacgacagtagtttgtgcctgtgctgaggatggccaattggctaccgctcgtcagctctttgatcagatgccagagaggaatgcgtttacatggactgcactcatcgagggatatgcttgccatgggcagccaatggatgcactgaatatgtttcaacacatgatgaaggaaggtttgcagccagatcaaatcaccttgggttgttgcctgagtgcttgtgcggctatgcgttcactgaaccttgggcagcagatccatggaatgttgctaagatgtggctttgatcgaagtgtgatgatcgttaccgcaatcattgacatgtattcaaaatgcagttttctgtctggtgccataaaggtgttcagcctaacaggtaaggaaaggaagaatgcagtgctgtggaatggcatgttgtctgctctgtatgatcatggtcatgaacaggatgtgattggattgtttgttcagatgattcatggaagacacaagcctgatgctaatacattctttctggttttggtggcttgctgccactgcggcctagttgaggaggggatgaatttttttgatttgatgaatgagagatacaggattgttccaggacaagaacactatttttgtatggctgatttggttagccatgcatcatccaataataaagtaattgaatggatcaaaagctcaccattcagttttaatctacgcgtttgggaagttcttgttaggaattgcaccatacatggcaacattgaattgttgaataaggtagaggaggaactggctagattggaccatccagaatgaatggacggttgttctttgtttggcttatgaggttgaggttgaaggatggtcatgcttgttcgatgaacaggagccattcgtttcgataagcagagataagatggcaacaaccgcatcctgcttattgaagaaacagatcattgtaaggactgttcaagcaatattctcaaatgaatgatgtcctgctgtttgtcttcccaattttgatggggaataaaaggtagatttgcagcttttctcaagcgaacaatgtgatgccacatcaatgctaacatacggaagtaacagggaatattataccatcttccaactaaccttcttaataaagacgcaggcttttcattttttgtgaaataattttatataaatgttatagctgtatgtgttccaagaatcctttcaggaatgctgtacagattctcattttcttttctcgcattacagcaagagaacgtaattatctttttgtggtacggg

SEQ ID NO: 8145 - DNA, 2733 bp, Zea Mays
ccttgttactctaccagtttctaactgaagttatcgtgttccctaaccatttgtacaatggaaaattaggacatgacaatgacaaacctcatttgaagtatgtctgtcaccttttcatgtctataagtccagaacattcaaagttttgttgttgaggccactatggtttgtttatgatggataactatggtatgcactgacagggaaggagacacaagtagtgttcaaactcttggcttgctgtatcttagtttcacggtgagaggacatttggtgtgttgacaaagcttgatttaatggacaagggaacaaatgcacttgacgttcttgaaggaagagcttacagactgcagcatccctgggttggaattgtgaaccgttcacaagcagatatcaacaagaatgttgacatgattattgctaggcgaaaagagcaggagttcttcgattctagtcctgaatattctcatcttgccagcaggatgggttcagaatatcttgctaaacttctttcacagcatctagaggccgcgatcagatcacgcattccgagcataacctctctgataaacaaaactattgatgagcttgaatctgagatggatcacctcggtagacctattgcttctgatgctggggctcagttgtacctcatcttggagctttgccgtgcatttgacaaaatatttaaagaacatcttgatggcggccgacctggcggtgatagaatttatggggtctttgataaccaactcccttctgctctgcggaagctcccatttgatcgtcatctctccgtgcaaaatgtgaagcgggttgtttcacaggcagatggttatcagcctcatttaattgctcctgagcaagggtaccgtcggctgattgaatcttctctcaattattttagaggaccagcggaagcctctgtagatgctgtgcattctgttttgaaagagctggtgaggatatccattggggagacacaggagttaaaacgatttccatctctacaaacggagctagctgctgcatgctataaggcccttgagagattccgcgaagatggcaggaaaactactctacggctggttgatatggagtctgcatatttgactgtggagttcttccgcaagctcccacaggaagttgataagactggaactggaaatcccagaaatgccaatcctcctgctccttcggatgatcgttacgctgatgcacatttcaggaggattgcttctaacgtgtcctcatacattggcatggtatctgaaacgctgaagaatactatccccaagtctgttgttcactgtcaggtccgcgaagctaagcggtccctgcttaaccatttctatactcaagtgggcgggaaagatgctaagcaacttgcagtactccttgacgaggatcctgccctcatggaacgcaggctgcaatgctttaagaggcttgagctgtacaagtctgctcgggacgagattgatgccgtgtcgtggacaagatgaaggtaacgcatgccatgcttgttaatatattcgctttctccattagacacattgtaattctactagtgcagaattagcagctagccattgtgcacactgattgtcaagtatagcagaccgagcacctgtctcgtatcttagcctgttaatatcagtagttgtgtgcttgactgcttgtgttgtatctatgtctcaactcccaactgttatcaggtgcaaatttctgtccttagtaacccatgtgcaaacttgtatgcacgaacgatacctggattctgtaggatgcacatgccgatcttcttcccatgctgtagttaggtgtagactgcagaactgggacttctaatgtgaaaataatgttttatgcaacttgtcattagtcaatcacattatcacactgtagaataattttttgttggctgcgagcattaccatgcgatttgggggtggtccacactaacatgtacgcattgcatgagaccctttcaataaacaatactggcactgcgtctgaacattcttggcctgctggacctgcaagacacgtctgccatctatcttagttcaatttgttagcgttattgcttgacattttccacatccgggatgaatgacgcgtgctgcgtgcggtgcagaatccgaaacaggtcagtcaactcccgcatgatccttggtcaatttcacgatacttatttgccctgctcgcgttcttttctggtcagttgcgcgctctgttgatgtgacccttttggtccgtccgggaaatcgtcgcctgctggccatggattcacgctttctagaggacgtgtgttgcccgccgtgcgcccttccatgagttccccgcatagaacaggtcgtcttctggaacagaaaggcgaagcgcgtggcgagctgtcctgattttgacgagtccatgcatcttcagcagattggactggtcgccataagaacacgaaactgtgattaggaggcatacacgtcatctgctagtgtttccggtgaagtcagttgccaccatgacctgctaggcagaaataaatatgcccctattaatcgggccttgatctgtcgtcctcattgctgaaaacctcacccaaattgcatcttatagcacattcgtcgccatggatatggtcattggctgtgccggctgtgagctgtcaacattttgtacagtactacatttccaaaatctaaaccgggcatcactgcgaatccgtaatagcag

SEQ ID NO: 8146 - DNA, 2145 bp, Zea Mays
tcggtcacgcacaggatgacttcttttactgcaccggagggagtatagagtcatagggaaccctaaccctaatgggccggcatagaacacacactgtctaacacatatgtctaataaaaccttctctctgctgtttttgaaacttgtccatatcatctgtgcttgtgaataatgattgataggcaaatagcctcttaacagatcaccaagaacttgcaacacaaggtgagaggacatttggtgtgttgacaaagcttgatttaatggacaagggaacaaatgcacttgacgttcttgaaggaagagcttacagactgcagcatccctgggttggaattgtgaaccgttcacaagcagatatcaacaagaatgttgacatgattattgctaggcgaaaagagcaggagttcttcgattctagtcctgaatattctcatcttgccagcaggatgggttcagaatatcttgctaaacttctttcacagcatctagaggccgcgatcagatcacgcattccgagcataacctctctgataaacaaaactattgatgagcttgaatctgagatggatcacctcggtagacctattgcttctgatgctggggctcagttgtacctcatcttggagctttgccgtgcatttgacaaaatatttaaagaacatcttgatggcggccgacctggcggtgatagaatttatggggtctttgataaccaactcccttctgctctgcggaagctcccatttgatcgtcatctctccgtgcaaaatgtgaagcgggttgtttcacaggcagatggttatcagcctcatttaattgctcctgagcaagggtaccgtcggctgattgaatcttctctcaattattttagaggaccagcggaagcctctgtagatgctgtgcattctgttttgaaagagctggtgaggatatccattggggagacacaggttggccctcggtttcttagagacaaagtatcagttacacccttttctctgtacattagtttcaaaagttactgcatctttaggagttaaaacgatttccatctctacaaacggagctagctgctgcatgctataaggcccttgagagattccgcgaagatggcaggaaaactactctacggctggttgatatggagtctgcatatttgactgtggagttcttccgcaagctcccacaggaagttgataagactggaactggaaatcccagaaatgccaatcctcctgctccttcggatgatcgttacgctgatgcacatttcaggaggattgcttctaacgtgtcctcatacattggcatggtatctgaaacgctgaagaatactatccccaagtctgttgttcactgtcaggtccgcgaagctaagcggtccctgcttaaccatttctatactcaagtgggcgggaaagatgtaagtaaccttctttgtgttctagcttgttcattcctcctcataccaaattttgcagtacataaattctgtttttttgcaggctaagcaacttgcagtactccttgacgaggatcctgccctcatggaacgcaggctgcaatgctttaagaggcttgagctgtacaagtctgctcgggacgagattgatgccgtgtcgtggacaagatgaagttgcgcgctctgttgatgtgacccttttggtccgtccgggaaatcgtcgcctgctggccatggattcacgctttctagaggacgtgtgttgcccgccgtgcgcccttccatgagttccccgcatagaacaggtcgtcttctggaacagaaaggcgaagcgcgtggcgagctgtcctgattttgacgagtccatgcatcttcagcagattggactggtcgccataagaacacgaaactgtgattaggaggcatacacgtcatctgctagtgtttccggtgaagtcagttgccaccatgacctgctaggcagaaataaatatgcccctattaatcgggccttgatctgtcgtcctcattgctgaaaacctcacccaaattgcatcttatagcacattcgtcgccatggatatggtcattggctgtgccggctgtgagctgtcaacattttgtacagtactacatttccaaaatctaaaccgggcatcactgcgaatccgtaatagcag

SEQ ID NO: 8147 - DNA, 3190 bp, Zea Mays
gtctatcttctcggctcgcacacctcagacacagccaggcagcggagcgctcccccctcgattccttcgcttccttctagaaccttccgctccctccgttgcaacagtagcacagagcttcctcctcccccacccccgaagatgacgaccatggagaacgtgatcgtgctcgtgaaccgcatccagcgtgcctgcaccgtcctcggcgaccacggcggcggggacgccgccgcctccctccctaccctctgggaagcgctcccgacggtcgccgtcgtcggcggtcagagttcggggaaatcatcggtgctcgagagcatcgtggggcgagacttcctgcctcgaggatcagggatcgtgacgcgtaggccactcgtcctgcagctgcacaagacagaggccggggtgcaggagtatgccgagttccttcacatgcctaagcgccgcttcactgatttctctattgtgcggaaggaaatccaggatgaaactgacaggttgactggaaagacaaagcagatatctccagttccaattcatctcagcatatactctccacatgaggggcagcctgaaagcattgttcaagatatcgaaagcatggtgcgttcatatgttgataagccgaattgtattatattggctatatctcctgccaatcaagatatagcgacatcagatgcaatcaagcttgcccgggaagtggatccaactggtgagaggacatttggtgtgttgacaaagcttgatttaatggacaagggaacaaatgcacttgacgttcttgaaggaagagcttacagactgcagcatccctgggttggaattgtgaaccgttcacaagcagatatcaacaagaatgttgacatgattattgctaggcgaaaagagcaggagttcttcgattctagtcctgaatattctcatcttgccagcaggatgggttcagaatatcttgctaaacttctttcacagcatctagaggccgcgatcagatcacgcattccgagcataacctctctgataaacaaaactattgatgagcttgaatctgagatggatcacctcggtagacctattgcttctgatgctggggctcagttgtacctcatcttggagctttgccgtgcatttgacaaaatatttaaagaacatcttgatggcggccgacctggcggtgatagaatttatggggtctttgataaccaactcccttctgctctgcggaagctcccatttgatcgtcatctctccgtgcaaaatgtgaagcgggttgtttcacaggcagatggttatcagcctcatttaattgctcctgagcaagggtaccgtcggctgattgaatcttctctcaattattttagaggaccagcggaagcctctgtagatgctgtgcattctgttttgaaagagctggtgaggatatccattggggagacacaggagttaaaacgatttccatctctacaaacggagctagctgctgcatgctataaggcccttgagagattccgcgaagatggcaggaaaactactctacggctggttgatatggagtctgcatatttgactgtggagttcttccgcaagctcccacaggaagttgataagactggaactggaaatcccagaaatgccaatcctcctgctccttcggatgatcgttacgctgatgcacatttcaggaggattgcttctaacgtgtcctcatacattggcatggtatctgaaacgctgaagaatactatccccaagtctgttgttcactgtcaggtccgcgaagctaagcggtccctgcttaaccatttctatactcaagtgggcgggaaagatgctaagcaacttgcagtactccttgacgaggatcctgccctcatggaacgcaggctgcaatgctttaagaggcttgagctgtacaagtctgctcgggacgagattgatgccgtgtcgtggacaagatgaaggtaacgcatgccatgcttgttaatatattcgctttctccattagacacattgtaattctactagtgcagaattagcagctagccattgtgcacactgattgtcaagtatagcagaccgagcacctgtctcgtatcttagcctgttaatatcagtagttgtgtgcttgactgcttgtgttgtatctatgtctcaactcccaactgttatcaggtgcaaatttctgtccttagtaacccatgtgcaaacttgtatgcacgaacgatacctggattctgtaggatgcacatgccgatcttcttcccatgctgtagttaggtgtagactgcagaactgggacttctaatgtgaaaataatgttttatgcaacttgtcattagtcaatcacattatcacactgtagaataattttttgttggctgcgagcattaccatgcgatttgggggtggtccacactaacatgtacgcattgcatgagaccctttcaataaacaatactggcactgcgtctgaacattcttggcctgctggacctgcaagacacgtctgccatctatcttagttcaatttgttagcgttattgcttgacattttccacatccgggatgaatgacgcgtgctgcgtgcggtgcagaatccgaaacaggtcagtcaactcccgcatgatccttggtcaatttcacgatacttatttgccctgctcgcgttcttttctggtcagttgcgcgctctgttgatgtgacccttttggtccgtccgggaaatcgtcgcctgctggccatggattcacgctttctagaggacgtgtgttgcccgccgtgcgcccttccatgagttccccgcatagaacaggtcgtcttctggaacagaaaggcgaagcgcgtggcgagctgtcctgattttgacgagtccatgcatcttcagcagattggactggtcgccataagaacacgaaactgtgattaggaggcatacacgtcatctgctagtgtttccggtgaagtcagttgccaccatgacctgctaggcagaaataaatatgcccctattaatcgggccttgatctgtcgtcctcattgctgaaaacctcacccaaattgcatcttatagcacattcgtcgccatggatatggtcattggctgtgccggctgtgagctgtcaacattttgtacagtactacatttccaaaatctaaaccgggcatcactgcgaatccgtaatagcag

SEQ ID NO: 8148 - DNA, 3176 bp, Zea Mays
gtctatcttctcggctcgcacacctcagacacagccaggcagcggagcgctcccccctcgattccttcgcttccttctagaaccttccgctccctccgttgcaacagtagcacagagcttcctcctcccccacccccgaagatgacgaccatggagaacgtgatcgtgctcgtgaaccgcatccagcgtgcctgcaccgtcctcggcgaccacggcggcggggacgccgccgcctccctccctaccctctgggaagcgctcccgacggtcgccgtcgtcggcggtcagagttcggggaaatcatcggtgctcgagagcatcgtggggcgagacttcctgcctcgaggatcagggatcgtgacgcgtaggccactcgtcctgcagctgcacaagacagaggccggggtgcaggagtatgccgagttccttcacatgcctaagcgccgcttcactgatttctctattgtgcggaaggaaatccaggatgaaactgacaggttgactggaaagacaaagcagatatctccagttccaattcatctcagcatatactctccacatgtggtcaacttaacattgattgatctgccgggcctaaccaaagttgcagttgaggggcagcctgaaagcattgttcaagatatcgaaagcatggtgcgttcatatgttgataagccgaattgtattatattggctatatctcctgccaatcaagatatagcgacatcagatgcaatcaagcttgcccgggaagtggatccaactggttcttgaaggaagagcttacagactgcagcatccctgggttggaattgtgaaccgttcacaagcagatatcaacaagaatgttgacatgattattgctaggcgaaaagagcaggagttcttcgattctagtcctgaatattctcatcttgccagcaggatgggttcagaatatcttgctaaacttctttcacagcatctagaggccgcgatcagatcacgcattccgagcataacctctctgataaacaaaactattgatgagcttgaatctgagatggatcacctcggtagacctattgcttctgatgctggggctcagttgtacctcatcttggagctttgccgtgcatttgacaaaatatttaaagaacatcttgatggcggccgacctggcggtgatagaatttatggggtctttgataaccaactcccttctgctctgcggaagctcccatttgatcgtcatctctccgtgcaaaatgtgaagcgggttgtttcacaggcagatggttatcagcctcatttaattgctcctgagcaagggtaccgtcggctgattgaatcttctctcaattattttagaggaccagcggaagcctctgtagatgctgtgcattctgttttgaaagagctggtgaggatatccattggggagacacaggagttaaaacgatttccatctctacaaacggagctagctgctgcatgctataaggcccttgagagattccgcgaagatggcaggaaaactactctacggctggttgatatggagtctgcatatttgactgtggagttcttccgcaagctcccacaggaagttgataagactggaactggaaatcccagaaatgccaatcctcctgctccttcggatgatcgttacgctgatgcacatttcaggaggattgcttctaacgtgtcctcatacattggcatggtatctgaaacgctgaagaatactatccccaagtctgttgttcactgtcaggtccgcgaagctaagcggtccctgcttaaccatttctatactcaagtgggcgggaaagatgctaagcaacttgcagtactccttgacgaggatcctgccctcatggaacgcaggctgcaatgctttaagaggcttgagctgtacaagtctgctcgggacgagattgatgccgtgtcgtggacaagatgaaggtaacgcatgccatgcttgttaatatattcgctttctccattagacacattgtaattctactagtgcagaattagcagctagccattgtgcacactgattgtcaagtatagcagaccgagcacctgtctcgtatcttagcctgttaatatcagtagttgtgtgcttgactgcttgtgttgtatctatgtctcaactcccaactgttatcaggtgcaaatttctgtccttagtaacccatgtgcaaacttgtatgcacgaacgatacctggattctgtaggatgcacatgccgatcttcttcccatgctgtagttaggtgtagactgcagaactgggacttctaatgtgaaaataatgttttatgcaacttgtcattagtcaatcacattatcacactgtagaataattttttgttggctgcgagcattaccatgcgatttgggggtggtccacactaacatgtacgcattgcatgagaccctttcaataaacaatactggcactgcgtctgaacattcttggcctgctggacctgcaagacacgtctgccatctatcttagttcaatttgttagcgttattgcttgacattttccacatccgggatgaatgacgcgtgctgcgtgcggtgcagaatccgaaacaggtcagtcaactcccgcatgatccttggtcaatttcacgatacttatttgccctgctcgcgttcttttctggtcagttgcgcgctctgttgatgtgacccttttggtccgtccgggaaatcgtcgcctgctggccatggattcacgctttctagaggacgtgtgttgcccgccgtgcgcccttccatgagttccccgcatagaacaggtcgtcttctggaacagaaaggcgaagcgcgtggcgagctgtcctgattttgacgagtccatgcatcttcagcagattggactggtcgccataagaacacgaaactgtgattaggaggcatacacgtcatctgctagtgtttccggtgaagtcagttgccaccatgacctgctaggcagaaataaatatgcccctattaatcgggccttgatctgtcgtcctcattgctgaaaacctcacccaaattgcatcttatagcacattcgtcgccatggatatggtcattggctgtgccggctgtgagctgtcaacattttgtacagtactacatttccaaaatctaaaccgggcatcactgcgaatccgtaatagcag

SEQ ID NO: 8149 - DNA, 3015 bp, Zea Mays
gtctatcttctcggctcgcacacctcagacacagccaggcagcggagcgctcccccctcgattccttcgcttccttctagaaccttccgctccctccgttgcaacagtagcacagagcttcctcctcccccacccccgaagatgacgaccatggagaacgtgatcgtgctcgtgaaccgcatccagcgtgcctgcaccgtcctcggcgaccacggcggcggggacgccgccgcctccctccctaccctctgggaagcgctcccgacggtcgccgtcgtcggcggtcagagttcggggaaatcatcggtgctcgagagcatcgtggggcgagacttcctgcctcgaggatcagggatcgtgacgcgtaggccactcgtcctgcagctgcacaagacagaggccggggtgcaggagtatgccgagttccttcacatgcctaagcgccgcttcactgatttctctattgtgcggaaggaaatccaggatgaaactgacaggttgactggaaagacaaagcagatatctccagttccaattcatctcagcatatactctccacatgtggtcaacttaacattgattgatctgccgggcctaaccaaagttgcagttgaggggcagcctgaaagcattgttcaagatatcgaaagcatggtgcgttcatatgttgataagccgaattgtattatattggctatatctcctgccaatcaagatatagcgacatcagatgcaatcaagcttgcccgggaagtggatccaactggtgagaggacatttggtgtgttgacaaagcttgatttaatggacaagggaacaaatgcacttgacgttcttgaaggaagagcttacagactgcagcatccctgggttggaattgtgaaccgttcacaagcagatatcaacaagaatgttgacatgattattgctaggcgaaaagagcaggagttcttcgattctagtcctgaatattctcatcttgccagcaggatgggttcagaatatcttgctaaacttctttcacagcatctagaggccgcgatcagatcacgcattccgagcataacctctctgataaacaaaactattgatgagcttgaatctgagatggatcacctcggtagacctattgcttctgatgctggggctcagttgtacctcatcttggagctttgccgtgcatttgacaaaatatttaaagaacatcttgatggcgggtgcattctgttttgaaagagctggtgaggatatccattggggagacacaggagttaaaacgatttccatctctacaaacggagctagctgctgcatgctataaggcccttgagagattccgcgaagatggcaggaaaactactctacggctggttgatatggagtctgcatatttgactgtggagttcttccgcaagctcccacaggaagttgataagactggaactggaaatcccagaaatgccaatcctcctgctccttcggatgatcgttacgctgatgcacatttcaggaggattgcttctaacgtgtcctcatacattggcatggtatctgaaacgctgaagaatactatccccaagtctgttgttcactgtcaggtccgcgaagctaagcggtccctgcttaaccatttctatactcaagtgggcgggaaagatgctaagcaacttgcagtactccttgacgaggatcctgccctcatggaacgcaggctgcaatgctttaagaggcttgagctgtacaagtctgctcgggacgagattgatgccgtgtcgtggacaagatgaaggtaacgcatgccatgcttgttaatatattcgctttctccattagacacattgtaattctactagtgcagaattagcagctagccattgtgcacactgattgtcaagtatagcagaccgagcacctgtctcgtatcttagcctgttaatatcagtagttgtgtgcttgactgcttgtgttgtatctatgtctcaactcccaactgttatcaggtgcaaatttctgtccttagtaacccatgtgcaaacttgtatgcacgaacgatacctggattctgtaggatgcacatgccgatcttcttcccatgctgtagttaggtgtagactgcagaactgggacttctaatgtgaaaataatgttttatgcaacttgtcattagtcaatcacattatcacactgtagaataattttttgttggctgcgagcattaccatgcgatttgggggtggtccacactaacatgtacgcattgcatgagaccctttcaataaacaatactggcactgcgtctgaacattcttggcctgctggacctgcaagacacgtctgccatctatcttagttcaatttgttagcgttattgcttgacattttccacatccgggatgaatgacgcgtgctgcgtgcggtgcagaatccgaaacaggtcagtcaactcccgcatgatccttggtcaatttcacgatacttatttgccctgctcgcgttcttttctggtcagttgcgcgctctgttgatgtgacccttttggtccgtccgggaaatcgtcgcctgctggccatggattcacgctttctagaggacgtgtgttgcccgccgtgcgcccttccatgagttccccgcatagaacaggtcgtcttctggaacagaaaggcgaagcgcgtggcgagctgtcctgattttgacgagtccatgcatcttcagcagattggactggtcgccataagaacacgaaactgtgattaggaggcatacacgtcatctgctagtgtttccggtgaagtcagttgccaccatgacctgctaggcagaaataaatatgcccctattaatcgggccttgatctgtcgtcctcattgctgaaaacctcacccaaattgcatcttatagcacattcgtcgccatggatatggtcattggctgtgccggctgtgagctgtcaacattttgtacagtactacatttccaaaatctaaaccgggcatcactgcgaatccgtaatagcag

SEQ ID NO: 8150 - DNA, 2609 bp, Zea Mays
gtcagtctatcttctcggctcgcacacctcagacacagccaggcagcggagcgctcccccctcgattccttcgcttccttctagaaccttccgctccctccgttgcaacagtagcacagagcttcctcctcccccacccccgaagatgacgaccatggagaacgtgatcgtgctcgtgaaccgcatccagcgtgcctgcaccgtcctcggcgaccacggcggcggggacgccgccgcctccctccctaccctctgggaagcgctcccgacggtcgccgtcgtcggcggtcagagttcggggaaatcatcggtgctcgagagcatcgtggggcgagacttcctgcctcgaggatcagggatcgtgacgcgtaggccactcgtcctgcagctgcacaagacagaggccggggtgcaggagtatgccgagttccttcacatgcctaagcgccgcttcactgatttctctattgtgcggaaggaaatccaggatgaaactgacaggttgactggaaagacaaagcagatatctccagttccaattcatctcagcatatactctccacatgtggtcaacttaacattgattgatctgccgggcctaaccaaagttgcagttgaggggcagcctgaaagcattgttcaagatatcgaaagcatggtgcgttcatatgttgataagccgaattgtattatattggctatatctcctgccaatcaagatatagcgacatcagatgcaatcaagcttgcccgggaagtggatccaactggtgagaggacatttggtgtgttgacaaagcttgatttaatggacaagggaacaaatgcacttgacgttcttgaaggaagagcttacagactgcagcatccctgggttggaattgtgaaccgttcacaagcagatatcaacaagaatgttgacatgattattgctaggcgaaaagagcaggagttcttcgattctagtcctgaatattctcatcttgccagcaggatgggttcagaatatcttgctaaacttctttcacagcatctagaggccgcgatcagatcacgcattccgagcataacctctctgataaacaaaactattgatgagcttgaatctgagatggatcacctcggtagacctattgcttctgatgctggggctcagttgtacctcatcttggagctttgccgtgcatttgacaaaatatttaaagaacatcttgatggcggccgacctggcggtgatagaatttatggggtctttgataaccaactcccttctgctctgcggaagctcccatttgatcgtcatctctccgtgcaaaatgtgaagcgggttgtttcacaggcagatggttatcagcctcatttaattgctcctgagcaagggtaccgtcggctgattgaatcttctctcaattattttagaggaccagcggaagcctctgtagatgctgtgcattctgttttgaaagagctggtgaggatatccattggggagacacaggttggccctcggtttcttagagacaaagtatcagttacacccttttctctgtacattagtttcaaaagttactgcatctttaggagttaaaacgatttccatctctacaaacggagctagctgctgcatgctataaggcccttgagagattccgcgaagatggcaggaaaactactctacggctggttgatatggagtctgcatatttgactgtggagttcttccgcaagctcccacaggaagttgataagactggaactggaaatcccagaaatgccaatcctcctgctccttcggatgatcgttacgctgatgcacatttcaggaggattgcttctaacgtgtcctcatacattggcatggtatctgaaacgctgaagaatactatccccaagtctgttgttcactgtcaggtccgcgaagctaagcggtccctgcttaaccatttctatactcaagtgggcgggaaagatgctaagcaacttgcagtactccttgacgaggatcctgccctcatggaacgcaggctgcaatgctttaagaggcttgagctgtacaagtctgctcgggacgagattgatgccgtgtcgtggacaagatgaaggttgcgcgctctgttgatgtgacccttttggtccgtccgggaaatcgtcgcctgctggccatggattcacgctttctagaggacgtgtgttgcccgccgtgcgcccttccatgagttccccgcatagaacaggtcgtcttctggaacagaaaggcgaagcgcgtggcgagctgtcctgattttgacgagtccatgcatcttcagcagattggactggtcgccataagaacacgaaactgtgattaggaggcatacacgtcatctgctagtgtttccggtgaagtcagttgccaccatgacctgctaggcagaaataaatatgcccctattaatcgggccttgatctgtcgtcctcattgctgaaaacctcacccaaattgcatcttatagcacattcgtcgccatggatatggtcattggctgtgccggctgtgagctgtcaacattttgtacagtactacatttccaaaatctaaaccgggcatcactgcgaatccgtaatagcag

SEQ ID NO: 8151 - DNA, 3174 bp, Zea Mays
ctctgtcagtctatcttctcggctcgcacacctcagacacagccaggcagcggagcgctcccccctcgattccttcgcttccttctagaaccttccgctccctccgttgcaacagtagcacagagcttcctcctcccccacccccgaagatgacgaccatggagaacgtgatcgtgctcgtgaaccgcatccagcgtgcctgcaccgtcctcggcgaccacggcggcggggacgccgccgcctccctccctaccctctgggaagcgctcccgacggtcgccgtcgtcggcggtcagagttcggggaaatcatcggtgctcgagagcatcgtggggcgagacttcctgcctcgaggatcagggatcgtgacgcgtaggccactcgtcctgcagctgcacaagacagaggccggggtgcaggagtatgccgagttccttcacatgcctaagcgccgcttcactgatttctctattgtgcggaaggaaatccaggatgaaactgacaggttgactggaaagacaaagcagatatctccagttccaattcatctcagcatatactctccacatgtggtcaacttaacattgattgatctgccgggcctaaccaaagttgcagttgaggggcagcctgaaagcattgttcaagatatcgaaagcatggtgcgttcatatgttgataagccgaattgtattatattggctatatctcctgccaatcaagatatagcgacatcagatgcaatcaagcttgcccgggaagtggatccaactggtgagaggacatttggtgtgttgacaaagcttgatttaatggacaagggaacaaatgcacttgacgttcttgaaggaagagcttacagactgcagcatccctgggttggaattgtgaaccgttcacaagcagatatcaacaagaatgttgacatgattattgctaggcgaaaagagcaggagttcttcgattctagtcctgaatattctcatcttgccagcaggatgggttcagaatatcttgctaaacttctttcacagcatctagaggccgcgatcagatcacgcattccgagcataacctctctgataaacaaaactattgatgagcttgaatctgagatggatcacctcggtagacctattgcttctgatgctggggctcagttgtacctcatcttggagctttgccgtgcatttgacaaaatatttaaagaacatcttgatggcggccgacctggcggtgatagaatttatggggtctttgataaccaactcccttctgctctgcggaagctcccatttgatcgtcatctctccgtgcaaaatgtgaagcgggttgtttcacaggcagatggttatcagcctcatttaattgctcctgagcaagggtaccgtcggctgattgaatcttctctcaattattttagaggaccagcggaagcctctgtagatgctgtgcattctgttttgaaagagctggtgaggatatccattggggagacacaggagttaaaacgatttccatctctacaaacggagctagctgctgcatgctataaggcccttgagagattccgcgaagatggcaggaaaactactctacggctggttgatatggagtctgcatatttgactgtggagttcttccgcaagctcccacaggaagttgataagactggaactggaaatcccagaaatgccaatcctcctgctccttcggatgatcgttacgctgatgcacatttcaggaggattgcttctaacgtgtcctcatacattggcatggtatctgaaacgctgaagaatactatccccaagtctgttgttcactgtcaggtccgcgaagctaagcggtccctgcttaaccatttctatactcaagtgggcgggaaagatgctaagcaacttgcagtactccttgacgaggatcctgccctcatggaacgcaggctgcaatgctttaagaggcttgagctgtacaagtctgctcgggacgagattgatgccgtgtcgtggacaagatgaaggtaacgcatgccatgcttgttaatatattcgctttctccattagacacattgtaattctactagtgcagaattagcagctagccattgtgcacactgattgtcaagtatagcagaccgagcacctgtctcgtatcttagcctgttaatatcagtagttgtgtgcttgactgcttgtgttgtatctatgtctcaactcccaactgttatcaggtgcaaatttctgtccttagtaacccatgtgcaaacttgtatgcacgaacgatacctggattctgtaggatgcacatgccgatcttcttcccatgctgtagttaggtgtagactgcagaactgggacttctaatgtgaaaataatgttttatgcaacttgtcattagtcaatcacattatcacactgtagaataattttttgttggctgcgagcattaccatgcgatttgggggtggtccacactaacatgtacgcattgcatgagaccctttcaataaacaatactggcactgcgtctgaacattcttggcctgctggacctgcaagacacgtctgccatctatcttagttcaatttgttagcgttattgcttgacattttccacatccgggatgaatgacgcgtgctgcgtgcggtgcagaatccgaaacagttgcgcgctctgttgatgtgacccttttggtccgtccgggaaatcgtcgcctgctggccatggattcacgctttctagaggacgtgtgttgcccgccgtgcgcccttccatgagttccccgcatagaacaggtcgtcttctggaacagaaaggcgaagcgcgtggcgagctgtcctgattttgacgagtccatgcatcttcagcagattggactggtcgccataagaacacgaaactgtgattaggaggcatacacgtcatctgctagtgtttccggtgaagtcagttgccaccatgacctgctaggcagaaataaatatgcccctattaatcgggccttgatctgtcgtcctcattgctgaaaacctcacccaaattgcatcttatagcacattcgtcgccatggatatggtcattggctgtgccggctgtgagctgtcaacattttgtacagtactacatttccaaaatctaaaccgggcatcactgcgaatccgtaatagcag

SEQ ID NO: 8152 - DNA, 3137 bp, Zea Mays
ctctgtcagtctatcttctcggctcgcacacctcagacacagccaggcagcggagcgctcccccctcgattccttcgcttccttctagaaccttccgctccctccgttgcaacagtagcacagagcttcctcctcccccacccccgaagatgacgaccatggagaacgtgatcgtgctcgtgaaccgcatccagcgtgcctgcaccgtcctcggcgaccacggcggcggggacgccgccgcctccctccctaccctctgggaagcgctcccgacggtcgccgtcgtcggcggtcagagttcggggaaatcatcggtgctcgagagcatcgtggggcgagacttcctgcctcgaggatcagggatcgtgacgcgtaggccactcgtcctgcagctgcacaagacagaggccggggtgcaggagtatgccgagttccttcacatgcctaagcgccgcttcactgatttctctattgtgcggaaggaaatccaggatgaaactgacaggttgactggaaagacaaagcagatatctccagttccaattcatctcagcatatactctccacatgtggtcaacttaacattgattgatctgccgggcctaaccaaagttgcagttgaggggcagcctgaaagcattgttcaagatatcgaaagcatggtgcgttcatatgttgataagccgaattgtattatattggctatatctcctgccaatcaagatatagcgacatcagatgcaatcaagcttgcccgggaagtggatccaactggtgagaggacatttggtgtgttgacaaagcttgatttaatggacaagggaacaaatgcacttgacgttcttgaaggaagagcttacagactgcagcatccctgggttggaattgtgaaccgttcacaagcagatatcaacaagaatgttgacatgattattgctaggcgaaaagagcaggagttcttcgattctagtcctgaatattctcatcttgccagcaggatgggttcagaatatcttgctaaacttctttcacagcatctagaggccgcgatcagatcacgcattccgagcataacctctctgataaacaaaactattgatgagcttgaatctgagatggatcacctcggtagacctattgcttctgatgctggggctcagttgtacctcatcttggagctttgccgtgcatttgacaaaatatttaaagaacatcttgatggcggccgacctggcggtgatagaatttatggggtctttgataaccaactcccttctgctctgcggaagctcccatttgatcgtcatctctccgtgcaaaatgtgaagcgggttgtttcacaggcagatggttatcagcctcatttaattgctcctgagcaagggtaccgtcggctgattgaatcttctctcaattattttagaggaccagcggaagcctctgtagatgctgtgcattctgttttgaaagagctggtgaggatatccattggggagacacagctgctgcatgctataaggcccttgagagattccgcgaagatggcaggaaaactactctacggctggttgatatggagtctgcatatttgactgtggagttcttccgcaagctcccacaggaagttgataagactggaactggaaatcccagaaatgccaatcctcctgctccttcggatgatcgttacgctgatgcacatttcaggaggattgcttctaacgtgtcctcatacattggcatggtatctgaaacgctgaagaatactatccccaagtctgttgttcactgtcaggtccgcgaagctaagcggtccctgcttaaccatttctatactcaagtgggcgggaaagatgctaagcaacttgcagtactccttgacgaggatcctgccctcatggaacgcaggctgcaatgctttaagaggcttgagctgtacaagtctgctcgggacgagattgatgccgtgtcgtggacaagatgaaggtaacgcatgccatgcttgttaatatattcgctttctccattagacacattgtaattctactagtgcagaattagcagctagccattgtgcacactgattgtcaagtatagcagaccgagcacctgtctcgtatcttagcctgttaatatcagtagttgtgtgcttgactgcttgtgttgtatctatgtctcaactcccaactgttatcaggtgcaaatttctgtccttagtaacccatgtgcaaacttgtatgcacgaacgatacctggattctgtaggatgcacatgccgatcttcttcccatgctgtagttaggtgtagactgcagaactgggacttctaatgtgaaaataatgttttatgcaacttgtcattagtcaatcacattatcacactgtagaataattttttgttggctgcgagcattaccatgcgatttgggggtggtccacactaacatgtacgcattgcatgagaccctttcaataaacaatactggcactgcgtctgaacattcttggcctgctggacctgcaagacacgtctgccatctatcttagttcaatttgttagcgttattgcttgacattttccacatccgggatgaatgacgcgtgctgcgtgcggtgcagaatccgaaacagttgcgcgctctgttgatgtgacccttttggtccgtccgggaaatcgtcgcctgctggccatggattcacgctttctagaggacgtgtgttgcccgccgtgcgcccttccatgagttccccgcatagaacaggtcgtcttctggaacagaaaggcgaagcgcgtggcgagctgtcctgattttgacgagtccatgcatcttcagcagattggactggtcgccataagaacacgaaactgtgattaggaggcatacacgtcatctgctagtgtttccggtgaagtcagttgccaccatgacctgctaggcagaaataaatatgcccctattaatcgggccttgatctgtcgtcctcattgctgaaaacctcacccaaattgcatcttatagcacattcgtcgccatggatatggtcattggctgtgccggctgtgagctgtcaacattttgtacagtactacatttccaaaatctaaaccgggcatcactgcgaatccgtaatagcag

SEQ ID NO: 8153 - DNA, 2547 bp, Zea Mays
ggattgcagcagcgacgcctctgtcagtctatcttctcggctcgcacacctcagacacagccaggcagcggagcgctcccccctcgattccttcgcttccttctagaaccttccgctccctccgttgcaacagtagcacagagcttcctcctcccccacccccgaagatgacgaccatggagaacgtgatcgtgctcgtgaaccgcatccagcgtgcctgcaccgtcctcggcgaccacggcggcggggacgccgccgcctccctccctaccctctgggaagcgctcccgacggtcgccgtcgtcggcggtcagagttcggggaaatcatcggtgctcgagagcatcgtggggcgagacttcctgcctcgaggatcagggatcgtgacgcgtaggccactcgtcctgcagctgcacaagacagaggccggggtgcaggagtatgccgagttccttcacatgcctaagcgccgcttcactgatttctctattgtgcggaaggaaatccaggatgaaactgacaggttgactggaaagacaaagcagatatctccagttccaattcatctcagcatatactctccacatgtggtcaacttaacattgattgatctgccgggcctaaccaaagttgcagttgaggggcagcctgaaagcattgttcaagatatcgaaagcatggtgcgttcatatgttgataagccgaattgtattatattggctatatctcctgccaatcaagatatagcgacatcagatgcaatcaagcttgcccgggaagtggatccaactggtgagaggacatttggtgtgttgacaaagcttgatttaatggacaagggaacaaatgcacttgacgttcttgaaggaagagcttacagactgcagcatccctgggttggaattgtgaaccgttcacaagcagatatcaacaagaatgttgacatgattattgctaggcgaaaagagcaggagttcttcgattctagtcctgaatattctcatcttgccagcaggatgggttcagaatatcttgctaaacttctttcacagcatctagaggccgcgatcagatcacgcattccgagcataacctctctgataaacaaaactattgatgagcttgaatctgagatggatcacctcggtagacctattgcttctgatgctggggctcagttgtacctcatcttggagctttgccgtgcatttgacaaaatatttaaagaacatcttgatggcggccgacctggcggtgatagaatttatggggtctttgataaccaactcccttctgctctgcggaagctcccatttgatcgtcatctctccgtgcaaaatgtgaagcgggttgtttcacaggcagatggttatcagcctcatttaattgctcctgagcaagggtaccgtcggctgattgaatcttctctcaattattttagaggaccagcggaagcctctgtagatgctgtgcattctgttttgaaagagctggtgaggatatccattggggagacacaggagttaaaacgatttccatctctacaaacggagctagctgctgcatgctataaggcccttgagagattccgcgaagatggcaggaaaactactctacggctggttgatatggagtctgcatatttgactgtggagttcttccgcaagctcccacaggaagttgataagactggaactggaaatcccagaaatgccaatcctcctgctccttcggatgatcgttacgctgatgcacatttcaggaggattgcttctaacgtgtcctcatacattggcatggtatctgaaacgctgaagaatactatccccaagtctgttgttcactgtcaggtccgcgaagctaagcggtccctgcttaaccatttctatactcaagtgggcgggaaagatgctaagcaacttgcagtactccttgacgaggatcctgccctcatggaacgcaggctgcaatgctttaagaggcttgagctgtacaagtctgctcgggacgagattgatgccgtgtcgtggacaagatgaagttgcgcgctctgttgatgtgacccttttggtccgtccgggaaatcgtcgcctgctggccatggattcacgctttctagaggacgtgtgttgcccgccgtgcgcccttccatgagttccccgcatagaacaggtcgtcttctggaacagaaaggcgaagcgcgtggcgagctgtcctgattttgacgagtccatgcatcttcagcagattggactggtcgccataagaacacgaaactgtgattaggaggcatacacgtcatctgctagtgtttccggtgaagtcagttgccaccatgacctgctaggcagaaataaatatgcccctattaatcgggccttgatctgtcgtcctcattgctgaaaacctcacccaaattgcatcttatagcacattcgtcgccatggatatggtcattggctgtgccggctgtgagctgtcaacattttgtacagtactacatttccaaaatctaaaccgggcatcactgcgaatccgtaatagcag

SEQ ID NO: 8154 - DNA, 844 bp, Zea Mays
gtctatcttctcggctcgcacacctcagacacagccaggcagcggagcgctcccccctcgattccttcgcttccttctagaaccttccgctccctccgttgcaacagtagcacagagcttcctcctcccccacccccgaagatgacgaccatggagaacgtgatcgtgctcgtgaaccgcatccagcgtgcctgcaccgtcctcggcgaccacggcggcggggacgccgccgcctccctccctaccctctgggaagcgctcccgacggtcgccgtcgtcggcggtcagagttcggggaaatcatcggtgctcgagagcatcgtggggcgagacttcctgcctcgaggatcagggatcgtgacgcgtaggccactcgtcctgcagctgcacaagacagaggccggggtgcaggagtatgccgagttccttcacatgcctaagcgccgcttcactgatttctctattgtgcggaaggaaatccaggatgaaactgacaggttgactggaaagacaaagcagatatctccagttccaattcatctcagcatatactctccacatgtggtcaacttaacattgattgatctgccgggcctaaccaaagttgcagttgaggggcagcctgaaagcattgttcaagatatcgaaagcatggtgcgttcatatgttgataagccgaattgtattatattggctatatctcctgccaatcaagatatagcgacatcagatgcaatcaagcttgcccgggaagtggatccaactgatattgtagaattgtgaagtccttgatgtattgcataagggatgatgacatatatatagagtcaaagggaaccctaac

SEQ ID NO: 8155 - DNA, 1201 bp, Zea Mays
atggccacatctaggctccccagggaccgctggaccctctggtgttgccgctcaaggcttctatggcccagcagtagccgcaaccggagagggagacaactgagcccctcaacctctccgtggctcctcaagtcaaatcagaagttacaaggtttaagggaagaaatgaatgcgattgtcccatacttggaggagatgagaaagaagaaagttgaaagatgggaccaatttgttgatgtcatagagcaaattaagaaggttgcatctgaaatcaggcctgcagattttgtaccctttagaattcctatggatcagtctgatctatctttaagaaagctggaggagctaacgaaagagctgcaatcccttcagaaggagaagagtgatcggctgaagcaagtcatggaacatcttaacactttgcattcgttatgcgaggtgcttggtgtagacttcaaacaaatagtaaatgagcttcaagatttggcctctagcatgcttgaactttggaatctcatggatacaccacttgaagaacaacagatgttccagaatgtaacgtgcaatattgctgcttctgaacatgaaataactgagcctaacaccctctctattgacttcctcagctacgtggaatctgaagttttaagactcgagcaacataaagcgagcaagatgaaagaccttgttctaaaaaagaagacagaactggaagagcataggagacgtgctcatttgattggcgaggaaggctatgcagctaaatttagcgatgaggctattgagttggatgacacaatcatcaaaaccattgagactgctcccaacaatgaactgaaaaaagcaaaagaaatcattcaacgtattcgccgaagagaacttaacaagttttgcaacccagtattctgttcaccaaaggacaaactggagcatttcaaaaatattactgcacaggacatagtttgttcgcagaaatcttctgaggtgctgctgaaggaagaggatgttgcagtaagcaatgttaagatagatcttactcgtggaaaagataacccccttgaaaggtttttgatatttgaatggtacttagttctcttattgatttgtctgaaacattgaaactctaattgattgcattcttttatgtatgtaacaaccaaccaccagcatcaagttctttaaggtaatcacttgcttctgg

SEQ ID NO: 8156 - DNA, 1372 bp, Zea Mays
aggcggagcagcacaggacaggacagccagaggccgggagcagaggaggcggtcgtggcgagcggcgagccacaggcacgggcacctatcgttgaattgaacgaaaggagagcgggagaaagcgactcgtcactcgtcagtctctcgtcctcatgccgtcgccgctgggtggacgaatccaattcgggcctggcaaggctggcatgccgtcggcctccctagctcgccgcctcctctctactatatcatctccagcgatcccttcacgcagtaccagcaccagcgccagcaacagcaacagctgtggtttcagcacaagaagggccaggaagaagcgcagctgcgtttcttggacggtgagcgcggctactccggcggacatggcgaccaacagtgccctggcgaagctggcgccgctggaagccatcctgttcgacatcgacggcacgctctgcgactccgaccccatccacttctgcgccttccgagagctcctgcagcaggccggcttcaacggcggtgtccccatcacggaggagttctacagcgccaacatcagcgggggccacaacgacgacctcgccaggtcgctgttcccgggcatggatcaccagaaggcgatgcggttcatggatgacaaagaagctatgttcagaaagttggcgcctgggcagctgaagcccgtggatgggctgcaggagctgtgcggatggatggaaggccgcgacctgaagcgcgcggcggtgacgaacgccccgagggcgaacgccgagctgatgctgtcgctgttgggcctcaccgacttcttcccggtgctcgtcatcgggagcgagtgcgaccgggccaagccgttccctgacccgtacctcaaggcgctccagctcatcggcgcatcgcctcaacacaccttcatatttgaagactctgcatcgggggtccgggccggtgtggctgccggagtgcccgtggttggcctgacgacgaggaaccccgggaaggtggaggtcgaacccgcagcggcgaatgcgcaaggctgatgcgtcggtcactgcggacaactaagaaatgaaatgtcgtgctggactagccttcagcgattctttcagagtggaatagctgtgtaactgcatcgtgtaataaactaactccggtcggttcctcggctggaacctggagactagcttcttggtggattcaaacagggcccaaatagaccctaagttaagggaggtttcctgtgcccaacaataatgccttactagtaattagcgcgcgtcttacgcgcgtaaaaagaattcgtaatttaagtgataataatattatattattttaaataaaatgtacataaatattttataatataagtgataat

SEQ ID NO: 8157 - DNA, 1068 bp, Zea Mays
ggtgttggcttatgctggaaggagaaggggtgttgccttttaagcagactccacttcacatgggggatgaacatggatgagttttgggaggggcacaatgataaatatgtgcctctcctgctgctagtttcaggctcatgctactaccttatgagtcgttttacagttcagttttgtattttcagcgctacctacctctctatccctagatccccttgtgattcttcctattttttcatcatataaatcaataaagattcagacagttcaatgaactgccatacatacattccttcaattaataagtttatgaaactgcgcccacaacagacatgtttggacgttatgctgttgttgttacaagtacaagctatcagtttgttaaccaagatgatcagcagaggtgtacttgtggtctcaggttcacttggcaaaactacccaagaacctgttggaaaaagcatcctttgcaaagaacacggagcatgtactgcaccagctacctcaagtaatttcatccttggatgcttatatggacaggagtttgcaaagtgcatctcaaattaagactgtcacacagctcttgtcaaacatggagaagacacagctgaagtccatgttgccttcctctcgaaggaaggaagatcagaagagtactgaacccttaagaactcagggttgattgacgtcaccgagacatagtggaaggataagcttttgccgtcttatgctagagagatctgagtatgatggtttggctgattggctctatgcatctatccggcataaggatccatcgctgcctaccgtttgcgccacattttaaaatttggttggggaatgctgttatggtgtaatggagctgttttttatgagttggaggtgctacaaggaaagcatgtctgtttatttgtcgtccgctaaatcattttaactaaattgcggcaaataaaaaagaacggatggattaattgccacgcctttgggtctacaaacatgctgttttcttgtaatagtattgattgtttctagcagaaaattaaggtagaaattaataagtgatcaaat

SEQ ID NO: 8158 - DNA, 838 bp, Zea Mays
gttatttacacattttcaatttcgtactgggcgactgggcgtagggcgagctgagctcccaagtcgacgtggcggggatggctgcgacggccggcgtcggcggtggtggaggggctaacgcggcggtggcagagcagatagcacaggcagtgcggtccacctccaatctcctccagctcatggagcagtcctcccccgctcaggttcacttggcaaaactacccaagaacctgttggaaaaagcatcctttgcaaagaacacggagcatctacctcaagtaatttcatccttggatgcttatatggacaggagtttgcaaagtgcatctcaaattaagactgtcacacagctcttgtcaaacatggagaagacacagctgaagtccatgttgccttcctctcgaaggaaggaagatcagaagagtactgaacccttaagaactcagggttgattgacgtcaccgagacatagtggaaggataagcttttgccgtcttatgctagagagatctgagtatgatggtttggctgattggctctatgcatctatccggcataaggatccatcgctgcctaccgtttgcgccacattttaaaatttggttggggaatgctgttatggtgtaatggagctgttttttatgagttggaggtgctacaaggaaagcatgtctgtttatttgtcgtccgctaaatcattttaactaaattgcggcaaataaaaaagaacggatggattaattgccacgcctttgggtctacaaacatgctgttttcttgtaatagtattgattgtttctagcagaaaattaaggtagaaattaataagtgatcaaat

SEQ ID NO: 8159 - DNA, 1367 bp, Zea Mays
gttatttacacattttcaatttcgtactgggcgactgggcgtagggcgagctgagctcccaagtcgacgtggcggggatggctgcgacggccggcgtcggcggtggtggaggggctaacgcggcggtggcagagcagatagcacaggcagtgcggtccacctccaatctcctccagctcatggagcagtcctcccccgctcaggttcacttggcaaaactacccaagaacctgttggaaaaagcatcctttgcaaagaacacggagcatgtactgcaccagctacctcaagtaatttcatccttggatgcttatatggacaggagtttgcaaaggttaccttcttcccctatatgcatttttattcattagtatcttctcactagaaattctagcttttctctcagacttattcatggaacttttttagctgcaatttttctgttcagattccaaccaactatgctgaagtgtattttgtccctacttgccttccagaaaaggatcacttatgtcaattgtgtggcatatgctttttatgtctcaactatttaccagttttttctttaaaaaaagatgatgcaagacagaatcatcaatttatttctcaacatgaagatcaattggcgagcttctggcttacataggaaatgatcatttcccaccagaacacattgatctataggacacatccatcagtaaactgaaatcccagcttgtagttctgtagggcgcataatggttcttctaaacttcacgcatgtccagatttccgaccaactaggttgaagtttgttttctttaatatcaccactgataatctttgcttttgtgtactaaaaaactgtgcagtgcatctcaaattaagactgtcacacagctcttgtcaaacatggagaagacacagctgaagtccatgttgccttcctctcgaaggaaggaagatcagaagagtactgaacccttaagaactcagggttgattgacgtcaccgagacatagtggaaggataagcttttgccgtcttatgctagagagatctgagtatgatggtttggctgattggctctatgcatctatccggcataaggatccatcgctgcctaccgtttgcgccacattttaaaatttggttggggaatgctgttatggtgtaatggagctgttttttatgagttggaggtgctacaaggaaagcatgtctgtttatttgtcgtccgctaaatcattttaactaaattgcggcaaataaaaaagaacggatggattaattgccacgcctttgggtctacaaacatgctgttttcttgtaatagtattgattgtttctagcagaaaattaaggtagaaattaataagtgatcaaat

SEQ ID NO: 8160 - DNA, 1157 bp, Zea Mays
actcagccagaattactgatagtatttacttagaaaaacatcattgttctatacaagtgtagcatatttattctcaaataagaaaatgcatagaactcaagttaatctaactctgaaaaacatcattgttctatgtgtaccatatctgttctcaaataagcgctccagcaaccggatgcgggcgccgcgagacaccgccgcgtgcgccgtgcagctgcccatgatgccggcgcccaccacgatgacgtcgaagttggaggctgggcgaccagcctggggaactgcgggtgcaccggcgctggccatggcagcagctcgcgagcgctttgcaagctggaacggacgtacggcaggaggagaaaaagatagacttcgccactgatttcctttaccatatggacctgcaaggtttacagcatatactagatgcaggaaatgtcataaaactcctgtgggagaatacaacgccgtgtagtcgaaattaagactagtcatgcagaaccatggtcttaatacagtaacaacaatatctggtgccaaattttgagaaggtgtcatgtttgatatagtttaagccaaagatcacaattttgtgagtacaacctaagaagctctgaaatgatgatcaaattaacataacttaaatgaggtcagctaaacgaaacatattcagaaattatgtagcactaaccacttatggaggtgccagacaagattacaaatccaagtaaagttagcaacttagtatacactgacctttccacactgttcttcatctctattgcatactctctcttatcagtctgagcacgcagtgcacgtacaacagggccttttgagctgttcagtacacgcttttgcaagtagcacctcaacagcggcggctgcgagaggaaccctagcgcgagctccaggcgaggatagaggcggctgtgaggaccctggctccaaccctagcgcgagatccaggcgaggcggctgcgcgagctccaggcgaggcgaggcggctgcgcgagctccacgccaggacacagggaaggggcctgcgcgtgctctgagctgcgaggacagggagcgagtggagcctggctctggagaaacggagattttggccgtttgtgatgggcctggatgagatggttattttgcacgagcgt

SEQ ID NO: 8161 - DNA, 1722 bp, Zea Mays
gtttggtttcctgtaccgactcagccagaattactgatagtatttacttagaaaaacatcattgttctatacaagtgtagcatatttattctcaaataagaaaatgcatagaactcaagttaatctaactctgaaaaacatcattgttctatgtgtaccatatctgttctcaaataagcgctccagcaaccggatgcgggcgccgcgagacaccgccgcgtgcgccgtgcagctgcccatgatgccggcgcccaccacgatgacgtcgaagttggaggctgggcgaccagcctggggaactgcgggtgcaccggcgctggccatggcagcagctcgcgagcgctttgcaagctggaacggacgtacggcaggaggagaaaaagatagacttcgccactgatttcctttaccatatggacctttccacactgttcttcatctctattgcatactctctcttatcagtctgagcacgcagtgcacgtacaacagggccttttgagctgttcagtacacgcttttgcaagtagcacctatcagaagaagatgcaatcagtatgctaagatatctttgttgattaactagcaatcaaaatatggactctcagccatttgcactcagagaaactcattctccaggcaacaagacgtttgaactcgtacctatcggtattttttccaatttcaccaccaaaggcatctacctcatggacaagttgagactttgcagggccaccaacagcagggttacaaggctgggtagggtagatgagttgaagcagaactacacttctaatactaaaatttaaatggaattcattaacaaagaatgtttccttatagttataggctatagcatactaagatatgcaacatactaatcaaaaatcatctcttcagtttctatcgtacattcataccttggaacagaatttgtgccctacaaaaatgttatcacaggtaagagttcacattgctaaatttctacactgcagggtttgatggatcaattcttcatataagggacatgatttttattatctagcatcaggagtcaatgttcaagtaatttcagtaatgaacctgactagaatatctaccatcggggcaaagctagctcagcgcagacctgccacgcaatccggtcaatgttgagcgtaaaagcagggtgcgcgcgccgaggcgagacgaagcaagggcggcctcgcatccggcatggccgcctccgaccacaatgccaaacctcgttacccggtagtaccaggagcaagtgcatctagcgtcggagagtgagatctgtgcgcgagagacagagaagaagagaaccgtgaccgcaagggggtgcggcggacgatcgaccggcccagtgttcggagcggggagaggagacgggagagggagagcttgagggtgagaggagaaggcagagtctgacctcaacagcggcggctgcgagaggaaccctagcgcgagctccaggcgaggatagaggcggctgtgaggaccctggctccaaccctagcgcgagatccaggcgaggcggctgcgcgagctccaggcgaggcgaggcggctgcgcgagctccacgccaggacacagggaaggggcctgcgcgtgctctgagctgcgaggacagggagcgagtggagcctggctctggagaaacggagattttggccgtttgtgatgggcctggatgagatggttattttgcacgagcgt

SEQ ID NO: 8162 - DNA, 1936 bp, Zea Mays
ggtctatttcttcttttttatttgtttaatttatataatttcggctattatttattatatacatatgttctcccctcttttctagtgacagggagcgaggcagcgaggcagcagctgcagccggccgcgcccccatctcatctcgggggtcgggacctgattaccccaatccgtttcctcaccaaatacgccacggcggcgcggcgcgctggctacccacaatggcgctcaccaccgcctccacggtctcctctccctcccgaatcatccgccgcttctcttcttctcaagactctcgccccccttcctcgctcctacatctcgccccgcgccgaggacccgggaattccccgcgcgcctgtagctggcaccggctcgttgtgcgccggatgggctgggcggcgcgagcgctcctcggcggattatcggacgccggcgccagtgagagcgacgaggaggaggagcacgtcctacgagtggggcagcgggagggcgagatcgacgacgccgtggagctctccgcggcggccgttgggccagagagatgggacgtgctgggcctcggccaggcgatgattgggcatagagaagggcacgagaaaggtcataaaccatgaggagaggggacgggtcttgcgtgccatggatggatgcagctacaaggctgcagctggaggctccctgtccaactcgctcgttgcgctggcaaggcttggtagtagccagtctgctggctaccctgagcttaatattgtgatgggcggcagtgtgggcagtgacccactaggtagtttctacagggcaaagttgcgccgtgctaatgtgcacttcctgtctaagccggtcaaagatggaacaactggaactgtcattgttctaacaacgccggatgcacagcgtactatgcttgcgtatcagggtacttcgtcaactctgagttacgattcagacttggccagtttagtgtctaaatcaaatgtactaattgtggaaggttatctatttgagctgcctcacacaattgaagctatcaagcaagcgtgtgaagatgctcacaagaatggtgcaatcattgctgttactgcatcagatgtatcttgcatcaagcgttgctacaatgactttcgggacattgtaagaaactatgcagatatactgttcgccaacgccaatgaagcaagggcgttgtgcgagctaccctcaacagacagtcccatgtcagccacaagatacttaagccactctgttcccctagtatctgtgactgacggcatgcatggctcctacattggggtgaaaggtgaagcaatatacatccctccaccacaatgcgtggctgtggacacttgtggcgctggcgacgcatacgcttctgggattctgtacggcgtcctccggggtgcttctgacctgaaaggcataggactcctggcgtcgcgggtagctgctgtcgtcgtcgggcagcaaggcacgcgactgcgggtccaggacgcggacagactggctggatcgtttgagcaccatctggatagcttggagttctgctcggatgtttgaatagatcactctgcaaacgtctggtctgattgtatctgtttttttcccaagccttagaaatctatatgtacatgtacatacatcactaaccttggttagtaggtctagtacatttcctcagggcatttagccgagctgggtaaatcttgtgcgcccatttgatattactttccatctttgagtattgccatgattggaattacgtagatttcattgggcatggaaaatacaacggtatagttcatttccattgaaaatggatggatgctatgttggtctggcctttctttatgtgtagtatgtaaaaggaactttgcggtccactgaaaccgcagtgagactgaaattacggtaatgcaatccggctttgttagattgt

SEQ ID NO: 8163 - DNA, 1216 bp, Zea Mays
tacgaacctaacgcaaacattacgatcaataaatcatacacttcaatacaattagtctaaacacaacttatcagctaattgacttaaaattttagctttacgattctgggacacctaatgtttataaaattatagaagaacctttattaaccttctaaactattttccagattaatttatataacacattagttggttacgacatttaccgatcataaacatagactgattatactaaatactagagcatgacatcgacttttttaaacaaacatcattcataacaggcaatactgaccacgcctaccagtaaaacattcgaaacacgaaacctatccttcgtcttactaatacaccaggtcgcaaatatagaaacgattcaatcctacttaacttaggtttacccacatattcatcgtataatagacatctaaacctaaccttcacataacgactaatctacgaccgtgatcacaagcacttcacaaacatctaatacaccacaacacgcatgctacagacaagatcattatcgacctgtatatataaccactccgagcataggaccaataacagtgaattggcttaccacactaaaccgagcttgatgatcgcgagaacgacgatggtcttgattcagccattttgtcgagcaccaagcaagcgttgcacgagcaagatgacgtcgaggcgagcatcaaagacgttcaaccggtacgaaagagagaaactcggcgcggaagctcgacacgtcatggcgagcaaagaacttcgcgcacaacaacgcgagagacgagaacttcatggcagcacgcgcaggaacaacggaacgcgcgtgcaggaagattgaagaagaagacgcgcgtccagcagagaagccaggaccgagctccatggctggggaaagaactcggcggccacggccgggggagcagcagactatggcgagatccgagctgtacgcggcagggaggagcaccatgggagcttcacggcgccggagctggaggaggaatcggtggccgggcgaccgagcgccatgggggacgcggtccagcagagggaggaaggagagggccgcaagagagaagcaggagagggagttgcggcgcagtccggcgagccgctcggcagtgtagggaaccggacacagcgctggaggttgaagaaggctgcgtgcgtataaaaagaacagcgggcggcggctaaaaaaatt

SEQ ID NO: 8164 - DNA, 2721 bp, Zea Mays
cgaatatcatgtcccagctgcaacccttgctatgtgacgtccctacccaaatcgtcgatccatctgatcatgaagaggcgacactgcagaacattgagtgtataaacaccgaagtaaatattgttggcgctatcgatactaacattcaaggcaaggagaacacgattccagaagtggtgacatataagaaggttgatccagttggaccagctgtgattgttcctaaagtaggaatgtattttgactctgagaaagaagcttatgagatgtacaatgcttatgcatgtatggttgggtttagtattagaaagagtgatacaagacgtcgaccagataaaactatatttcagaaacatatagtttgcagcaaccaaggtaatagaaaaaatgagccatcacaatcaactacaaggacaggttgcaaagctcgtgtccagtttagcattagcagggaaggggtttggacagtgcaaaaagttgaacttgaacacaatcataccctcgctagtccgaacaaggcacacaagttaaggtcccaacgacatgttattgaagcggacagacaactcattagccaaatacgggaagctggaatgagaccaacgcaagtgtatgaatttatgaagcaattttatggaggtgctgataaagttccattctcgaggatggattgtaataatgagatcggtcgcgaacgaaagaaatatttagaatccaatgatgcacaaacactattggaatacttgaagaataagcaaatagaggatcatgcatttttttatgccattgaaatagatttggaagaaggtgagcaatatggtcggatagctaatttcttttgggctgatggtcaatctatattagattatgcatgctttggagatgatgtttcatttgacaccacatttcaaacaaataagtttgaaatgccttttgctccactacttggaaccaaccatcataagcagacaatagtctttggggctgcactgttatttaatgaaactattgaatcatttgtttggctctttcaaacctttttgacagcaatgtcagggaaacatccaagtacaattttcactgatcaagatgcagccatggcatgtgcaattgcttatgtgttcccaaatacaagacatcgactttgtttatggcatatttatcttaatgccgctaaacatctaagtcatatcattcataaccatcctaagaagtttctacctgcatttaaaaattgtgtctatgaagatagatcagaggattgtttcaaaaggaagtggaatgaactgttgattgaatatagccttgaggagaacttgtggatgctaaatctatataatttaagagaaaagtgggctgctgtttatcgtgactcttttacagcggatatgacaactactcaaaggagtgaaggtatgaataatgtatttaagaagagattccgtaggaaacttgggctttccgaactcatcgtcgaatgcgagaaggtttctgcttctcttcgcgaaaatgagttggatgaagatttcaaatcacgtatgaagaatccagttaattacatccaaaatttacctttgttgaagtatgctgctgaatcatatacaaggaggatgtatatggagtttgaggaagaatttaaatgtcagttttcatattcatgtaaattgttacaatctgaggggtcaatatcaacattcatggttacacatatgcattcaaattatggagcaacagtaacattcaatgttgcagatttgaccattacatgttcttgcaggaagtttgaatccataggtatgtattttcatttgaaactatagttttggttctaatacaagttgctaaccaaaactttcatatcttataggtatattgtgcaagcatgccttcaaagtatttaatatgaacgatgttttcattttaccaccgaaatatatattaaataggtggacaaaatatgcaaaaaagggatttcatattgaaagaaaaacaaatcagaatgaaaccttgaaagcacatgctgcacgcatgtctcgaaaggcaacatcccttgcattgaagtgctcagtgtcaaggccacttcttgattatttagagaaagcattagagaagttggagatggaatcagatgcttctctaagtaatctgagagaaaatgatgttcctatggcatctctatcttcttcgagagtaaatgatattcctatggttttaaatgactccaatgtagatataataaaaagtgccatatcatttcgagttcctcgtgtgattaaaggtgcaaaaagtaagcgagcaaagaatatagttgaaaagaaagcatggaaaaaaaagaaattttctcaggagaaaggagaaggtttaagcaaagtaacagacaatagagagcatgaacatgatccaaaaaatttgagccagagcaataatgctaatatgggaatatcaaatgctttcaccaacaatatgtatgtggatttttcatcaatggaggctccattaatgcaaggaggatacaccaggcttctgcttggagttgatcaagatgcatcggctgctcggaaattaaattttgatgtagcaaaccatgtaacatttaaggactaagtattcataatacactcagcaacctgacgttgtcagctttgtaattaacattgcacgtagaatcctttgtgatggtgacgattacttatgctgaaaaatgcagtagctgtaactagc

SEQ ID NO: 8165 - DNA, 2720 bp, Zea Mays
cacgaatatcatgtcccagctgcaacccttgctatgtgacgtccctacccaaatcgtcgatccatctgatcatgaagaggcgacactgcagaacattgagtgtataaacaccgaagtaaatattgttggcgctatcgatactaacattcaaggcaaggagaacacgattccagaagtggtgacatataaggttgatccagttggaccagctgtgattgttcctaaagtaggaatgtattttgactctgagaaagaagcttatgagatgtacaatgcttatgcatgtatggttgggtttagtattagaaagagtgatacaagacgtcgaccagataaaactatatttcagaaacatatagtttgcagcaaccaaggtaatagaaaaaatgagccatcacaatcaactacaaggacaggttgcaaagctcgtgtccagtttagcattagcagggaaggggtttggacagtgcaaaaagttgaacttgaacacaatcataccctcgctagtccgaacaaggcacacaagttaaggtcccaacgacatgttattgaagcggacagacaactcattagccaaatacgggaagctggaatgagaccaacgcaagtgtatgaatttatgaagcaattttatggaggtgctgataaagttccattctcgaggatggattgtaataatgagatcggtcgcgaacgaaagaaatatttagaatccaatgatgcacaaacactattggaatacttgaagaataagcaaatagaggatcatgcatttttttatgccattgaaatagatttggaagaaggtgagcaatatggtcggatagctaatttcttttgggctgatggtcaatctatattagattatgcatgctttggagatgatgtttcatttgacaccacatttcaaacaaataagtttgaaatgccttttgctccactacttggaaccaaccatcataagcagacaatagtctttggggctgcactgttatttaatgaaactattgaatcatttgtttggctctttcaaacctttttgacagcaatgtcagggaaacatccaagtacaattttcactgatcaagatgcagccatggcatgtgcaattgcttatgtgttcccaaatacaagacatcgactttgtttatggcatatttatcttaatgccgctaaacatctaagtcatatcattcataaccatcctaagaagtttctacctgcatttaaaaattgtgtctatgaagatagatcagaggattgtttcaaaaggaagtggaatgaactgttgattgaatatagccttgaggagaacttgtggatgctaaatctatataatttaagagaaaagtgggctgctgtttatcgtgactcttttacagcggatatgacaactactcaaaggagtgaaggtatgaataatgtatttaagaagagattccgtaggaaacttgggctttccgaactcatcgtcgaatgcgagaaggtttctgcttctcttcgcgaaaatgagttggatgaagatttcaaatcacgtatgaagaatccagttaattacatccaaaatttacctttgttgaagtatgctgctgaatcatatacaaggaggatgtatatggagtttgaggaagaatttaaatgtcagttttcatattcatgtaaattgttacaatctgaggggtcaatatcaacattcatggttacacatatgcattcaaattatggagcaacagtaacattcaatgttgcagatttgaccattacatgttcttgcaggaagtttgaatccataggtatgtattttcatttgaaactatagttttggttctaatacaagttgctaaccaaaactttcatatcttataggtatattgtgcaagcatgccttcaaagtatttaatatgaacgatgttttcattttaccaccgaaatatatattaaataggtggacaaaatatgcaaaaaagggatttcatattgaaagaaaaacaaatcagaatgaaaccttgaaagcacatgctgcacgcatgtctcgaaaggcaacatcccttgcattgaagtgctcagtgtcaaggccacttcttgattatttagagaaagcattagagaagttggagatggaatcagatgcttctctaagtaatctgagagaaaatgatgttcctatggcatctctatcttcttcgagagtaaatgatattcctatggttttaaatgactccaatgtagatataataaaaagtgccatatcatttcgagttcctcgtgtgattaaaggtgcaaaaagtaagcgagcaaagaatatagttgaaaagaaagcatggaaaaaaaagaaattttctcaggagaaaggagaaggtttaagcaaagtaacagacaatagagagcatgaacatgatccaaaaaatttgagccagagcaataatgctaatatgggaatatcaaatgctttcaccaacaatatgtatgtggatttttcatcaatggaggctccattaatgcaaggaggatacaccaggcttctgcttggagttgatcaagatgcatcggctgctcggaaattaaattttgatgtagcaaaccatgtaacatttaaggactaagtattcataatacactcagcaacctgacgttgtcagctttgtaattaacattgcacgtagaatcctttgtgatggtgacgattacttatgctgaaaaatgcagtagctgtaactagc

SEQ ID NO: 8166 - DNA, 814 bp, Zea Mays
cgcaactacactcgcaagcctgacgctgtgactcacaactccctgcttacctcagccaaaccttctcacatcccaccgcatagggttagtaaaaatctggtcgccgcttcgttcctcagccgctcgcgttggcgatgcagcctccctcgatccgacgtgcaggcatcttcaaccgcggcggatcattttcgaccgtggttagggcgaccacggctgcactccatcagcacggcggccaagcaggtgtcgacgtccggctgttgccgtcaacatgatggcgtctctacgagctgccgtcttcccggcgatatgcggcgaggtacaagatcttcagggagagtctgccttcaccaaatcggaccccacgcacccagattttgagtctctgaagccatctcctcgctgcagtgtgctccccagaaggtcattctgtctgcccctgcagccctgcatcatccggttacaaatttctcattcaacagcgtgtttcacaaggtattcagtggcagatcacataactaggcggctagctgatgccgtgtgacacgggtctgttgagaattgagatggcacaacctttgttaggactaggagtatgatatttgccggccgagggcggtaaggtggtacaccgggcatgttaaaaacttggtgcaagcggggcatcataaattaatactggctctgttacaaaataaaatttgttttggtttttcagtagttcatataatacttagtatatgtattatatatatatctatatttattatcatctaattaaatataaatataaaaattgaaactaaaataaata

SEQ ID NO: 8167 - DNA, 1882 bp, Zea Mays
gtttttcttgctgctttgcacgccgtagaagctagcgaccaattaaactttctgggcaacctgagaagtgtcgtcttctcctctgccattcccggctccacggtgatgagtgcctccatggtcagttgagtcatcggaacagcccttcgacgccgaagcaccccgtcatcaaacatctccaagtggatcgttctctctgttcttcgtccaggccgtcccactgccgttccaggttcctgaacacgaggaagaaatcgttgtggaagacgaggttatctcccagactgaacatcctccagcagaaaccaacttttacttcgacctctgcggtgtggaaccagaacctcctacaacacaaggcaagccccggtgcattatccctttccttgttgttttaaaaaaactttatcaccttgcatgatgctttaggtgataggagttgtgtgctaaacaattgatgcattcccttccttggaaaattggttaccattccttgttccctgatttattcaaacgagttttatgatgcttagtctggctttagaaaacaaaatgttttgttttaaaacaaaaggtgatgcttcatattggatgggaaattttacaaagaaaagaattatgatggtgaatccatcatggccgtgatgggttcaacatctgaaaagagtacctctgtcaggtaccaaactttgagttttaaatgataaagacaagactgggtgggtgacttgcacgagaagagagtctcggtgtagtgtctccgtctaagtcgcttaaggaccgagccgatgtagcctgctgatcgaggaccttttaactggccacatgcctcgtcatgggtaagctttgcctcggccgtaccaataccagaaaggccaccacgcaatgggagtggagagatgtcgagagtagcgtgtaccctccgtggcaagaggctggacggtggagtatttgtgctctcggttggcgtgaacccattctggtcttgagaaacccaggtgtgagttgacatatgcaaaggttaagtgctacatatgtcgtgtggttggagctccccagctaggtattaatcgattcggatcgccattacttcttggacatgaagacttggtcactgacttacacgtagcatcaagtgaactgaagtatgataaaagacggctagtataggccaagtgcttgatctagaatagaaggaaatctagatgtaagtaactacttaacctgctaagtaaaatggatttttaaggatccactcatagtaagcttttctgcaaagagagtctttgaatcttgataagctttaccttgattcccaaaagccagcatatccttgagagtcttttttctttgataggtaatacttgcaaaagtacactccgtactcagggttttcaaacccatgttgttgtaggtgatgaaacagccaagttctgttgtttctgttccaaggtggttcccaagcaggaggatgaaaactaagacttatttagggaagatgttttgccttcctgtgatgtaataataagtttacgcactcaagtacccggatatgtaataatcactctttctatatttttcttatgaatgtaaattttgttattgtaatcctttccgcttactccttacttcgatgatgtataatatctgcgtgatgggttaagcgctcttgggcgatatgatgggggatacagataaccgaacttgccaagtcattatgcacacctgcatgactgtctgaggtccttaggacaaggacatctgtaggtgggcctaataccttgggaggttctgccacaactgttatacatcacaaatttaaaagtaggtacaatcatgataagttggcaacatctaggtcatgcatttgtaaacaaacctt

SEQ ID NO: 8168 - DNA, 1904 bp, Zea Mays
ttcaattcacttgtgctgttttatttgtggtgtgggtggagcacacggagattgttggagaggagaagccactgcaccaggtgttcaaggactacgtcgccagcggctctgccttcggcgccacgcgctgggtatccctgctccagcgccaatgcgagcgccttgccagtgagctcgcccgcaacatcgccgacctgggagtgatccgcacaccagaggcgagaacaaatatgatgaagctgtcacagcggatgatcactagtttctctgccaacatcagtgcttctgggagccaatcttggacttcactctcagaaactacagaggacacgatcagggtcactactcgcaagaacacggatccggggcagcccagcggtgtcattctaaccgctgtctctacaagctggcttcctttcaaccatcagaaggtcttcgagcttcttgccgatgaacaacagcgttgtcagcttgagattatgtcaagcgggggctcacttcacgaagtggcacatattgcaaatggatcacacccaaagaattgcatttctcttcttagaatcaatgctgcaagcaactcatcccagaacgtggagctcatgctgcaggagagcagcacccaccccgacggcgggagcctcgtggtgtttgcgaccgtggacgtggacgccatccaagtgacaatgagcggcgaggacccttcctacatccctctcctcccgctgggcttcgccatcttcccggccgccaacccttcggctgcagcaaccagcgccgcaggctccggcgacggccaaagcagcccagcaggtaacgccgacgagcccgccagcggctgcctcctcaccgtgggcatgcaggtgctcgctagcgctgtgccctcggctaagctgaacctctcgagcgtgaccgcgatcaacagccacgtctgcaacgccgtccaccagatcacagccgcgctcaagggcgctggggcgagcggggccgctgaaccggcggctgctgcctccgagtagtagcaagagcgggagcagaggagagcagatccatacaccacaacaaaagccaaattgccttccaggtccggttgtttctgctgacagacatcccagtgcaagagagggtttgacaggagcccgaaaccaacacacggaaagttcaaaaaccccccttctctttcccgccatatgcctcttaaaatgacaaaaatacccctgaccgaacgaagagaatggtgggggcattttgatcattttgggaagctagtgcggtgtcatctacagctactggaaaagaaagggtcctgtcaagctctcacttgtgccggccgattctctatcacgcagaaaacaatccggggcagcttggtcatgcaggtgttgctgctggtagctctctctctctcggtctgttcccttgctcagaagtcagaactgtgaagaaggttagcttcgattggtatgcttatttcgatttttgtaataataataagacgggagatttacctagtagttcgcgcgtaatggtcgggcgtagagccgtgtaactctgtattagaagagactgaggacttgattgtttaggagagcaagagaaaaggtgcgagaggaggagtcaagagcgaaccaaaccagttgtgaccatctgatcccaggctatcagggaagaagggtcttggttcgggaattgacttgttccctctctgcaccgcctgtttgtgctgctactcaagctcgtttgattacgttggtaggttgtttttatcatgcgtgttttgcagctctcttgcggtcttgccctggttggttggttggatggatgggagtgaatgtgtgtgtgtgtgtggtggtggtgctggccttttgtttcttgcgtcgacctactccgtggagggctctgcgggc

SEQ ID NO: 8169 - DNA, 1428 bp, Zea Mays
ggagatggttcttatcgactcatcgtcatcctcatctgtcctagggaagcacctggagaccgcgcgcagttgcccctgcctagaggtgggctgccagcccctgggtccgtccatctttaggagcaaataacgccgaccatggtcgccggcggatccatgttgcctgtggggtttgtgaagggcgacaaagcagaggcggaggagtggcgacgacttgagtcgaccccgctttgggctgacgtgattctagaaaccattgagtgcatgcttagtggtttcgagatgcgatctcgattgcccaagcgtcggtgacgggggactttgtccccttcggacggcaccttctcgcacgatcggaggctcggtggaggcactgcaaacggcacaggtggggatagagttgctccgcgcgggtgctgtctacactgaagaggaagaacgcgagcttgtcgtcccccatttagaaatataccatcttcgaggcgagacatcatccttgcatgcgaagtgcgatggggctcgtggcaatgcagatcgcctttgaaactagggttcccaactcggagaggcactccgcagagtaaagtgtcatgctgggctagccgagtcatcttcatgggaggcaaaggttcgtctggtgcaagcagtctcaaaacttgtgatggagcgcgacgcgaccagagaggtccgcaaaattctcactcaagcgcgggatacgaaggtcgcggaggatgaagcgaaggctacagccacggagaatacatgcaagctcttgcttgctcgcgaaaatgccgttgctgcggggcaccgggcggatgcccttctctcggaaaggagcaccaaactccaagtgattcgtctggttgttagcatggtgtgcgcccatctctctcctctgttgtcgactgaggcgcctctggttgatcgcctctgggagctgcccgattgtgtggagagcgcaccgtcgccgagggcatttgtcgaggggtggaatcggccttggccagatggtctctcactttgacgagatcgacgtcaccattatcgccgagggctaagccagtgtccggagcgacaagtaattggacgttatcgaagaccaggtccacccccacgctcagtcaatcatgagccaagttgacgtcaggtccctcctaatcagcccctcgacactggagcttcccgccaatggtctaactgctcctatttagacgatgcccgctgggattcatgtattgaacctctacatggtgcattttgtgtatatgataacacttttttccatgtagacaatagctttgacacgcatttataacttttcactgattttgggggaacgtacacgactgcgccttgcctacatggctagtttctttcttctttctagactccgttgccgaaaaacccttgcgttctgtgcctgtgccc

SEQ ID NO: 8170 - DNA, 3700 bp, Zea Mays
cttaaatggaaatcgttgccagtttagcattcaatctattatattctattctctacttccggttaacccctcccaagtgactactggccccaaagtgattgcaatgaattaccagcatcacaaatggctttgtaaagcaactccaataggagccttaaacatagaaacaaattaaaatatagggcctaaacaaaaaaggagagctccaacaggagccccatttcaataaaatttgtctaaacgttttggggcccaacttgaagggtaggatatttgagacacagagaagcgtggccctataccgtttgcgctcttctcaacctccacgaatatttcaggcttcttctccgccgccaacatctgctcccgatccgccaccactcgacagtcccgttcccatctcgtactcgttcccatatgtgccgtcgaaggccccgatccctctccatccctccgcctcctctggtccgtcttcttgctcctttcctgatctgctacgtggcatcattcagagagggaaagccaggggctgccaggccaggggatcctacactggtgagcgcgggagctccttgaactggatgagtctcggtctcgggtccaagacatggtagctgatacctccctagaaacatgaagacaaaaacatgtattctccactgtcataaaattccctctcacacatgtacgatgtttgcaatactagtaaggaaaatagcagtagtagaactgctttcatattgcactaccaagataaaaatctatggaacatcacttccctaaaaatctatacaaagtattttatatgtttgcaattcaataggtttgcaaaaactgaaactctgctgttcactgagtaggtttgcaatgtgaattggttaaagcccatgctgagcataattctatcattggttaaagcctagtgcttaatattctgaaactctgaatctgtgagcaattcatttgttatgcaattgtttagctcatacaattattcagttcattggacttcatatacaattattcagttcatttgacttcattcatttgttatgcagcacaatgtcacctggttacttaacaatacatttgcgctctcagcctactttttgtcgtgccacctgatctcctgctctcgtaccaacaatcataatggtctgcttcttgattagttatagattcttcaaaatcctggtcttcaataggatgctgctgctgctttggtgtgcctgatctctgcacctctttgaaaaaagacagtacaattctatctgtgttggactcgacagagatggaatattggtggcaagttgcacagtgatgaaaaagacatcagcctatatgcttctatgaagcattgaacaggccactgtacacatatgtgatgaggggggaaaaaggagatcgcaaaggatgcagccaatgttacaacaatagtaacctgcatcaaatcagtaatacagttgcaagcacactccgatgaggagagcaatgtggtaggtcataatgcatcatcggtcgtctaggtctgcagcatcagccatctctctcaaggttcctgcacgatccagacattccctgtcggctcttggtctccagtatattgaggctagttcaggacaggaaaaggaaaagaacaagccgggcatgggagtagcgacgacgggcgacggatggcgtcaaatgaccgaaatcctgcagcagttgcaacctacacacggtttaaggctcactgtttggagtctatccttcaatttgggcctaaacaaattgacttgagtagcagtagctaaatcaaaatataaggcccaattatagaactcatgattggagttgttctaatgcatttcggtttccaccactcagactgattaccacacaacatacatagaaaggaaagaatgtgcttagtttcagcaggcctcacccctccaatccaggaacagcagcacgagaagccgaggcagcagctactccgcctcgatgatcttcttgggctctgcgaaccagagaagaagcagccatatagacctatcgatcatgccgatcaaagggtaagacgaggcatgaagggattcggaccgtgtaactcgggcggtcgggcatctttgccccaacccacgccgcgtgtagcctctaggtactggtccacgaggtggcggcacttctggtggtggttgatcccctcgatgcggtagcaccagcggaggcgctcccggatgatcttggcggtctcgatctggatccacttctcccgcaccaggtgttcccggtactccagcatagccaccgggtccgcatatgggttcttcgggtcgaagttatccggtggctgctcatcgaactcaacctttgccttgcgcaccatcttctccgatcgcggccggcggccgcacggtcttccgattgggtgggggtgggggtgggggtgtgggattggtgtggtccgctcggtcggatgggagacggagctgatgggtcgatgagttaattatgcgaaccaggcctgtgggctgttagtcggcccaacagaatgaagcgtaggtgggccaagagacaagcttctgtcgccgactcactgtttcccgaagtctgcactctgcaggcggaaacgccagttcagccacgtggagagggcagatccgagaagagccggcgcgatgagctcgccggcgaggtcgaccatctcggccgccgaagacgtcgctgattccatcgacgcgctctaccgcaaggacgaggccctggctgaactcaagtctgaggtgatggaggcgctgcagagggaggtgaggtctctcgacgaagacaactggatgttcgccgcaccgcggtcccgcatcaacctcgtctccaggcctggtgcttacctgcccaagcaaaacgggaagctctcagagttggggcaagcatccaagaaaacaaggaacttctagggtgtacatgcttgtgcttgcaagaagcctggtccatgactccatgatggtagtgaaggctgtagcatcaaggatgatttgttcatgtttcaaatcaatctggttgcttcctgctaattcaatttcagacacattgcgggaagcctacggcactgggtacgccttttaatgacttactcttccattgtacgtaccttaacaacgacaagtgttcatatatacaagaatttcgttaccaaaatcttctgttagccattttgaactttacaatgaattatgaatgtgaagtgtcttaaggttttggtagtgctttgtacattgtttctcaaaattgttttgctttatcggcaaatcttatatgttctgcagtgaaatcatggcacttgactaatagatcagcctgtatgataatcctggtgtttcctattatttttcttttcttttgtcaaatgtaaatgcacactgccatacacgaatgcatatgaacaatgggaaagctgtgaagatgatgtgaatggtgtaacagtagtcagtagggtctgcgattcagctttcttatagaggccatgctggctttgcaccagttatttcttccagagaagtgttccctgtcagtttaacactgaagaatgatgcttcgacttgtgcttgaatttgacttcatgtgtgcattttccatcatggggagagtagtggtgaaagtagttgaaaagttagcagccataccacctttttttgtgtaatgtagtagtcacacatttgag

SEQ ID NO: 8171 - DNA, 3111 bp, Zea Mays
tcgttgccagtttagcattcaatctattatattctattctctacttccggttaacccctcccaagtgactactggccccaaagtgattgcaatgaattaccagcatcacaaatggctttgtaaagcaactccaataggagccttaaacatagaaacaaattaaaatatagggcctaaacaaaaaaggagagctccaacaggagccccatttcaataaaatttgtctaaacgttttggggcccaacttgaagggtaggatatttgagacacagagaagcgtggccctataccgtttgcgctcttctcaacctccacgaatatttcaggcttcttctccgccgccaacatctgctcccgatccgccaccactcgacagtcccgttcccatctcgtactcgttcccatatgtgccgtcgaaggccccgatccctctccatccctccgcctcctctggtccgtcttcttgctcctttcctgatctgctacgtggcatcattcagagagggaaagccaggggctgccaggccaggggatcctacactggtgagcgcgggagctccttgaactggatgagtctcggtctcgggtccaagacatggtagctgatacctccctagaaacatgaagacaaaaacatgtattctccactgtcataaaattccctctcacacatgtacgatgtttgcaatactagtaaggaaaatagcagtagtagaactgctttcatattgcactaccaagataaaaatctatggaacatcacttccctaaaaatctatacaaagtattttatatgtttgcaattcaataggtttgcaaaaactgaaactctgctgttcactgagtaggtttgcaatgtgaattggttaaagcccatgctgagcataattctatcattggttaaagcctagtgcttaatattctgaaactctgaatctgtgagcaattcatttgttatgcaattgtttagctcatacaattattcagttcattggacttcatatacaattattcagttcatttgacttcattcatttgttatgcagcacaatgtcacctggttacttaacaatacatttgcgctctcagcctactttttgtcgtgccacctgatctcctgctctcgtaccaacaatcataatggtctgcttcttgattagttatagattcttcaaaatcctggtcttcaataggatgctgctgctgctttggtgtgcctgatctctgcacctctttgaaaaaagacagtacaattctatctgtgttggactcgacagagatggaatattggtggcaagttgcacagtgatgaaaaagacatcagcctatatgcttctatgaagcattgaacaggccactgtacacatatgtgatgaggggggaaaaaggagatcgcaaaggatgcagccaatgttacaacaatagtaacctgcatcaaatcagtaatacagttgcaagcacactccgatgaggagagcaatgtggtaggtcataatgcatcatcggtcgtctaggtctgcagcatcagccatctctctcaaggttcctgcacgatccagacattccctgtcggctcttggtctccagtatattgaggctagttcaggacaggaaaaggaaaagaacaagccgggcatgggagtagcgacgacgggcgacggatggcgtcaaatgaccgaaatcctgcagcagttgcaacctacacacggtttaaggctcactgtttggagtctatccttcaatttgggcctaaacaaattgacttgagtagcagtagctaaatcaaaatataaggcccaattatagaactcatgattggagttgttctaatgcatttcggtttccaccactcagactgattaccacacaacatacatagaaaggaaagaatgtgcttagtttcagcaggcctcacccctccaatccaggaacagcagcacgagaagccgaggcagcagctactccgcctcgatgatcttcttgggctctgcgaaccagagaagaagcagccatatagacctatcgatcatgccgatcaaagggtaagacgaggcatgaagggattcggaccgtgtaactcgggcggtcgggcatctttgccccaacccacgccgcgtgtagcctctaggtactggtccacgaggtggcggcacttctggtggtggttgatcccctcgatgcggtagcaccagcggaggcgctcccggatgatcttggcggtctcgatctggatccacttctcccgcaccaggtgttcccggtactccagcatagccaccgggtccgcatatgggttcttcgggtcgaagttatccggtggctgctcatcgaactcaacctttgccttgcgcaccatcttctccgatcgcggccggcggccgcacggtcttccgattgggtgggggtgggggtgggggtgtgggattggtgtggtccgctcggtcggatgggagacggagctgatgggtcgatgagttaattatgcgaaccaggcctgtgggctgttagtcggcccaacagaatgaagcgtaggtgggccaagagacaagcttctgtcgccgactcactgtttcccgaagtctgcactctgcaggcggaaacgccagttcagccacgtggagagggcagatccgagaagagccggcgcgatgagctcgccggcgaggtcgaccatctcggccgccgaagacgtcgctgattccatcgacgcgctctaccgcaaggacgaggccctggctgaactcaagtctgaggtgatggaggcgctgcagagggaggtgaggtctctcgacgaagacaactggatgttcgccgcaccgcggtcccgcatcaacctcgtctccaggcctggtgcttacctgcccaagcaaaacgggaagctctcagagttggggcaagcatccaagaaaacaaggaacttctagggtgtacatgcttgtgcttgcaagaagcctggtccatgactccatgatggtagtgaaggctgtagcatcaaggatgatttgttcatgtttcaaatcaatctggttgcttcctgctaattcaatttcagacacatatatgcatgattgccactttagttggagacagcaaatacatcgataattattg

SEQ ID NO: 8172 - DNA, 3278 bp, Zea Mays
ctgccaccttcacatgtatccagttcataattcaagtcatgtaatatgacgacagcacaaaccatttgctggaggacatgaggattcatgcccaacaagagaaaatccttccaaatacttaaatggaaatcgttgccagtttagcattcaatctattatattctattctctacttccggttaacccctcccaagtgactactggccccaaagtgattgcaatgaattaccagcatcacaaatggctttgtaaagcaactccaataggagccttaaacatagaaacaaattaaaatatagggcctaaacaaaaaaggagagctccaacaggagccccatttcaataaaatttgtctaaacgttttggggcccaacttgaagggtaggatatttgagacacagagaagcgtggccctataccgtttgcgctcttctcaacctccacgaatatttcaggcttcttctccgccgccaacatctgctcccgatccgccaccactcgacagtcccgttcccatctcgtactcgttcccatatgtgccgtcgaaggccccgatccctctccatccctccgcctcctctggtccgtcttcttgctcctttcctgatctgctacgtggcatcattcagagagggaaagccaggggctgccaggccaggggatcctacactggtgagcgcgggagctccttgaactggatgagtctcggtctcgggtccaagacatggtagctgatacctccctagaaacatgaagacaaaaacatgtattctccactgtcataaaattccctctcacacatgtacgatgtttgcaatactagtaaggaaaatagcagtagtagaactgctttcatattgcactaccaagataaaaatctatggaacatcacttccctaaaaatctatacaaagtattttatatgtttgcaattcaataggtttgcaaaaactgaaactctgctgttcactgagtaggtttgcaatgtgaattggttaaagcccatgctgagcataattctatcattggttaaagcctagtgcttaatattctgaaactctgaatctgtgagcaattcatttgttatgcaattgtttagctcatacaattattcagttcattggacttcatatacaattattcagttcatttgacttcattcatttgttatgcagcacaatgtcacctggttacttaacaatacatttgcgctctcagcctactttttgtcgtgccacctgatctcctgctctcgtaccaacaatcataatggtctgcttcttgattagttatagattcttcaaaatcctggtcttcaataggatgctgctgctgctttggtgtgcctgatctctgcacctctttgaaaaaagacagtacaattctatctgtgttggactcgacagagatggaatattggtggcaagttgcacagtgatgaaaaagacatcagcctatatgcttctatgaagcattgaacaggccactgtacacatatgtgatgaggggggaaaaaggagatcgcaaaggatgcagccaatgttacaacaatagtaacctgcatcaaatcagtaatacagttgcaagcacactccgatgaggagagcaatgtggtaggtcataatgcatcatcggtcgtctaggtctgcagcatcagccatctctctcaaggttcctgcacgatccagacattccctgtcggctcttggtctccagtatattgaggctagttcaggacaggaaaaggaaaagaacaagccgggcatgggagtagcgacgacgggcgacggatggcgtcaaatgaccgaaatcctgcagcagttgcaacctacacacggtttaaggctcactgtttggagtctatccttcaatttgggcctaaacaaattgacttgagtagcagtagctaaatcaaaatataaggcccaattatagaactcatgattggagttgttctaatgcatttcggtttccaccactcagactgattaccacacaacatacatagaaaggaaagaatgtgcttagtttcagcaggcctcacccctccaatccaggaacagcagcacgagaagccgaggcagcagctactccgcctcgatgatcttcttgggctctgcgaaccagagaagaagcagccatatagacctatcgatcatgccgatcaaagggtaagacgaggcatgaagggattcggaccgtgtaactcgggcggtcgggcatctttgccccaacccacgccgcgtgtagcctctaggtactggtccacgaggtggcggcacttctggtggtggttgatcccctcgatgcggtagcaccagcggaggcgctcccggatgatcttggcggtctcgatctggatccacttctcccgcaccaggtgttcccggtactccagcatagccaccgggtccgcatatgggttcttcgggtcgaagttatccggtggctgctcatcgaactcaacctttgccttgcgcaccatcttctccgatcgcggccggcggccgcacggtcttccgattgggtgggggtgggggtgggggtgtgggattggtgtggtccgctcggtcggatgggagacggagctgatgggtcgatgagttaattatgcgaaccaggcctgtgggctgttagtcggcccaacagaatgaagcgtaggtgggccaagagacaagcttctgtcgccgactcactgtttcccgaagtctgcactctgcaggcggaaacgccagttcagccacgtggagagggcagatccgagaagagccggcgcgatgagctcgccggcgaggtcgaccatctcggccgccgaagacgtcgctgattccatcgacgcgctctaccgcaaggacgaggccctggctgaactcaagtctgaggtgatggaggcgctgcagagggaggtgaggtctctcgacgaagacaactggatgttcgccgcaccgcggtcccgcatcaacctcgtctccaggcctggtgcttacctgcccaagcaaaacgggaagctctcagagttggggcaagcatccaagaaaacaaggaacttctagggtgtacatgcttgtgcttgcaagaagcctggtccatgactccatgatggtagtgaaggctgtagcatcaaggatgatttgttcatgtttcaaatcaatctggttgcttcctgctaattcaatttcagacacatgtaaggatttttcaagtgattgtgacttcaatgtcatgatatgcatgattgccactttagttggagacagcaaatacatcgataattattg

SEQ ID NO: 8173 - DNA, 1876 bp, Zea Mays
ctaactaaaatacggttcccggtcaaaaaaacaccgaaatttggtcaggaaatacgaaattcgaatttttgaatttgaatacgtaaacccttcgggaatgcgaaattcagttatttcccgttttcagaaacggacggaattcagttcacaaacgggatgggtaacactgctgtagggtgattctcgaatctcgatctccctgctctacccgcatcaccccgccgttgccggccccttcctcccgcttcccacctcgccgtcgccacctcttcctcttcctcatcgccggcgcttgcgcgccccttctccaccccgttgaccgccgcacccacggcctcgccgttgcagcactcgtgcgatccggtcacgagtggagcgcacgagctcattcgctgcttccgcctccccctcttccttgccggagcccgcgcctcctctcctcgccggcgccttcgcctgctcctgcgcccccttctccacgtcgcacccacggcctcgtgttgctgccctcgtgagatccggtcgcgagcgcccgacctaggccgctgcctcagtctctcctcgctcggtcgcatcaccaccgccggagacggaccgaggtgctctgcgagactccgcgccatagagctcctcctacggcgggttcttttccgtccggtagctgggttccctgaagccagtcatggcgatgaccaccgccgtgacgggcctcgccgtcgcagcaaccgctcccattcgctccttcctctcgtccgccgccgcctctgtcagcctgcccgccgatcttcgtgacctcgcctccgacctagcctcggaccctgccgtctcctaccgctctctgcgtgccatctggtgcgccacctcgccggacacccgcccgccgctccgcgacctcctccagggcgccgacttcgtgctacccagcccgaaacctcgtgagaagagcgatgagctgaaggcgaggctggagaagctccgggagacacaggagaggaaggagtatgctgagctcgtcagggacgtcgctccgcccagcaaggatgacgctcctgagcccttttcatcctacaaggatcagataggatttggtctgcatgtcgtggttattatgttcacaggttacttggtaggatttgctatgttcaaagctctgttcaacaataatgctgtactgaacgctgctggaggtatcttaggattagttggtggcatgctggttgagaccattctcttcatcatcagatcatcgagtaaagagttagcctctgttccaagatcaaagaaagctcagtagactcttgaaatgctatcatcagttagtggtgagagctataagtggccttagcttgtggaagtctatggagcattggtatgggtttgaaaatgcaattcatcgaatatatgcaattgacatccgatttgaatttgcatcatgaaggaatagggcagagggatttgatttcaatattattagctacccagaattttgtatctcgcccaatgattggctcgatgataattgaagaacatgtacctacggatatgtaaaaagtacatacaagaagatggtatgcttaacagcttaagtaccattggagagtatattggcttgaaattttgcagttaaaacttaaaagtcgaaacaaaatatctggaaaggtcgaagttatcgatggaagatcagaatgtcgccgcggcgacgacatgaagacaacacatggcactgtagatagatttgtgggatgacgcaaaacagtggccgaaatatggttttcgggatggatttagaaccaacattgatttagggagtcccaacgaggtggtaaatatagggatgaaattggattttgtatggagtttgtaaatttaaggatct

SEQ ID NO: 8174 - DNA, 1958 bp, Zea Mays
ctaactaaaatacggttcccggtcaaaaaaacaccgaaatttggtcaggaaatacgaaattcgaatttttgaatttgaatacgtaaacccttcgggaatgcgaaattcagttatttcccgttttcagaaacggacggaattcagttcacaaacgggatgggtaacactgctgtagggtgattctcgaatctcgatctccctgctctacccgcatcaccccgccgttgccggccccttcctcccgcttcccacctcgccgtcgccacctcttcctcttcctcatcgccggcgcttgcgcgccccttctccaccccgttgaccgccgcacccacggcctcgccgttgcagcactcgtgcgatccggtcacgagtggagcgcacgagctcattcgctgcttccgcctccccctcttccttgccggagcccgcgcctcctctcctcgccggcgccttcgcctgctcctgcgcccccttctccacgtcgcacccacggcctcgtgttgctgccctcgtgagatccggtcgcgagcgcccgacctaggccgctgcctcagtctctcctcgctcggtcgcatcaccaccgccggagacggaccgaggtgctctgcgagactccgcgccatagagctcctcctacggcgggttcttttccgtccggtagctgggttccctgaagccagtcatggcgatgaccaccgccgtgacgggcctcgccgtcgcagcaaccgctcccattcgctccttcctctcgtccgccgccgcctctgtcagcctgcccgccgatcttcgtgacctcgcctccgacctagcctcggaccctgccgtctcctaccgctctctgcgtgccatctggtgcgccacctcgccggacacccgcccgccgctccgcgacctcctccagggcgccgacttcgtgctacccagcccgaaacctcgtgagaagagcgatgagctgaaggcgaggctggagaagctccgggagacacaggagaggaaggagtatgctgagctcgtcagggacgtcgctccgcccagcaaggatgacgctcctgagcccttttcatcctacaaggatcagataggatttggtactacccaaccgccctattttcaaattgctctatgcaatcttcctactgcttgtttcatggattacacttgttccattgaagtaataggaatataggatgacaccgtgtgtgtatttcaacataattggagcaatatagttcaaaagctataacatacgagttgtggagcaatatcttctctcttcatcaattgttccaaatgcagaggtaggatctactattttttaaaacacacacacataaagacaagaataaacaaataagataatgtaaaataaatttgagaataatatttttgtaaataccactcgaacaaagatcaatcttccgtgtgctcgtatctaaagcaatgatgccattagaatttagacctgaggtgcagcacatgaaaattgttctacctccaccactacattagtgtatacgtccaagaggcatttatctagatttaaagtgaacaacgaactactaaaaatctagtttcaggatttgtttttttgaactatcaactaaatcaggttataataacctgagtttaatctttaatcaagattacattaataacttggtggtgtgaaaatctatttctcgctcaaaggtctgaagttcagaggccatgtattgtgttgtttttcttctttatttttaaagttattattactttaccggtttctatttttatatttatattgaacgtacgtgacaaaaaacaaaatttaatctaaccggaaatataaaaaaatgaaatcgtgaaaagtcatagaaaaagagaaggaacacgatacatctacctgaccggccagcagccatcgctgcgcagtgtgcacttgtgtccggcagcacaagcccgcatctggctgcctccgc

SEQ ID NO: 8175 - DNA, 1422 bp, Zea Mays
aagagcagatcgagagccgttcgcttcattcctcctcttgtctgctctgctgtcagtctgctctgaggaggaaggagtcatctcaggtcgagatcgaaaccgactccgcttccgccttccccgccgttggggttcatcagcagttcgcagggtaaagaaagggcggccgcgatgtgggtggaaatcctgtgcggcctggtggtctacaagatcatccaacgcgtcttcttcgccggcggcgacgacgcttcctacctcgccgacctcgactcctcccactccgatctctgcttcgccgtcgcctccaggctcgagaagctctacgccggtcgatgcttcgtcggtctccgcatccccgaccccgacgccggcgagcgccagcatatcgacgttgtcctcgttaccaagagggaggtgatggtggtagcgatcaaaaacttatctggttttgttgaggctgacaaggatggaaattggtcttgtcccactgacaagaagcataagcatgagatatttccaaacccggtattagaagtcaacagactagctgctaatcttcaatcatacttggagcaaaggggagcaaaactgcctgatgggcatatcatcgggagagttgttctgccaaatcccaactgcaggccttcctatactataagcacccaaccagaggtcatgctgtatgatcaatggaaggatctcaagacagactcaaagactggactctcagcatggattaaaggtgcatttactggaagcagaagtgacatgcaagattctgtactccagaatctacattttattctcagctcatcgcctatgtgggacaggttggaactcaaaggagacaaaaatgttcttggtgaattcattgaattcaaaggcaggcatgaggacgttcaacttctcaaaattctcaagaggtcaaaagtcagtcgcttcatcatccagaagtcaactctttttggtggttttggtcacgagttcaaatattgtattctcctcgtgactatcgagctgaggggacttcatcttcagagttgaaagagatttctgtgaagcaatacacggagatcgttttccaaccactgcgttccaaaaaggctcggaagttcaagctgtccaatgttgtttctgtcacactgagtgcctagcaagcagaagcttgcctttcaaatttaggctagccaagtagccatatctcttgtattttatatttctcgtccgtgtgtgtaactcatcagttgtgtgcttctctgtttgcacttgtaattatgtgtctgttcttgatgatgagggaagtaacttacaacgacggctaactgaatatgcttcgtactgttgcttgacattatgtgcgctatggtacggggacctgattgaatatgtttcgtcaaggaattgcgcggggacgaatttttt

SEQ ID NO: 8176 - DNA, 1248 bp, Zea Mays
aagggattcagttgaagtcgcacaggatcatcagctgctcctccatggcaaaatttgtgggctccagagcataaaaaccatcgcccgcacccacacccacaccctggaaccattcaacgcgccacccatgaaccaagtgtcgattagaggaaccaagggacgaaagctatgagagctgccattagcgtcggggaagaatgggtgccgccaacgtggtcttgcaccccgaggcgttgttcaaaagccaaatggaggtccgggagcatcgtcgggcttcacggagtctattccgtggtcaactgagctcggggcatgaccaaggcacagcgaattgttcgccgtagctgtggtgtctccatacccctgtgggctacactctcaggcgcctccaccgccaaggcaaggcgacgaggaatctgatgcccatcttttgaggcaacatctggacaacaaggttatcacaggtataacgcaagttgtgtccttgatcatatttttttacctaataatgttcatgaaaatcaccgtgacaagcttaagttaacatgataggacctaataggttacctagctttgtttacaccacaccttgcatacaaatgaattattgggtagtttttctattgcttttcggtcattagcggctcagaccctcacatgagtaagttataaaattaaactttacatgtcatgcgttgcattgtgggatttattattcattatgatcaattatttaattgggttggtatctacttacgcttagtaattgctaataaaattttgaccaacttatttaaaagcaatgctcaaccttaaccattttcctcggtaagccttacactacacatgaccccaccataacgagctcatccatattattctccacatttaccgagcgatgaacgtatgtgagctcacacttgctataatcacatcgtgtgaaaaacaggtaccacctgaagtgcatgaaggatgtaataatgagttcggagaggtctaggctgtcgtctctcagtcaactatagttgcgtaggatcgttgtcgtcctaagttgtattttacttagctattttgtacggaattttattatataattgtgacagaacctcccaatgtattatgcccacccacagatgtccttgtcctaaggacctcagatagtcatgcaggtgcgcataatgactcgacaagttcggttatctgtatattcatcatatcgcccaagagcgcttaacccatcacgcagac

SEQ ID NO: 8177 - DNA, 770 bp, Zea Mays
cggaaacaagggattcagttgaagtcgcacaggatcatcagctgctcctccatggcaaaatttgtgggctccagagcataaaaaccatcgcccgcacccacacccacaccctggaaccattcaacgcgccacccatgaaccaagtgtcgattagaggaaccaagggacgaaagctatgagagctgccattagcgtcggggaagaatgggtgccgccaacgtggtcttgcaccccgaggcgttgttcaaaagccaaatggaggtccgggagcatcgtcgggcttcacggagtctattccgtggtcaactgagctcggggcatgaccaaggcacagcgaattgttcgccgtagctgtggtgtctccatacccctgtgggctacactctcaggcgcctccaccgccaaggcaaggcgacgaggaatctgatgcccatcttttgaggcaacatctggacaacaaggttatcacaggtaccacctgaagtgcatgaaggatgtaataatgagttcggagaggtctaggctgtcgtctctcagtcaactatagttgcgtaggatcgttgtcgtcctaagttgtattttacttagctattttgtacggaattttattatataattgtgacagaacctcccaatgtattatgcccacccacagatgtccttgtcctaaggacctcagatagtcatgcaggtgcgcataatgactcgacaagttcggttatctgtatattcatcatatcgcccaagagcgcttaacccatcacgcagac

SEQ ID NO: 8178 - DNA, 399 bp, Zea Mays
atgaagtatcgcggtggcccgggacgcttagtcgggttgggacgtgttgctgacgaaggcaggtatcacgactgtcgccgcagcgatggcatgcgaagcgaccgatacgtgtggccgagcgaccacggctgtggaggctatagtacggtccgcgggacgtggcgtgctgaggcaaaagaacggacctggttagtccacattggaaggagaagggagcaaagggatatggcggataggtttggcgaaaacttacaggctaggggcggaggggagaatgagctcggaactcgaaagggatggagagtcgccttcttcgacatggcggccatggccggcgcgatggccgggacaaagcgtttgaggcgatgcagcttggcggagacggacgccggcgtctga

SEQ ID NO: 8179 - DNA, 682 bp, Zea Mays
ctcacctcttgattccatttttgagacgctcactggaatacttattaattcttggaacaattgtcataaataaatatggtaagttgcttactgtacctgcattagtgaatgaatgtagtattatagtaggtataaacaatttattggtcacatatttcaaaatttgaatcttgatatgtgtatacattataaaagaatatagacggaagtatagaatatgctctatatgattagtgatatgaattgagtaatgacataacaattaattgaactttagaaaacaaatgatccagcttaatccagaaaatagtctgaaaccatttggtggttcaattgcaagttaggcacgaattggtcaaagagagcaaatcataaaatgctactataagttaaggagtggcaaagaagtacattggttgcatctcatacatttccttcttataggctctgtatttctttcagctctagtaggttacagttgtcatggagtagaagtatgatcctcttgtgatattgtcgaatcgctacagtctcggttgcaggttcagtgttcccacatatagttcacccctgtagcaggacaaaacaaaacgaaacacacattttattagcacaatttaatgaagacgcaagaagtttcatatgttggaagccagggtggaccaagtcgtagccattattt

SEQ ID NO: 8180 - DNA, 923 bp, Zea Mays
gcgagagagagggggagagcttgtgccagggagaaaaagaaagcaacaccgccacgatgaattcacgccatcgctgcttgctcgccatcgattggtcaaccaagagattcgctaagaaccggaggtccttcccgtgctcaagcggtgcgcaaggtggactcatccttggctagttgctcgctggtgaggtgtgggcatcatggaccgcatatcgtcgtggacagacatctccatgactctcggagccggcgagcaaatgaccaaggagctcgaggcaccgcaggttaaagattatgagtaggagctcgtagaagttatctcaactcaagaggactattgcgcgtggataggcgcctgaagtactggtttagttctactgaagggtgggtgcaatcatgtgaaaacttgtactaaacccgacttcaaagtttctgcagacaatgttcgaagatcaacaatcgaagcttcaaagtggtcaaaaaagttcttgtttgatatatggaaggagggtggaaaggaatcaatattgaagaatcaataaaaatgatagaagtttctacttcataggtaatcattgaagtaaaacacaatgaagctgatgcagaagatgttgccatctaagccaaagcgatagctgccagggtcacgaagagggctacagacagtgtagtttttaaaatatgtgaacaaatttatgatgagatgatgcacggatagtaaacacttggtgccgtctatgttgaagctccctagtactttttttgttgtaatataacgtacttctattttgacttgctgatttgcttttttcctttgtgatgtgtaaaacttatatgctatgcattttttagtcgaaggcaaaaaaacaccttccgttcttttcacatgttacaaagggaatgcactccatggatgtagcttcg

SEQ ID NO: 8181 - DNA, 2557 bp, Zea Mays
gtattgctgcggagcaaatggaatcgtagtggacaaacggaattgctggccggcagctagtctgccactcgatccatcggcggacggcggcagtggccagtgggcagcggcaaagacgcgaatcaaccgagctggtctccctcgcccctgaagcaaagcaacctactccgcgctcgctcctccacttgctcccctcctcttccgtgctcgtcccgtccaccgccccctccccctccgcttacgccacacccagcccaatcaactcgccgcggaccgcgcccatgccctcatctccctgctcctcccaaaattgaccacccaatcaatcggctcctagtcctcacccccgacccgttcccatggatcgcaccacctccaacaacagcagcagtgccagtagcaccacctccgccggcagccagaacccgcacctcggcgtcaacaagctcggccgctccatccgcaaggccacgccgccgccgcccccgcagccacagcccgccgcaaaccgccctccccagccccagccgcaggtctacaacatcagcaagaaccagttccgcgacatcgtccagcagctcaccgccggtaccccgtccccaccgccgccgcagcaccaccaccagctcgcccaccgcccgccgcagccgcagcccaagacaccctccatgcgcctccagaggatccgcccgccccccatcgcaacccccgtcgcccggcccccgcccgtccatcccaaccaccacgccgtcccccacaaccctaaccacaactaccccgtcttccaccgtccgccgccgccgcagccccaagcacagcacatgcccgctcccggccctgcctgggctgattccccagtctcagcgtacatgcgcatcctcgagaactccctcttcagcgccaccccaccgggagccgctgccgcggcggcggcggctgcagctgcagctgcgggacagctgccacaccctcaccaccagccttcacatcctcatcccccgcctgtaccgtcgcctgggatactcccttccccaagcagcttcctcaacctgctctcgcccacgcccaggtcaccttatccgctactctcgccagggtttcagcacccgccgccgctcacgccgaacttccccgcgctgtctccgttggcggggaccggcatccttggcccaggacccatgccgccgccgccgtcgccgggtctctggttcccgcagtcgccgtctgggctcctttctccatcaggcttcttgccgagccttagcccaaggtggagagatatatagcaagtctgtgttttccacagcagctgcccctcttgagcaaggcggccgtgtaacatttgacggtagggacgtagccacggtgaggtcggttgggtcgtccgccggatttggctggagaaacacacaggtgggttgtaactttggactcccatatttattgctgctacttactgcttctgtgctgtggttgattagtcggtatgtaaaaggagatttgttatatatttgtaattgtataactgtgaaatatttcaattcattcacttctcttagatgcaaattctggacatgttctactttagattctcgagtgactaggcttggaaatctgtaattgtaaacctgtagttcatgaaagagtagctctttctgacaaatctcaaactgatgggtattgttggtctgcctgttaaggcatggcatgttcttcttattctttttttctcctttccgtattacttattggttgaggagcttcctggacattatctggtcagaaaatcaccatcaaacaaatgttggtagttatccctatcatgaactactgaagggcttagtctttaagattgacacactgttcttatgtttataagttactaactgttcacaggaccataccatcctgtgctaattgtgcccgtatacatatgatacaaaggttgctcttttgctcattttggccgcgtggcagtagcatcttctgatctgatcactaaatgggttatatgcagttcaacatggtaatcgacataagcagcacttctcgcagggaccacactgtatacctttggtttctggatttcagatagaaaataaaatattgtccatgcccattccagcctctgtttttgcagaagacttgagcccttgagacgtgccagccttgtgcgtctcgtctgcctgagtggggcgccggaatgatgagagtgatggctggctgcttgtcatctcaaacttctcaagggccgccgcctggaacgggtcactggagcaagccgccggctgcctggcaggttgctcgtgacaaccaggcgccagaagggccggagcaacagcgagccagcgacaggttgcagccgtgcatatgatatgtgtgccatctgttgtggcccatggtaactggtcgccacacgtctggctggctgctgcagctgcagctagagatggtctgcgagaaattccttcgtttgggatggagacgaggaaagttctccccactgtgatgggaaaaaatcctctcctgacagatgtaaatggggaatacccgtggg

SEQ ID NO: 8182 - DNA, 4164 bp, Zea Mays
gtattgctgcggagcaaatggaatcgtagtggacaaacggaattgctggccggcagctagtctgccactcgatccatcggcggacggcggcagtggccagtgggcagcggcaaagacgcgaatcaaccgagctggtctccctcgcccctgaagcaaagcaacctactccgcgctcgctcctccacttgctcccctcctcttccgtgctcgtcccgtccaccgccccctccccctccgcttacgccacacccagcccaatcaactcgccgcggaccgcgcccatgccctcatctccctgctcctcccaaaattgaccacccaatcaatcggctcctagtcctcacccccgacccgttcccatggatcgcaccacctccaacaacagcagcagtgccagtagcaccacctccgccggcagccagaacccgcacctcggcgtcaacaagctcggccgctccatccgcaaggccacgccgccgccgcccccgcagccacagcccgccgcaaaccgccctccccagccccagccgcaggtctacaacatcagcaagaaccagttccgcgacatcgtccagcagctcaccgccggtaccccgtccccaccgccgccgcagcaccaccaccagctcgcccaccgcccgccgcagccgcagcccaagacaccctccatgcgcctccagaggatccgcccgccccccatcgcaacccccgtcgcccggcccccgcccgtccatcccaaccaccacgccgtcccccacaaccctaaccacaactaccccgtcttccaccgtccgccgccgccgcagccccaagcacagcacatgcccgctcccggccctgcctgggctgattccccagtctcagcgtacatgcgcatcctcgagaactccctcttcagcgccaccccaccgggagccgctgccgcggcggcggcggctgcagctgcagctgcgggacagctgccacaccctcaccaccagccttcacatcctcatcccccgcctgtaccgtcgcctgggatactcccttccccaagcagcttcctcaacctgctctcgcccacgcccaggtcaccttatccgctactctcgccagggtttcagcacccgccgccgctcacgccgaacttccccgcgctgtctccgttggcggggaccggcatccttggcccaggacccatgccgccgccgccgtcgccgggtctctggttcccgcagtcgccgtctgggctcctttctccatcaggcttcttgccgagccttagcccaaggtggagagatatatagcaagtctgtgttttccacagcagctgcccctcttgagcaaggcggccgtgtaacatttgacggtagggacgtagccacggtgaggtcggttgggtcgtccgccggatttggctggagaaacacacaggtgggttgtaactttggactcccatatttattgctgctacttactgcttctgtgctgtggttgattagtcggtatgtaaaaggagatttgttatatatttgtaattgtataactgtgaaatatttcaattcattcacttctcttagatgcaaattctggacatgttctactttagattctcgagtgactaggcttggaaatctgtaattgtaaacctgtagttcatgaaagagtagctctttctgacaaatctcaaactgatgggtattgttggtctgcctgttaaggcatggcatgttcttcttattctttttttctcctttccgtattacttattggttgaggagcttcctggacattatctggtcagaaaatcaccatcaaacaaatgttggtagttatccctatcatgaactactgaagggcttagtctttaagattgacacactgttcttatgtttataagttactaactgttcacaggaccataccatcctgtgctaattgtgcccgtatacatatgatacaaaggttgctcttttgctcattttggccgcgtggcagtagcatcttctgatctgatcactaaatgggttatatgcagttcaacatggtaatcgacataagcagcacttctcgcagggaccacactgtatacctttggtttctggatttcagatagaaaataaaatattgtccatgcccatgtcagtatattaaaggaaatatattcgtatagttacagttgtacagacttttgtatggcatactagcttgttttctttcttacctacatctatataaggttgcgcgacacctttattggggacacattccttttatagcagcatatctttgaaattttcagtgacatataattgttttgattgatctttcatcaagtggtgtcctttgatgcgcactatgcttggagtccccaaagttcaagtgcttttcctagtgggaactctcaggctatctgaattgtcttctgggttatgatgaacactatgccatgtgttccagagaaaaaaaaatgtgtttccaactgggacttctcatgctgtgtatatcattttgtgtggcatattatactttgtctgtgtcctctgtttagaattaatatatgaaatgttctactggacccccttggtatccagtgctaaagagggagtgatccaatgatggcccttgttccaattagtattatttgtgagcagcagcatcttctaattagatactctttcttgggaataattggtattttaccacggtcccctattatgtcatcctgtgtctataatttgtgggtatatctgtgtctaccattgtgatacttaaatggctttccatgatctgctatcagaagaaaccttgcttatgtttgtgaatcattatgttgatggttacatgctttgtaatgtgggaatttgctcgcggatgtgagtactgagatctatggggtgtttggtttaagaaatcactacatctaaattgaggtggtacatcatgggttcattcttcaaatttggtgggatgacctcatttctcatattagtattaactaactaattatgaggaatgaggtggtgatggatcaactcattccattccacaaaccaaataaaaatagtgaggagtgagaagatgatggactagctcatttatcaaaccaaacaccctactaatgtgtggtgttctgccaccttaccattctgctcaccggaatggaaaggtggcactgatcttgttggtttagctaggcccagaaagaaatacttactaaaggctagtttgggaacatcaatttcccaagggatttctattttcccatggaaaaatgaactaatttttcttgggaaaatgaaaatctcttggaaaattggggttctcaaactaggcctaaagattcgtaaacattatgcactctggatggtctcctcctgaagtttgtgctcacctccagttggtggtggtaacggatggagaccaattctggacatttttttctgaaatgttttttatggtgtgttggcatttgttgatttgatctgtataaacaaaatccgaacttccacgggatttggtgattggcaagcatgtgtcccatgtccccgttatcatggatgacttacaagcattgagaatggtatggatatgcttgaaatgttctctcacccttcgtcacctccttgttttatttggctcgcaatgcaagctacgccctcggagaagataaaaaaacgagtgtgacaattgattattttttttccttgtgtacatagtggcgtgcccgcgtgcagaaccagcaagtcagccgaaagcttgggaaattagacttgagcccttgagacgtgccagccttgtgcgtctcgtctgcctgagtggggcgccggaatgatgagagtgatggctggctgcttgtcatctcaaacttctcaagggccgccgcctggaacgggtcactggagcaagccgccggctgcctggcaggttgctcgtgacaaccaggcgccagaagggccggagcaacagcgagccagcgacaggttgcagccgtgcatatgatatgtgtgccatctgttgtggcccatggtaactggtcgccacacgtctggctggctgctgcagctgcagctagagatggtctgcgagaaattccttcgtttgggatggagacgaggaaagttctccccactgtgatgggaaaaaatcctctcctgacagatgtaaatggggaatacccgtggg

SEQ ID NO: 8183 - DNA, 3560 bp, Zea Mays
gtattgctgcggagcaaatggaatcgtagtggacaaacggaattgctggccggcagctagtctgccactcgatccatcggcggacggcggcagtggccagtgggcagcggcaaagacgcgaatcaaccgagctggtctccctcgcccctgaagcaaagcaacctactccgcgctcgctcctccacttgctcccctcctcttccgtgctcgtcccgtccaccgccccctccccctccgcttacgccacacccagcccaatcaactcgccgcggaccgcgcccatgccctcatctccctgctcctcccaaaattgaccacccaatcaatcggctcctagtcctcacccccgacccgttcccatggatcgcaccacctccaacaacagcagcagtgccagtagcaccacctccgccggcagccagaacccgcacctcggcgtcaacaagctcggccgctccatccgcaaggccacgccgccgccgcccccgcagccacagcccgccgcaaaccgccctccccagccccagccgcaggtctacaacatcagcaagaaccagttccgcgacatcgtccagcagctcaccgccggtaccccgtccccaccgccgccgcagcaccaccaccagctcgcccaccgcccgccgcagccgcagcccaagacaccctccatgcgcctccagaggatccgcccgccccccatcgcaacccccgtcgcccggcccccgcccgtccatcccaaccaccacgccgtcccccacaaccctaaccacaactaccccgtcttccaccgtccgccgccgccgcagccccaagcacagcacatgcccgctcccggccctgcctgggctgattccccagtctcagcgtacatgcgcatcctcgagaactccctcttcagcgccaccccaccgggagccgctgccgcggcggcggcggctgcagctgcagctgcgggacagctgccacaccctcaccaccagccttcacatcctcatcccccgcctgtaccgtcgcctgggatactcccttccccaagcagcttcctcaacctgctctcgcccacgcccaggtcaccttatccgctactctcgccagggtttcagcacccgccgccgctcacgccgaacttccccgcgctgtctccgttggcggggaccggcatccttggcccaggacccatgccgccgccgccgtcgccgggtctctggttcccgcagtcgccgtctgggctcctttctccatcaggcttcttgccgagccttagcccaaggtggagagatatatagcaagtctgtgttttccacagcagctgcccctcttgagcaaggcggccgtgtaacatttgacggtagggacgtagccacggtgaggtcggttgggtcgtccgccggatttggctggagaaacacacagttcaacatggtaatcgacataagcagcacttctcgcagggaccacactgtatacctttggtttctggatttcagatagaaaataaaatattgtccatgcccatgtcagtatattaaaggaaatatattcgtatagttacagttgtacagacttttgtatggcatactagcttgttttctttcttacctacatctatataaggttgcgcgacacctttattggggacacattccttttatagcagcatatctttgaaattttcagtgacatataattgttttgattgatctttcatcaagtggtgtcctttgatgcgcactatgcttggagtccccaaagttcaagtgcttttcctagtgggaactctcaggctatctgaattgtcttctgggttatgatgaacactatgccatgtgttccagagaaaaaaaaatgtgtttccaactgggacttctcatgctgtgtatatcattttgtgtggcatattatactttgtctgtgtcctctgtttagaattaatatatgaaatgttctactggacccccttggtatccagtgctaaagagggagtgatccaatgatggcccttgttccaattagtattatttgtgagcagcagcatcttctaattagatactctttcttgggaataattggtattttaccacggtcccctattatgtcatcctgtgtctataatttgtgggtatatctgtgtctaccattgtgatacttaaatggctttccatgatctgctatcagaagaaaccttgcttatgtttgtgaatcattatgttgatggttacatgctttgtaatgtgggaatttgctcgcggatgtgagtactgagatctatggggtgtttggtttaagaaatcactacatctaaattgaggtggtacatcatgggttcattcttcaaatttggtgggatgacctcatttctcatattagtattaactaactaattatgaggaatgaggtggtgatggatcaactcattccattccacaaaccaaataaaaatagtgaggagtgagaagatgatggactagctcatttatcaaaccaaacaccctactaatgtgtggtgttctgccaccttaccattctgctcaccggaatggaaaggtggcactgatcttgttggtttagctaggcccagaaagaaatacttactaaaggctagtttgggaacatcaatttcccaagggatttctattttcccatggaaaaatgaactaatttttcttgggaaaatgaaaatctcttggaaaattggggttctcaaactaggcctaaagattcgtaaacattatgcactctggatggtctcctcctgaagtttgtgctcacctccagttggtggtggtaacggatggagaccaattctggacatttttttctgaaatgttttttatggtgtgttggcatttgttgatttgatctgtataaacaaaatccgaacttccacgggatttggtgattggcaagcatgtgtcccatgtccccgttatcatggatgacttacaagcattgagaatggtatggatatgcttgaaatgttctctcacccttcgtcacctccttgttttatttggctcgcaatgcaagctacgccctcggagaagataaaaaaacgagtgtgacaattgattattttttttccttgtgtacatagtggcgtgcccgcgtgcagaaccagcaagtcagccgaaagcttgggaaattagacttgagcccttgagacgtgccagccttgtgcgtctcgtctgcctgagtggggcgccggaatgatgagagtgatggctggctgcttgtcatctcaaacttctcaagggccgccgcctggaacgggtcactggagcaagccgccggctgcctggcaggttgctcgtgacaaccaggcgccagaagggccggagcaacagcgagccagcgacaggttgcagccgtgcatatgatatgtgtgccatctgttgtggcccatggtaactggtcgccacacgtctggctggctgctgcagctgcagctagagatggtctgcgagaaattccttcgtttgggatggagacgaggaaagttctccccactgtgatgggaaaaaatcctctcctgacagatgtaaatggggaatacccgtggg

SEQ ID NO: 8184 - DNA, 2602 bp, Zea Mays
atgattcagtaaaatcatataaattccacttcgaataaaaccttgtgcattaataacatgacaagtcttaaataattaagctaaaaaccgcaacgaaatagttagaatgaagcaaataaaacgatccagagcacggcgatccagagctcaaatggatcgcaggggatagcgtcgcagcgggtagtccttggcatagctgtaggcgcccgggatgccctgatacgccacgcggagctgctacccttcatgggcgccggggacaagatgaacaaacgatgggaagaggaacttcgaggctaagaactcacctgaaaatgtctgcggtgacggccgctaatggtgacgtctctggcttattaaatccgagttgaagatgacaagacgtgtgagcttgtctatttggatgactttaagcgtgtcttgtctccatttaggtgaagcactcgcctctctgtctatacgagcgaagcctgttttaccgctttccataatcgcaaaaatctcctacacgaccaaaagaaagtcgtcgttgcacctacacggcaaggtagagtgtgggtgctgcatgcccaatccaccagcatcaaccacgcaacggctagtacggagggagaggggggcaagcagcgagcagtgccgtctcctcgtccgttccctgaggctgagagcctgagacaacggtcatattaccgttgtcctgccacaattccaactttttaaacctgccgcagggccttcgccgtctcccccagctctctctcccgctccttcgccctcgcacgtcgtttctttcctcgcgagcgacgcgcgcttctcacccgcatcgccgatggagacgccgctgtccaccaggaggatcacccgctcgctggccgccgcatccgcccagaagagcgccgccgcagggatggactccgccgccctcttctccctgtccaagaacgccgtcgcgggggagacacacgcacagacgcgcgcggcccttcacgacatcaccaacgactcccccgtcgtcggcctcgccgcgggcagcctccacgccaccgacaccacccccgccaagacccgccgcagggccccgcgctgcacgccaggctccggggaggcgctcctgcgcggccaggtcaaggcgctcctgcacaaggtcgacgaggagcagggctgcgccgccgccggcgccctcgtcaggcccaagcgcatccaggcgctgctcggggtctccaggtccccggcccagcttcttgcgcccacgccggccaacacgccgcagatcggccccgtctccgcgcccagggaaggcgtcgggctgcatgacggcgccaccgtcgtgccctgcgtcctcgacgaagaggaactgctgattcctaagcttcaggtaatgtaattgtcaattagcaatgaatggcccccctagtatgaaatcttcctactcatcgaggacgaatagtctgcaattcgacatgtgccttgtacacgtttgattcaccgtttctgttccgagtagtggggtttccaatttcagtctggaacgtaccatttcatctagtatcttcatttgttaaccttctttaatttattcatgtccatgttagtttatttgcaattctgcggtacttgtcgcataataagttttgaccttggtgtgtaggtcattgcaggttccatccctccacctcagccagaggagaagttgggcgagtgccagctgaaccgtgcgctggtgttcgacgactccccggacaattccgacgagtccagcggatcagccgtcccatcatccgtctccctccaggagggcagcgccgggaagacatcgtcacctgaggagggtgacagctcctcagcctggtccactcaggtccatgccagctccgagaagggcgatcaagaagagctggacgtggaggagctggcggcagattacactgaagaagaggaggagttcgaggaggaggatgactgggaagaagacagcgatgacggctgctacgatgatctgtgcgatgagatgagccggatgaccgtgttggatgaaggggagaagaagaccgggctgccgcagttcgaggggaagcacaccaggttcatctacaacagtgacgacgagatcgagcgggaggaggtggccgatgcggctgaagctagggcggagctcggcgcactgatgctcagggggctgccggtgccggaggggaggcacctacgcttccacgacgacgaggatgacgaggaataagaatgttcagattgggtatcggcagtggttgtctttccctgacaccagccagccaaaattcatcatgggagctttgtttctacaatcgggtacagggagcaaatagctcttttgccaattcacaactcaactcttctgaaatgaaacatagtactatttcctggttacttaggtcttgtttggttatttcaatgtcacgtggattaatgtgtattaaaataaattgagatgtatttgctatggatttaaatcgactaaatatcactcaatctacatatagattaatagtgaaacgaacaacccgatataaaaaccaattttggcaaaaaaccatttcttttgacgtttgtgtcgcgttaaactcac

SEQ ID NO: 8185 - DNA, 1840 bp, Zea Mays
ccatgattaaggtgcatgcattctgagtgtgatttatgcaaaaaggccatgcatgctaccttcaaatgccagacatatggaggacgaatttgtaaaactcaccccaattttagtctacgaacgaacactcgtcgttttttactttctactgtagatcgagcgagaaagcagcacgcataggcatctcatttcagttgatggcgttgccatgtcagttgaacgatggccaaaaagtcttggaaatcagctacccttttcttcagaaatcaaattatatttttttccatacattagctatatactaaccgtagcaatataatataggagtataaaaacaactaagagaacagaacaggtattctttttaatactagaagtatatgagaatacaaggcatagcactgccactatttccatatagttagaaacacgagcattctaaattctaatattcagaccgcatccacaatagaccaacactttttttcctttgagaactaactaacggaatgcaacaagtatatgtgtgcccagatttcacctcaccactgaactcctctgatcgattcagatggccactaaactccacatctcctatgttatggttgccctttctgctttagcttggatgttttgcaactaaggccagggcaagtctaatctgaagttgtgtcgctagggtgggttgtacttattagatgttgggtaagaaacctggcccaggctattatttgaaaattgtttgcagcagtaatcatgagcttaacacctgcaatcctgtatgtggctttaccattggaacgttgagcaagcaactaatgcacttgaaccatatcatacacagttgctgtcatcatgtccagctatggatacagccattttgccatcagaagaagcaaccttaaccaactgtgccgcaagctgaagaagaaaaaaaaggcccccttctttcacaattccatatggaaagttggaatgttggatgccaggacaagagagtgagggagggagagcctctgcacaaagcatcatcatttcacatttgcgctggaggtggggacacagctcgcactcgcagcatccagcaggatagacaacctcagccttctggatcctcgacggtcgactgaccatagctctcattgcttggtcaagattcaaaaggagacatatttgtcaagatggcgataatgattgtaggatcccgagtgaaaaccatcgtagtgagaatccgaatttcgtaagatctgtcctaggttggaaggattggtgaagactagtgaacagaatacatggatccccagtctctagcaagcagtcaatttttttttggtgttgtgtgagagagagagagcgtcagtgtgaaccctggaatgatccaaatcatggaacagaagtggaagaaaggccatggatttgatttagtgatttacgtacgtaccttggaggttgtgtagctatttaccgaccaatgcagctgaatccccggcagactgcgagccaggcggcgaagaggattgtgaggaggaggagatccgcaaggatgaccatccagagctgccgcctccacgtccagctgggtccggcccgcccccggtgcgagcctcgatccctcttgggcgtggtccgcgcggctaggtcagcgtccctccgtgcggcctcctcctccgcgtgggcctccgcggcggcgacctcgttcgcctcgcgcgcgtcgtcgcccggcgggagtggcaagcgcagcgctaggcgcggcatctcgtcccgcatccgggcctgcggggcggcgagccgggacgggatttggcgggctggcggcggcgaccgaccttgggcggtgtag

SEQ ID NO: 8186 - DNA, 888 bp, Zea Mays
tggtgtttggtgtctgtccagattgtgacggacgggtgaactggggtcccatttgagatcccatctgagcactatacatctgcaaatacaataagcttgagttttattttaaactaatgtatatatagagtttatactaaacaactgaattctgaatccgatggaaaacataaagtgcattggaacgtgtaggattagagtggttgatagatacagaagaaagacagagctaaaaagcactcgcgccaccataatctatgtgcatgcttttttatttctacaaccagaccattttaaaaaaaacttggatgtaaaaatgttgtaaacgatgggatgctagctgatgtcgaagttggtttaccaactgaagtcacaagcaagttaccaactgaaccatgagttaggctttaccaactgaagtcacaattcactgatgcaggcagcaactagcagatgacagaaattacgattacacataacacaaaaatcagctaatcaagaaagcaaacaggaatagcctagattacacatagcacaaaaatcagctaatcaacaagtgtgtagtggaacatgctgtctacagaaaaggggctggaaattctctcctggtggtggtctatgtggatgatctaataatatgcagggcgcgctgccatgtatacagcctgaacctataatatgcccatcccaactcgcagcttaaagtacactgcagatctatcaagtatcccagaaagcaatggcaggaacaaacaaaggaaaaagggttaatcatgtctgtgccattataattttccatgttttgatatgtgccactgaactttttaagcttacaaatgtgccattaaacttccagtcaaatatgaaatagaccattttatacggttt

SEQ ID NO: 8187 - DNA, 1604 bp, Zea Mays
atgggggcgaaacttgaaaatgaagctgcatcgtcgctttgtctctactcttggtactggtacgacacaaggacgaagcaacaagtcagagcgcgaggccgtggacgtgtgcgctagtcgggcgggatacggtcgctagcagccatggcatcatcgagtgctgctctcgccgtcctgatgctcagctgggcggcggctctcgcggccgcgtcgtcgccggtgacgttgttcgaagccggctacatgccgctgttcggcggcggcaacctagtaccgtcgcccggcggccgctccgtccgcctcaaacttgaccgccacaccggctccgggttcgtgtcccgatcgtcttaccaccatggattcttcagcgcttccatcaagctgcccgaccatcacaccgccggtgtcgtcgtcgccttctacctgtcgaacgcggacgtgttccctggcaaccacgacgaggtggacttcgagctgctgggcaaccggcggggccacgagtggcgcgtccagaccaacatctacggcaacggcagcacctcccgcgggcgcgaggagcggtacctcctccccttcgaccccaccctccggccgcacgcctacgccgtggcctggacccccacggccatcctcttctacgtggatgggacgcccatccgcgaggtggtccgcgtgccggccatgggcggcgacttcccgtccaagcccatgtccgtgtacgccaccatctgggacggctccgcctgggccaccgagggcgggcggtacaaggtcgactacgccttcgcgcccttcgccgccgacttctcgtcgctcgtcctgagcggctgccccgtcgccggcggcggcgacgacctcgcggccgccgagtgccaggtggccacgatgacggcggactgcgccgtcatgacccccgccaagcgcgccgccatgcgccgcttccgccgccggtacctcctctacacggtgtgccacgacatgtaccgctacaacggcaccgtcttccccgagtgcgacgccgacggctcggaacgcgacgacttccacaagtggggcgagtccaagcgcgtgtctcccagcagccgcgggtacgtggaggtggaggaggacgccggcgtggagctcttctactacttcgtccaggccgagtccggcgccgccgccgccgccgatgacacccctttcctcttctggctcaccggcggcgaccgctgctccgtcttcagcggcctcgcctacgagatcggtcccatcagattcgtcctggaaccctacaacggcaccctgccgcgcctgcgatacaaccacaactcgtggtcaaaggtgtcacatatcctcttcgtcgattcaccggttggagctggattttccttctcgagagatcccaaaggctacgatgtcggagacatctcggcctcactgcagctacaggaattcctcatcaaggtgctgtccatcaatccaactagctagacatatataccaatgccacaaacccattcggataacgttagatgcaaatcttttaacgtttatttatgctgtttgcttatacatattccgtggatgtccagtggttcagtgatcatcccgagtacctcgcg

SEQ ID NO: 8188 - DNA, 1435 bp, Zea Mays
ggacgaagcaacaagtcagagcgcgaggccgtggtagctcttgcttgcttccctagccttatagctagcaaatgtatgcaacctgtcaggggcttgactccttgctgggcatatatatatataggacgtgtgcgctagtcgggcgggatacggtcgctagcagccatggcatcatcgagtgctgctctcgccgtcctgatgctcagctgggcggcggctctcgcggccgcgtcgtcgccggtgacgttgttcgaagccggctacatgccgctgttcggcggcggcaacctagtaccgtcgcccggcggccgctccgtccgcctcaaacttgaccgccacaccggctccgggttcgtgtcccgatcgtcttaccaccatggattcttcagcgcttccatcaagctgcccgaccatcacaccgccggtgtcgtcgtcgccttctacctgtcgaacgcggacgtgttccctggcaaccacgacgaggtggacttcgagctgctgggcaaccggcggggccacgagtggcgcgtccagaccaacatctacggcaacggcagcacctcccgcgggcgcgaggagcggtacctcctccccttcgaccccaccctccggccgcacgcctacgccgtggcctggacccccacggccatcctcttctacgtggatgggacgcccatccgcgaggtggtccgcgtgccggccatgggcggcgacttcccgtccaagcccatgtccgtgtacgccaccatctgggacggctccgcctgggccaccgagggcgggcggtacaaggtcgactacgccttcgcgcccttcgccgccgacttctcgtcgctcgtcctgagcggctgccccgtcgccggcggcggcgacgacctcgcggccgccgagtgccaggtggccacgatgacggcggactgcgccgtcatgacccccgccaagcgcgccgccatgcgccgcttccgccgccggtacctcctctacacggtgtgccacgacatgtaccgctacaacggcaccgtcttccccgagtgcgacgccgacggctcggaacgcgacgacttccacaagtggggcgagtccaagcgcgtgtctcccagcagccgcgggtacaagcagcagcagcagcgcgcggacaaggccgtcgccgttgccgcgcctggccggcccgacacgtggccgaccgtagggacattacgtgtcgactaataatgatatgttacggttattaggagattgatggatttatattagtggacaaatacaaacaagcatagctggctgaaccgctgaagtacatggtactgctgcaatggacacacattacacatatgtagtgtacacttaactcttttcagtctgataatatatatactccaacttatagtttgatttgcactagcagtgcctgcaggcacataatgcaaagatgctg

SEQ ID NO: 8189 - DNA, 1569 bp, Zea Mays
aacgtccggatcgaagcctggctccacgcgaccgacgcagcggcggctccacgcgaccggcgcgatggcggctttgacgcgaccggcacggcggcggcgcacagccccgacaacgaccctccccgctgccttctccacgatccctacaacaccaattatagttggggaaggtgaacctcctccctcttgggatccggtaccaactccaaaagctatggttggaaaaggctccccaaggttcaacataggtggttccccaaagttgcgtaggttcattcctacaacaagtgctactaaaaagaagacttctcctaaatgcagtggggcaaaaaagagtggaagttctccaagagtgaaacaaagagcggattggaatccaggccttgagaggtctcttgttgacattctccatgaatttaaagaaagtggatatagaggtgacaatggttggaactcggaagggtggaatagaatggtcaaggagtttcatgtgaggaacaagtatgtctcctttacaaagtctcaaattcaggataaagaaggtcagctgaagagagactacaagatgctcaaagcagcaaagcaacagagtgggtccacctggaatgagaaaaggaatatggttgaaggaccaccagctttgtgggagaatctcattgtgacatttcctaaaatcaagaagtttaacaacaacaaggcaaccttcccgctctttgatgctttgggagagctttatgatggacacttggctgaagggacttggaattgcacttctcttgatgcaccgcgagaggaagaaccgaatgagcaacttcaggatgtagaagatggaccacaaggctttgatctgaatgttgttcatgatgtatatgatgaagttgatgatgcactcactgaaaggaatgaagatatgcttcaaggaagggctaatactctgtcacgagatgaagaaagtgggcagcgaagacctgctgcgtcaagaaacaagcaagaaaaggaactaaagaagcctagaaagactgacaacatagaaaatatgatgaacaaatacctagaaacgaggagcaagcaagtagaagatgaagctgcaagagaaaaggaagcaagagaaaaggagacaagagaaaaggaggcaactcaaagtgaagatttctccatcaaaaggtgcatatcagttctgaacacaatggaagaagtgaccaaactggagaaggcaaaagcatattcagtcttcaccaagagcaaagagaatagagagactttcatatgtgcatgtgaagcggatcaagaatcagctttgatttggctaagaaatgagatggcttagtaggtttgggcgatcaataggtgatgcttagcacatctggaggtttcttattttgaactgacatgcttagttataaagtggtgtttctttttagcacatctgttctatctcttagctgttgaagatgtcagtttatacctgtctatcaatccatgtcacaagttatacttgttttttcacatgcctcttgatcctggaatattatgctcagctctgctgatgaagagaagaacgcagggctg

SEQ ID NO: 8190 - DNA, 564 bp, Zea Mays
gttccccggggtgaacaacgtcgtgaccgaggctgcgcaagcgcgacgtgctgctcgacaaccaccaaggtgctgctgcagggagggaaagaacatttgcctgcaccgtggggaacagatcaccaacatccagggggaacgccatggggagggagcaagggagccgagagggaggaaacaccatgggggttggacgagctgatacgcgcagaggtggaaaagagggggcgcgagcaggaagatgggcttggccaccaagaagggctgcaggtcgtcgtgtccatggctgaggggaggggcgagctcagcgacggcgtggagaaagggctagagcagaggatgggcgagctcgactggggcgctcggggaagcggtgccaaggccgacgctaggaagggcgatgcagcggcgctggccaccggcgaggacgcggccgggtggaggtccgagcaggggatggatgccgtggcaagagctggaggcgagggcttggggatccgagttgagaggatggtgtgctctgctgctgggcggagagggcggctggaagatgagcccaggtga

SEQ ID NO: 8191 - DNA, 2161 bp, Zea Mays
gcaggatcatactgtcttttggcgtttcttctccggctctttttcgtttgcctgtcggttacaaggtggaacgtcttcagaagcttctccactagattagtgtaaatagtagacttgttcaggtttagtttggttggaagaattagtttctggttcgtgttcatttctgctagcaataatggctgcgatgaacggaaaggtattgggtaaatgtggaaggaacatgaatagtctcaagagaaagcgggagaaccccgctgcatatgatgctgacatattccacaactctgaattgcatcagcaccctgtcaatgattctgctgttaggtttcatgttgataaagaccgcaaggcaaagatcgtgtgccacttcaacaagcaggttttgcagagctataagaacttcatgagtagcgcaccacctaaacgtattttgcttcgcataggtgctgtctggaaagacttcccagaaaagattgtcaaattggcacaagctgacttcagggcgaaaaaaacaatcacagaaacaggatatcagaaccagctatttttgctggattttgcccatatgacattcatagacacgaagacaggtcttcagaggccgattgcttggatcgatgaaaatggaaaccgctacttcccagaatcatttgtgcaagatcagaaaatatttatgaagaaagattttggcaacggatatcatgattacattagtgttgagtcaaatgggacacgagaaatgaatgaccagcttggaacatcagaaagttccgcagaaagttcaaacttcggttcaagtactgaagatgtttccagtcctaagagagctagagctgaaaataattccatcataaaaaaatactgtgatatgggagaagctattggagaaaatgagccatgcactttgttgcctacagcctgtaacctactaccacgccaagctaatctgggtgaggtatcacgtgcccagcgcactattgaagccgtggagaagctgttgttgcaggggatgggttcagttattgaatccaaggacattattggaatctacaggactccattattggatgaccatggacaagtccgttaccataatcacgaaaagcatgtacaggttaccagatgtcatcgtggaaacgcaaatgtccgttatgcatggcttccttgctccaaaagcactgtgcatgaaatgatgctgaatagttctttacaagttcataagccgcccattaagtgtgcagcctatggagagggcacattccttacaccagcaaatcgttctgatgcctgtgtgaaattctctgctgttgatgaaaatggcattgtccatatgatgttgtgccgtgttataatggggaacgtagaaatagttcaccctggatctaagcagcaccaacctagtagtgactattttgatagtggagtagatgaccttaaaaacccacaacattacattgtgtgggatatgaatctgaataggcacatctatcctgagtttgtagtcaccgtcaaattgccttctaaaacaaaagattacttcgtatcgcaagaagactgccagaattcatctgatctgtcactggtgttgaattctagttcacccgactgtatttcagagcgatctcaaccaaagtgtctcctcaaattatggacatggttattggttgctatgaagagtttaagttgcctcctgtggagaggcgtgagggaccgggtgcatcagctgccaagatggtggcgaaaccgtgaggcgggtgtcggtcggtcggtgggcgaggaatgcagaagggaggaagcagctgactttgacaaccctgtgggaagcagcaactatgaagcctcttgtgtcagtctttgtatggcggctgatgtttcttctttctgtgtcgtatgagtatgttttttcctagtagattgtatcaggagtttttcatttcaaattgagctgcgcatgttcttttgagcctttggaatagttcgtcaacgaaaaaggctccttttacctttctgataacagtgttgtgcattgttaattaatgtgggtcatatagaataatatatgatgtatacaatgtttttgagtttggctctcgctgccagtcgtgtgtttattctgcacccgtggtaccccactaaacgttagtcgagttcattttat

SEQ ID NO: 8192 - DNA, 2257 bp, Zea Mays
gcaggatcatactgtcttttggcgtttcttctccggctctttttcgtttgcctgtcggttacaaggtggaacgtcttcagaagcttctccactagattagtgtaaatagtagacttgttcaggtttagtttggttggaagaattagtttctggttcgtgttcatttctgctagcaataatggctgcgatgaacggaaaggtattgggtaaatgtggaaggaacatgaatagtctcaagagaaagcgggagaaccccgctgcatatgatgctgacatattccacaactctgaattgcatcagcaccctgtcaatgattctgctgttaggtttcatgttgataaagaccgcaaggcaaagatcgtgtgccacttcaacaagcaggttttgcagagctataagaacttcatgagtagcgcaccacctaaacgtattttgcttcgcataggtgctgtctggaaagacttcccagaaaagattgtcaaattggcacaagctgacttcagggcgaaaaaaacaatcacagaaacaggatatcagaaccagctatttttgctggattttgcccatatgacattcatagacacgaagacaggtcttcagaggccgattgcttggatcgatgaaaatggaaaccgctacttcccagaatcatttgtgcaagatcagaaaatatttatgaagaaagattttggcaacggatatcatgattacattagtgttgagtcaaatgggacacgagaaatgaatgaccagcttggaacatcagaaagttccgcagaaagttcaaacttcggttcaagtactgaagatgtttccagtcctaagagagctagagctgaaaataattccatcataaaaaaatactgtgatatgggagaagctattggagaaaatgagccatgcactttgttgcctacagcctgtaacctactaccacgccaagctaatctgggtgaggtatcacgtgcccagcgcactattgaagccgtggagaagctgttgttgcaggggatgggttcagttattgaatccaaggacattattggaatctacaggactccattattggatgaccatggacaagtccgttaccataatcacgaaaagcatgtacaggttaccagatgtcatcgtggaaacgcaaatgtccgttatgcatggcttccttgctccaaaagcactgtgcatgaaatgatgctgaatagttctttacaagttcataagccgcccattaagtgtgcagcctatggagagggcacattccttacaccagcaaatcgttctgatgcctgtgtgaaattctctgctgttgatgaaaatggcattgtccatatgatgttgtgccgtgttataatggggaacgtagaaatagttcaccctggatctaagcagcaccaacctagtagtgactattttgatagtggagtagatgaccttaaaaacccacaacattacattgtgtgggatatgaatctgaataggcacatctatcctgagtttgtagtcaccgtcaaattgccttctaaaacaaaagattacttcgtatcgcaagaagactgccagaattcatctgatctgtcactggtgttgaattctagttcacccgactgtatttcagagcgatctcaaccaaagtgtctcctcaaattatggacatggttattggttgctatgaagagtttaagagtaagaaaataagccgatgcgaactaataaaggagctgaggcacgtagttggtgatagagtgctaatatcgacgataatgcgtctccaagataagttgcctcctgtggagaggcgtgagggaccgggtgcatcagctgccaagatggtggcgaaaccgtgaggcgggtgtcggtcggtcggtgggcgaggaatgcagaagggaggaagcagctgactttgacaaccctgtgggaagcagcaactatgaagcctcttgtgtcagtctttgtatggcggctgatgtttcttctttctgtgtcgtatgagtatgttttttcctagtagattgtatcaggagtttttcatttcaaattgagctgcgcatgttcttttgagcctttggaatagttcgtcaacgaaaaaggctccttttacctttctgataacagtgttgtgcattgttaattaatgtgggtcatatagaataatatatgatgtatacaatgtttttgagtttggctctcgctgccagtcgtgtgtttattctgcacccgtggtaccccactaaacgttagtcgagttcattttat

SEQ ID NO: 8193 - DNA, 2136 bp, Zea Mays
gcaggatcatactgtcttttggcgtttcttctccggctctttttcgtttgcctgtcggttacaaggtggaacgtcttcagaagcttctccactagattagtgtaaatagtagacttgttcaggtttagtttggttggaagaattagtttctggttcgtgttcatttctgctagcaataatggctgcgatgaacggaaaggtattgggtaaatgtggaaggaacatgaatagtctcaagagaaagcgggagaaccccgctgcatatgatgctgacatattccacaactctgaattgcatcagcaccctgtcaatgattctgctgttaggtttcatgttgataaagaccgcaaggcaaagatcgtgtgccacttcaacaagcaggttttgcagagctataagaacttcatgagtagcgcaccacctaaacgtattttgcttcgcataggtgctgtctggaaagacttcccagaaaagattgtcaaattggcacaagctgacttcagggcgaaaaaaacaatcacagaaacaggatatcagaaccagctatttttgctggattttgcccatatgacattcatagacacgaagacaggtcttcagaggccgattgcttggatcgatgaaaatggaaaccgctacttcccagaatcatttgtgcaagatcagaaaatatttatgaagaaagattttggcaacggatatcatgattacattagtgttgagtcaaatgggacacgagaaatgaatgaccagcttggaacatcagaaagttccgcagaaagttcaaacttcggttcaagtactgaagatgtttccagtcctaagagagctagagctgaaaataattccatcataaaaaaatactgtgatatgggagaagctattggagaaaatgagccatgcactttgttgcctacagcctgtaacctactaccacgccaagctaatctgggtgaggtatcacgtgcccagcgcactattgaagccgtggagaagctgttgttgcaggggatgggttcagttattgaatccaaggacattattggaatctacaggactccattattggatgaccatggacaagtccgttaccataatcacgaaaagcatgtacaggttaccagatgtcatcgtggaaacgcaaatgtccgttatgcatggcttccttgctccaaaagcactgtgcatgaaatgatgctgaatagttctttacaagttcataagccgcccattaagtgtgcagcctatggagagggcacattccttacaccagcaaatcgttctgatgcctgattacttcgtatcgcaagaagactgccagaattcatctgatctgtcactggtgttgaattctagttcacccgactgtatttcagaggagatgaacctggaggcacctccagcattgggaggtggatgtgcagcccccatgctaggagattcgatggcaaaggctccaagctcaccttggatgcctttctctatgttgtttgcagcgatctcaaccaaagtgtctcctcaaattatggacatggttattggttgctatgaagagtttaagagtaagaaaataagccgatgcgaactaataaaggagctgaggcacgtagttggtgatagagtgctaatatcgacgataatgcgtctccaagataagcagttgcctcctgtggagaggcgtgagggaccgggtgcatcagctgccaagatggtggcgaaaccgtgaggcgggtgtcggtcggtcggtgggcgaggaatgcagaagggaggaagcagctgactttgacaaccctgtgggaagcagcaactatgaagcctcttgtgtcagtctttgtatggcggctgatgtttcttctttctgtgtcgtatgagtatgttttttcctagtagattgtatcaggagtttttcatttcaaattgagctgcgcatgttcttttgagcctttggaatagttcgtcaacgaaaaaggctccttttacctttctgataacagtgttgtgcattgttaattaatgtgggtcatatagaataatatatgatgtatacaatgtttttgagtttggctctcgctgccagtcgtgtgtttattctgcacccgtggtaccccactaaacgttagtcgagttcattttat

SEQ ID NO: 8194 - DNA, 2694 bp, Zea Mays
tttgagtgtcctgctgtaatccaatattgttttgctgcatataaagtgcagcaacaattatcttactgatttctgacaattttcccttagcaggatcatactgtcttttggcgtttcttctccggctctttttcgtttgcctgtcggttacaaggtggaacgtcttcagaagcttctccactagattagtgtaaatagtagacttgttcaggtttagtttggttggaagaattagtttctggttcgtgttcatttctgctagcaataatggctgcgatgaacggaaaggtattgggtaaatgtggaaggaacatgaatagtctcaagagaaagcgggagaaccccgctgcatatgatgctgacatattccacaactctgaattgcatcagcaccctgtcaatgattctgctgttaggtttcatgttgataaagaccgcaaggcaaagatcgtgtgccacttcaacaagcaggttttgcagagctataagaacttcatgagtagcgcaccacctaaacgtattttgcttcgcataggtgctgtctggaaagacttcccagaaaagattgtcaaattggcacaagctgacttcagggcgaaaaaaacaatcacagaaacaggatatcagaaccagctatttttgctggattttgcccatatgacattcatagacacgaagacaggtcttcagaggccgattgcttggatcgatgaaaatggaaaccgctacttcccagaatcatttgtgcaagatcagaaaatatttatgaagaaagattttggcaacggatatcatgattacattagtgttgagtcaaatgggacacgagaaatgaatgaccagcttggaacatcagaaagttccgcagaaagttcaaacttcggttcaagtactgaagatgtttccagtcctaagagagctagagctgaaaataattccatcataaaaaaatactgtgatatgggagaagctattggagaaaatgagccatgcactttgttgcctacagcctgtaacctactaccacgccaagctaatctgggtgaggtatcacgtgcccagcgcactattgaagccgtggagaagctgttgttgcaggggatgggttcagttattgaatccaaggacattattggaatctacaggactccattattggatgaccatggacaagtccgttaccataatcacgaaaagcatgtacaggttaccagatgtcatcgtggaaacgcaaatgtccgttatgcatggcttccttgctccaaaagcactgtgcatgaaatgatgctgaatagttctttacaagttcataagccgcccattaagtgtgcagcctatggagagggcacattccttacaccagcaaatcgttctgatgcctgtgtgaaattctctgctgttgatgaaaatggcattgtccatatgatgttgtgccgtgttataatggggaacgtagaaatagttcaccctggatctaagcagcaccaacctagtagtgactattttgatagtggagtagatgaccttaaaaacccacaacattacattgtgtgggatatgaatctgaataggcacatctatcctgagtttgtagtcaccgtcaaattgccttctaaaacaaaagattacttcgtatcgcaagaagactgccagaattcatctgatctgtcactggtgttgaattctagttcacccgactgtatttcagagacgagttccactgttggagcagcaagagtgcagtaattcagattgtgtgatttgacacaatacttgacttgtgtttgcgttattgagattataacttggagctgattatattcgctatctatgatagaaacctccaaatatgataagtttccttgtgaaaccatgctgttttagtcatgttggagttggttaaagaaccagttaacaacttccttttatgcataaaacaggagatgaacctggaggcacctccagcattgggaggtggatgtgcagcccccatgctaggagattcgatggcaaaggctccaagctcaccttggatgcctttctctatgttgtttgcagcgatctcaaccaaagtgtctcctcaaattatggacatggttattggttgctatgaagagtttaagagtaagaaaataagccgatgcgaactaataaaggagctgaggcacgtagttggtgatagagtgctaatatcgacgataatgcgtctccaagataagttgcctcctgtggagaggcgtgagggaccgggtgcatcagctgccaagatggtggcgaaaccgtgaggcgggtgtcggtcggtcggtgggcgaggaatgcagaagggaggaagcagctgactttgacaaccctgtgggaagcagcaactatgaagcctcttgtgtcagtctttgtatggcggctgatgtttcttctttctgtgtcgtatgagtatgttttttcctagtagattgtatcaggagtttttcatttcaaattgagctgcgcatgttcttttgagcctttggaatagttcgtcaacgaaaaaggctccttttacctttctgataacagtgttgtgcattgttaattaatgtgggtcatatagaataatatatgatgtatacaatgtttttgagtttggctctcgctgccagtcgtgtgtttattctgcacccgtggtaccccactaaacgttagtcgagttcattttat

SEQ ID NO: 8195 - DNA, 2403 bp, Zea Mays
cgggccgaggcttctcgtgtcgactgtcgacgccttcttcgccctctccgtccggcttccgcctcagctgaactcatgcgctatttcccaggccgccattcccactagggttttcggattattaggtttctagaacctttcttcgccgccccccccccccccccccccagaccccatgcacgctccgccgctggtcgcgttcgcagggggcgcctgccccgcttccgctgcctcctcgctgtcgccctggttggcctcgctgcggcccgccatcgttgctgcgccggcgaggctgctatggttccgccgcggggcactccggctggaagccaaggccgcgtggagggctaccggagggggacggggcccgcgggtcccggccaagggcgctgtgctcgcctcctatatgggtgccgaggaggtggtgggacccttgtcgctgctcgacgaggaagagctcattttgcacataagaaaggaacgggataatggaaaacttcctgcagatgttgccattaacttggaggagctgtattataattacaggaatgcagtcctgcaaaatggtgatcctaatgcatatgagatcatgctttcaaatatgacagctttgtttgatcgtgttctactggatgtacagaatccatttacctttccaccgtatcacaaagctgtgcgggaaccatttgactattacatgtttggtcagaactacattaggcctctggtagatttcaggaactcctatgttggcaacatttcccttttccatgacatggaagagaagctccaccagggccacaatgttgttttgatgtccaaccatcagacagaagcagatccagcaattatcgccttgcttcttgaaaaaaccaatccatggattagtgaaaacatagtttatgttgctggcgatagggttgttaccgatccactttgcaagccatttagcatgggaagaaatctcatttgtgtgtactcgaaaaagcatatgaatgattttccagagctaattgagatgaagaggagatcaaacactcggagcctcaaggaaatggccttgcttttacgtggtggttcacagctaatttggattgcaccgagtggtggtagagatcgcccaaatccttcaacaggagagtggtacccggtatatgctcttgcctgatggtcttattcttccattttgactttgctatgcattatagcacatcttctctttcaatgtaactgcgttactaaaaggcaaatgaaacgagatggtacagacagttgtagaggttgctcacaagaattatccttttttttttgcctaagacaatgcttgagaagtccgctgcatgggtaagtatgttcccttatgtttattttatctgctatatgcaaaaacaagggcaggcgcattttgattcatccacagtggacaatatgaggaggcttctggagcatgctggtgttcctgggcacatatatccactatcattactgtgctacgaggttatgcctccaccacaacaggtcgagaaagagattggtgaacagagggtgatatccttccatggagtaggcttgtcagcaactgaagaaacaaagtatggggatattacttgtcataccaagaatgctgatgagggaagggagctattcacaaatactttgtacaactcagttgttaatcagtacaatgtcctcaaatctgctatctttagagatcgtggagcagctgtatcaaacaatgccatctcactgtcacaaccatggcgatgaatgtagctttcccagtccagattcgatactgaagttaccttttcagaagaacaggtgaactgcaattgtgcaatttttctgggaaaaactcttgaagtttaatctttctgatatcactggactttaccaatcatggtggagcttattactctaatgcagatcctcgctaagatgtctggctggtcaagggtgattggtgattctgcagatagggatcctcgtaacattgcatgccgtcgtccgcaaattactgctccctcaggttgttcagtaatgtgctggttgggcactgaggaatccatcaggttgcatccttttgtctagacgtcgatttgtgttgttgaagtggtaaacattttcatcctgggctgtatcgtcatcatgtatagataggctcgagtctctctcttttttttttggctccacaattttttggagatataaaagcggcaggagttatgacatgcccacagtcggccctccttgtagaaatcctttggatgtaacctgtctctttcttatatacatactgaaagtcaaggcagatatcccgtgtttcgagtacgtggctccgtgactacccgcgtctgcgtctcctgtctagctggagctgtagcgtaaagaatctatctgcag

SEQ ID NO: 8196 - DNA, 2155 bp, Zea Mays
cgggccgaggcttctcgtgtcgactgtcgacgccttcttcgccctctccgtccggcttccgcctcagctgaactcatgcgctatttcccaggccgccattcccactagggttttcggattattaggtttctagaacctttcttcgccgccccccccccccccccccccagaccccatgcacgctccgccgctggtcgcgttcgcagggggcgcctgccccgcttccgctgcctcctcgctgtcgccctggttggcctcgctgcggcccgccatcgttgctgcgccggcgaggctgctatggttccgccgcggggcactccggctggaagccaaggccgcgtggagggctaccggagggggacggggcccgcgggtcccggccaagggcgctgtgctcgcctcctatatgggtgccgaggaggtggtgggacccttgtcgctgctcgacgaggaagagctcattttgcacataagaaaggaacgggataatggaaaacttcctgcagatgttgccattaacttggaggagctgtattataattacaggaatgcagtcctgcaaaatggtgatcctaatgcatatgagatcatgctttcaaatatgacagctttgtttgatcgtgttctactggatgtacagaatccatttacctttccaccgtatcacaaagctgtgcgggaaccatttgactattacatgtttggtcagaactacattaggcctctggtagatttcaggaactcctatgttggcaacatttcccttttccatgacatggaagagaagctccaccagggccacaatgttgttttgatgtccaaccatcagacagaagcagatccagcaattatcgccttgcttcttgaaaaaaccaatccatggattagtgaaaacatagtttatgttgctggcgatagggttgttaccgatccactttgcaagccatttagcatgggaagaaatctcatttgtgtgtactcgaaaaagcatatgaatgattttccagagctaattgagatgaagaggagatcaaacactcggagcctcaaggaaatggccttgcttttacgtggtggttcacagctaatttggattgcaccgagtggtggtagagatcgcccaaatccttcaacaggagagtggtacccggcgcattttgattcatccacagtggacaatatgaggaggcttctggagcatgctggtgttcctgggcacatatatccactatcattactgtgctacgaggttatgcctccaccacaacaggtcgagaaagagattggtgaacagagggtgatatccttccatggagtaggcttgtcagcaactgaagaaacaaagtatggggatattacttgtcataccaagaatgctgatgagggaagggagctattcacaaatactttgtacaactcagttgttaatcagtacaatgtcctcaaatctgctatctttagagatcgtggagcagctgtatcaaacaatgccatctcactgtcacaaccatggcgatgaatgtagctttcccagtccagattcgatactgaagttaccttttcagaagaacaggtgaactgcaattgtgcaatttttctgggaaaaactcttgaagtttaatctttctgatatcactggactttaccaatcatggtggagcttattactctaatgcagatcctcgctaagatgtctggctggtcaagggtgattggtgattctgcagatagggatcctcgtaacattgcatgccgtcgtccgcaaattactgctccctcaggttgttcagtaatgtgctggttgggcactgaggaatccatcaggttgcatccttttgtctagacgtcgatttgtgttgttgaagtggtaaacattttcatcctgggctgtatcgtcatcatgtatagataggctcgagtctctctcttttttttttggctccacaattttttggagatataaaagcggcaggagttatgacatgcccacagtcggccctccttgtagaaatcctttggatgtaacctgtctctttcttatatacatactgaaagtcaaggcagatatcccgtgtttcgagtacgtggctccgtgactacccgcgtctgcgtctcctgtctagctggagctgtagcgtaaagaatctatctgcag

SEQ ID NO: 8197 - DNA, 2235 bp, Zea Mays
cgggccgaggcttctcgtgtcgactgtcgacgccttcttcgccctctccgtccggcttccgcctcagctgaactcatgcgctatttcccaggccgccattcccactagggttttcggattattaggtttctagaacctttcttcgccgccccccccccccccccccccagaccccatgcacgctccgccgctggtcgcgttcgcagggggcgcctgccccgcttccgctgcctcctcgctgtcgccctggttggcctcgctgcggcccgccatcgttgctgcgccggcgaggctgctatggttccgccgcggggcactccggctggaagccaaggccgcgtggagggctaccggagggggacggggcccgcgggtcccggccaagggcgctgtgctcgcctcctatatgggtgccgaggaggtggtgggacccttgtcgctgctcgacgaggaagagctcattttgcacataagaaaggaacgggataatggaaaacttcctgcagatgttgccattaacttggaggagctgtattataattacaggaatgcagtcctgcaaaatggtgatcctaatgcatatgagatcatgctttcaaatatgacagctttgtttgatcgtgttctactggatgtacagaatccatttacctttccaccgtatcacaaagctgtgcgggaaccatttgactattacatgtttggtcagaactacattaggcctctggtagatttcagcaggaactcctatgttggcaacatttcccttttccatgacatggaagagaagctccaccagggccacaatgttgttttgatgtccaaccatcagacagaagcagatccagcaattatcgccttgcttcttgaaaaaaccaatccatggattagtgaaaacatagtttatgttgctggcgatagggttgttaccgatccactttgcaagccatttagcatgggaagaaatctcatttgtgtgtactcgaaaaagcatatgaatgattttccagagctaattgagatgaagaggagatcaaacactcggagcctcaaggaaatggccttgcttttacgtggtggttcacagctaatttggattgcaccgagtggtggtagagatcgcccaaatccttcaacaggagagtggtacccggcaaatgaaacgagatggtacagacagttgtagaggttgctcacaagaattatccttttttttttgcctaagacaatgcttgagaagtccgctgcatggtggacaatatgaggaggcttctggagcatgctggtgttcctgggcacatatatccactatcattactgtgctacgaggttatgcctccaccacaacaggtcgagaaagagattggtgaacagagggtgatatccttccatggagtaggcttgtcagcaactgaagaaacaaagtatggggatattacttgtcataccaagaatgctgatgagggaagggagctattcacaaatactttgtacaactcagttgttaatcagtacaatgtcctcaaatctgctatctttagagatcgtggagcagctgtatcaaacaatgccatctcactgtcacaaccatggcgatgaatgtagctttcccagtccagattcgatactgaagttaccttttcagaagaacaggtgaactgcaattgtgcaatttttctgggaaaaactcttgaagtttaatctttctgatatcactggactttaccaatcatggtggagcttattactctaatgcagatcctcgctaagatgtctggctggtcaagggtgattggtgattctgcagatagggatcctcgtaacattgcatgccgtcgtccgcaaattactgctccctcaggttgttcagtaatgtgctggttgggcactgaggaatccatcaggttgcatccttttgtctagacgtcgatttgtgttgttgaagtggtaaacattttcatcctgggctgtatcgtcatcatgtatagataggctcgagtctctctcttttttttttggctccacaattttttggagatataaaagcggcaggagttatgacatgcccacagtcggccctccttgtagaaatcctttggatgtaacctgtctctttcttatatacatactgaaagtcaaggcagatatcccgtgtttcgagtacgtggctccgtgactacccgcgtctgcgtctcctgtctagctggagctgtagcgtaaagaatctatctgcag

SEQ ID NO: 8198 - DNA, 2122 bp, Zea Mays
cgggccgaggcttctcgtgtcgactgtcgacgccttcttcgccctctccgtccggcttccgcctcagctgaactcatgcgctatttcccaggccgccattcccactagggttttcggattattaggtttctagaacctttcttcgccgccccccccccccccccccccagaccccatgcacgctccgccgctggtcgcgttcgcagggggcgcctgccccgcttccgctgcctcctcgctgtcgccctggttggcctcgctgcggcccgccatcgttgctgcgccggcgaggctgctatggttccgccgcggggcactccggctggaagccaaggccgcgtggagggctaccggagggggacggggcccgcgggtcccggccaagggcgctgtgctcgcctcctatatgggtgccgaggaggtggtgggacccttgtcgctgctcgacgaggaagagctcattttgcacataagaaaggaacgggataatggaaaacttcctgcagatgttgccattaacttggaggagctgtattataattacaggaatgcagtcctgcaaaatggtgatcctaatgcatatgagatcatgctttcaaatatgacagctttgtttgatcgtgttctactggatgtacagaatccatttacctttccaccgtatcacaaagctgtgcgggaaccatttgactattacatgtttggtcagaactacattaggcctctggtagatttcaggaactcctatgttggcaacatttcccttttccatgacatggaagagaagctccaccagggccacaatgttgttttgatgtccaaccatcagacagaagcagatccagcaattatcgccttgcttcttgaaaaaaccaatccatggattagtgaaaacataggttgttaccgatccactttgcaagccatttagcatgggaagaaatctcatttgtgtgtactcgaaaaagcatatgaatgattttccagagctaattgagatgaagaggagatcaaacactcggagcctcaaggaaatggccttgcttttacgctaatttggattgcaccgagtggtggtagagatcgcccaaatccttcaacaggagagtggtacccggcgcattttgattcatccacagtggacaatatgaggaggcttctggagcatgctggtgttcctgggcacatatatccactatcattactgtgctacgaggttatgcctccaccacaacaggtcgagaaagagattggtgaacagagggtgatatccttccatggagtaggcttgtcagcaactgaagaaacaaagtatggggatattacttgtcataccaagaatgctgatgagggaagggagctattcacaaatactttgtacaactcagttgttaatcagtacaatgtcctcaaatctgctatctttagagatcgtggagcagctgtatcaaacaatgccatctcactgtcacaaccatggcgatgaatgtagctttcccagtccagattcgatactgaagttaccttttcagaagaacaggtgaactgcaattgtgcaatttttctgggaaaaactcttgaagtttaatctttctgatatcactggactttaccaatcatggtggagcttattactctaatgcagatcctcgctaagatgtctggctggtcaagggtgattggtgattctgcagatagggatcctcgtaacattgcatgccgtcgtccgcaaattactgctccctcaggttgttcagtaatgtgctggttgggcactgaggaatccatcaggttgcatccttttgtctagacgtcgatttgtgttgttgaagtggtaaacattttcatcctgggctgtatcgtcatcatgtatagataggctcgagtctctctcttttttttttggctccacaattttttggagatataaaagcggcaggagttatgacatgcccacagtcggccctccttgtagaaatcctttggatgtaacctgtctctttcttatatacatactgaaagtcaaggcagatatcccgtgtttcgagtacgtggctccgtgactacccgcgtctgcgtctcctgtctagctggagctgtagcgtaaagaatctatctgcag

SEQ ID NO: 8199 - DNA, 2595 bp, Zea Mays
cgggccgaggcttctcgtgtcgactgtcgacgccttcttcgccctctccgtccggcttccgcctcagctgaactcatgcgctatttcccaggccgccattcccactagggttttcggattattaggtttctagaacctttcttcgccgccccccccccccccccccccagaccccatgcacgctccgccgctggtcgcgttcgcagggggcgcctgccccgcttccgctgcctcctcgctgtcgccctggttggcctcgctgcggcccgccatcgttgctgcgccggcgaggctgctatggttccgccgcggggcactccggctggaagccaaggccgcgtggagggctaccggagggggacggggcccgcgggtcccggccaagggcgctgtgctcgcctcctatatgggtgccgaggaggtggtgggacccttgtcgctgctcgacgaggaagagctcattttgcacataagaaaggaacgggataatggaaaacttcctgcagatgttgccattaacttggaggagctgtattataattacaggaatgcagtcctgcaaaatggtgatcctaatgcatatgagatcatgctttcaaatatgacagctttgtttgatcgtgttctactggatgtacagaatccatttacctttccaccgtatcacaaagctgtgcgggaaccatttgactattacatgtttggtcagaactacattaggcctctggtagatttcaggaactcctatgttggcaacatttcccttttccatgacatggaagagaagctccaccagggccacaatgttgttttgatgtccaaccatcagacagaagcagatccagcaattatcgccttgcttcttgaaaaaaccaatccatggattagtgaaaacatagtttatgttgctggcgatagggttgttaccgatccactttgcaagccatttagcatgggaaggtctttctcttcacccagatctttttttgacgtgtgacaatattgtctctgttttctttgactcctatcaatgtcactcaagcatttttctcccaacagaaatctcatttgtgtgtactcgaaaaagcatatgaatgattttccagagctaattgagatgaagaggagatcaaacactcggagcctcaaggaaatggccttgcttttacggtatcttcccttacaataacatgttagtttgtaatcctttttccctatgtattgactctgtattgatgacttgtaccaaaagctggtgcctcatggcacaaatttatcaagtaaaagagtaaagaactcctgttcaaaaaagactaatggactattcacttgcacaaaaatctttaaagttttttgtgcaccattactctttgctaagttggttcttgccctcatgaggaaaaacatattctcaatctagatcatcgtgcatgcaattgcctttactgttttgtgcttgatcccacatatcttcttacgacaatacacagtggtggttcacagctaatttggattgcaccgagtggtggtagagatcgcccaaatccttcaacaggagagtggtacccggcgcattttgattcatccacagtggacaatatgaggaggcttctggagcatgctggtgttcctgggcacatatatccactatcattactgtgctacgaggttatgcctccaccacaacaggtcgagaaagagattggtgaacagagggtgatatccttccatggagtaggcttgtcagcaactgaagaaacaaagtatggggatattacttgtcataccaagaatgctgatgagggaagggagctattcacaaatactttgtacaactcagttgttaatcagtacaatgtcctcaaatctgctatctttagagatcgtggagcagctgtatcaaacaatgccatctcactgtcacaaccatggcgatgaatgtagctttcccagtccagattcgatactgaagttaccttttcagaagaacaggtgaactgcaattgtgcaatttttctgggaaaaactcttgaagtttaatctttctgatatcactggactttaccaatcatggtggagcttattactctaatgcagatcctgtaaggtctcttaagtcttggcgctaagatgtctggctggtcaagggtgattggtgattctgcagatagggatcctcgtaacattgcatgccgtcgtccgcaaattactgctccctcaggttgttcagtaatgtgctggttgggcactgaggaatccatcaggttgcatccttttgtctagacgtcgatttgtgttgttgaagtggtaaacattttcatcctgggctgtatcgtcatcatgtatagataggctcgagtctctctcttttttttttggctccacaattttttggagatataaaagcggcaggagttatgacatgcccacagtcggccctccttgtagaaatcctttggatgtaacctgtctctttcttatatacatactgaaagtcaaggcagatatcccgtgtttcgagtacgtggctccgtgactacccgcgtctgcgtctcctgtctagctggagctgtagcgtaaagaatctatctgcag

SEQ ID NO: 8200 - DNA, 2483 bp, Zea Mays
cgggccgaggcttctcgtgtcgactgtcgacgccttcttcgccctctccgtccggcttccgcctcagctgaactcatgcgctatttcccaggccgccattcccactagggttttcggattattaggtttctagaacctttcttcgccgccccccccccccccccccccagaccccatgcacgctccgccgctggtcgcgttcgcagggggcgcctgccccgcttccgctgcctcctcgctgtcgccctggttggcctcgctgcggcccgccatcgttgctgcgccggcgaggctgctatggttccgccgcggggcactccggctggaagccaaggccgcgtggagggctaccggagggggacggggcccgcgggtcccggccaagggcgctgtgctcgcctcctatatgggtgccgaggaggtggtgggacccttgtcgctgctcgacgaggaagagctcattttgcacataagaaaggaacgggataatggaaaacttcctgcagatgttgccattaacttggaggagctgtattataattacaggaatgcagtcctgcaaaatggtgatcctaatgcatatgagatcatgctttcaaatatgacagctttgtttgatcgtgttctactggatgtacagaatccatttacctttccaccgtatcacaaagctgtgcgggaaccatttgactattacatgtttggtcagaactacattaggcctctggtagatttcaggaactcctatgttggcaacatttcccttttccatgacatggaagagaagctccaccagggccacaatgttgttttgatgtccaaccatcagacagaagcagatccagcaattatcgccttgcttcttgaaaaaaccaatccatggattagtgaaaacatagtaaggccgttctttgactatacactgttaagttatcagtgaactatttgacccaatcaaaccagttaaagtttccacctgatgtaggtttatgttgctggcgatagggttgttaccgatccactttgcaagccatttagcatgggaagaaatctcatttgtgtgtactcgaaaaagcatatgaatgattttccagagctaattgagatgaagaggagatcaaacactcggagcctcaaggaaatggccttgcttttacgctaatttggattgcaccgagtggtggtagagatcgcccaaatccttcaacaggagagtggtacccggtatatgctcttgcctgatggtcttattcttccattttgactttgctatgcattatagcacatcttctctttcaatgtaactgcgttactaaaaggcaaatgaaacgagatggtacagacagttgtagaggttgctcacaagaattatccttttttttttgcctaagacaatgcttgagaagtccgctgcatgggtaagtatgttcccttatgtttattttatctgctatatgcaaaaacaagggcaggcgcattttgattcatccacagtggacaatatgaggaggcttctggagcatgctggtgttcctgggcacatatatccactatcattactgtgctacgaggttatgcctccaccacaacaggtcgagaaagagattggtgaacagagggtgatatccttccatggagtaggcttgtcagcaactgaagaaacaaagtatggggatattacttgtcataccaagaatgctgatgagggaagggagctattcacaaatactttgtacaactcagttgttaatcagtacaatgtcctcaaatctgctatctttagagatcgtggagcagctgtatcaaacaatgccatctcactgtcacaaccatggcgatgaatgtagctttcccagttatggtccagattcgatactgaagttaccttttcagaagaacaggtgaactgcaattgtgcaatttttctgggaaaaactcttgaagtttaatctttctgatatcactggactttaccaatcatggtggagcttattactctaatgcagatcctcgctaagatgtctggctggtcaagggtgattggtgattctgcagatagggatcctcgtaacattgcatgccgtcgtccgcaaattactgctccctcaggttgttcagtaatgtgctggttgggcactgaggaatccatcaggttgcatccttttgtctagacgtcgatttgtgttgttgaagtggtaaacattttcatcctgggctgtatcgtcatcatgtatagataggctcgagtctctctcttttttttttggctccacaattttttggagatataaaagcggcaggagttatgacatgcccacagtcggccctccttgtagaaatcctttggatgtaacctgtctctttcttatatacatactgaaagtcaaggcagatatcccgtgtttcgagtacgtggctccgtgactacccgcgtctgcgtctcctgtctagctggagctgtagcgtaaagaatctatctgcag

SEQ ID NO: 8201 - DNA, 2093 bp, Zea Mays
cgggccgaggcttctcgtgtcgactgtcgacgccttcttcgccctctccgtccggcttccgcctcagctgaactcatgcgctatttcccaggccgccattcccactagggttttcggattattaggtttctagaacctttcttcgccgccccccccccccccccccccagaccccatgcacgctccgccgctggtcgcgttcgcagggggcgcctgccccgcttccgctgcctcctcgctgtcgccctggttggcctcgctgcggcccgccatcgttgctgcgccggcgaggctgctatggttccgccgcggggcactccggctggaagccaaggccgcgtggagggctaccggagggggacggggcccgcgggtcccggccaagggcgctgtgctcgcctcctatatgggtgccgaggaggtggtgggacccttgtcgctgctcgacgaggaagagctcattttgcacataagaaaggaacgggataatggaaaacttcctgcagatgttgccattaacttggaggagctgtattataattacaggaatgcagtcctgcaaaatggtgatcctaatgcatatgagatcatgctttcaaatatgacagctttgtttgatcgtgttctactggatgtacagaatccatttacctttccaccgtatcacaaagctgtgcgggaaccatttgactattacatgtttggtcagaactacattaggcctctggtagatttcaggaactcctatgttggcaacatttcccttttccatgacatggaagagaagctccaccagggccacaatgttgttttgatgtccaaccatcagacagaagcagatccagcaattatcgccttgcttcttgaaaaaaccaatccatggattagtgaaaacatagtaaggccgttctttgactatacactgttaagttatcagtgaactatttgacccaatcaaaccagttaaagtttccacctgatgtaggtttatgttgctggcgatagggttgttaccgatccactttgcaagccatttagcatgggaagaaatctcatttgtgtgtactcgaaaaagcatatgaatgattttccagagctaattgagatgaagaggagatcaaacactcggagcctcaaggaaatggccttgcttttacgtggtggttcacagctaatttggattgcaccgagtggtggtagagatcgcccaaatccttcaacaggagagtggtacccggcgcattttgattcatccacagtggacaatatgaggaggcttctggagcatgctggtgttcctgggcacatatatccactatcattactgtgctacgaggttatgcctccaccacaacaggtcgagaaagagattggtgaacagagggtgatatccttccatggagtaggcttgtcagcaactgaagaaacaaagtatggggatattacttgtcataccaagaatgctgatgaggtccagattcgatactgaagttaccttttcagaagaacaggtgaactgcaattgtgcaatttttctgggaaaaactcttgaagtttaatctttctgatatcactggactttaccaatcatggtggagcttattactctaatgcagatcctcgctaagatgtctggctggtcaagggtgattggtgattctgcagatagggatcctcgtaacattgcatgccgtcgtccgcaaattactgctccctcaggttgttcagtaatgtgctggttgggcactgaggaatccatcaggttgcatccttttgtctagacgtcgatttgtgttgttgaagtggtaaacattttcatcctgggctgtatcgtcatcatgtatagataggctcgagtctctctcttttttttttggctccacaattttttggagatataaaagcggcaggagttatgacatgcccacagtcggccctccttgtagaaatcctttggatgtaacctgtctctttcttatatacatactgaaagtcaaggcagatatcccgtgtttcgagtacgtggctccgtgactacccgcgtctgcgtctcctgtctagctggagctgtagcgtaaagaatctatctgcag

SEQ ID NO: 8202 - DNA, 2177 bp, Zea Mays
cgggccgaggcttctcgtgtcgactgtcgacgccttcttcgccctctccgtccggcttccgcctcagctgaactcatgcgctatttcccaggccgccattcccactagggttttcggattattaggtttctagaacctttcttcgccgccccccccccccccccccccagaccccatgcacgctccgccgctggtcgcgttcgcagggggcgcctgccccgcttccgctgcctcctcgctgtcgccctggttggcctcgctgcggcccgccatcgttgctgcgccggcgaggctgctatggttccgccgcggggcactccggctggaagccaaggccgcgtggagggctaccggagggggacggggcccgcgggtcccggccaagggcgctgtgctcgcctcctatatgggtgccgaggaggtggtgggacccttgtcgctgctcgacgaggaagagctcattttgcacataagaaaggaacgggataatggaaaacttcctgcagatgttgccattaacttggaggagctgtattataattacaggaatgcagtcctgcaaaatggtgatcctaatgcatatgagatcatgctttcaaatatgacagctttgtttgatcgtgttctactggatgtacagaatccatttacctttccaccgtatcacaaagctgtgcgggaaccatttgactattacatgtttggtcagaactacattaggcctctggtagatttcaggaactcctatgttggcaacatttcccttttccatgacatggaagagaagctccaccagggccacaatgttgttttgatgtccaaccatcagacagaagcagatccagcaattatcgccttgcttcttgaaaaaaccaatccatggattagtgaaaacatattaaagtttccacctgatgtaggtttatgttgctggcgatagggttgttaccgatccactttgcaagccatttagcatgggaagaaatctcatttgtgtgtactcgaaaaagcatatgaatgattttccagagctaattgagatgaagaggagatcaaacactcggagcctcaaggaaatggccttgcttttacgtggtggttcacagctaatttggattgcaccgagtggtggtagagatcgcccaaatccttcaacaggagagtggtacccggcgcattttgattcatccacagtggacaatatgaggaggcttctggagcatgctggtgttcctgggcacatatatccactatcattactgtgctacgaggttatgcctccaccacaacaggtcgagaaagagattggtgaacagagggtgatatccttccatggagtaggcttgtcagcaactgaagaaacaaagtatggggatattacttgtcataccaagaatgctgatgagggaagggagctattcacaaatactttgtacaactcagttgttaatcagtacaatgtcctcaaatctgctatctttagagatcgtggagcagctgtatcaaacaatgccatctcactgtcacaaccatggcgatgaatgtagctttcccagtccagattcgatactgaagttaccttttcagaagaacaggtgaactgcaattgtgcaatttttctgggaaaaactcttgaagtttaatctttctgatatcactggactttaccaatcatggtggagcttattactctaatgcagatcctcgctaagatgtctggctggtcaagggtgattggtgattctgcagatagggatcctcgtaacattgcatgccgtcgtccgcaaattactgctccctcaggttgttcagtaatgtgctggttgggcactgaggaatccatcaggttgcatccttttgtctagacgtcgatttgtgttgttgaagtggtaaacattttcatcctgggctgtatcgtcatcatgtatagataggctcgagtctctctcttttttttttggctccacaattttttggagatataaaagcggcaggagttatgacatgcccacagtcggccctccttgtagaaatcctttggatgtaacctgtctctttcttatatacatactgaaagtcaaggcagatatcccgtgtttcgagtacgtggctccgtgactacccgcgtctgcgtctcctgtctagctggagctgtagcgtaaagaatctatctgcag

SEQ ID NO: 8203 - DNA, 2160 bp, Zea Mays
cgggccgaggcttctcgtgtcgactgtcgacgccttcttcgccctctccgtccggcttccgcctcagctgaactcatgcgctatttcccaggccgccattcccactagggttttcggattattaggtttctagaacctttcttcgccgccccccccccccccccccccagaccccatgcacgctccgccgctggtcgcgttcgcagggggcgcctgccccgcttccgctgcctcctcgctgtcgccctggttggcctcgctgcggcccgccatcgttgctgcgccggcgaggctgctatggttccgccgcggggcactccggctggaagccaaggccgcgtggagggctaccggagggggacggggcccgcgggtcccggccaagggcgctgtgctcgcctcctatatgggtgccgaggaggtggtgggacccttgtcgctgctcgacgaggaagagctcattttgcacataagaaaggaacgggataatggaaaacttcctgcagatgttgccattaacttggaggagctgtattataattacaggaatgcagtcctgcaaaatggtgatcctaatgcatatgagatcatgctttcaaatatgacagctttgtttgatcgtgttctactggatgtacagaatccatttacctttccaccgtatcacaaagctgtgcgggaaccatttgactattacatgtttggtcagaactacattaggcctctggtagatttcaggaactcctatgttggcaacatttcccttttccatgacatggaagagaagctccaccagggccacaatgttgttttgatgtccaaccatcagacagaagcagatccagcaattatcgccttgcttcttgaaaaaaccaatccatggattagtgaaaacatagtttatgttgctggcgatagggttgttaccgatccactttgcaagccatttagcatgggaagaaatctcatttgtgtgtactcgaaaaagcatatgaatgattttccagagctaattgagatgaagaggagatcaaacactcggagcctcaaggaaatggccttgcttttacgtggtggttcacagctaatttggattgcaccgagtggtggtagagatcgcccaaatccttcaacaggagagtggtacccgggcaggcgcattttgattcatccacagtggacaatatgaggaggcttctggagcatgctggtgttcctgggcacatatatccactatcattactgtgctacgaggttatgcctccaccacaacaggtcgagaaagagattggtgaacagagggtgatatccttccatggagtaggcttgtcagcaactgaagaaacaaagtatggggatattacttgtcataccaagaatgctgatgagggaagggagctattcacaaatactttgtacaactcagttgttaatcagtacaatgtcctcaaatctgctatctttagagatcgtggagcagctgtatcaaacaatgccatctcactgtcacaaccatggcgatgaatgtagctttcccagtccagattcgatactgaagttaccttttcagaagaacaggtgaactgcaattgtgcaatttttctgggaaaaactcttgaagtttaatctttctgatatcactggactttaccaatcatggtggagcttattactctaatgcagatcctcgctaagatgtctggctggtcaagggtgattggtgattctgcagatagggatcctcgtaacattgcatgccgtcgtccgcaaattactgctccctcaggttgttcagtaatgtgctggttgggcactgaggaatccatcaggttgcatccttttgtctagacgtcgatttgtgttgttgaagtggtaaacattttcatcctgggctgtatcgtcatcatgtatagataggctcgagtctctctcttttttttttggctccacaattttttggagatataaaagcggcaggagttatgacatgcccacagtcggccctccttgtagaaatcctttggatgtaacctgtctctttcttatatacatactgaaagtcaaggcagatatcccgtgtttcgagtacgtggctccgtgactacccgcgtctgcgtctcctgtctagctggagctgtagcgtaaagaatctatctgcag

SEQ ID NO: 8204 - DNA, 2647 bp, Zea Mays
cgggccgaggcttctcgtgtcgactgtcgacgccttcttcgccctctccgtccggcttccgcctcagctgaactcatgcgctatttcccaggccgccattcccactagggttttcggattattaggtttctagaacctttcttcgccgccccccccccccccccccccagaccccatgcacgctccgccgctggtcgcgttcgcagggggcgcctgccccgcttccgctgcctcctcgctgtcgccctggttggcctcgctgcggcccgccatcgttgctgcgccggcgaggctgctatggttccgccgcggggcactccggctggaagccaaggccgcgtggagggctaccggagggggacggggcccgcgggtcccggccaagggcgctgtgctcgcctcctatatgggtgccgaggaggtggtgggacccttgtcgctgctcgacgaggaagagctcattttgcacataagaaaggaacgggataatggaaaacttcctgcagatgttgccattaacttggaggagctgtattataattacaggaatgcagtcctgcaaaatggtgatcctaatgcatatgagatcatgctttcaaatatgacagctttgtttgatcgtgttctactggatgtacagaatccatttacctttccaccgtatcacaaagctgtgcgggaaccatttgactattacatgtttggtcagaactacattaggcctctggtagatttcaggaactcctatgttggcaacatttcccttttccatgacatggaagagaagctccaccagggccacaatgttgttttgatgtccaaccatcagacagaagcagatccagcaattatcgccttgcttcttgaaaaaaccaatccatggattagtgaaaacatagtttatgttgctggcgatagggttgttaccgatccactttgcaagccatttagcatgggaagaaatctcatttgtgtgtactcgaaaaagcatatgaatgattttccagagctaattgagatgaagaggagatcaaacactcggagcctcaaggaaatggccttgcttttacggtatcttcccttacaataacatgttagtttgtaatcctttttccctatgtattgactctgtattgatgacttgtaccaaaagctggtgcctcatggcacaaatttatcaagtaaaagagtaaagaactcctgttcaaaaaagactaatggactattcacttgcacaaaaatctttaaagttttttgtgcaccattactctttgctaagttggttcttgccctcatgaggaaaaacatattctcaatctagatcatcgtgcatgcaattgcctttactgttttgtgcttgatcccacatatcttcttacgacaatacacagtggtggttcacagctaatttggattgcaccgagtggtggtagagatcgcccaaatccttcaacaggagagtggtacccggtatatgctcttgcctgatggtcttattcttccattttgactttgctatgcattatagcacatcttctctttcaatgtaactgcgttactaaaaggcaaatgaaacgagatggtacagacagttgtagaggttgctcacaagaattatccttttttttttgcctaagacaatgcttgagaagtccgctgcatggtggacaatatgaggaggcttctggagcatgctggtgttcctgggcacatatatccactatcattactgtgctacgaggttatgcctccaccacaacaggtcgagaaagagattggtgaacagagggtgatatccttccatggagtaggcttgtcagcaactgaagaaacaaagtatggggatattacttgtcataccaagaatgctgatgagggaagggagctattcacaaatactttgtacaactcagttgttaatcagtacaatgtcctcaaatctgctatctttagagatcgtggagcagctgtatcaaacaatgccatctcactgtcacaaccatggcgatgaatgtagctttcccagtccagattcgatactgaagttaccttttcagaagaacaggtgaactgcaattgtgcaatttttctgggaaaaactcttgaagtttaatctttctgatatcactggactttaccaatcatggtggagcttattactctaatgcagatcctcgctaagatgtctggctggtcaagggtgattggtgattctgcagatagggatcctcgtaacattgcatgccgtcgtccgcaaattactgctccctcaggttgttcagtaatgtgctggttgggcactgaggaatccatcaggttgcatccttttgtctagacgtcgatttgtgttgttgaagtggtaaacattttcatcctgggctgtatcgtcatcatgtatagataggctcgagtctctctcttttttttttggctccacaattttttggagatataaaagcggcaggagttatgacatgcccacagtcggccctccttgtagaaatcctttggatgtaacctgtctctttcttatatacatactgaaagtcaaggcagatatcccgtgtttcgagtacgtggctccgtgactacccgcgtctgcgtctcctgtctagctggagctgtagcgtaaagaatctatctgcag

SEQ ID NO: 8205 - DNA, 2480 bp, Zea Mays
cgggccgaggcttctcgtgtcgactgtcgacgccttcttcgccctctccgtccggcttccgcctcagctgaactcatgcgctatttcccaggccgccattcccactagggttttcggattattaggtttctagaacctttcttcgccgccccccccccccccccccccagaccccatgcacgctccgccgctggtcgcgttcgcagggggcgcctgccccgcttccgctgcctcctcgctgtcgccctggttggcctcgctgcggcccgccatcgttgctgcgccggcgaggctgctatggttccgccgcggggcactccggctggaagccaaggccgcgtggagggctaccggagggggacggggcccgcgggtcccggccaagggcgctgtgctcgcctcctatatgggtgccgaggaggtggtgggacccttgtcgctgctcgacgaggaagagctcattttgcacataagaaaggaacgggataatggaaaacttcctgcagatgttgccattaacttggaggagctgtattataattacaggaatgcagtcctgcaaaatggtgatcctaatgcatatgagatcatgctttcaaatatgacagctttgtttgatcgtgttctactggatgtacagaatccatttacctttccaccgtatcacaaagctgtgcgggaaccatttgactattacatgtttggtcagaactacattaggcctctggtagatttcaggaactcctatgttggcaacatttcccttttccatgacatggaagagaagctccaccagggccacaatgttgttttgatgtccaaccatcagacagaagcagatccagcaattatcgccttgcttcttgaaaaaaccaatccatggattagtgaaaacatagtttatgttgctggcgatagggttgttaccgatccactttgcaagccatttagcatgggaagaaatctcatttgtgtgtactcgaaaaagcatatgaatgattttccagagctaattgagatgaagaggagatcaaacactcggagcctcaaggaaatggccttgcttttacggtatcttcccttacaataacatgttagtttgtaatcctttttccctatgtattgactctgtattgatgacttgtaccaaaagctggtgcctcatggcacaaatttatcaagtaaaagagtaaagaactcctgttcaaaaaagactaatggactattcacttgcacaaaaatctttaaagttttttgtgcaccattactctttgctaagttggttcttgccctcatgaggaaaaacatattctcaatctagatcatcgtgcatgcaattgcctttactgttttgtgcttgatcccacatatcttcttacgacaatacacagtggtggttcacagctaatttggattgcaccgagtggtggtagagatcgcccaaatccttcaacaggagagtggtacccgggcaggcgcattttgattcatccacagtggacaatatgaggaggcttctggagcatgctggtgttcctgggcacatatatccactatcattactgtgctacgaggttatgcctccaccacaacaggtcgagaaagagattggtgaacagagggtgatatccttccatggagtaggcttgtcagcaactgaagaaacaaagtatggggatattacttgtcataccaagaatgctgatgagggaagggagctattcacaaatactttgtacaactcagttgttaatcagtacaatgtcctcaaatctgctatctttagagatcgtggagcagctgtatcaaacaatgccatctcactgtcacaaccatggcgatgaatgtagctttcccagtccagattcgatactgaagttaccttttcagaagaacaggtgaactgcaattgtgcaatttttctgggaaaaactcttgaagtttaatctttctgatatcactggactttaccaatcatggtggagcttattactctaatgcagatcctcgctaagatgtctggctggtcaagggtgattggtgattctgcagatagggatcctcgtaacattgcatgccgtcgtccgcaaattactgctccctcaggttgttcagtaatgtgctggttgggcactgaggaatccatcaggttgcatccttttgtctagacgtcgatttgtgttgttgaagtggtaaacattttcatcctgggctgtatcgtcatcatgtatagataggctcgagtctctctcttttttttttggctccacaattttttggagatataaaagcggcaggagttatgacatgcccacagtcggccctccttgtagaaatcctttggatgtaacctgtctctttcttatatacatactgaaagtcaaggcagatatcccgtgtttcgagtacgtggctccgtgactacccgcgtctgcgtctcctgtctagctggagctgtagcgtaaagaatctatctgcag

SEQ ID NO: 8206 - DNA, 1571 bp, Zea Mays
cgggccgaggcttctcgtgtcgactgtcgacgccttcttcgccctctccgtccggcttccgcctcagctgaactcatgcgctatttcccaggccgccattcccactagggttttcggattattaggtttctagaacctttcttcgccgccccccccccccccccccccagaccccatgcacgctccgccgctggtcgcgttcgcagggggcgcctgccccgcttccgctgcctcctcgctgtcgccctggttggcctcgctgcggcccgccatcgttgctgcgccggcgaggctgctatggttccgccgcggggcactccggctggaagccaaggccgcgtggagggctaccggagggggacggggcccgcgggtcccggccaagggcgctgtgctcgcctcctatatgggtgccgaggaggtggtgggacccttgtcgctgctcgacgaggaagagctcattttgcacataagaaaggaacgggataatggaaaacttcctgcagatgttgccattaacttggaggagctgtattataattacaggaatgcagtcctgcaaaatggtgatcctaatgcatatgagatcatgctttcaaatatgacagctttgtttgatcgtgttctactggatgtacagaatccatttacctttccaccgtatcacaaagctgtgcgggaaccatttgactattacatgtttggtcagaactacattaggcctctggtagatttcaggaactcctatgttggcaacatttcccttttccatgacatggaagagaagctccaccagggccacaatgttgttttgatgtccaaccatcagacagaagcagatccagcaattatcgccttgcttcttgaaaaaaccaatccatggattagtgaaaacatagtttatgttgctggcgatagggttgttaccgatccactttgcaagccatttagcatgggaaggtctttctcttcacccagatctttttttgacgtgtgacaatattgtctctgttttctttgactcctatcaatgtcactcaagcatttttctcccaacagaaatctcatttgtgtgtactcgaaaaagcatatgaatgattttccagagctaattgagatgaagaggagatcaaacactcggagcctcaaggaaatggccttgcttttacgtggtggttcacagctaatttggattgcaccgagtggtggtagagatcgcccaaatccttcaacaggagagtggtacccggcgcattttgattcatccacagtggacaatatgaggaggcttctggagcatgctggtgttcctgggcacatatatccactatcattactgtgctacgaggttatgcctccaccacaacaggtcgagaaagagattggtgaacagagggtgatatccttccatggagtaggcttgtcagcaactgaagaaacaaagtatggggatattacttgtcataccaagaatgctgatgagttgacaggttagaaaccgtgtttcgacagctgacaggttaaagaagcgaggcctccttcatccggaacatttttttgtgaccaagaag

SEQ ID NO: 8207 - DNA, 1459 bp, Zea Mays
cgggccgaggcttctcgtgtcgactgtcgacgccttcttcgccctctccgtccggcttccgcctcagctgaactcatgcgctatttcccaggccgccattcccactagggttttcggattattaggtttctagaacctttcttcgccgccccccccccccccccccccagaccccatgcacgctccgccgctggtcgcgttcgcagggggcgcctgccccgcttccgctgcctcctcgctgtcgccctggttggcctcgctgcggcccgccatcgttgctgcgccggcgaggctgctatggttccgccgcggggcactccggctggaagccaaggccgcgtggagggctaccggagggggacggggcccgcgggtcccggccaagggcgctgtgctcgcctcctatatgggtgccgaggaggtggtgggacccttgtcgctgctcgacgaggaagagctcattttgcacataagaaaggaacgggataatggaaaacttcctgcagatgttgccattaacttggaggagctgtattataattacaggaatgcagtcctgcaaaatggtgatcctaatgcatatgagatcatgctttcaaatatgacagctttgtttgatcgtgttctactggatgtacagaatccatttacctttccaccgtatcacaaagctgtgcgggaaccatttgactattacatgtttggtcagaactacattaggcctctggtagatttcaggaactcctatgttggcaacatttcccttttccatgacatggaagagaagctccaccagggccacaatgttgttttgatgtccaaccatcagacagaagcagatccagcaattatcgccttgcttcttgaaaaaaccaatccatggattagtgaaaacatagtttatgttgctggcgatagggttgttaccgatccactttgcaagccatttagcatgggaagaaatctcatttgtgtgtactcgaaaaagcatatgaatgattttccagagctaattgagatgaagaggagatcaaacactcggagcctcaaggaaatggccttgcttttacgctaatttggattgcaccgagtggtggtagagatcgcccaaatccttcaacaggagagtggtacccggcgcattttgattcatccacagtggacaatatgaggaggcttctggagcatgctggtgttcctgggcacatatatccactatcattactgtgctacgaggttatgcctccaccacaacaggtcgagaaagagattggtgaacagagggtgatatccttccatggagtaggcttgtcagcaactgaagaaacaaagtatggggatattacttgtcataccaagaatgctgatgagttgacaggttagaaaccgtgtttcgacagctgacaggttaaagaagcgaggcctccttcatccggaacatttttttgtgaccaagaag

SEQ ID NO: 8208 - DNA, 2620 bp, Zea Mays
cggcgattgagcgccgcaccgttgcttgtgttccctacttccctcccgcgcgtcgtctgggcttgcaatgcttgcgacgacgcctcggtacccgctcacttgcttccatgctccacggcacgcgcaggaggacggcgccgctcgcagccgctttcttcgcttccaagccccagcctcagcctccgccgcagctgccaacgccgcagatagtcgaagccgccgtcgctcgctgcccctcagacggcatcgcgctctccttcttcctgtggtgtgcccgccgccccggctatttccacccgccttcctccttcgaccgcctcctccccgccgcctcccgcctcgcctctcgcctcggcactgccaacaagcttatccgcgagctccaggccctcggcgtccacgtcaagccccagactttcctgctcctgctcaggctctactggcgcggggggctctaccctatcgtactcgatctgttctatcaaatgcgcctttggggattccaacccaatgccttcgcctgcaatgtcgtcctcgacgtccagctcaggacaggccatctcgacgcagcgcgacacacgttgcagtactacccggcacccaattacctcacctacgccattgtgctcacccatctctgcagggctgggggctggtcaggagcccggagttgttttattgaaatgctacagctggggtttgtcccaagtgcagcttctctcactgcggtttttgcctgctgcagtaaggctggaactatgtctgagcttctgcagctgttttctttcgcgcttgtttcgggttgcaatctcacctcagccatgtggacatgtttgatcgctcgtctgtgccgtgaggggcgactagaggaggcttgtaatatgcttgcaaagatggcggattctggttcttctccttcagtggtcacctacactccacttgtcaggggattgttgcgagctggtaggcatgaaaaggccagcgagcttttggggtcaatgatgtccgctagttgcagaccagacattgttttgtataatgttctgatggacagcatgctaaaggagagaagatacaatgaggcactaaatatttacatgcatattcttggcagtcagataaagccagatgcatacactttatctactttagctcaggtattgcagttttcacagaatatgggccttcttcacagcttgattttaagctccgatatctctcttgatcttgtggcctgcaattctgtgttgagtagtctgtgcaaatcaggttttccatctgaagccatccaattctacattgatagaattgacacgtgcaccagcccagacagctacactcatgctgggttactggatagtttgtgccagttaggaagggtaaaccatgcaattgatgtctaccacaatatcattgccagtgctcctgaattgaatgcatatgttcatgcagcaatcctccgtggtcttgttagacagggccagagccttgcggccttaaggattttaagagaggctgtacggaaaaattatgctgttgattctgtgtgctacactgtggttttacatggtcttttccgtgtgcatctggtggaagaggctttcaggttgttcgaccagatgaaaaattcaggattagcacccaacacttgtacatacaatgtgatgctttgtgggctttgtaggaccagggatctccatgctgtcaagcagttgttaacagaaatggaatgtgcggatgcaaaaatggacagtatatcattcaacacagtagcagtgctcctaattaagtcaaagcgcatcgactctgctgttgcattgatcagagacatgctaaatctaggcatgaagcctagtaccaaaactcgtttgttactttctcagtccactgtctataaatctgttttggtggataatgccactcccactgtagaaagcgatgggtcagactcgtccagtgatctccttgtatgctcagcttcataggccatattatgtcaactgaacaaacatattatctctccaactacagttggtcatgcacagctgcataaacttaacatatgcagttctaatggatcatgggtcctcaatgactttctgcattcagtaggtgctacactgccctaaaagaaggccagatctagtgctgaaggctctcacatacagtctgtgaaagagataaaccgaggcaagtcttctcctcgcaaatacggagatgttgttttgaacccgtgacctggtgactcattgagacagtcctcaccactgcaccaggttggtgtacatactgcagtgaaacagattcatctggagaatattaccttatgcaggaaaaaagtggtatggttcaatgtttttaaattgtctagttgacccaagtaggcttatgggcgattagatcacctaggatgagtagtcgacgactagggcgactattcaaccctagtcggcagttggtcgtcttacctactgcagggccgatattataattatacagtgtataattgtatattgtataacattataacagtataatagcatataatttagaatgatagtcaattgctagtgcttcgttgtgaattttgaattttcgatgggtaataaaggtgttattg

SEQ ID NO: 8209 - DNA, 3044 bp, Zea Mays
caaccggcggcgattgagcgccgcaccgttgcttgtgttccctacttccctcccgcgcgtcgtctgggcttgcaatgcttgcgacgacgcctcggtacccgctcacttgcttccatgctccacggcacgcgcaggaggacggcgccgctcgcagccgctttcttcgcttccaagccccagcctcagcctccgccgcagctgccaacgccgcagatagtcgaagccgccgtcgctcgctgcccctcagacggcatcgcgctctccttcttcctgtggtgtgcccgccgccccggctatttccacccgccttcctccttcgaccgcctcctccccgccgcctcccgcctcgcctctcgcctcggcactgccaacaagcttatccgcgagctccaggccctcggcgtccacgtcaagccccagactttcctgctcctgctcaggctctactggcgcggggggctctaccctatcgtactcgatctgttctatcaaatgcgcctttggggattccaacccaatgccttcgcctgcaatgtcgtcctcgacgtccagctcaggacaggccatctcgacgcagcgcgacacacgttgcagtactacccggcacccaattacctcacctacgccattgtgctcacccatctctgcagggctgggggctggtcaggagcccggagttgttttattgaaatgctacagctggggtttgtcccaagtgcagcttctctcactgcggtttttgcctgctgcagtaaggctggaactatgtctgagcttctgcagctgttttctttcgcgcttgtttcgggttgcaatctcacctcagccatgtggacatgtttgatcgctcgtctgtgccgtgaggggcgactagaggaggcttgtaatatgcttgcaaagatggcggattctggttcttctccttcagtggtcacctacactccacttgtcaggggattgttgcgagctggtaggcatgaaaaggccagcgagcttttggggtcaatgatgtccgctagttgcagaccagacattgttttgtataatgttctgatggacagcatgctaaaggagagaagatacaatgaggcactaaatatttacatgcatattcttggcagtcagataaagccagatgcatacactttatctactttagctcaggtattgcagttttcacagaatatgggccttcttcacagcttgattttaagctccgatatctctcttgatcttgtggcctgcaattctgtgttgagtagtctgtgcaaatcaggttttccatctgaagccatccaattctacattgatagaattgacacgtgcaccagcccagacagctacactcatgctgggttactggatagtttgtgccagttaggaagggtaaaccatgcaattgatgtctaccacaatatcattgccagtgctcctgaattgaatgcatatgttcatgcagcaatcctccgtggtcttgttagacagggccagagccttgcggccttaaggattttaagagaggctgtacggaaaaattatgctgttgattctgtgtgctacactgtggttttacatggtcttttccgtgtgcatctggtggaagaggctttcaggttgttcgaccagatgaaaaattcaggattagcacccaacacttgtacatacaatgtgatgctttgtgggctttgtaggaccagggatctccatgctgtcaagcagttgttaacagaaatggaatgtgcggatgcaaaaatggacagtatatcattcaacacagtagcagtgctcctaattaagtcaaagcgcatcgactctgctgttgcattgatcagagacatgctaaatctaggcatgaagcctagtaccaaaactcgtttgttactttctcagtccactgtctataaatctgttttggtggataatgccactcccactgtagaaagcgatgggtcagactcgtccagtgatctccttgtatgctcagcttcataggccatattatgtcaactgaacaaacatattatctctccaactacagttggtcatgcacagctgcataaacttaacatatgcagttctaatggatcatgggtcctcaatgactttctgcattcagtaggtgctacactgccctaaaagaagtataaaaaggccagatctagtgctgaaggctctcacatacagtctgtgaaagagataaaccgaggcaagtcttctcctcgcaaatacggagatgttgttttgaacccgtgacctggtgactcattgagacagtcctcaccactgcaccaggtacgccgttcactactattgtttcagggcgtcaggagaaaatgactcagtaaacctgtctaaactgtagttatgctcttcatactttgcattattattgtatagaaggaatatattaattaattacttgggaagggaagtcaaataccagctcagttttgtcagccggtcttgtctaggtggtgtatattaaactgcagttcttgagttggttgattctaccaatgaggttttagaactcagtttagttcatgttaattcttgctgaaatacctactctgtaataacgaactgagcctgtgttcttttatctttgctagagtatttcgtctctggtttatgggttcatgattcaaatggtaatttggatgtagctgttgctgattctttggtttcactctgatttaggttggtgtacatactgcagtgaaacagattcatctggagaatattaccttatgcaggaaaaaagtggtatggttcaatgtttttaaattgtctagttgacccaagtaggcttatgggcgattagatcacctaggatgagtagtcgacgactagggcgactattcaaccctagtcggcagttggtcgtcttacctactgcagggccgatattataattatacagtgtataattgtatattgtataacattataacagtataatagcatataatttagaatgatagtcaattgctagtgcttcgttgtgaattttgaattttcgatgggtaataaaggtgttattg

SEQ ID NO: 8210 - DNA, 3874 bp, Zea Mays
caaccggcggcgattgagcgccgcaccgttgcttgtgttccctacttccctcccgcgcgtcgtctgggcttgcaatgcttgcgacgacgcctcggtacccgctcacttgcttccatgctccacggcacgcgcaggaggacggcgccgctcgcagccgctttcttcgcttccaagccccagcctcagcctccgccgcagctgccaacgccgcagatagtcgaagccgccgtcgctcgctgcccctcagacggcatcgcgctctccttcttcctgtggtgtgcccgccgccccggctatttccacccgccttcctccttcgaccgcctcctccccgccgcctcccgcctcgcctctcgcctcggcactgccaacaagcttatccgcgagctccaggccctcggcgtccacgtcaagccccagactttcctgctcctgctcaggctctactggcgcggggggctctaccctatcgtactcgatctgttctatcaaatgcgcctttggggattccaacccaatgccttcgcctgcaatgtcgtcctcgacgtccagctcaggacaggccatctcgacgcagcgcgacacacgttgcagtactacccggcacccaattacctcacctacgccattgtgctcacccatctctgcagggctgggggctggtcaggagcccggagttgttttattgaaatgctacagctggggtttgtcccaagtgcagcttctctcactgcggtttttgcctgctgcagtaaggctggaactatgtctgagcttctgcagctgttttctttcgcgcttgtttcgggttgcaatctcacctcagccatgtggacatgtttgatcgctcgtctgtgccgtgaggggcgactagaggaggcttgtaatatgcttgcaaagatggcggattctggttcttctccttcagtggtcacctacactccacttgtcaggggattgttgcgagctggtaggcatgaaaaggccagcgagcttttggggtcaatgatgtccgctagttgcagaccagacattgttttgtataatgttctgatggacagcatgctaaaggagagaagatacaatgaggcactaaatatttacatgcatattcttggcagtcagataaagccagatgcatacactttatctactttagctcaggtattgcagttttcacagaatatgggccttcttcacagcttgattttaagctccgatatctctcttgatcttgtggcctgcaattctgtgttgagtagtctgtgcaaatcaggttttccatctgaagccatccaattctacattgatagaattgacacgtgcaccagcccagacagctacactcatgctgggttactggatagtttgtgccagttaggaagggtaaaccatgcaattgatgtctaccacaatatcattgccagtgctcctgaattgaatgcatatgttcatgcagcaatcctccgtggtcttgttagacagggccagagccttgcggccttaaggattttaagagaggctgtacggaaaaattatgctgttgattctgtgtgctacactgtggttttacatggtcttttccgtgtgcatctggtggaagaggctttcaggttgttcgaccagatgaaaaattcaggattagcacccaacacttgtacatacaatgtgatgctttgtgggctttgtaggaccagggatctccatgctgtcaagcagttgttaacagaaatggaatgtgcggatgcaaaaatggacagtatatcattcaacacagtagcagtgctcctaattaagtcaaagcgcatcgactctgctgttgcattgatcagagacatgctaaatctaggcatgaagcctagtaccaaaactcgtttgttactttctcagtccactgtctataaatctgttttggtggataatgccactcccactgtagaaagcgatgggtcagactcgtccagtgatctccttgtatgctcagcttcataggccatattatgtcaactgaacaaacatattatctctccaactacagttggtcatgcacagctgcataaacttaacatatgcagttctaatggatcatgggtcctcaatgactttctgcattcagtaggtgctacactgccctaaaagaagtataaaaaggccagatctagtgctgaaggctctcacatacagtctgtgaaagagataaaccgaggcaagtcttctcctcgcaaatacggagatgttgttttgaacccgtgacctggtgactcattgagacagtcctcaccactgcaccaggtctgcccttctctaatcttagtatcaagtatttaatttaatgtgtttatacagaatctgcttaacttcaagcagcatatgcagaacgaaaccttaggcatgatggtgtggcacatggtaaatattcaacaatgacaaagaaaatactttacaccacacaagaaatagctctagccttgcatctatagaatcattaggtggattcatgttattgtcataaatatagctgttcttggaaactaaaattaggaaggaaaacatatacactaagggctagtttgtaaacaaggggagccagacccagagaaggaaaacctcacataaataactaaatgtcttattcaatttacaccctctaagattgctcaccgtgggaaaaggggtttgagtttccaaactagtcctaagttgattatgctatccactttgttctgtatgctgtctccgtcctgaaatacaaggtattgaaggttcaaaatttgtcccaaattataaactttccgggttgctcaaccacatccatgcatgcctttttaagcaccatctggcgcaaaatgactcctgtgattggtatgacatgcttgtatggatctttacactatttgttactagaaaattaaccaagttgacaaccaaattaactaattaatgattttattcttttgtcagacttcttatttggtcctaaaatttcttaggtaccttgtatttcaggatagagtgagtacttgacaagcccatggagtgtacatacaactaaatcctgattttgctttgtattaattacttgattgtttgactgtttctcaatttaattttgatcattcaaggtacgccgttcactactattgtttcagggcgtcaggagaaaatgactcagtaaacctgtctaaactgtagttatgctcttcatactttgcattattattgtatagaaggaatatattaattaattacttgggaagggaagtcaaataccagctcagttttgtcagccggtcttgtctaggtggtgtatattaaactgcagttcttgagttggttgattctaccaatgaggttttagaactcagtttagttcatgttaattcttgctgaaatacctactctgtaataacgaactgagcctgtgttcttttatctttgctagagtatttcgtctctggtttatgggttcatgattcaaatggtaatttggatgtagctgttgctgattctttggtttcactctgatttaggttggtgtacatactgcagtgaaacagattcatctggagaatattaccttatgcaggaaaaaagtggtatggttcaatgtttttaaattgtctagttgacccaagtaggcttatgggcgattagatcacctaggatgagtagtcgacgactagggcgactattcaaccctagtcggcagttggtcgtcttacctactgcagggccgatattataattatacagtgtataattgtatattgtataacattataacagtataatagcatataatttagaatgatagtcaattgctagtgcttcgttgtgaattttgaattttcgatgggtaataaaggtgttattg

SEQ ID NO: 8211 - DNA, 2705 bp, Zea Mays
gcacgttcatgggctacctgcaggctgcagctgaagcagcgtgcccacacgccgccgccgtgcggcagccaaccggcggcgattgagcgccgcaccgttgcttgtgttccctacttccctcccgcgcgtcgtctgggcttgcaatgcttgcgacgacgcctcggtacccgctcacttgcttccatgctccacggcacgcgcaggaggacggcgccgctcgcagccgctttcttcgcttccaagccccagcctcagcctccgccgcagctgccaacgccgcagatagtcgaagccgccgtcgctcgctgcccctcagacggcatcgcgctctccttcttcctgtggtgtgcccgccgccccggctatttccacccgccttcctccttcgaccgcctcctccccgccgcctcccgcctcgcctctcgcctcggcactgccaacaagcttatccgcgagctccaggccctcggcgtccacgtcaagccccagactttcctgctcctgctcaggctctactggcgcggggggctctaccctatcgtactcgatctgttctatcaaatgcgcctttggggattccaacccaatgccttcgcctgcaatgtcgtcctcgacgtccagctcaggacaggccatctcgacgcagcgcgacacacgttgcagtactacccggcacccaattacctcacctacgccattgtgctcacccatctctgcagggctgggggctggtcaggagcccggagttgttttattgaaatgctacagctggggtttgtcccaagtgcagcttctctcactgcggtttttgcctgctgcagtaaggctggaactatgtctgagcttctgcagctgttttctttcgcgcttgtttcgggttgcaatctcacctcagccatgtggacatgtttgatcgctcgtctgtgccgtgaggggcgactagaggaggcttgtaatatgcttgcaaagatggcggattctggttcttctccttcagtggtcacctacactccacttgtcaggggattgttgcgagctggtaggcatgaaaaggccagcgagcttttggggtcaatgatgtccgctagttgcagaccagacattgttttgtataatgttctgatggacagcatgctaaaggagagaagatacaatgaggcactaaatatttacatgcatattcttggcagtcagataaagccagatgcatacactttatctactttagctcaggtattgcagttttcacagaatatgggccttcttcacagcttgattttaagctccgatatctctcttgatcttgtggcctgcaattctgtgttgagtagtctgtgcaaatcaggttttccatctgaagccatccaattctacattgatagaattgacacgtgcaccagcccagacagctacactcatgctgggttactggatagtttgtgccagttaggaagggtaaaccatgcaattgatgtctaccacaatatcattgccagtgctcctgaattgaatgcatatgttcatgcagcaatcctccgtggtcttgttagacagggccagagccttgcggccttaaggattttaagagaggctgtacggaaaaattatgctgttgattctgtgtgctacactgtggttttacatggtcttttccgtgtgcatctggtggaagaggctttcaggttgttcgaccagatgaaaaattcaggattagcacccaacacttgtacatacaatgtgatgctttgtgggctttgtaggaccagggatctccatgctgtcaagcagttgttaacagaaatggaatgtgcggatgcaaaaatggacagtatatcattcaacacagtagcagtgctcctaattaagtcaaagcgcatcgactctgctgttgcattgatcagagacatgctaaatctaggcatgaagcctagtaccaaaactcgtttgttactttctcagtccactgtctataaatctgttttggtggataatgccactcccactgtagaaagcgatgggtcagactcgtccagtgatctccttgtatgctcagcttcataggccatattatgtcaactgaacaaacatattatctctccaactacagttggtcatgcacagctgcataaacttaacatatgcagttctaatggatcatgggtcctcaatgactttctgcattcagtaggtgctacactgccctaaaagaagtataaaaaggccagatctagtgctgaaggctctcacatacagtctgtgaaagagataaaccgaggcaagtcttctcctcgcaaatacggagatgttgttttgaacccgtgacctggtgactcattgagacagtcctcaccactgcaccaggttggtgtacatactgcagtgaaacagattcatctggagaatattaccttatgcaggaaaaaagtggtatggttcaatgtttttaaattgtctagttgacccaagtaggcttatgggcgattagatcacctaggatgagtagtcgacgactagggcgactattcaaccctagtcggcagttggtcgtcttacctactgcagggccgatattataattatacagtgtataattgtatattgtataacattataacagtataatagcatataatttagaatgatagtcaattgctagtgcttcgttgtgaattttgaattttcgatgggtaataaaggtgttattg

SEQ ID NO: 8212 - DNA, 1810 bp, Zea Mays
aaattataatttaggagggtcattctaacgtcgtcttatatcagataaaatggttttcgcgtacccattagttcatgagcgctcttagttcattaccatatgtactcgtgttggtgcgttcgccccgtagcagccgtcgggcttctctgccttgtacttgcgatcgagtccagacctgcggagatagatctactagtcgaccgatccggatccttcccttccgtctcacgctgcttgctcgggacgggaaccggaggtggggttgcgatggcgctgcagtacgtggaggcgcagcggcagttgcgcccggacctctccgactggtacgcctccctcgccgacctctaccagcggaagctatggcaccagctcaccctcaagctcgaccaattcttacagctccaggtcgcacagaccggagacactatcattcagctctacaacaatttcattgtcgactttgagaccaagattaatctgctcaaacttgcccattttgcggtgataacttctcgccagtaccctgataaggatgctgcaattactttcttagagggggtgatcacaaagctgcgtgagacaagggagtcacggatcaatgaaccaattctctatgtgaagatgcaaattgcagctattaatcttgagaaaggaaacaaaaaagagtgcaagaatttgttggaagatgggaaaaccactctggatagtatgactgatgtcgatcccacagttcatgctagcttttactggatatcatctcaataccacaaggcctgccaagaatttgcagagttctataagaatgctcttctctatctggcctacacaactgtggagtctctatctgagtcattcaagctagacttggcttttgatctatctctagcagccttgctgggtgataacatttacaactttggggagttgttagctcacccgattatcaatagtcttattggaactaaggtggagtgggtttatcatatgttacaagcattcaacagcggcaaccttgccctctaccaagaactttgcagggttcacaatgctgctcttactgcacaaccagctttggtgcagaatgagcggaagctgcttgagaaaatcaatattctttgtctgatggagataatctttagtcggccatctgaagatagaactattccattaagtgttattgctgagcggactaagctttcaatcagtgacgtggaatgtcttcttatgaagagcctctcggttcatcttattgagggaataattgatgaagtggacagtacagttcacgtatcatgggtccagcctagagtgcttggaattccacaggttaaggctttgcgcgaccgcctggatgcctgggttggaaaggtgcataccacattgctttcagttgaggcggaaacacctgatcttgttgctgtgtaatttcacagctgttacacttccgcgagaggcttggtcagcaaggtcccatttgcaaaatgacatggatggttagaactgcacgcagtgtcacggagacgggaccaatggattgaaaatttcatactagtagggtgttactagtagaacacgatgcaggagaatcttgctggaacatgagttgtgcctgatgtttgcatgttgcactgcgataagacgtggatcatcattaacatattagctgtttttcagtgcacatggctcttaccgatcgctaatgttggtcatctgttaaatctgttaaagctactgcatgaactataccagggcacacaattaaagaagcgaggttacgagaaacctgaaggcaaattgaagaagtaactgg

SEQ ID NO: 8213 - DNA, 1410 bp, Zea Mays
attacagacgccttcgttcataaggcggatctcgccgcaaacccaccccgcctcctagacttcccatgttttaaccggagacactatcattcagctctacaacaatttcattgtcgactttgagaccaagattaatctgctcaaacttgcccattttgcggtgataacttctcgccagtaccctgataaggatgctgcaattactttcttagagggggtgatcacaaagctgcgtgagacaagggagtcacggatcaatgaaccaattctctatgtgaagatgcaaattgcagctattaatcttgagaaaggaaacaaaaaagagtgcaagaatttgttggaagatgggaaaaccactctggatagtatgactgatgtcgatcccacagttcatgctagcttttactggatatcatctcaataccacaaggcctgccaagaatttgcagagttctataagaatgctcttctctatctggcctacacaactgtggagtctctatctgagtcattcaagctagacttggcttttgatctatctctagcagccttgctgggtgataacatttacaactttggggagttgttagctcacccgattatcaatagtcttattggaactaaggtggagtgggtttatcatatgttacaagcattcaacagcggcaaccttgccctctaccaagaactttgcagggttcacaatgctgctcttactgcacaaccagctttggtgcagaatgagcggaagctgcttgagaaaatcaatattctttgtctgatggagataatctttagtcggccatctgaagatagaactattccattaagtgttattgctgagcggactaagctttcaatcagtgacgtggaatgtcttcttatgaagagcctctcggttcatcttattgagggaataattgatgaagtggacagtacagttcacgtatcatgggtccagcctagagtgcttggaattccacaggttaaggctttgcgcgaccgcctggatgcctgggttggaaaggtgcataccacattgctttcagttgaggcggaaacacctgatcttgttgctgtgtaatttcacagctgttacacttccgcgagaggcttggtcagcaaggtcccatttgcaaaatgacatggatggttagaactgcacgcagtgtcacggagacgggaccaatggattgaaaatttcatactagtagggtgttactagtagaacacgatgcaggagaatcttgctggaacatgagttgtgcctgatgtttgcatgttgcactgcgataagacgtggatcatcattaacatattagctgtttttcagtgcacatggctcttaccgatcgctaatgttggtcatctgttaaatctgttaaagctactgcatgaactataccaggg

SEQ ID NO: 8214 - DNA, 1842 bp, Zea Mays
aaattataatttaggagggtcattctaacgtcgtcttatatcagataaaatggttttcgcgtacccattagttcatgagcgctcttagttcattaccatatgtactcgtgttggtgcgttcgccccgtagcagccgtcgggcttctctgccttgtacttgcgatcgagtccagacctgcggagatagatctactagtcgaccgatccggatccttcccttccgtctcacggcaagtatcttccctcttcccctctgctcctgccaggctgccacacctccgccagcgctagggttttcattttcactcgctgttgctggtgctgcttgctcgggacgggaaccggaggtggggttgcgatggcgctgcagtacgtggaggcgcagcggcagttgcgcccggacctctccgactggtacgcctccctcgccgacctctaccagcggaagctatggcaccagctcaccctcaagctcgaccaattcttacagctccaggtcgcacagaccggagacactatcattcagctctacaacaatttcattgtcgactttgagaccaagattaatctgctcaaacttgcccattttgcggtgataacttctcgccagtaccctgataaggatgctgcaattactttcttagagggggtgatcacaaagctgcgtgagacaagggagtcacggatcaatgaaccaattctctatgtgaagatgcaaattgcagctattaatcttgagaaaggaaacaaaaaagagtgcaagaatttgttggaagatgggaaaaccactctggatagtatgactgatgtcgatcccacagttcatgctagcttttactggatatcatctcaataccacaaggcctgccaagaatttgcagagttctataagaatgctcttctctatctggcctacacaactgtggagtctctatctgagtcattcaagctagacttggcttttgatctatctctagcagccttgctgggtgataacatttacaactttggggagttgttagctcacccgattatcaatagtcttattggaactaaggtggagtgggtttatcatatgttacaagcattcaacagcggcaaccttgccctctaccaagaactttgcagggttcacaatgctgctcttactgcacaaccagctttggtgcagaatgagcggaagctgcttgagaaaatcaatattctttgtctgatggagataatctttagtcggccatctgaagatagaactattccattaagtgttattgctgagcggactaagctttcaatcagtgacgtggaatgtcttcttatgaagagcctctcggttcatcttattgagggaataattgatgaagtggacagtacagttcacgtatcatgggtccagcctagagtgcttggaattccacaggttaaggctttgcgcgaccgcctggatgcctgggttggaaaggtgcataccacattgctttcagttgaggcggaaacacctgatcttgttgctgtgtaatttcacagctgttacacttccgcgagaggcttggtcagcaaggtcccatttgcaaaatgacatggatggttagaactgcacgcagtgtcacggagacgggaccaatggattgaaaatttcatactagtagggtgttactagtagaacacgatgcaggagaatcttgctggaacatgagttgtgcctgatgtttgcatgttgcactgcgataagacgtggatcatcattaacatattagctgtttttcagtgcacatggctcttaccgatcgctaatgttggtcatctgttaaatctgttaaagctactgcatgaactataccaggg

SEQ ID NO: 8215 - DNA, 2082 bp, Zea Mays
ggagtctccgtcaccacctcgcctgctagcctcctccgtctgctcaagacgagggaggagcagagaccgaactctgccgtctcttcctcctccctctgcacccccacgagctccatggccgccaccgccatgattgggattaccaacctacgttgccgccacgacccgctctcctcccttccccgggctacgtcgtcggccgcccggtcctgtacgctgcttcctcctcgatgccgccgccattcttcttgctgctccccttcctcctccgtctctccgtgccgggcccgggtccgaccaacagcagcactgaagcgcatccctgccgccgacaccggcttcatgggtccagccaacaatgaggccaccacgcttaaacgatcatcgtcggccgaccttcgccgccgccttatcgtccccagctccaccgctggcaccggacacgccgccagtgcttccacaggagtgctgcccgccattatcggggtggcgcatctgctcgtgtcgctgggcattctgctcgccatggacaagttcctcaagcaggcattcgtcgccgcgtccatcaagttcccgagtgcccttttcggcatgttctgtgtcttctcggtgctcgtagtcttcgacacattcgtgcctcctctcgcgaaggcgttcattggcttctttgagcccgccacgctgttcatccagaggtggctgtccttgttctacgtcccgacactggtcgtgctgccgctcgccgtcggggatattccagcggcctcaggaatcaagatccttgcaatcacttttggtggctggtttgctaccctgacggtggcaggatatacagtgttagccatgcgaaaactcgtgaagacagagcttcttgcaccatcggagcccacgaagaagccgtcgccgttttccacgtcggagatctgggcatggtcagctatattcgtcgcgtcgttcggcgtcgcatgtttcaatcccacggcgtttggtaccacggcaagaacatgccttcctttcctgcttgctgctaatgtgctgggatacatggttaccacctggcgtcaagaaagtgctgcatccgatcatctcctgcgcactctgtgcagatttcgcggcgctagcctatgggtacatctcagggtttggacttgatgccgtgctaggtgcttacctcacaaaggtgccctctaatcctggagccggtgacgtactaatgactttccttgggtctgtgatcatatcatttgcattctcgatcttcaagcagagaaagcttgtgaagaggcacgcaacagagattttcacatcaattgccatcgcgtcgacattctctctgtactcaactgctatcatagggcgcctgattgggctagagccatcgttaaccatatcaatactgccaaggtgtattactctggcgctggctttgagcatagtgtctttctttgaaggtgtaaactcttcggtaactgctgtcgtggttgtccttaccgggctcatcggtgcgaactttgtgctagcagccatggagaaacttggtctgaacgaccccatctccagaggagtagggacagcttccagcgctcaaggactgggaacagcagcactggcggccaaggaacctgaagcgctccctttctgcgccatcgcttatagtttcacggggattttcggcacgctgatctgctcggttccggcagtcaggcaaagcctgatattcatagctggttaagagatgatctgaatttgacggtttcattctttagataaaagaagcagcttgcttcctccctccgtgttcagaaggtcaggaagcaacgccccacatgtcaggtcaggatctaatatgtgtaggggcttgaaaaaaaaaggcgaataattctgtaatcaggatgtaaccgaaatactacagttttttttttcttgtgacaaaatactactagaggaaggtagatccgttatttgtttgacagtttgtggtgtcatctttctccctccctagaaacaggagagatatagtatgattgataaaatcaacgtttttcagagataaattatggtatgaagttggataaaaaaatc

SEQ ID NO: 8216 - DNA, 1535 bp, Zea Mays
gcctggcgaccgggagccagaagcaaaaattctgggccggccactgcccagatcccgccgacattctccaaaccaaccgtggcggcgatgaggaaggcgggggtgacctccgcctccagcggtggaggagaaggatggccgtgcggtggtggcctcaacctcggtgtgaagctgaacgtgctgctactgctgttggtggtggccaccaatctggtgtccctgtaccacctctccctccgcgccgccaccgtgccgccggtccttctccagcagcaacgtgacggcgacaaggatctggtcctgatccggcagctggaagccatccgcgcgggcgtgtcgcagctgaaccacctccgctcgtcgtcccctcccccgccgcttccgccggcggagcttgtcctctactcccgcctcgcccccgtcgcatccgcctgctccgcgcacccggagctcctccaccgctacatgtcctacactccctacgcgctctgccccgacgacgccctctccatcgccgagcccctcctcctccgcggatgccatccgctcccgcgtcgcaggtgcttctcccccaccgcatccgcatcagcatccaaactcctccccaccgaccccttctccccgcttcccgacgccgccgtccgatggcccaaggaggcgaagtgcaaatcgttctcctgcctgccgccgtcgctgggcttcgacgtggcgcgcacggaggccgcacggttcctccgcgcgcgcgggcccttagacctgacggccccgcagctactgcggctggcctcgctgagccgggcagggcccatccggcttgggctcgacatcggcggcggcacgggcacgctggcggcgcggctcaagaagctcgtcaacgccacggtgctgacgacaaccatgaatctgggcgctccctactcggaggcggcggcggcacgcggggtggtgccgctgcacgtgccgctgcagcagcggttcccggtgggggatgggaccatggacgtggtgcgggcggggcacgccgtgaaccgttggatcccggaggtggcgctggagttcctgtggtacgacgccgaccgtgtgctgcgcccgggcgggcttctctgggtggaccacttctggtgccggaggagcgacctggagggcgtctacgccgccatgctgcggaggcttggctacaagaccatcaagtgggtcgccgccgacaagagtgttgccatcggcggcaacagcagcaaggacgaggtctacctcaccgcgctgctgcagaagtccttcagttaggcagtgaacatcggggaaatgacacggaattcatccatcagccgaagaaggcgaagcaatacagtgctagtgcgattccggcagactcgcagcaatcagcttgtgttatcccactctagaatttctgctgcaacgtgcgtatgcgtgcaacaatctatgctgatactagtgtagcagcaactgttgtctatgaatctgtaagtcttctttcatacaagtaaggttaaatacatcttgcgaatgctttccac

SEQ ID NO: 8217 - DNA, 2046 bp, Zea Mays
atggttcttacatctgacaatccacccgtgagggaccgatttggtgctctggctttgccgtccgtgagggaccgatctggtgctctggctttgcccatgagggaccgatctggtgctccgactttgaaccctaatctaattgccttcttgttctatgattgtagccgtgaggaccgatctggtgctccggctttgaccgcccatttagccatctattgcagcaggttgcaggctctcaacagcgacgtgcctggcgaccgggagccagaagtgcgtatccgagactccgagccgactcccgactgcaatggagtgatccacgagtgaactttagaactactctccttctcagtctcttgacttctcaaattctcgttcaatttattagggatagcaatctgtgaatcgcttagcctgagcaaaaattctgggccggccactgcccagatcccgccgacattctccaaaccaaccgtggcggcgatgaggaaggcgggggtgacctccgcctccagcggtggaggagaaggatggccgtgcggtggtggcctcaacctcggtgtgaagctgaacgtgctgctactgctgttggtggtggccaccaatctggtgtccctgtaccacctctccctccgcgccgccaccgtgccgccggtccttctccagcagcaacgtgacggcgacaaggatctggtcctgatccggcagctggaagccatccgcgcgggcgtgtcgcagctgaaccacctccgctcgtcgtcccctcccccgccgcttccgccggcggagcttgtcctctactcccgcctcgcccccgtcgcatccgcctgctccgcgcacccggagctcctccaccgctacatgtcctacactccctacgcgctctgccccgacgacgccctctccatcgccgagcccctcctcctccgcggatgccatccgctcccgcgtcgcaggtgcttctcccccaccgcatccgcatcagcatccaaactcctccccaccgaccccttctccccgcttcccgacgccgccgtccgatggcccaaggaggcgaagtgcaaatcgttctcctgcctgccgccgtcgctgggcttcgacgtggcgcgcacggaggccgcacggttcctccgcgcgcgcgggcccttagacctgacggccccgcagctactgcggctggcctcgctgagccgggcagggcccatccggcttgggctcgacatcggcggcggcacgggcacgctggcggcgcggctcaagaagctcgtcaacgccacggtgctgacgacaaccatgaatctgggcgctccctactcggaggcggcggcggcacgcggggtggtgccgctgcacgtgccgctgcagcagcggttcccggtgggggatgggaccatggacgtggtgcgggcggggcacgccgtgaaccgttggatcccggaggtggcgctggagttcctgtggtacgacgccgaccgtgtgctgcgcccgggcgggcttctctgggtggaccacttctggtgccggaggagcgacctggagggcgtctacgccgccatgctgcggaggcttggctacaagaccatcaagtgggtcgccgccgacaagagtgttgccatcggcggcaacagcagcaaggacgaggtctacctcaccgcgctgctgcagaagtccttcagttaggcagtgaacatcggggaaatgacacggaattcatccatcagccgaagaaggcgaagcaatacagtgctagtgcgattccggcagactcgcagcaatcagcttgtgttatcccactctagaatttctgctgcaacgtgcgtatgcgtgcaacaatgtaagcaaatggaacttaggctactctaacagatgcctcttcgcattctctatcttatcctctattctctgcaaataatatcaacaatgtcttctacagttctacgttccctatttttcacactctactggagataatcttaagttccatgtaatcttatgtggccaaaatccaatgattaagaaaaaagtaatcctataccaatttcatat

SEQ ID NO: 8218 - DNA, 1898 bp, Zea Mays
atggttcttacatctgacaatccacccgtgagggaccgatttggtgctctggctttgccgtccgtgagggaccgatctggtgctctggctttgcccatgagggaccgatctggtgctccgactttgaaccctaatctaattgccttcttgttctatgattgtagccgtgaggaccgatctggtgctccggctttgaccgcccatttagccatctattgcagcaggttgcaggctctcaacagcgacgtgcctggcgaccgggagccagaagcaaaaattctgggccggccactgcccagatcccgccgacattctccaaaccaaccgtggcggcgatgaggaaggcgggggtgacctccgcctccagcggtggaggagaaggatggccgtgcggtggtggcctcaacctcggtgtgaagctgaacgtgctgctactgctgttggtggtggccaccaatctggtgtccctgtaccacctctccctccgcgccgccaccgtgccgccggtccttctccagcagcaacgtgacggcgacaaggatctggtcctgatccggcagctggaagccatccgcgcgggcgtgtcgcagctgaaccacctccgctcgtcgtcccctcccccgccgcttccgccggcggagcttgtcctctactcccgcctcgcccccgtcgcatccgcctgctccgcgcacccggagctcctccaccgctacatgtcctacactccctacgcgctctgccccgacgacgccctctccatcgccgagcccctcctcctccgcggatgccatccgctcccgcgtcgcaggtgcttctcccccaccgcatccgcatcagcatccaaactcctccccaccgaccccttctccccgcttcccgacgccgccgtccgatggcccaaggaggcgaagtgcaaatcgttctcctgcctgccgccgtcgctgggcttcgacgtggcgcgcacggaggccgcacggttcctccgcgcgcgcgggcccttagacctgacggccccgcagctactgcggctggcctcgctgagccgggcagggcccatccggcttgggctcgacatcggcggcggcacgggcacgctggcggcgcggctcaagaagctcgtcaacgccacggtgctgacgacaaccatgaatctgggcgctccctactcggaggcggcggcggcacgcggggtggtgccgctgcacgtgccgctgcagcagcggttcccggtgggggatgggaccatggacgtggtgcgggcggggcacgccgtgaaccgttggatcccggaggtggcgctggagttcctgtggtacgacgccgaccgtgtgctgcgcccgggcgggcttctctgggtggaccacttctggtgccggaggagcgacctggagggcgtctacgccgccatgctgcggaggcttggctacaagaccatcaagtgggtcgccgccgacaagagtgttgccatcggcggcaacagcagcaaggacgaggtctacctcaccgcgctgctgcagaagtccttcagttaggcagtgaacatcggggaaatgacacggaattcatccatcagccgaagaaggcgaagcaatacagtgctagtgcgattccggcagactcgcagcaatcagcttgtgttatcccactctagaatttctgctgcaacgtgcgtatgcgtgcaacaatgtaagcaaatggaacttaggctactctaacagatgcctcttcgcattctctatcttatcctctattctctgcaaataatatcaacaatgtcttctacagttctacgttccctatttttcacactctactggagataatcttaagttccatgtaatcttatgtggccaaaatccaatgattaagaaaaaagtaatcctataccaatttcatat

SEQ ID NO: 8219 - DNA, 1951 bp, Zea Mays
atggttcttacatctgacaatccacccgtgagggaccgatttggtgctctggctttgccgtccgtgagggaccgatctggtgctctggctttgcccatgagggaccgatctggtgctccgactttgaaccctaatctaattgccttcttgttctatgattgtagccgtgaggaccgatctggtgctccggctttgaccgcccatttagccatctattgcagcaggttgcaggctctcaacagcgacgtgcctggcgaccgggagccagaagtgcgtatccgagactccgagccgactcccgactgcaatggagtgatccacgagcaaaaattctgggccggccactgcccagatcccgccgacattctccaaaccaaccgtggcggcgatgaggaaggcgggggtgacctccgcctccagcggtggaggagaaggatggccgtgcggtggtggcctcaacctcggtgtgaagctgaacgtgctgctactgctgttggtggtggccaccaatctggtgtccctgtaccacctctccctccgcgccgccaccgtgccgccggtccttctccagcagcaacgtgacggcgacaaggatctggtcctgatccggcagctggaagccatccgcgcgggcgtgtcgcagctgaaccacctccgctcgtcgtcccctcccccgccgcttccgccggcggagcttgtcctctactcccgcctcgcccccgtcgcatccgcctgctccgcgcacccggagctcctccaccgctacatgtcctacactccctacgcgctctgccccgacgacgccctctccatcgccgagcccctcctcctccgcggatgccatccgctcccgcgtcgcaggtgcttctcccccaccgcatccgcatcagcatccaaactcctccccaccgaccccttctccccgcttcccgacgccgccgtccgatggcccaaggaggcgaagtgcaaatcgttctcctgcctgccgccgtcgctgggcttcgacgtggcgcgcacggaggccgcacggttcctccgcgcgcgcgggcccttagacctgacggccccgcagctactgcggctggcctcgctgagccgggcagggcccatccggcttgggctcgacatcggcggcggcacgggcacgctggcggcgcggctcaagaagctcgtcaacgccacggtgctgacgacaaccatgaatctgggcgctccctactcggaggcggcggcggcacgcggggtggtgccgctgcacgtgccgctgcagcagcggttcccggtgggggatgggaccatggacgtggtgcgggcggggcacgccgtgaaccgttggatcccggaggtggcgctggagttcctgtggtacgacgccgaccgtgtgctgcgcccgggcgggcttctctgggtggaccacttctggtgccggaggagcgacctggagggcgtctacgccgccatgctgcggaggcttggctacaagaccatcaagtgggtcgccgccgacaagagtgttgccatcggcggcaacagcagcaaggacgaggtctacctcaccgcgctgctgcagaagtccttcagttaggcagtgaacatcggggaaatgacacggaattcatccatcagccgaagaaggcgaagcaatacagtgctagtgcgattccggcagactcgcagcaatcagcttgtgttatcccactctagaatttctgctgcaacgtgcgtatgcgtgcaacaatgtaagcaaatggaacttaggctactctaacagatgcctcttcgcattctctatcttatcctctattctctgcaaataatatcaacaatgtcttctacagttctacgttccctatttttcacactctactggagataatcttaagttccatgtaatcttatgtggccaaaatccaatgattaagaaaaaagtaatcctataccaatttcatat

SEQ ID NO: 8220 - DNA, 2015 bp, Zea Mays
actgccatgccgataatttctagccacaattccatgccttgcccgtccagtagctcccatctcatcccatcccgacgaatcaaatctccatcaccacttcaccagtcaccaccttgcctagcctccgtctgctgcggacgccagacatcagtcagcacgagggaagcccaaactctgccgcctcttcctctgcgctgcgctaacaacgattcccgattccatggccgcgaccgccatgattaggattaccactttacgttgccgccacgacccgctctcctcccttccccgcaccacgtcggccgcctgctcctgtacccttccgcctcgatgtcgccaatgcagactgctccctccccattcttctggctgttccccttcctcctccatctttccgcgccgggtccgggtccgcccaacagcagcattgaagcgcatcggtggcggcaacaccagcttcatgggtccagccaacaatggcgccaccacgcttcagcgatcttcatcgcccgaccttcgtcgcagcctgatcgtcctcaagtctactgctggtacaggaggtggcaatgcttcctcaggactgctgcccaccattcttggggtggcgcatctgcttgtgtcgctgggcattgtgctcgccaccgataagttcctcaaacaggcatttgttgccgcgtccatcaagttcccaagcgccctcttcggcatgttctgcgtcttctctgtgctagtcgtgttcgacacattcgtgcctgctctggcgaaggcgttcatggacttctttgagcctgccacgctgttcatccagaggtggctaccgttgttctatgtcccgtcactggtcgtgctgccgctcgccgtcagggatgtcccagcggcttcaggagtcaagatttttgcaatcacttttggcggctggtttgctacccttgcggtcgcaggatatacagcattagctgtgagaaaacttgtgaaaacacagcttataccagcagagcccatgagcaaggcatcgccattttctacagtagaaacctgggcatgggctgctgtattcgttgcatcgttcggtgttgcatgtttcaatcccagagctcttggtaccacagcaagaacatgccttccctttctgctcgctgccactgtgctgggatacatggttggttctgggttaccatctggtgtcaagaaagtgttacatccaatcatcacctgcgcactttctgcagatttggcggcagtagcgtatgggtacctctccgggtctggacttgacgctgtgctaggtgattacctcacaaaggcgccctctaatcctggagctggtgacgtactaatgggtttccttgggtctgtgatcatatcatttgcattctcaatgttcaaacagagaaagcttgtaaagaggcacgcagcagagattttcacatcaattgccattgcgtcgacattctctctgtactcaaccgctgtcatagggcgcctgattgggctggagccatcgttaaccatatccatattgccaaggtgtataactgtggcgctggctttgagcatagtatctttctttgaaggtgtaaactcttccctaaccgctgccgtggttgtcgttaccgggctcattggcgcgaatttcgtgcaagtagctatggataaacttggtctcaacgaccccatcgccagaggaatagggacagcttccagtgctcatggactggggacagcagcactgtcagccaaggaacctgaagcgcttcctttctgcgccatcgcttatggtctcacgggaatttttggctccttggtttgctcggttccagtagtgaggcaaagcttggtattcatagctggttaggagcagctcgtgatgatctgaatttgaggatctgattctttagataaaggaaatcgtttcatgtgtaaaagaagtcgtgctcagaagacgaggaagcaaaacgcccccacgttttgggtcaggatgaagaaagcattgaatccacagcattgatagctgg

SEQ ID NO: 8221 - DNA, 2004 bp, Zea Mays
actgccatgccgataatttctagccacaattccatgccttgcccgtccagtagctcccatctcatcccatcccgacgaatcaaatctccatcaccacttcaccagtcaccaccttgcctagcctccgtctgctgcggacgccagacatcagtcagcacgagggaagcccaaactctgccgcctcttcctctgcgctgcgctaacaacgattcccgattccatggccgcgaccgccatgattaggattaccactttacgttgccgccacgacccgctctcctcccttccccgcaccacgtcggccgcctgctcctgtacccttccgcctcgatgtcgccaatgcagactgctccctccccattcttctggctgttccccttcctcctccatctttccgcgccgggtccgggtccgcccaacagcagcattgaagcgcatcggtggcggcaacaccagcttcatgggtccagccaacaatggcgccaccacgcttcagcgatcttcatcgcccgaccttcgtcgcagcctgatcgtcctcaagtctactgctggtacaggaggtggcaatgcttcctcaggactgctgcccaccattcttggggtggcgcatctgcttgtgtcgctgggcattgtgctcgccaccgataagttcctcaaacaggcatttgttgccgcgtccatcaagttcccaagcgccctcttcggcatgttctgcgtcttctctgtgctagtcgtgttcgacacattcgtgcctgctctggcgaaggcgttcatggacttctttgagcctgccacgctgttcatccagaggtggctaccgttgttctatgtcccgtcactggtcgtgctgccgctcgccgtcagggatgtcccagcggcttcaggagtcaagatttttgcaatcacttttggcggctggtttgctacccttgcggtcgcaggatatacagcattagctgtgagaaaacttgtgaaaacacagcttataccagcagagcccatgagcaaggcatcgccattttctacagtagaaacctgggcatgggctgctgtattcgttgcatcgttcggtgttgcatgtttcaatcccagagctcttggtaccacagcaagaacatgccttccctttctgctcgctgccactgtgctgggatacatggttaccatctggtgtcaagaaagtgttacatccaatcatcacctgcgcactttctgcagatttggcggcagtagcgtatgggtacctctccgggtctggacttgacgctgtgctaggtgattacctcacaaaggcgccctctaatcctggagctggtgacgtactaatgggtttccttgggtctgtgatcatatcatttgcattctcaatgttcaaacagagaaagcttgtaaagaggcacgcagcagagattttcacatcaattgccattgcgtcgacattctctctgtactcaaccgctgtcatagggcgcctgattgggctggagccatcgttaaccatatccatattgccaaggtgtataactgtggcgctggctttgagcatagtatctttctttgaaggtgtaaactcttccctaaccgctgccgtggttgtcgttaccgggctcattggcgcgaatttcgtgcaagtagctatggataaacttggtctcaacgaccccatcgccagaggaatagggacagcttccagtgctcatggactggggacagcagcactgtcagccaaggaacctgaagcgcttcctttctgcgccatcgcttatggtctcacgggaatttttggctccttggtttgctcggttccagtagtgaggcaaagcttggtattcatagctggttaggagcagctcgtgatgatctgaatttgaggatctgattctttagataaaggaaatcgtttcatgtgtaaaagaagtcgtgctcagaagacgaggaagcaaaacgcccccacgttttgggtcaggatgaagaaagcattgaatccacagcattgatagctgg

SEQ ID NO: 8222 - DNA, 1096 bp, Zea Mays
caggctcgtcttgcgcgtgcccgccaaacccacgccgccccgccggagttccccaacacctatcttctcgtcggatgctgcaacgacgagctaacctaccgctacaagggcaagaccgtcatgacccaggaagagcgatacgaatccctgcggcactgcaagtgggttgatgaggtcattcctgatgcaccgtgggttctcacacaggagtttattgataagcatcagattgactatgttgctcatgatgcgctgccttatgctgatactagcggaacagcaaatgatgtctatgaatttgttaaaaagattggaaaattcaaggaaacaaaaaggacagacggggtttctacttcagatctcataatgaggatcttgaaggactataaccagtatgtcatgaggaatttagcacggggctactcgaggaaagatcttggtgtgagctatgtcaaggagaaacaattgcaagttaatatgaagatcaataaactgcgggagactgtgaaggcacatcaggaaaagttgcaaacagtggcaaagactgctggtttgaatcatgaagaatggcttgctaatgcggatcgctgggttgctggtttcctagagaagtttgagcaacactgccacaatatggaaactgcgatcaaggatcggatacaggagaggctagggaaacagttgagcaaaggaataatcgctggtcttgtgcaggaaccggtgacagcctaaaacaggtgatgctgtcaatgaaacgcactgatgcttttcagatcatcctcccgatgtggttctggtgcgaggcttgtaagggtgcaacgcggttgctgagacgttttaattttgtggtgcatgtgaactcttcccgtatacaaatgtctataggagaggcgtttggtgttttgggcatcgtcgtgggcgtgtttctttgtatctaacgggttagattaaccttttttttgtatcgagattgatgttctttcgtggttataataataataaataataataatattgtcaaagcacaatgttgatgacattctagatttggtaccttaatgactctgtatttacgaatgtatgatatcatatctat

SEQ ID NO: 8223 - DNA, 1381 bp, Zea Mays
gagttccgcagcgatccgcgcctttttattggcgagcctgcacgcggccttgccctcccaggaagggaggccgaactgagcagttcgaccaggcagccatccacctccaaccccccttcgcctgcgcaaatcgttaccatcccagcgagaaagatggcgcgcgtctccaatgccaagaagcggcagggcgccaagcccgcctccgcgctcagcagcaccgacaccagcaccgccgcaaagaggaaggccgaggacgaccgccccgtgcgcgtctacgccgacggcatcttcgatctcttccacttcggccacgcccgcgccctcgagcaggccaagatgctgttccccaacacctatcttctcgtcggatgctgcaacgacgagctaacctaccgctacaagggcaagaccgtcatgacccaggaagagcgatacgaatccctgcggcactgcaagtgggttgatgaggtcattcctgatgcaccgtgggttctcacacaggagtttattgataagcatcagattgactatgttgctcatgatgcgctgccttatgctgatactagcggaacagcaaatgatgtctatgaatttattggaaaattcaaggaaacaaaaaggacagacggggtttctacttcagatctcataatgaggatcttgaaggactataaccagtatgtcatgaggaatttagcacggggctactcgaggaaagatcttggtgtgagctatgtcaaggagaaacaattgcaagttaatatgaagatcaataaactgcgggagactgtgaaggcacatcaggaaaagttgcaaacagtggcaaagactgctggtttgaatcatgaagaatggcttgctaatgcggatcgctgggttgctggtttcctagagaagtttgagcaacactgccacaatatggaaactgcgatcaaggatcggatacaggagaggctagggaaacagttgagcaaaggaataatcgctggtcttgtgcaggaaccggtgacagcctaaaacaggtgatgctgtcaatgaaacgcactgatgcttttcagatcatcctcccgatgtggttctggtgcgaggcttgtaagggtgcaacgcggttgctgagacgttttaattttgtggtgcatgtgaactcttcccgtatacaaatgtctataggagaggcgtttggtgttttgggcatcgtcgtgggcgtgtttctttgtatctaacgggttagattaaccttttttttgtatcgagattgatgttctttcgtggttataataataataaataataataatattgtcaaagcacaatgttgatgacattctagatttggtaccttaatgactctgtatttacgaatgtatgatatcatatctat

SEQ ID NO: 8224 - DNA, 1261 bp, Zea Mays
ataaaattgaaatctcattcactttcaaacttatttttttaatgtgttgctaatatccttaatgtgttatcatgatactatttaatcttttatctcatcttacctagaggcgttgataatttttatagctcatgatagcagaaaaatatttgagccgactcgtgctacccaatggactagcaaggctacaactttttagggttatggcatgactgagtctgctgccgttggaactcgtggcttcaatacttcaaagcataagaagtatggttcagtaggactcctggctccaaacatgcatgcaagaattgttcatgtggaaactggttgctccttgcctccaggctcttgtggggagctctggctccatggtccagctataatgaaaggttacttgaatcatgttgatccatgcgcaataaatggtggctggctgcgaactggtgacattgcctacttcgatttcgatgggtacttgtatatagtgggccgcttgaaagaggtgatcaagtacaagggatttcagatagctccagctgacttggaagcagttttgatcgaacaccctggaattgttgatgtggctgtgacgtctactgaggatgaagaagctggagaggtaccagtagccttcgtggtgaggaaatctggaagtggcctatcgtgcacgcaagtgatggagtatgtagctaagcaggtgtccccgtataagaaggtgcggaaggtggtgttcgtggagtcgatccccaagtcgccggctggaaaggttctcaggaggcttctcagggaatctcttgcagctagcgctgttgctggtccaacaagttattccgagtccaattccatgcgccattcgagactgtaactgcaggacaaggccagccaagcaggatctcggtcaggaacagtttccagctttattttaggttgccgtgacctgaataggccttctgtatcacagttaggggcttagcacactcacatagatgaacaaagaccttttggattagtttgcttgttgagcaaaattcaaagtgtaaggaagatgttttgtcttcttcttctctttgtgtccttccgttgaaaaataccatggtcaaatctttctacaatctgaaaagaaggtagccaagtgatagttcgtagttcaagaaacggtttcacgctatgttggtcctatatatatggctttagattttgacatttcgggagaactacagtgattggatcctaactgtagatatatagccttcatcaaaat

SEQ ID NO: 8225 - DNA, 1310 bp, Zea Mays
ctgcctcctgacgaaagaccagagcgttcctacgcttccatagttgccagcaacagagatgaatgaatgatgagaactcagcttttgggatattcgtaggtctttcaacgcgatgaagttgagacacttcaaggtccgctagaatttggatgccgattgcttgccagaacattttggcataactgcaacctagcataatgtgtcgtgccgtttcacctgcccacactcttcacagccatcttcctcaaggttatggcatgactgagtctgctgccgttggaactcgtggcttcaatacttcaaagcataagaagtatggttcagtaggactcctggctccaaacatgcatgcaagaattgttcatgtggaaactggttgctccttgcctccaggctcttgtggggagctctggctccatggtccagctataatgaaaggttacttgaatcatgttgatccatgcgcaataaatggtggctggctgcgaactggtgacattgcctacttcgatttcgatgggtacttgtatatagtgggccgcttgaaagaggtgatcaagtacaagggatttcagatagctccagctgacttggaagcagttttgatcgaacaccctggaattgttgatgtggctgtgacgtctactgaggatgaagaagctggagaggtaccagtagccttcgtggtgaggaaatctggaagtggcctatcgtgcacgcaagtgatggagtatgtagctaagcaggtgtccccgtataagaaggtgcggaaggtggtgttcgtggagtcgatccccaagtcgccggctggaaaggttctcaggaggcttctcagggaatctcttgcagctagcgctgttgctggtccaacaagttattccgagtccaattccatgcgccattcgagactgtaactgcaggacaaggccagccaagcaggatctcggtcaggaacagtttccagctttattttaggttgccgtgacctgaataggccttctgtatcacagttaggggcttagcacactcacatagatgaacaaagaccttttggattagtttgcttgttgagcaaaattcaaagtgtaaggaagatgttttgtcttcttcttctctttgtgtccttccgttgaaaaataccatggtcaaatctttctacaatctgaaaagaaggtagccaagtgatagttcgtagttcaagaaacggtttcacgctatgttggtcctatatatatggctttagattttgacatttcgggagaactacagtgattggatcctaactgtagatatatagccttcatcaaaat

SEQ ID NO: 8226 - DNA, 4178 bp, Zea Mays
aacagatcaatccaagggcatcgtgtgttgctggtgctaaacttgcagcgtgctttccgcaccttgacgccgtcgccttgatccactgcagctggagggtggcatcgcattcgcagccgccaaatcacatctatttatactcgtccggcaaggagtccaaagagtagtgacacgagaagaccaggggaggggagagccacaaatctccactgacgatgcaggacgccgtggcgacccacggccccgccaatgccgccgccggcgccaccttctactgcgccgccgccggcgtgtacgcgagcacgcaccctccggtggccctcccgtccgacccctccctctccctcgtcccgcacatcttcgcccgcctacccgccgcccgccccgacgccccggccctcgtcgacgccgccactgccgaggccctctcccgcgccgacctccgccgcctcgtatccgccctcgcggcgggcctccgccgccgtcggggcctccgtgagggggacgtcgtgctcctcgctctgccgaactccatcgccttccccgtcgcgttcctcgccgtcctcgccgccgggtccatcgccaccacaatgagcccgttcagcgcccccgccgagatcgccgctagggttcgggacaccagccccgccctcgtgttcgccacgctcgacaacgtcgggaagctcccgccgttgcgcgtcccggtcgtcctcgtccccgacgccttccacctcgcggacgagggcgcccccgagttcgcacccttccgcgagttgctgctgctcgattccgagccactgccgggcccttcggtcggtcaggacgacgcggccgccatcctctactcgtcggggacgggcggccggagcaagggcgtcgtgctcacgcaccgcaacctcatcgccacggtcgagctcttcgtgcacttcgaggcctcgcagtacgccgcacctgcttgtgataatgtctacctggcggcgctgcccatgttccacgtctacggactctcgctcttcgcggtgggacttctctcgctcggttccacggtggtcgtcatgaagaggttcgacgcaggcgaagccgttaagaccattcgcagattcaaagtcacgcacttcccggtcgttccgcccatcatggcggcgctggtgcacaccaccaagccagcggcaatgccgttggaatgcttggtgcaagtgtcaaccggtgcagcgccgtccagccgcaggctcatcgacgacttcgtcaaggctttccctcacgtcgatctcattcagtgacatacaaacagcttacatttacaacccggcatgaaccgagcttgttcttttttgtttggaggaggagggggtgggggttgctgtttacatcttattgcctcgcactggaaaacaccatctgccaggcagcacgcacacccagttctctgcttcggtggctgtagcaccagatttcagcttcgttgccgcatcgttgcaggagacattttagtgatgctgcctcctgacgaaagaccagagcgttcctacgcttccatagttgccagcaacagagatgaatgaatgatgagaactcagcttttgggatattcgtaggtctttcaacgcgatgaagttgagacacttcaaggtccgctagaatttggatgccgattgcttgccagaacattttggcataactgcaacctagcataatgtgtcgtgccgtttcacctgcccacactcttcacagccatcttcctcaagtatcctcttcttcctaagatttgttttgcattgtatcttttcttgggcaagtaaccatgcaaaaaactgagcatgcttgattcctaattgagttgaccttcctaattgagcatgcctgattcctagatcacctgtcaattcactaagacaatggggggacatggcaaatattaagctagacacgggcgtatatggtgtttgaatttacatgtttttttggcacaatgccaaatgccattagcactagtgtaggttctctaatttagcaagccaaaaagaaaagaaactaggacacaagtatccgggtaacactaatacactatacacatacaaatgagaatgggcaaggttgatccaacctacaagagcaaggtcaatggtcccaggggccaacctcagagtctgaaattggtcaatagagtaagatgggtcgatccaatcatcacatacaatccattttttcaaatttgttgatcctcttcgtttttccaaacaagcatgatttgtcataacttttaagcaagtctatacttggaagtagatcaaggaatatcctgaaaatagataaaattgaaatctcattcactttcaaacttatttttttaatgtgttgctaatatccttaatgtgttatcatgatactatttaatcttttatctcatcttacctagaggcgttgataatttttatagctcatgatagcagaaaaatatttgagccgactcgtgctacccaatggactagcaaggctacaactttttaggtaaaatgtgctgactcatgatccctaaaagtttgccttgaggccacagggtgggtcagcccattcccatccatgaatacacacaaaatatgggtaacttgagtacttgaccttcccggttgaccatgcctgaccatctctcagtctgccaccgtcatgtggtgatgtgtaccgttgagtctagcaatgggctttacaaagattttactctttctactagcaaacggaaaatattgtacttttcccttgaagaaaaaccccaagaaaacaaagatttacagcaaattcaagcatgtagtgatgcctactgcttggctgtcattttagcagggaagtatggttctcaaccttacagccactaggcctgcatgcagtgatgccagactccaatagcaaacttgctacttggtggtttcagagtagggaacagattgataagtcagggtgcaatggttttgattgccttatgctcttagtgattttgttactttggaaggaaaggaaccatcaagtctttgaggggttcagtcttcaactatcagtctatcacttcggtactgaagatcaaggatgagtccagattgtggattcaagtaggataccataggggttatggcatgactgagtctgctgccgttggaactcgtggcttcaatacttcaaagcataagaagtatggttcagtaggactcctggctccaaacatgcatgcaagaattgttcatgtggaaactggttgctccttgcctccaggctcttgtggggagctctggctccatggtccagctataatgaaaggttacttgaatcatgttgatccatgcgcaataaatggtggctggctgcgaactggtgacattgcctacttcgatttcgatgggtacttgtatatagtgggccgcttgaaagaggtgatcaagtacaagggatttcagatagctccagctgacttggaagcagttttgatcgaacaccctggaattgttgatgtggctgtgacgtctactgaggatgaagaagctggagaggtaccagtagccttcgtggtgaggaaatctggaagtggcctatcgtgcacgcaagtgatggagtatgtagctaagcaggtgtccccgtataagaaggtgcggaaggtggtgttcgtggagtcgatccccaagtcgccggctggaaaggttctcaggaggcttctcagggaatctcttgcagctagcgctgttgctggtccaacaagttattccgagtccaattccatgcgccattcgagactgtaactgcaggacaaggccagccaagcaggatctcggtcaggaacagtttccagctttattttaggttgccgtgacctgaataggccttctgtatcacagttaggggcttagcacactcacatagatgaacaaagaccttttggattagtttgcttgttgagcaaaattcaaagtgtaaggaagatgttttgtcttcttcttctctttgtgtccttccgttgaaaaataccatggtcaaatctttctacaatctgaaaagaaggtagccaagtgatagttcgtagttcaagaaacggtttcacgctatgttggtcctatatatatggctttagattttgacatttcgggagaactacagtgattggatcctaactgtagatatatagccttcatcaaaat

SEQ ID NO: 8227 - DNA, 2352 bp, Zea Mays
caacacatggcagaacagatcaatccaagggcatcgtgtgttgctggtgctaaacttgcagcgtgctttccgcaccttgacgccgtcgccttgatccactgcagctggagggtggcatcgcattcgcagccgccaaatcacatctatttatactcgtccggcaaggagtccaaagagtagtgacacgagaagaccaggggaggggagagccacaaatctccactgacgatgcaggacgccgtggcgacccacggccccgccaatgccgccgccggcgccaccttctactgcgccgccgccggcgtgtacgcgagcacgcaccctccggtggccctcccgtccgacccctccctctccctcgtcccgcacatcttcgcccgcctacccgccgcccgccccgacgccccggccctcgtcgacgccgccactgccgaggccctctcccgcgccgacctccgccgcctcgtatccgccctcgcggcgggcctccgccgccgtcggggcctccgtgagggggacgtcgtgctcctcgctctgccgaactccatcgccttccccgtcgcgttcctcgccgtcctcgccgccgggtccatcgccaccacaatgagcccgttcagcgcccccgccgagatcgccgctagggttcgggacaccagccccgccctcgtgttcgccacgctcgacaacgtcgggaagctcccgccgttgcgcgtcccggtcgtcctcgtccccgacgccttccacctcgcggacgagggcgcccccgagttcgcacccttccgcgagttgctgctgctcgattccgagccactgccgggcccttcggtcggtcaggacgacgcggccgccatcctctactcgtcggggacgggcggccggagcaagggcgtcgtgctcacgcaccgcaacctcatcgccacggtcgagctcttcgtgcacttcgaggcctcgcagtacgccgcacctgcttgtgataatgtctacctggcggcgctgcccatgttccacgtctacggactctcgctcttcgcggtgggacttctctcgctcggttccacggtggtcgtcatgaagaggttcgacgcaggcgaagccgttaagaccattcgcagattcaaagtcacgcacttcccggtcgttccgcccatcatggcggcgctggtgcacaccaccaagccagcggcaatgccgttggaatgcttggtgcaagtgtcaaccggtgcagcgccgtccagccgcaggctcatcgacgacttcgtcaaggctttccctcacgtcgatctcattcagggttatggcatgactgagtctgctgccgttggaactcgtggcttcaatacttcaaagcataagaagtatggttcagtaggactcctggctccaaacatgcatgcaagaattgttcatgtggaaactggttgctccttgcctccaggctcttgtggggagctctggctccatggtccagctataatgaaaggttacttgaatcatgttgatccatgcgcaataaatggtggctggctgcgaactggtgacattgcctacttcgatttcgatgggtacttgtatatagtgggccgcttgaaagaggtgatcaagtacaagggatttcagatagctccagctgacttggaagcagttttgatcgaacaccctggaattgttgatgtggctgtgacgtctactgaggatgaagaagctggagaggtaccagtagccttcgtggtgaggaaatctggaagtggcctatcgtgcacgcaagtgatggagtatgtagctaagcaggtgtccccgtataagaaggtgcggaaggtggtgttcgtggagtcgatccccaagtcgccggctggaaaggttctcaggaggcttctcagggaatctcttgcagctagcgctgttgctggtccaacaagttattccgagtccaattccatgcgccattcgagactgtaactgcaggacaaggccagccaagcaggatctcggtcaggaacagtttccagctttattttaggttgccgtgacctgaataggccttctgtatcacagttaggggcttagcacactcacatagatgaacaaagaccttttggattagtttgcttgttgagcaaaattcaaagtgtaaggaagatgttttgtcttcttcttctctttgtgtccttccgttgaaaaataccatggtcaaatctttctacaatctgaaaagaaggtagccaagtgatagttcgtagttcaagaaacggtttcacgctatgttggtcctatatatatggctttagattttgacatttcgggagaactacagtgattggatcctaactgtagatatatagccttcatcaaaat

SEQ ID NO: 8228 - DNA, 2662 bp, Zea Mays
cgcagaacatgtaccaaatttgtgctacaacttaatgtgattgttagaaacattcctcgtgtctcaagtcattcaacttctgaaacagtggatgagttcttccgaagaaatcacccagaccactatcttggtcatcagcctgtttacaatgcaaatcggtatgctaaacttgtgaagcaaaaggagaggctccaaaactggttggattactacgaactgaagttcgaaaggcatcctgagagaagaccaacaagacgggtaacttttccaacattgattctgttctcttacatttctggtgtgccatgttcttcaaatgtatccattctgtattttatttccaagaaatgggaaatggttcagcatgttgtttgttttatgtgttttagacaggatgccttggtttctgtggcagggaagtggatcaaatagactactaccgggctagaatcagcgagcttgagaggaggatgacatcagaacgacagaaaattctcaatgacccaaaagctgttatgccagtttcttttgtgacatttgactcgagatggggtgcggctgtgtgtgcacagacacaacagtcaaagaacccaacccaatggttgactgattgggctcctgaaccgcgggatgtttattggcaaaatcttgccatcccatttttctctctcagtatccgcaggtttctgatgtctgtcgctgtctttgctctagtgtttttctacatgatccccatcgcgtttgttcaatcgcttgccaatctcgagggtcttgaaaaagttgctccttttctgaagccagtaatagaagcacatgtggtaaaatctttccttcagggatttcttcctggtctggctctgaagatttttctctatattctccctactgtcctgctaatcatgtcaaaggttgaaggctatgtctctttatcctcgctggaaaggaggactgcttcgaaatattactacttcatgctggtgaacgtatttcttggaagcataatcgctggcacagcatttgaacagctatattcgtttctccaccagcctcctacacaaataccaaggaccattggggtagctataccaatgaaagccacatttttcatgacatacgtaatggtagatggctgggctggtattgctaacgagatccttcgagtgaaggctctggtgatataccatctgaagaacatgttcatcgtgaagacggagagggacagggatcgggcgatggatcccggcagcataggactcggagaaaacctcccgtcccttcagctgtatttcctcctcggcctcgtgtacgccgtcgttaccccgcttctcctgccgtttataatcgtcttcttcgcctttgctttcctcgtctacagacaccagatcatcaacgtgtacaatcaggagtacgagagtgctgctgcgttctggcctcaggtgcactcccggataatagctagcctactcatctctcatgtaactctgtttgggttgatgagcacaaaggaagctgcgtactccacccctctgctcatcttcctgcctctgctgacgatctggttccacaaatactgcaagagccggttcgaaccagctttcagaaagtatcctcttgaggaagcaatggcgaaggacaccatggagcacgcatcggagcctaacctgaacctggaatccttcctggctaacgcttacctgcaccccatcttccgccttttcgaggaagccgggaaagaggaggagacggtggaggtgaggatcgacaaagccgagaagcagcagcatcgccatgaggaggacgaggctcacgcgaggagctcgtcgcagtaccgggaggaggagactcacttcaggagcacgcacgagacgcattaccaccacgaggagagccacgtcagcaggagcacccagtatcatgagggcatccacgtgaggagcgacacggactcgccgtcgccgccacacttcgtctaccactacgacatccagcagtgatgatgtcgtctctaactttgttttcctgggtgtcttgtgaatgcttctcttggctaacctgtccagccccccccccccccccccccaagaggtttgctaaagtcgctgatgattgatgaattgttgcgtgtacatgcagggtagggtctagtgttgtagtgactgtaaaagttctggtgtgccatgggacctgaacattgattccatgcaggaaaaaaaagaagtggatgaatcaagttgagtattgcgtggtatacatgagaatgtcttcataattcatttgaaaacatggagattaaaaaaaataacaggctctgtatgcaagcactgcatagagcagcagatatgagcgtcggagacatgctcctggtcctggagactcatgtcatcatggttaaacatgcagcgacaatggtcaagctttgatcgatgttcggcaagtgccccagccacagccagcctgggaaggaaatctggaaatgatagcatgcatatagtttagaaatgtgtaaccaagtacctcatgatctatgaaagcatattccatgttgtattcttgaattggttgacaacgagttggcacctgcatcttagtaatggaattttctatttcttttttttttgaaaaaagagatattgagactcgattttagaggtgtcaatcagcc

SEQ ID NO: 8229 - DNA, 2851 bp, Zea Mays
ggataattcagccacagcaccaccacatggcattcagttattttactctatctacttcacgtttagccacatggccaatgctctgcatctacacaagatgttttggcctcaagatatttctgcccattacgactctcgcccttctggttcttatcccagtcaacgtatctggcggcacattacttgatctaagaaaggaagttgttttcagtgatatcgataagctttccatatcaaatgttagccctggatccaacagattctttatccatctcttgatggcatatgtgttcacattctgggtgtgctttatgctgtacaaagaatacagcaatgtagcatttatgaggttgcatttcctggcttcccagaagcgctgtgccgatcatttcacagtgattgttagaaacattcctcgtgtctcaagtcattcaacttctgaaacagtggatgagttcttccgaagaaatcacccagaccactatcttggtcatcagcaaaaggagaggctccaaaactggttggattactacgaactgaagttcgaaaggcatcctgagagaagaccaacaagacggacaggatgccttggtttctgtggcagggaagtggatcaaatagactactaccgggctagaatcagcgagcttgagaggaggatgacatcagaacgacagaaaattctcaatgacccaaaagctgttatgccagtttcttttgtgacatttgactcgagatggggtgcggctgtgtgtgcacagacacaacagtcaaagaacccaacccaatggttgactgattgggctcctgaaccgcgggatgtttattggcaaaatcttgccatcccatttttctctctcagtatccgcaggtttctgatgtctgtcgctgtctttgctctagtgtttttctacatgatccccatcgcgtttgttcaatcgcttgccaatctcgagggtcttgaaaaagttgctccttttctgaagccagtaatagaagcacatgtggtaaaatctttccttcagggatttcttcctggtctggctctgaagatttttctctatattctccctactgtcctgctaatcatgtcaaaggttgaaggctatgtctctttatcctcgctggaaaggaggactgcttcgaaatattactacttcatgctggtgaacgtatttcttggaagcataatcgctggcacagcatttgaacagctatattcgtttctccaccagcctcctacacaaataccaaggaccattggggtagctataccaatgaaagccacatttttcatgacatacgtaatggtagatggctgggctggtattgctaacgagatccttcgagtgaaggctctggtgatataccatctgaagaacatgttcatcgtgaagacggagagggacagggatcgggcgatggatcccggcagcataggactcggagaaaacctcccgtcccttcagctgtatttcctcctcggcctcgtgtacgccgtcgttaccccgcttctcctgccgtttataatcgtcttcttcgcctttgctttcctcgtctacagacaccagatcatcaacgtgtacaatcaggagtacgagagtgctgctgcgttctggcctcaggtgcactcccggataatagctagcctactcatctctcatgtaactctgtttgggttgatgagcacaaaggaagctgcgtactccacccctctgctcatcttcctgcctctgctgacgatctggttccacaaatactgcaagagccggttcgaaccagctttcagaaagtatcctcttgaggaagcaatggcgaaggacaccatggagcacgcatcggagcctaacctgaacctggaatccttcctggctaacgcttacctgcaccccatcttccgccttttcgaggaagccgggaaagaggaggagacggtggaggtgaggatcgacaaagccgagaagcagcagcatcgccatgaggaggacgaggctcacgcgaggagctcgtcgcagtaccgggaggaggagactcacttcaggagcacgcacgagacgcattaccaccacgaggagagccacgtcagcaggagcacccagtatcatgagggcatccacgtgaggagcgacacggactcgccgtcgccgccacacttcgtctaccactacgacatccagcagtgatgatgtcgtctctaactttgttttcctgggtgtcttgtgaatgcttctcttggctaacctgtccagccccccccccccccccccccaagaggtttgctaaagtcgctgatgattgatgaattgttgcgtgtacatgcagggtagggtctagtgttgtagtgactgtaaaagttctggtgtgccatgggacctgaacattgattccatgcaggaaaaaaaagaagtggatgaatcaagttgagtattgcgtggtatacatgagaatgtcttcataattcatttgaaaacatggagattaaaaaaaataacaggctctgtatgcaagcactgcatagagcagcagatatgagcgtcggagacatgctcctggtcctggagactcatgtcatcatggttaaacatgcagcgacaatggtcaagctttgatcgatgttcggcaagtgccccagccacagccagcctgggaaggaaatctggaaatgatagcatgcatatagtttagaaatgtgtaaccaagtacctcatgatctatgaaagcatattccatgttgtattcttgaattggttgacaacgagttggcacctgcatcttagtaatggaattttctatttcttttttttttgaaaaaagagatattgagactcgattttagaggtgtcaatcagcc

SEQ ID NO: 8230 - DNA, 2986 bp, Zea Mays
ccctctgctgcttctcccttcttctactactactactctactactactgcttgcttctcccttcttcttcttctgctaccaccactacccgcaatttctttcctgcgaaatcaattactactactactgctgcggttgcaattctggttggtctcactgctcgttcactctcggacgaggtctgccttagctaacgttcaagcctcaagatatttctgcccattacgactctcgcccttctggttcttatcccagtcaacgtatctggcggcacattacttgatctaagaaaggaagttgttttcagtgatatcgataagctttccatatcaaatgttagccctggatccaacagattctttatccatctcttgatggcatatgtgttcacattctgggtgtgctttatgctgtacaaagaatacagcaatgtagcatttatgaggttgcatttcctggcttcccagaagcgctgtgccgatcatttcacagtgattgttagaaacattcctcgtgtctcaagtcattcaacttctgaaacagtggatgagttcttccgaagaaatcacccagaccactatcttggtcatcagcctgtttacaatgcaaatcggtatgctaaacttgtgaagcaaaaggagaggctccaaaactggttggattactacgaactgaagttcgaaaggcatcctgagagaagaccaacaagacggacaggatgccttggtttctgtggcagggaagtggatcaaatagactactaccgggctagaatcagcgagcttgagaggaggatgacatcagaacgacagaaaattctcaatgacccaaaagctgttatgccagtttcttttgtgacatttgactcgagatggggtgcggctgtgtgtgcacagacacaacagtcaaagaacccaacccaatggttgactgattgggctcctgaaccgcgggatgtttattggcaaaatcttgccatcccatttttctctctcagtatccgcaggtttctgatgtctgtcgctgtctttgctctagtgtttttctacatgatccccatcgcgtttgttcaatcgcttgccaatctcgagggtcttgaaaaagttgctccttttctgaagccagtaatagaagcacatgtggtaaaatctttccttcagggatttcttcctggtctggctctgaagatttttctctatattctccctactgtcctgctaatcatgtcaaaggttgaaggctatgtctctttatcctcgctggaaaggaggactgcttcgaaatattactacttcatgctggtgaacgtatttcttggaagcataatcgctggcacagcatttgaacagctatattcgtttctccaccagcctcctacacaaataccaaggaccattggggtagctataccaatgaaagccacatttttcatgacatacgtaatggtagatggctgggctggtattgctaacgagatccttcgagtgaaggctctggtgatataccatctgaagaacatgttcatcgtgaagacggagagggacagggatcgggcgatggatcccggcagcataggactcggagaaaacctcccgtcccttcagctgtatttcctcctcggcctcgtgtacgccgtcgttaccccgcttctcctgccgtttataatcgtcttcttcgcctttgctttcctcgtctacagacaccagatcatcaacgtgtacaatcaggagtacgagagtgctgctgcgttctggcctcaggtgcactcccggataatagctagcctactcatctctcatgtaactctgtttgggttgatgagcacaaaggaagctgcgtactccacccctctgctcatcttcctgcctctgctgacgatctggttccacaaatactgcaagagccggttcgaaccagctttcagaaagtatcctcttgaggaagcaatggcgaaggacaccatggagcacgcatcggagcctaacctgaacctggaatccttcctggctaacgcttacctgcaccccatcttccgccttttcgaggaagccgggaaagaggaggagacggtggaggtgaggatcgacaaagccgagaagcagcagcatcgccatgaggaggacgaggctcacgcgaggagctcgtcgcagtaccgggaggaggagactcacttcaggagcacgcacgagacgcattaccaccacgaggagagccacgtcagcaggagcacccagtatcatgagggcatccacgtgaggagcgacacggactcgccgtcgccgccacacttcgtctaccactacgacatccagcagtgatgatgtcgtctctaactttgttttcctgggtgtcttgtgaatgcttctcttggctaacctgtccagccccccccccccccccccccaagaggtttgctaaagtcgctgatgattgatgaattgttgcgtgtacatgcagggtagggtctagtgttgtagtgactgtaaaagttctggtgtgccatgggacctgaacattgattccatgcaggaaaaaaaagaagtggatgaatcaagttgagtattgcgtggtatacatgagaatgtcttcataattcatttgaaaacatggagattaaaaaaaataacaggctctgtatgcaagcactgcatagagcagcagatatgagcgtcggagacatgctcctggtcctggagactcatgtcatcatggttaaacatgcagcgacaatggtcaagctttgatcgatgttcggcaagtgccccagccacagccagcctgggaaggaaatctggaaatgatagcatgcatatagtttagaaatgtgtaaccaagtacctcatgatctatgaaagcatattccatgttgtattcttgaattggttgacaacgagttggcacctgcatcttagtaatggaattttctatttcttttttttttgaaaaaagagatattgagactcgattttagaggtgtcaatcagcc

SEQ ID NO: 8231 - DNA, 4580 bp, Zea Mays
gtacgccgcgcgcccgcaattctctcttccgccgctccccctctgctgcttctcccttcttctactactactactctactactactgcttgcttctcccttcttcttcttctgctaccaccactacccgcaatttctttcctgcgaaatcaattactactactactgctgcggttgcaattctggttggtctcactgctcgttcactctcggacgaggtctgccttagctaacgttcaaggtgcatctttttcttttctcatcttctgttcgtggtgtgtgctacttgctgcaatcgtttcgctctggagtgccagcaaacaaatgcatcattctctcctccaacgattcaacaaaaccaccggcgtcgaggtcgaggggatggagttcgtaatctatcgcactttcccccctcttttgctgaactcctcctgcaaacggcggatttttctccatgagttttaatgacggttttccagatttccatcgccagctttgcctgcctgtatgcatacgagggtttgcgtctggctaccgcattcctctcggcaacttgctttccatatttaattacggaaccttttgagcagttgtgcttgtttcctcgtctcacgcacagcatagaaagccgtcacatttaggcactctgcaaattgctagatgaaacaaataaaaaaaccggcaattttccccttccaaaaaatataattgcttgattatccttccagaaataacagcgcgttttccttccaacgagaattgcaagatcttttccttccagaaaataaactaatcagtaccattttatttcagagaagtctttgataactattactacattgcacacagcacactatacttatcgctttcacgcaatctgcataatccagtgacagaacagaatttgcttgtgtttgatgatacagaatttggtgtggtaatgttgtccctagcacgtttcgtctgtagtgccccattcagtcgtggcgtcgaaactggtgccgttaattagtctctgatttgatccgcacgattcctggctttctttcaggacggcacagacttctgtggttccatcattgatttcctagcttagtgctcgcccactacaaaccaacgcgctcacgctcacgggcccggacatatttttgttcccttgtcattgtggctgtggcagcgtcgcgttctcatcaatatagctggggagtgggggaccgctccttacaactggagatgcttttcttgtagttctactacttgtttggaactttggatgaaaattcactcaaaaggtttcccatttgggggtgcaactttgaccaaagaaggcacgatgcaaaatttcattttgctgggcgtctttgctttgtcggctctctacaagctgtacaactacttatgctactacgggctgaacagaggataattcagccacagcaccaccacatggcattcagttattttactctatctacttcacgtttagccacatggccaatgctctgcatctacacaagatgttttgggtaatttcaaccgaagttgcaaaggctgtaatgctgtggcctttgcctctttccccccttgttttgcaatgcaaaatcagggattgccctgccaggggggggggaggcttgtctctatagcaataagagatttgattatgggatagattttttttgcattgacaaataagggattgccctaaaaacgcatcaattttctggcagcacaataagacaggctgccctcaagtcaatgcagcatgctaacacatcttttccgtctccttggcagcctcaagatatttctgcccattacgactctcgcccttctggttcttatcccagtcaacgtatctggcggcacattacttgatctaagaaaggaagttgttttcagtgatatcgataagctttccatatcaaatgttagccctggatccaacagattctttatccatctcttgatggcatatgtgttcacattctgggtgtgctttatgctgtacaaagaatacagcaatgtagcatttatgaggttgcatttcctggcttcccagaagcgctgtgccgatcatttcacagtgattgttagaaacattcctcgtgtctcaagtcattcaacttctgaaacagtggatgagttcttccgaagaaatcacccagaccactatcttggtcatcagcctgtttacaatgcaaatcggtatgctaaacttgtgaagcaaaaggagaggctccaaaactggttggattactacgaactgaagttcgaaaggcatcctgagagaagaccaacaagacggacaggatgccttggtttctgtggcagggaagtggatcaaatagactactaccgggctagaatcagcgagcttgagaggaggatgacatcagaacgacagaaaattctcaatgacccaaaagctgttatgccagtttcttttgtgacatttgactcgagatggggtgcggctgtgtgtgcacagacacaacagtcaaagaacccaacccaatggttgactgattgggctcctgaaccgcgggatgtttattggcaaaatcttgccatcccatttttctctctcagtatccgcaggtttctgatgtctgtcgctgtctttgctctagtgtttttctacatgatccccatcgcgtttgttcaatcgcttgccaatctcgagggtcttgaaaaagttgctccttttctgaagccagtaatagaagcacatgtggtaaaatctttccttcagggatttcttcctggtctggctctgaagatttttctctatattctccctactgtcctgctaatcatgtcaaaggttgaaggctatgtctctttatcctcgctggaaaggaggactgcttcgaaatattactacttcatgctggtgaacgtatttcttggaagcataatcgctggcacagcatttgaacagctatattcgtttctccaccagcctcctacacaaataccaaggaccattggggtagctataccaatgaaagccacatttttcatgacatacgtaatggtagatggctgggctggtattgctaacgagatccttcgagtgaaggctctggtgatataccatctgaagaacatgttcatcgtgaagacggagagggacagggatcgggcgatggatcccggcagcataggactcggagaaaacctcccgtcccttcagctgtatttcctcctcggcctcgtgtacgccgtcgttaccccgcttctcctgccgtttataatcgtcttcttcgcctttgctttcctcgtctacagacaccagatcatcaacgtgtacaatcaggagtacgagagtgctgctgcgttctggcctcaggtgcactcccggataatagctagcctactcatctctcatgtaactctgtttgggttgatgagcacaaaggaagctgcgtactccacccctctgctcatcttcctgcctctgctgacgatctggttccacaaatactgcaagagccggttcgaaccagctttcagaaagtatcctcttgaggaagcaatggcgaaggacaccatggagcacgcatcggagcctaacctgaacctggaatccttcctggctaacgcttacctgcaccccatcttccgccttttcgaggaagccgggaaagaggaggagacggtggaggtgaggatcgacaaagccgagaagcagcagcatcgccatgaggaggacgaggctcacgcgaggagctcgtcgcagtaccgggaggaggagactcacttcaggagcacgcacgagacgcattaccaccacgaggagagccacgtcagcaggagcacccagtatcatgagggcatccacgtgaggagcgacacggactcgccgtcgccgccacacttcgtctaccactacgacatccagcagtgatgatgtcgtctctaactttgttttcctgggtgtcttgtgaatgcttctcttggctaacctgtccagccccccccccccccccccccaagaggtttgctaaagtcgctgatgattgatgaattgttgcgtgtacatgcagggtagggtctagtgttgtagtgactgtaaaagttctggtgtgccatgggacctgaacattgattccatgcaggaaaaaaaagaagtggatgaatcaagttgagtattgcgtggtatacatgagaatgtcttcataattcatttgaaaacatggagattaaaaaaaataacaggctctgtatgcaagcactgcatagagcagcagatatgagcgtcggagacatgctcctggtcctggagactcatgtcatcatggttaaacatgcagcgacaatggtcaagctttgatcgatgttcggcaagtgccccagccacagccagcctgggaaggaaatctggaaatgatagcatgcatatagtttagaaatgtgtaaccaagtacctcatgatctatgaaagcatattccatgttgtattcttgaattggttgacaacgagttggcacctgcatcttagtaatggaattttctatttcttttttttttgaaaaaagagatattgagactcgattttagaggtgtcaatcagcc

SEQ ID NO: 8232 - DNA, 5188 bp, Zea Mays
ccgcgtcccgcgtgcgtcgtgcggcgctctcccgatcccgagtgcatgctacctcacctgcgtgtgcgccgcgtttcaactcgagaaagaagacacaccgtcgcggcgcacgcggcctctggtttctgatttcctggttaccctttccctccctgcatttgcctttcagatcaggcggcagcaccttcctctcctccccttcccttccgtctcatcttcgttcccttccggggtcatcccttccgtcctcctcctaccaagtcccaaggccgcgagacagacagacagacagacagaaagagagagcagagcagacaatggcgacgctcgaggacctgggcgtctccgccttcatcaacatcctgggcgccttcgtcttcctgctcctcttcgccgtcctccgcatccagcccgtcaacgaccgcgtctacttccccaagctctacctcgcgcacaagcgccaccagcacgaccacgccgcccgctccgccttccgccgcttcgtcaacctcaacctctgcacctacgtcaccttcctcagctgggtgcccggcgcgctccgcatgtccgagccggacctcgtcgcccacgccgggctcgactccgccgtctaccttagaatctacacgctcgggtacgccgcgcgcccgcaattctctcttccgccgctccccctctgctgcttctcccttcttctactactactactctactactactgcttgcttctcccttcttcttcttctgctaccaccactacccgcaatttctttcctgcgaaatcaattactactactactgctgcggttgcaattctggttggtctcactgctcgttcactctcggacgaggtctgccttagctaacgttcaaggtgcatctttttcttttctcatcttctgttcgtggtgtgtgctacttgctgcaatcgtttcgctctggagtgccagcaaacaaatgcatcattctctcctccaacgattcaacaaaaccaccggcgtcgaggtcgaggggatggagttcgtaatctatcgcactttcccccctcttttgctgaactcctcctgcaaacggcggatttttctccatgagttttaatgacggttttccagatttccatcgccagctttgcctgcctgtatgcatacgagggtttgcgtctggctaccgcattcctctcggcaacttgctttccatatttaattacggaaccttttgagcagttgtgcttgtttcctcgtctcacgcacagcatagaaagccgtcacatttaggcactctgcaaattgctagatgaaacaaataaaaaaaccggcaattttccccttccaaaaaatataattgcttgattatccttccagaaataacagcgcgttttccttccaacgagaattgcaagatcttttccttccagaaaataaactaatcagtaccattttatttcagagaagtctttgataactattactacattgcacacagcacactatacttatcgctttcacgcaatctgcataatccagtgacagaacagaatttgcttgtgtttgatgatacagaatttggtgtggtaatgttgtccctagcacgtttcgtctgtagtgccccattcagtcgtggcgtcgaaactggtgccgttaattagtctctgatttgatccgcacgattcctggctttctttcaggacggcacagacttctgtggttccatcattgatttcctagcttagtgctcgcccactacaaaccaacgcgctcacgctcacgggcccggacatatttttgttcccttgtcattgtggctgtggcagcgtcgcgttctcatcaatatagctggggagtgggggaccgctccttacaactggagatgcttttcttgtagttctactacttgtttggaactttggatgaaaattcactcaaaaggtttcccatttgggggtgcaactttgaccaaagaaggcacgatgcaaaatttcattttgctgggcgtctttgctttgtcggctctctacaagctgtacaactacttatgctactacgggctgaacagaggataattcagccacagcaccaccacatggcattcagttattttactctatctacttcacgtttagccacatggccaatgctctgcatctacacaagatgttttgggtaatttcaaccgaagttgcaaaggctgtaatgctgtggcctttgcctctttccccccttgttttgcaatgcaaaatcagggattgccctgccaggggggggggaggcttgtctctatagcaataagagatttgattatgggatagattttttttgcattgacaaataagggattgccctaaaaacgcatcaattttctggcagcacaataagacaggctgccctcaagtcaatgcagcatgctaacacatcttttccgtctccttggcagcctcaagatatttctgcccattacgactctcgcccttctggttcttatcccagtcaacgtatctggcggcacattacttgatctaagaaaggaagttgttttcagtgatatcgataagctttccatatcaaatgttagccctggatccaacagattctttatccatctcttgatggcatatgtgttcacattctgggtgtgctttatgctgtacaaagaatacagcaatgtagcatttatgaggttgcatttcctggcttcccagaagcgctgtgccgatcatttcacagtgattgttagaaacattcctcgtgtctcaagtcattcaacttctgaaacagtggatgagttcttccgaagaaatcacccagaccactatcttggtcatcagcctgtttacaatgcaaatcggtatgctaaacttgtgaagcaaaaggagaggctccaaaactggttggattactacgaactgaagttcgaaaggcatcctgagagaagaccaacaagacggggaagtggatcaaatagactactaccgggctagaatcagcgagcttgagaggaggatgacatcagaacgacagaaaattctcaatgacccaaaagctgttatgccagtttcttttgtgacatttgactcgagatggggtgcggctgtgtgtgcacagacacaacagtcaaagaacccaacccaatggttgactgattgggctcctgaaccgcgggatgtttattggcaaaatcttgccatcccatttttctctctcagtatccgcaggtttctgatgtctgtcgctgtctttgctctagtgtttttctacatgatccccatcgcgtttgttcaatcgcttgccaatctcgagggtcttgaaaaagttgctccttttctgaagccagtaatagaagcacatgtggtaaaatctttccttcagggatttcttcctggtctggctctgaagatttttctctatattctccctactgtcctgctaatcatgtcaaaggttgaaggctatgtctctttatcctcgctggaaaggaggactgcttcgaaatattactacttcatgctggtgaacgtatttcttggaagcataatcgctggcacagcatttgaacagctatattcgtttctccaccagcctcctacacaaataccaaggaccattggggtagctataccaatgaaagccacatttttcatgacatacgtaatggtagatggctgggctggtattgctaacgagatccttcgagtgaaggctctggtgatataccatctgaagaacatgttcatcgtgaagacggagagggacagggatcgggcgatggatcccggcagcataggactcggagaaaacctcccgtcccttcagctgtatttcctcctcggcctcgtgtacgccgtcgttaccccgcttctcctgccgtttataatcgtcttcttcgcctttgctttcctcgtctacagacaccagatcatcaacgtgtacaatcaggagtacgagagtgctgctgcgttctggcctcaggtgcactcccggataatagctagcctactcatctctcatgtaactctgtttgggttgatgagcacaaaggaagctgcgtactccacccctctgctcatcttcctgcctctgctgacgatctggttccacaaatactgcaagagccggttcgaaccagctttcagaaagtatcctcttgaggaagcaatggcgaaggacaccatggagcacgcatcggagcctaacctgaacctggaatccttcctggctaacgcttacctgcaccccatcttccgccttttcgaggaagccgggaaagaggaggagacggtggaggtgaggatcgacaaagccgagaagcagcagcatcgccatgaggaggacgaggctcacgcgaggagctcgtcgcagtaccgggaggaggagactcacttcaggagcacgcacgagacgcattaccaccacgaggagagccacgtcagcaggagcacccagtatcatgagggcatccacgtgaggagcgacacggactcgccgtcgccgccacacttcgtctaccactacgacatccagcagtgatgatgtcgtctctaactttgttttcctgggtgtcttgtgaatgcttctcttggctaacctgtccagccccccccccccccccccccaagaggtttgctaaagtcgctgatgattgatgaattgttgcgtgtacatgcagggtagggtctagtgttgtagtgactgtaaaagttctggtgtgccatgggacctgaacattgattccatgcaggaaaaaaaagaagtggatgaatcaagttgagtattgcgtggtatacatgagaatgtcttcataattcatttgaaaacatggagattaaaaaaaataacaggctctgtatgcaagcactgcatagagcagcagatatgagcgtcggagacatgctcctggtcctggagactcatgtcatcatggttaaacatgcagcgacaatggtcaagctttgatcgatgttcggcaagtgccccagccacagccagcctgggaaggaaatctggaaatgatagcatgcatatagtttagaaatgtgtaaccaagtacctcatgatctatgaaagcatattccatgttgtattcttgaattggttgacaacgagttggcacctgcatcttagtaatggaattttctatttcttttttttttgaaaaaagagatattgagactcgattttagaggtgtcaatcagcc

SEQ ID NO: 8233 - DNA, 3461 bp, Zea Mays
aactggccagcaccacgcaacagctagactagactggtagaagagctagactgctagagcctagagccgccgcgtcccgcgtgcgtcgtgcggcgctctcccgatcccgagtgcatgctacctcacctgcgtgtgcgccgcgtttcaactcgagaaagaagacacaccgtcgcggcgcacgcggcctctggtttctgatttcctggttaccctttccctccctgcatttgcctttcagatcaggcggcagcaccttcctctcctccccttcccttccgtctcatcttcgttcccttccggggtcatcccttccgtcctcctcctaccaagtcccaaggccgcgagacagacagacagacagacagaaagagagagcagagcagacaatggcgacgctcgaggacctgggcgtctccgccttcatcaacatcctgggcgccttcgtcttcctgctcctcttcgccgtcctccgcatccagcccgtcaacgaccgcgtctacttccccaagctctacctcgcgcacaagcgccaccagcacgaccacgccgcccgctccgccttccgccgcttcgtcaacctcaacctctgcacctacgtcaccttcctcagctgggtgcccggcgcgctccgcatgtccgagccggacctcgtcgcccacgccgggctcgactccgccgtctaccttagaatctacacgctcggcctcaagatatttctgcccattacgactctcgcccttctggttcttatcccagtcaacgtatctggcggcacattacttgatctaagaaaggaagttgttttcagtgatatcgataagctttccatatcaaatgttagccctggatccaacagattctttatccatctcttgatggcatatgtgttcacattctgggtgtgctttatgctgtacaaagaatacagcaatgtagcatttatgaggttgcatttcctggcttcccagaagcgctgtgccgatcatttcacagtgattgttagaaacattcctcgtgtctcaagtcattcaacttctgaaacagtggatgagttcttccgaagaaatcacccagaccactatcttggtcatcagcctgtttacaatgcaaatcggtatgctaaacttgtgaagcaaaaggagaggctccaaaactggttggattactacgaactgaagttcgaaaggcatcctgagagaagaccaacaagacggggaagtggatcaaatagactactaccgggctagaatcagcgagcttgagaggaggatgacatcagaacgacagaaaattctcaatgacccaaaagctgttatgccagtttcttttgtgacatttgactcgagatggggtgcggctgtgtgtgcacagacacaacagtcaaagaacccaacccaatggttgactgattgggctcctgaaccgcgggatgtttattggcaaaatcttgccatcccatttttctctctcagtatccgcaggtttctgatgtctgtcgctgtctttgctctagtgtttttctacatgatccccatcgcgtttgttcaatcgcttgccaatctcgagggtcttgaaaaagttgctccttttctgaagccagtaatagaagcacatgtggtaaaatctttccttcagggatttcttcctggtctggctctgaagatttttctctatattctccctactgtcctgctaatcatgtcaaaggttgaaggctatgtctctttatcctcgctggaaaggaggactgcttcgaaatattactacttcatgctggtgaacgtatttcttggaagcataatcgctggcacagcatttgaacagctatattcgtttctccaccagcctcctacacaaataccaaggaccattggggtagctataccaatgaaagccacatttttcatgacatacgtaatggtagatggctgggctggtattgctaacgagatccttcgagtgaaggctctggtgatataccatctgaagaacatgttcatcgtgaagacggagagggacagggatcgggcgatggatcccggcagcataggactcggagaaaacctcccgtcccttcagctgtatttcctcctcggcctcgtgtacgccgtcgttaccccgcttctcctgccgtttataatcgtcttcttcgcctttgctttcctcgtctacagacaccagatcatcaacgtgtacaatcaggagtacgagagtgctgctgcgttctggcctcaggtgcactcccggataatagctagcctactcatctctcatgtaactctgtttgggttgatgagcacaaaggaagctgcgtactccacccctctgctcatcttcctgcctctgctgacgatctggttccacaaatactgcaagagccggttcgaaccagctttcagaaagtatcctcttgaggaagcaatggcgaaggacaccatggagcacgcatcggagcctaacctgaacctggaatccttcctggctaacgcttacctgcaccccatcttccgccttttcgaggaagccgggaaagaggaggagacggtggaggtgaggatcgacaaagccgagaagcagcagcatcgccatgaggaggacgaggctcacgcgaggagctcgtcgcagtaccgggaggaggagactcacttcaggagcacgcacgagacgcattaccaccacgaggagagccacgtcagcaggagcacccagtatcatgagggcatccacgtgaggagcgacacggactcgccgtcgccgccacacttcgtctaccactacgacatccagcagtgatgatgtcgtctctaactttgttttcctgggtgtcttgtgaatgcttctcttggctaacctgtccagccccccccccccccccccccaagaggtttgctaaagtcgctgatgattgatgaattgttgcgtgtacatgcagggtagggtctagtgttgtagtgactgtaaaagttctggtgtgccatgggacctgaacattgattccatgcaggaaaaaaaagaagtggatgaatcaagttgagtattgcgtggtatacatgagaatgtcttcataattcatttgaaaacatggagattaaaaaaaataacaggctctgtatgcaagcactgcatagagcagcagatatgagcgtcggagacatgctcctggtcctggagactcatgtcatcatggttaaacatgcagcgacaatggtcaagctttgatcgatgttcggcaagtgccccagccacagccagcctgggaaggaaatctggaaatgatagcatgcatatagtttagaaatgtgtaaccaagtacctcatgatctatgaaagcatattccatgttgtattcttgaattggttgacaacgagttggcacctgcatcttagtaatggaattttctatttcttttttttttgaaaaaagagatattgagactcgattttagaggtgtcaatcagcc

SEQ ID NO: 8234 - DNA, 3484 bp, Zea Mays
caactggccagcaccacgcaacagctagactagactggtagaagagctagactgctagagcctagagccgccgcgtcccgcgtgcgtcgtgcggcgctctcccgatcccgagtgcatgctacctcacctgcgtgtgcgccgcgtttcaactcgagaaagaagacacaccgtcgcggcgcacgcggcctctggtttctgatttcctggttaccctttccctccctgcatttgcctttcagatcaggcggcagcaccttcctctcctccccttcccttccgtctcatcttcgttcccttccggggtcatcccttccgtcctcctcctaccaagtcccaaggccgcgagacagacagacagacagacagaaagagagagcagagcagacaatggcgacgctcgaggacctgggcgtctccgccttcatcaacatcctgggcgccttcgtcttcctgctcctcttcgccgtcctccgcatccagcccgtcaacgaccgcgtctacttccccaagctctacctcgcgcacaagcgccaccagcacgaccacgccgcccgctccgccttccgccgcttcgtcaacctcaacctctgcacctacgtcaccttcctcagctgggtgcccggcgcgctccgcatgtccgagccggacctcgtcgcccacgccgggctcgactccgccgtctaccttagaatctacacgctcggcctcaagatatttctgcccattacgactctcgcccttctggttcttatcccagtcaacgtatctggcggcacattacttgatctaagaaaggaagttgttttcagtgatatcgataagctttccatatcaaatgttagccctggatccaacagattctttatccatctcttgatggcatatgtgttcacattctgggtgtgctttatgctgtacaaagaatacagcaatgtagcatttatgaggttgcatttcctggcttcccagaagcgctgtgccgatcatttcacagtgattgttagaaacattcctcgtgtctcaagtcattcaacttctgaaacagtggatgagttcttccgaagaaatcacccagaccactatcttggtcatcagcctgtttacaatgcaaatcggtatgctaaacttgtgaagcaaaaggagaggctccaaaactggttggattactacgaactgaagttcgaaaggcatcctgagagaagaccaacaagacgggatgccttggtttctgtggcagggaagtggatcaaatagactactaccgggctagaatcagcgagcttgagaggaggatgacatcagaacgacagaaaattctcaatgacccaaaagctgttatgccagtttcttttgtgacatttgactcgagatggggtgcggctgtgtgtgcacagacacaacagtcaaagaacccaacccaatggttgactgattgggctcctgaaccgcgggatgtttattggcaaaatcttgccatcccatttttctctctcagtatccgcaggtttctgatgtctgtcgctgtctttgctctagtgtttttctacatgatccccatcgcgtttgttcaatcgcttgccaatctcgagggtcttgaaaaagttgctccttttctgaagccagtaatagaagcacatgtggtaaaatctttccttcagggatttcttcctggtctggctctgaagatttttctctatattctccctactgtcctgctaatcatgtcaaaggttgaaggctatgtctctttatcctcgctggaaaggaggactgcttcgaaatattactacttcatgctggtgaacgtatttcttggaagcataatcgctggcacagcatttgaacagctatattcgtttctccaccagcctcctacacaaataccaaggaccattggggtagctataccaatgaaagccacatttttcatgacatacgtaatggtagatggctgggctggtattgctaacgagatccttcgagtgaaggctctggtgatataccatctgaagaacatgttcatcgtgaagacggagagggacagggatcgggcgatggatcccggcagcataggactcggagaaaacctcccgtcccttcagctgtatttcctcctcggcctcgtgtacgccgtcgttaccccgcttctcctgccgtttataatcgtcttcttcgcctttgctttcctcgtctacagacaccagatcatcaacgtgtacaatcaggagtacgagagtgctgctgcgttctggcctcaggtgcactcccggataatagctagcctactcatctctcatgtaactctgtttgggttgatgagcacaaaggaagctgcgtactccacccctctgctcatcttcctgcctctgctgacgatctggttccacaaatactgcaagagccggttcgaaccagctttcagaaagtatcctcttgaggaagcaatggcgaaggacaccatggagcacgcatcggagcctaacctgaacctggaatccttcctggctaacgcttacctgcaccccatcttccgccttttcgaggaagccgggaaagaggaggagacggtggaggtgaggatcgacaaagccgagaagcagcagcatcgccatgaggaggacgaggctcacgcgaggagctcgtcgcagtaccgggaggaggagactcacttcaggagcacgcacgagacgcattaccaccacgaggagagccacgtcagcaggagcacccagtatcatgagggcatccacgtgaggagcgacacggactcgccgtcgccgccacacttcgtctaccactacgacatccagcagtgatgatgtcgtctctaactttgttttcctgggtgtcttgtgaatgcttctcttggctaacctgtccagccccccccccccccccccccaagaggtttgctaaagtcgctgatgattgatgaattgttgcgtgtacatgcagggtagggtctagtgttgtagtgactgtaaaagttctggtgtgccatgggacctgaacattgattccatgcaggaaaaaaaagaagtggatgaatcaagttgagtattgcgtggtatacatgagaatgtcttcataattcatttgaaaacatggagattaaaaaaaataacaggctctgtatgcaagcactgcatagagcagcagatatgagcgtcggagacatgctcctggtcctggagactcatgtcatcatggttaaacatgcagcgacaatggtcaagctttgatcgatgttcggcaagtgccccagccacagccagcctgggaaggaaatctggaaatgatagcatgcatatagtttagaaatgtgtaaccaagtacctcatgatctatgaaagcatattccatgttgtattcttgaattggttgacaacgagttggcacctgcatcttagtaatggaattttctatttcttttttttttgaaaaaagagatattgagactcgattttagaggtgtcaatcagcc

SEQ ID NO: 8235 - DNA, 1169 bp, Zea Mays
cttaaggcctattcaacctgccggtgtttgacgtcgaggaagcggctacataacaatgacgacaagacgtagcaagcgcaacaatggccatctatgatgtaatgcagcttgtgagggcagacgtgtccactattggaatgggcatagctggatcaacagcttctataatccttggtggtggcacgaagggcaagcgatttgccatgcccaacaccaggattatgatccatcagcctgtcggaggtgcaagcgggcaggccctagatgtagaggtccaagcgaaggagatattgaccaacaagaggaatgtcattcggatcgtatcaggcttcacaggccgcactcctgagcaggtagagaaagacattgacagagatcgttacatgggccctctcgaggctgtcgattatggactcattgatggcgtgatcgatggagacagtattatcccacttgagcctgtcccggagagggtgaagcctaagtacaactacgaagagctgtacaaggatccacagaagtttcttacaccagatgtcccagatgatgagatatactagtcgaaaagttgtattttgtgcgaatgttaagtctgttcttcagcaagcagatgtttttcgtcgcttgtagctgtcaaaccaaccatagcactagtagcttattgatcttgtttactgactggatggtgattcgagcaggcaactagaacctgttggttgtgtttctggtgttacattgtggtgttagaatggtccggctgtttcgttttgagtcctgaccatttcaggtgtggtacgttgagatcagttaactgttcgtttttttttttttgaccaccagcaaaagcttctacatcccatttcaaaacattttctttatcatgataagtcttataaaatacaaagaatacataactgtaaagtcagtatggcatgcaattgtgactgctcgattgacgattggctggaaatccgtgtttccagagacagatttcaaaggagagtaaaaagttctcagctcaacgtgttctctaatttattcgctgtcatgtggccaccaaaacaggatgaagagtttgccgtgaagtatttctttcttaagctcaaaagtacagtaatggatacaacaatcagattatttagaataggagaaaaaaaagaatacaccaa

SEQ ID NO: 8236 - DNA, 1301 bp, Zea Mays
gaccctttattagttcttgtgtttgaggaattagagactaaaaagaactaaaaagtagggactaaagattagtcctatggaaccaagcagagcctaagtcgcaccgtccaggtgtcaactgcaagggaaaacaaagagtgtgtgctgtgtgttatccatttcttctcctctctgctctgttcacttcgttctagtggggagcgccgccgctgcagttgccgccgccaccagagcagtccacctcggtctgatatggcgaccgggagtgcaagtgccatcgcgtccttctccgtggcggcggcagcggctgctgctctgcgcgtcaggcggccatgcgctcgcgcttgcgcttgggccccctcgcagcgaccgcagcaaggggcactcgtcagcctcaagccttgcgcctcactggcaccacaagctcctctgtggcgcgcggagtcggatgccgcggggggtggtgccggcgccggcgatgtcatgggcctcctcctccgggagcgcatagtcttcctcggcaacgagatcgaggacttcctcgcggacgccgtcgtcagccagctcctcctccttgacgccatcgacccggactctgacatccgcctcttcgtcaactcaccagggggatcccttagcgcaacaatggccatctatgatgtaatgcagcttgtgagggcagacgtgtccactattggaatgggcatagctggatcaacagcttctataatccttggtggtggcacgaagggcaagcgatttgccatgcccaacaccaggattatgatccatcagcctgtcggaggtgcaagcgggcaggccctagatgtagaggtccaagcgaaggagatattgaccaacaagaggaatgtcattcggatcgtatcaggcttcacaggccgcactcctgagcaggtagagaaagacattgacagagatcgttacatgggccctctcgaggctgtcgattatggactcattgatggcgtgatcgatggagacagtattatcccacttgagcctgtcccggagagggtgaagcctaagtacaactacgaagagctgtacaaggatccacagaagtttcttacaccagatgtcccagatgatgagatatactagtcgaaaagttgtattttgtgcgaatgttaagtctgttcttcagcaagcagatgtttttcgtcgcttgtagctgtcaaaccaaccatagcactagtagcttattgatcttgtttactgactggatggtgattcgagcaggcaactagaacctgttggttgtaaaaaaaagaatacaccaa

SEQ ID NO: 8237 - DNA, 358 bp, Zea Mays
cctcgatcacaactgctcctctctccactcccctcttcctcgacagatcctcaatcaagcttcatctgtgccgtcgtcggcaatggctccggccttcccacgccgccgtccaacctcccccgactctcctcctcacaccgccgccgctcccatggcccaccctccctgctcgcctccatggccacctggaggcggattcggcctccccgagtcaccgcccaacgtctcgccgcccaaccaaagcgagaaatccactgggcgaagcttctgcacctcccgaacgggggaggggaggggagcacgccagcactatgtgcctgcggatccatgtttggatgatgaaaacagctactcgatg

SEQ ID NO: 8238 - DNA, 773 bp, Zea Mays
cctcgatcacaactgctcctctctccactcccctcttcctcgacagatcctcaatcaagcttcatctgtgccgtcgtcggcaatggctccggccttcccacgccgccgtccaacctcccccgactctcctcctcacaccgccgccgctcccatggcccaccctccctgctcgcctccatggccacctggaggcggattcggcctccccgagtcaccgcccaacgtctcgccgcccaaccaaagcgagaaatccactgggcgaagcttctgcacctcccgaacgggggaggggaggggagcacgccagcactatgtgcctgcgggtagggtttctcccggtccgatggcgtccgccatgtcgtcgaggtcacgacccgccggccacttcggagtgttcccggtgaacgctatggccggcacgggaggcagcgacggtggggtgcagctcgcggacaagctcaagataatcaagactgacaactttgaccccgacgcctacgtgcagtccaagtgccgcgccatggacgagaagagacaagattatcctacatgttgtcttgtggttcactggagaggctgctcaacatgaggaatctgaagttatggatggtgaggatgacgatgatgaagacgatgatgacgaggatgatgatgattatgatacaaagaagaacaagggaactgctggaggggaagggcaacagggaaaacgacctacaaagtgcaagcagcagtgagatccatgtttggatgatgaaaacagctactcgatg

SEQ ID NO: 8239 - DNA, 1050 bp, Zea Mays
cttggcggctccaccttacgccatgcagaataatcttaggccttgaaaatggttgtctttgtcatgcaacaagctgtttggaatgttgacactaataatgaggcagttcaaggtttcaggagatctttacatgatgagacaagattatcctacatgttgtcttgtggttcactggagaggctgctcaacatgaggaatctgaagttatggatggtgaggatgacgatgatgaagacgatgatgacgaggatgatgatgattatgatacaaagaagaacaagggaactgctggaggggaagggcaacagggaaaacgacctacaaagtgcaagcagcagtgagcagcggcggtgtgctctttgcaaagccttggagctgcctctcctacaaagtctgaacttgcagagatagtcccacaagagaaatcaccaaaaggtaatgcttcatttttcaggtcatcatacttcttgccatttctcccccgttcattttcaatggatgtggctcagtacgcacgtgttccattgtgattttgttgttccatagcttccattcaaccaatgccgccgagtccaaggtcttctacctcaagatgaagggcgactaccacaggtatactattatcgctagcagatctagaccatgcaagttgtggtttgtagagatcaaaacttaagatctgtgtgtagatatttgtctagacaatgggagtggcaggatgctagtttttagtaaggttggttgcttatctatgaatttgcctgtatcatgcatgatcatgtgttgtatcctgtagcacatggttgaaatataaatttgtgttccatgtttttacccccctacacgtatttcttggatatctgatttctactcatgatgatttggcatgtacctttctgagttcaagttaggtgcatagaggaaggatgctgcggggagcaccatgaattcctacaaagttgctcaggtttcctctgactgttcaccattattggaagcaggacaggcagagagccttggaaccgaactcttggagatggtgcctagcag

SEQ ID NO: 8240 - DNA, 1609 bp, Zea Mays
agcctccttcgtccctcgatcacaactgctcctctctccactcccctcttcctcgacagatcctcaatcaagcttcatctgtgccgtcgtcggcaatggctccggccttcccacgccgccgtccaacctcccccgactctcctcctcacaccgccgccgctcccatggcccaccctccctgctcgcctccatggccacctggaggcggattcggcctccccgagtcaccgcccaacgtctcgccgcccaaccaaagcgagaaatccactgggcgaagcttctgcacctcccgaacgggggaggggaggggagcacgccagcactatgtgcctgcgggtagggtttctcccggtccgatggcgtccgccatgtcgtcgaggtcacgacccgccggccacttcggagtgttcccggtgaacgctatggccggcacgggaggcagcgacggtggggtgcagctcgcggacaagctcaagataatcaagactgacaactttgaccccgacgcctacgtgcagtccaagtgccgcgccatggacgagaagaaaatggttgtctttgtcatgcaacaagctgtttggaatgttgacactaataatgaggcagttcaaggtttcaggagatctttacatgatggtatgttacatgaaactttcatgtacatgcatgaatcatatacaagattatgatattggagacaagattatcctacatgttgtcttgtggttcactggagaggctgctcaacatgaggaatctgaagttatggatggtgaggatgacgatgatgaagacgatgatgacgaggatgatgatgattatgatacaaagaagaacaagggaactgctggaggggaagggcaacagggaaaacgacctacaaagtgcaagcagcagtgagcagcggcggtgtgctctttgcaaagccttggagctgcctctcctacaaagtctgaacttgcagagatagtcccacaagagaaatcaccaaaaggtaatgcttcatttttcaggtcatcatacttcttgccatttctcccccgttcattttcaatggatgtggctcagtacgcacgtgttccattgtgattttgttgttccatagcttccattcaaccaatgccgccgagtccaaggtcttctacctcaagatgaagggcgactaccacaggtatactattatcgctagcagatctagaccatgcaagttgtggtttgtagagatcaaaacttaagatctgtgtgtagatatttgtctagacaatgggagtggcaggatgctagtttttagtaaggttggttgcttatctatgaatttgcctgtatcatgcatgatcatgtgttgtatcctgtagcacatggttgaaatataaatttgtgttccatgtttttacccccctacacgtatttcttggatatctgatttctactcatgatgatttggcatgtacctttctgagttcaagttaggtgcatagaggaaggatgctgcggggagcaccatgaattcctacaaagttgctcaggtttcctctgactgttcaccattattggaagcaggacaggcagagagccttggaaccgaactcttggagatggtgcctagcag

SEQ ID NO: 8241 - DNA, 1606 bp, Zea Mays
agcctccttcgtccctcgatcacaactgctcctctctccactcccctcttcctcgacagatcctcaatcaagcttcatctgtgccgtcgtcggcaatggctccggccttcccacgccgccgtccaacctcccccgactctcctcctcacaccgccgccgctcccatggcccaccctccctgctcgcctccatggccacctggaggcggattcggcctccccgagtcaccgcccaacgtctcgccgcccaaccaaagcgagaaatccactgggcgaagcttctgcacctcccgaacgggggaggggaggggagcacgccagcactatgtgcctgcgggtagggtttctcccggtccgatggcgtccgccatgtcgtcgaggtcacgacccgccggccacttcggagtgttcccggtgaacgctatggccggcacgggaggcagcgacggtggggtgcagctcgcggacaagctcaagataatcaagactgacaactttgaccccgacgcctacgtgcagtccaagtgccgcgccatggacgagaagaaaatggttgtctttgtcatgcaacaagctgtttggaatgttgacactaataatgaggcagttcaaggtttcaggagatctttacatgatggtatgttacatgaaactttcatgtacatgcatgaatcatatacaagattatgatattggagacaagattatcctacatgttgtcttgtggttcactggagaggctgctcaacatgaggaatctgaagttatggatggtgaggatgacgatgatgaagacgatgatgacgaggatgatgatgattatgatacaaagaacaagggaactgctggaggggaagggcaacagggaaaacgacctacaaagtgcaagcagcagtgagcagcggcggtgtgctctttgcaaagccttggagctgcctctcctacaaagtctgaacttgcagagatagtcccacaagagaaatcaccaaaaggtaatgcttcatttttcaggtcatcatacttcttgccatttctcccccgttcattttcaatggatgtggctcagtacgcacgtgttccattgtgattttgttgttccatagcttccattcaaccaatgccgccgagtccaaggtcttctacctcaagatgaagggcgactaccacaggtatactattatcgctagcagatctagaccatgcaagttgtggtttgtagagatcaaaacttaagatctgtgtgtagatatttgtctagacaatgggagtggcaggatgctagtttttagtaaggttggttgcttatctatgaatttgcctgtatcatgcatgatcatgtgttgtatcctgtagcacatggttgaaatataaatttgtgttccatgtttttacccccctacacgtatttcttggatatctgatttctactcatgatgatttggcatgtacctttctgagttcaagttaggtgcatagaggaaggatgctgcggggagcaccatgaattcctacaaagttgctcaggtttcctctgactgttcaccattattggaagcaggacaggcagagagccttggaaccgaactcttggagatggtgcctagcag

SEQ ID NO: 8242 - DNA, 1551 bp, Zea Mays
aagcctccttcgtccctcgatcacaactgctcctctctccactcccctcttcctcgacagatcctcaatcaagcttcatctgtgccgtcgtcggcaatggctccggccttcccacgccgccgtccaacctcccccgactctcctcctcacaccgccgccgctcccatggcccaccctccctgctcgcctccatggccacctggaggcggattcggcctccccgagtcaccgcccaacgtctcgccgcccaaccaaagcgagaaatccactgggcgaagcttctgcacctcccgaacgggggaggggaggggagcacgccagcactatgtgcctgcgggtagggtttctcccggtccgatggcgtccgccatgtcgtcgaggtcacgacccgccggccacttcggagtgttcccggtgaacgctatggccggcacgggaggcagcgacggtggggtgcagctcgcggacaagctcaagataatcaagactgacaactttgaccccgacgcctacgtgcagtccaagtgccgcgccatggacgagaagaaaatggttgtctttgtcatgcaacaagctgtttggaatgttgacactaataatgaggcagttcaaggtttcaggagatctttacatgatgagacaagattatcctacatgttgtcttgtggttcactggagaggctgctcaacatgaggaatctgaagttatggatggtgaggatgacgatgatgaagacgatgatgacgaggatgatgatgattatgatacaaagaagaacaagggaactgctggaggggaagggcaacagggaaaacgacctacaaagtgcaagcagcagtgagcagcggcggtgtgctctttgcaaagccttggagctgcctctcctacaaagtctgaacttgcagagatagtcccacaagagaaatcaccaaaaggtaatgcttcatttttcaggtcatcatacttcttgccatttctcccccgttcattttcaatggatgtggctcagtacgcacgtgttccattgtgattttgttgttccatagcttccattcaaccaatgccgccgagtccaaggtcttctacctcaagatgaagggcgactaccacaggtatactattatcgctagcagatctagaccatgcaagttgtggtttgtagagatcaaaacttaagatctgtgtgtagatatttgtctagacaatgggagtggcaggatgctagtttttagtaaggttggttgcttatctatgaatttgcctgtatcatgcatgatcatgtgttgtatcctgtagcacatggttgaaatataaatttgtgttccatgtttttacccccctacacgtatttcttggatatctgatttctactcatgatgatttggcatgtacctttctgagttcaagttaggtgcatagaggaaggatgctgcggggagcaccatgaattcctacaaagttgctcaggtttcctctgactgttcaccattattggaagcaggacaggcagagagccttggaaccgaactcttggagatggtgcctagcag

SEQ ID NO: 8243 - DNA, 382 bp, Zea Mays
aacaagcttgttggagggtgtgattcctgcggatgcgaatgaagaggacgatgagcgcaagtcattaggagaggtcagaggggtgttagggagaggcaaagacgtacacgtcttcaaattgtaagtactgttgttcaaattttcacagcgaacaaactttcgttcttatgcacttgcctctattattagtagtctccgtgatgcagaaaccgaattagcataagactttggagccatggatctaaaaatggatttgctttcattaacttggatactgaaggagcacaacgctgatggttacgacctgctgagatatgatgtttataactattgaagatgataaaatattaagtatttcgagatatgaaaacatagaagatta

SEQ ID NO: 8244 - DNA, 309 bp, Zea Mays
ggcatctgcgcccccaccacagccagccaccccggccgagctcatcaaattcggacgcgtaagcgaatagagagagtgaggacacgcacgtgttgtgatctgagcaccggggctcggtggacgacatatcggagctcttggacatcgaggcgagaaggatcagcattgggggtggggaaacatagatccaagcacagaggaggcaagaggaagaagtgggagcgatctagttgtcttccctggatctaaccctggaggaaggaggggagaactgtacgctgattgaaggaaaacgtgggttcataaaat

SEQ ID NO: 8245 - DNA, 2744 bp, Zea Mays
ctgacgtgtcaaacaaattgtgacgaatatttttatcataacacacgatgatgtagcatctaacataatgtgtttatgatgtttttagttcatcattaattaataaaaatcagtattcaattgaattcaaaccatatagtacatacaatttgatcaaagaacatgagtgtacataaatttttctagcatgcacatataattgaagcataaatcatcaaacattctctaaacacaaaaatgtccaagtctcaatggagcaaccatttgatttcaactcagctgttgcacagctgcctgaagccaacatcctgctagcaggtctgaggtttatgtaggccatgtcttcctgctttgctggtgaaggcgcatacagtccaggaagggatttagcgaccttgcagaacagaggctacatgattccagtttccagatgtctccttcgccagtggacactttcccggtgacacatacagggaacaagaatcagatagctggtcacttcataaaaaactatatggcaagcaggggcggatgcacggggtgggcaaagagggccgtggccccacctcaatttttgtcttcttatatatatactgaatatgatgagaattgaaataaataataaatacgtgaagacaaaaatacagcacacatccaccatcccgccaaacaatccaactccacaactctctaaaacaatccaattccacttctgttctattatcgttgtatcggatcgacacaaggtagaagcgctcgactccgtcgtcgccgtacccttattgtactcaccctgactttgtcgcctgcccccttctgtgttgccccagtgtcactggcacacctagctccccttctgtgctcaccaactttatcgccgcaccaatgtcgttgtcgcccgtccatcccccttctgcctgcgctcacacacccgcacaatttagtcattcagccatcgcaacattgacacgtagttttttcttgttcatatttttctcttctttcaaattttaatttctattgttcgatcactagattctatatgcagtgttacatctattttataatcttatctagatgtcttatgattttgtttggctccgcatgaaattctatcctgcgtccgccactgatggcaagggtaactcgttatatttatattgagcagaagatgggagcattgaggatgaaatacataaatgatgctcataaaccatctaaacaggttaaggacctgatctaaagtttgttcctaaaccatctaaatgtgtggactaagtggtagagtaaattttaagtcagcctaccttttgttgcatctttcaatcgatagatgagctgtaaatctattagtggcttctacaatcatcaacatttgatatcttaaatattacccatcatttgttggtttattccctaactgttgagatctagaagttaacaacttgcgaagtatataagtgaaccaaaaattaagaagtatgctaaaacaagaaaaaatactgactttccacatccaacgcattagccttttaacttgcccccgagttgtgctagcagttgcttcactcgtgctaaaaggacagtgattttggctatggtcatgagatccttaaaacataaggagtttatattcaaagaataaaggataattaccatttgaattagtacaattgtatataaacctatacataactcgaagtaacaaggctatactttcagataaaaatcagagttacatttattcaaatttattgtattcaaaaatttatgctaagtagtggatacaaactcacacaagttagaccattatgttgactgaatagcttttgatacaaacagaactattataaggatttgatcagctgagctgcctaagcagcacagacctataacgtgaagtctaacaactgtgtgcttcccaagttaattccaatacaattcaagtgtcatcaatgtaaagataaattacacattatgacagtgcattttttcatttagcgaaattttgagcaaacattaaataatattgttccaaagatacttggataaacaaaaaagccaaattccaaaactcataatctaaataccatgaataatacagtttagcacatgccatgcaccttctatcctccttcaccttctgttgcacaatcttccttgttgtccgtagatttactggtcctaagaacatttttagaaacacgcctgcaaacccaagaacattgttataaataaaacataggtttcacgcctagggaaaaagaaacaaaacctaagaacaatatgaagcttaaaacaactcaaatcaccttacgtcttgctcaggtttccacactaattacagaaccatgcatattatccctgactgctcctgtaaactcaatatctagtccaattcaccagctttgaatgccccatcataaaaaaatgcttagaagaagctcaattcagtcatatgctttcatggaatccacaccctggagcattgacaaagcccaacaaataagtcacaaagaaaaggtctcagtttttctaaacccacagagcttgaattcagagcttcacaattctggtgcacatcactatgagaacagagaggcacacaagccaatagcagtttaattgtctagaacagcaacacttccacgacaaatcgatccattgaccacttttcagtgacgatgtgctactaatcccaccatcataatagtctaaccgcttccaactcaagtggatgaatt

SEQ ID NO: 8246 - DNA, 1890 bp, Zea Mays
atgtgtattgaagcgcctcttgccttgttggccgatctggatgcctacttttttatactcggaaggaagaaggatgatcctctctcgtcactgctttcctgcccaaagctttttctggcagacgaggatcttgtccttgtcggccttgttctcgctgctgtgcttctcgcagctccatcgcatccctttggcaatgggtgccacagaatcgaggaagtaggtgctctcccggattatggcgtagcccgtgggacgaaggatacggtccatctcaaggagcacctgtgagactctgctgtgaacaggccatcaagatgcaacaggtcataggtgcgtggatatgtcgagaacgcctcacacctgtcgtggttgacgccgatgagccctctgtcgtagacgacgccgagggagtttgggccgtaggaggagacgacgttcatgacccagacggggtccttgatgaggctgcctgcgaatcctccgtacacggtgttcatgtccatgacgttcctgatcttgtcgctccccagcgccggcagcagcgtcttgtagtgcttgaccctgagcttccaccgggcgtcgtcctgcttgaaggcggcggcgctgctgcccgggacgacgctgatgcgctccggggcgacgctgagcctctggggccacttgggcgtggcgttgagccccagcttcctgtacttggggctgggagccgtgacgcaggagcgcatgggcacgtaccaggcggcgtcggggtcgacgctgtcgtcgcacttggcgggcgtggtgaccggggtgagcttgtcgtagcaggcgtcggcggacttctgccacacggcgatgtcccccttcatgctgtagagcttgaagcacatgctggccagcatcttcttgagcctgtccaggggatgaggcagcgcgagcagtgcgccatgtcgaaggcggcggacgggaacggcaggcgctgcgtggagatgatgccgaggatggccgggatgccgcgctccagcgcgaactgcacctgggcctcgtggttgtccctgggcgccagcgacacggtgaggatgccccgccccagcaggtcgccgccccagctggcgacgccgcagccggtgtcgagcgcggtgcggacggtgccgtcgcgcatgcccgggaccaggccctgcatcaggtccacgtacgcgccgacgccgttggggaacatggtgccgccgccggggaaccggaagcggtcgccctccttgacgagccagtgctggttggacttctggctgttgatccagtcgtaggggacgttccggtaccagcactggtccttgctcttgggccaccggatgggcggcttgtaccccttgggcggcggcaccaggcactgctgccggtcgggcggcggcgggcagtgccgctccatgaagctgaggcggtagttgccgtacctccgccagcgcttggggtcggtgcagggggtgtagtcctggtagtcggcggggcactcggggaacgccacggcggccgtggacgccagtgccggccgagcctggccgtcgtcggagggacggcgggtcgtcgtggcggcgccgagggcgaggagagccgtcggcgccggctggatggagtccagcaggctccgtcccgtgctgtagatgccgcccaggtagaaggagaaggcgcagagcacgacgacgacgagcgccaccggcaccgccctggaccctgcgccggcgccgcccgccctctcgggcttatcttccttgctgtacttcatggcgccgcccacgccacgctattctccccgtcgtcgagcgctgcagctgtaacgcgaggagaaattaaacttttattaccggggtgcggggtgcggggtggcagagaagaagaaaaaaaggcgcaggggac

SEQ ID NO: 8247 - DNA, 1726 bp, Zea Mays
ggcgcgtatacgagcgaaggaaacggaagtttaagttattcccaaattgaacggcccaaagggaaaccccaccacaaccggtctcgagtctcgacagatcggcgtcgatgaccctaccactcgctggccctcccacgccttccccggcatggccgagcccaccccaccgtccctcccctcgtccgactgcgcagacgtgctcgtgggatcctccgccccctccttcccctacatccgcggctggtcattcacctccgactcgggcgctgctatgggttctgtagaggaacatctccaacccaaggtgtgcgtgcagacgagcacctccgcggggcttgagcagatcctgccctggctcttctatcacaaggtcgtcggcgtcgcgcagttcctgctcttcgtggagggcaaggcggcgaaacccaatgtcgcgggagtcctcgagtcaattcctggggtaaaagtggtgtacagaactaaggatcttgaggagcggcaggcacggaggatttttctacaaaccttgcaactatgaactctttgtgaagcaatccctcaacatggagatggctattgtaatggctcgggatggtggcatggattggatcatacatttagacactgatgagttactttatcctggcggagctgctgagtattctgttagacgtttgttagctgaggtccctcgtgatgtcgacatggttatttttccaaactatgaaagcagtgttgagcatgataatataaaagatccattcagcgaagtatctatgttcaagaggaattatgatcatcttcctaaagatacttactttggcatgtataaggaagcgacacgaggaaatccaaattattttctcacctatggtaatggaaaatctgctgcacgaattcaagaccatctccgtcctaatggcgcgcacaggtggcataattatgcaaagagcccaaatgagatcaagttggaggaggctgcagttctgcattatacatacactaaattttcagatttgacatctagacgtgatcgctgtggatgcaagcctacaaaagaagatgttaagagatgtttcatgttagattttgacagagcagcttttataattgcatcaactgctagtgaagaagaaatgcttcgctggtacaatgaacgagtcgtgtggaccgataagcagctgaacttaaagcttctgaggaaaggagtgctgactcgcatatacaccccaatgacaattgttcagagtctgcgcgaatccggtgtcttcacttccgccattacagctggccaacctgctgtgaatgccaaactctcacccaaggaaaccaatgcgcagagccaaaatgttaccgcacctgggaacatgacaagagtggtcagatctactgattcaaaggcatctggcagaaagatactgcaagccgttgatcttgccttcagcgatactaatgtaactgctgttccaccgttgtcgccgcccagtttggacgaacacaggcatcatagtgaataataatgtcatacgtatcatatatatattttttgctcggcgtataagttcctaagaaaaggaggaaaagaaagttactgacatcttcgttaagagaagtgctaacatcagcttggatggtcaatttttatgcaatcgagctttatttgtttcatttttaaactaaaattaattaatatctcgaacgaattttgaagaaacatttggattgtggt

SEQ ID NO: 8248 - DNA, 989 bp, Zea Mays
ctttgactcatggctttatcttatcgaatggggtggttgactggacaactatgtgaaatacaatatatgatgtcacacttgccgaacattctgctagcatcaatgcgaactccacctggctgcatgggctgggcatgttgatgttgtgagatgcctttgcaagcacaaagctgatgtgggagctgcagcaatggacgacactgcagcacttcattttgcttcccagaaaggccatgtagaagtggctcgtgagctgctggcatctggggcctctgtgaaagccaagaaccggaaaggcttcacggcgctgcactttgctgctcagaattctcacctggatcttgtgaagtaccttgtgaagaaaggtgttgacgtcacagcaaagaccaaaggtggccagacagctctacatgtcgctgaggatgatgaagtgcgtgcgttcctgaaggagtgcgagcaatccttgaagaagggtgccgagctaccatcggagaaggatgattctgccgagaaagagggcgatagcaagtcttcaggtgaggttatgaaagatgaggaggatgcagagcagggcgagaagaggaaaagcgaattggttggtgcgtcgagtttgtcaggagcaaaaaaagccaaagtttctcttggtcatctagtttgtgaaaatgacatggacgaggaagaggagtgatttcgagcagccttgaccttgaggatgcaatagaagtgcacttcgatgttttgttatgctagtcttagtctgtacggcgatcttgaatgtaaagacaagtgcaaagttgaatctcagttctcatgtattgcatggatgaaaattctaagggcttgtttggtaggactctggctcctttgaaaacggatgtagctctggctcatttatttgtaggagcagctcctccacatgagtcactgtacctcaatttctgtaaaccagtttcttaaaaaaaaatgggtgcttttaaacacgatctaag

SEQ ID NO: 8249 - DNA, 907 bp, Zea Mays
agggactcaaacttttccttagtaaaactccacctggctgcatgggctgggcatgttgatgttgtgagatgcctttgcaagcacaaagctgatgtgggagctgcagcaatggacgacactgcagcacttcattttgcttcccagaaaggccatgtagaagtggctcgtgagctgctggcatctggggcctctgtgaaagccaagaaccggaaaggcttcacggcgctgcactttgctgctcagaattctcacctggatcttgtgaagtaccttgtgaagaaaggtgttgacgtcacagcaaagaccaaaggtggccagacagctctacatgtcgctgaggatgatgaagtgcgtgcgttcctgaaggagtgcgagcaatccttgaagaagggtgccgagctaccatcggagaaggatgattctgccgagaaagagggcgatagcaagtcttcaggtgaggttatgaaagatgaggaggatgcagagcagggcgagaagaggaaaagcgaattggttggtgcgtcgagtttgtcaggagcaaaaaaagccaaagtttctcttggtcatctagtttgtgaaaatgacatggacgaggaagaggagtgatttcgagcagccttgaccttgaggatgcaatagaagtgcacttcgatgttttgttatgctagtcttagtctgtacggcgatcttgaatgtaaagacaagtgcaaagttgaatctcagttctcatgtattgcatggatgaaaattctaagggcttgtttggtaggactctggctcctttgaaaacggatgtagctctggctcatttatttgtaggagcagctcctccacatgagtcactgtacctcaatttctgtaaaccagtttcttaaaaaaaaatgggtgcttttaaacacgatctaag

SEQ ID NO: 8250 - DNA, 1158 bp, Zea Mays
ctcattttactacttcacatgtcaacttcagtcttccctaatctctcttttcatctatcacgtcttaggatctcactatacattggtgctatcccttgcctatcacgtatatcatcgttccggatttggtcccttttttatgctacaaatacaacacaatatatgcatttccacaacatttatctactaatcatgttgtctttcaggataacattctacaccatacaatatagcatgtctaatcattgttctatacaacttgacatttagctctgtgactccacctggctgcatgggctgggcatgttgatgttgtgagatgcctttgcaagcacaaagctgatgtgggagctgcagcaatggacgacactgcagcacttcattttgcttcccagaaaggccatgtagaagtggctcgtgagctgctggcatctggggcctctgtgaaagccaagaaccggaaaggcttcacggcgctgcactttgctgctcagaattctcacctggatcttgtgaagtaccttgtgaagaaaggtgttgacgtcacagcaaagaccaaaggtggccagacagctctacatgtcgctgaggatgatgaagtgcgtgcgttcctgaaggagtgcgagcaatccttgaagaagggtgccgagctaccatcggagaaggatgattctgccgagaaagagggcgatagcaagtcttcaggtgaggttatgaaagatgaggaggatgcagagcagggcgagaagaggaaaagcgaattggttggtgcgtcgagtttgtcaggagcaaaaaaagccaaagtttctcttggtcatctagtttgtgaaaatgacatggacgaggaagaggagtgatttcgagcagccttgaccttgaggatgcaatagaagtgcacttcgatgttttgttatgctagtcttagtctgtacggcgatcttgaatgtaaagacaagtgcaaagttgaatctcagttctcatgtattgcatggatgaaaattctaagggcttgtttggtaggactctggctcctttgaaaacggatgtagctctggctcatttatttgtaggagcagctcctccacatgagtcactgtacctcaatttctgtaaaccagtttcttaaaaaaaaatgggtgcttttaaacacgatctaag

SEQ ID NO: 8251 - DNA, 1098 bp, Zea Mays
gtcacgggtgaggtctattccttcctgctacagtccaaagtcatggatccaattacctgaccgattcgcgagactgatgggacggcgtcacagcggcggcggcggccgcggcggcggaagaggaagagggcgagggcgagggcgtgggcgagatgaggaagaagatcttcctctgcacaaggctgcaaggtctggtgatgcggcagcagtggagtcgactccacctggctgcatgggctgggcatgttgatgttgtgagatgcctttgcaagcacaaagctgatgtgggagctgcagcaatggacgacactgcagcacttcattttgcttcccagaaaggccatgtagaagtggctcgtgagctgctggcatctggggcctctgtgaaagccaagaaccggaaaggcttcacggcgctgcactttgctgctcagaattctcacctggatcttgtgaagtaccttgtgaagaaaggtgttgacgtcacagcaaagaccaaaggtggccagacagctctacatgtcgctgaggatgatgaagtgcgtgcgttcctgaaggagtgcgagcaatccttgaagaagggtgccgagctaccatcggagaaggatgattctgccgagaaagagggcgatagcaagtcttcaggtgaggttatgaaagatgaggaggatgcagagcagggcgagaagaggaaaagcgaattggttggtgcgtcgagtttgtcaggagcaaaaaaagccaaagtttctcttggtcatctagtttgtgaaaatgacatggacgaggaagaggagtgatttcgagcagccttgaccttgaggatgcaatagaagtgcacttcgatgttttgttatgctagtcttagtctgtacggcgatcttgaatgtaaagacaagtgcaaagttgaatctcagttctcatgtattgcatggatgaaaattctaagggcttgtttggtaggactctggctcctttgaaaacggatgtagctctggctcatttatttgtaggagcagctcctccacatgagtcactgtacctcaatttctgtaaaccagtttcttaaaaaaaaatgggtgcttttaaacacgatctaag

SEQ ID NO: 8252 - DNA, 248 bp, Zea Mays
actgcttcggcgccgggcggggagtgtgtgaacagaaggccgcccatgccaccgccggggaatcagggctatttaggggccagggcgaggtcccggacgttcgtgagggtgtgagacgggtgttcgagggacagacggatctagtgcttgcaccgggcgtcggtgattgctcaccggagcaatccttccgccgtgactctgcatatcatcgtgggcggccatgtatgattcacaaacattggtaaaat

SEQ ID NO: 8253 - DNA, 1423 bp, Zea Mays
cccaatcttgtgacaggcaccaatgcaatgctcatcccagacccctcaagttcgatgtggcggggtacacggaagggttcccgcggctggtctacttcgaggattcatggaccaagcaccacgtgttcctccgcaagtgggtggcggagcaccccgagttcgcgtccaacccgctgtacatcggcggcgactcctactcgggctacaccgtgcccgtgacggcgatggacatcgccaccagcagcgacgacgaggagccgccgaagctgaaccttgtgggctacctggtgggcaacgccgcgacggacgaccggtacgacacggggggcaaggtgccgttcatgcacggcatggggctcatctccgacgagctgtacgaggcggcgaagcagggctgcggcggcgacttctacgtggcgccggaccccaccaacgcgcggtgcgccagcgcgatgatggccatcaacatggtgaccttcgccgtgaaccccgtgcacatcctggagcccttctgcggcgcggccgtgcgggccggcggcggcagcatcttccagggctacggcggcggcgcgaggcggtcgatgctggtgcgtgacgacgtccgccacccgggcttcttcgccaagcagcggctgggcctgcccgtggagtgcagggacaacgggtaccggctgtcctacatctgggccgacgacccggaggtgagggaggcgctcggcatcctcgagggttccattggttcgtggagccggtgcaccatgctgtcgcactacaggcacgacgtcaccaccgtcatcccctaccatgtcaacctcaccaaggcaggatacagggcgcttgtgtacaacggcgatcatgacctagacatgaccttcgtgggcacccaagagtggatcagaagcatcggctaccccatcgtcagcgactggagaccatggttcgccaaccgacaggtcgcagggttcacaagaacatacgcccacaaccttactttcgccactgtgaagggaggagggcacacagctccggagtacaggccgaaagagtgtcaggccatgttggatcgatggacatcagaagcaggccaactctgatgaatgtggtgaccgcggaattaacaaactagggagaggcaggcagcttgtagtacttttggctatgagcatgtctcacgcgtgtggtttccaagaacattcgatacaacaaaatgctggatcacccgacagtaaaacccattactaatatagagcaggtccaacaatgagggcctctttggcggacacattactacgtcagtccgctgacgtgaggggctagcaaggggtggacctatgtttatggagagcggggcacaagcctcactcaatttcgttgttttatgtatttactgtatctacaaagttttaatcgtcactatgccttc

SEQ ID NO: 8254 - DNA, 1101 bp, Zea Mays
cacgatttctctcggtcgaagcttcttttaggcgccacttttaaagactataattcatcgtgatgtgaagtcatcaaacatcctgctgacagatagctatcgggccaaggtgtctgactttgggtttgcaagaagtggccctagtgacacggagaagacacacatatcaacgaaagtgaaaggcacagctgggtacctggaccccgaatacttgaggacataccagctaactccaaagagtgatgtcttctcatttggcatattgcttgtagaaattctttctgctcgcagacccgtagagctgaagcgaacccctgaagagaggatcacaatcagatggactttcaaaaaattcaacgaaggcaacacgagagagatactggacccattgctggaagatcacgtggacgacgaggtgcttgaaaagctccttagcctggctttccaatgcgctgctccgacacgggacgaccggccgaccatgaaggaagttggggagcagctgtgggagataaggaaagagtacggaaagagtgttaggaaggtgtgaagatcatggaaaacatttccctgtttctcaagactttccctggaccaaggggactaagggggtgtttggttttatagggattaaattttagttcttccattttattctatttaagtccctaaattaccaaacacggaaatcaaaactttattttagttttagtatttggtaatttagagacttgaatggaataaaatggatagactaaaaataagttcctagaaatcaaacaccctctaagcatgcgaagtatttgtgcccattggataaacacctgatcatctatgtttcttggaagatgtgacctgaagaaatgtacagtgcgataacaccgccatcagtttgtgctttcttgtctcagtttgcagtgcactccctctatggagaatgtatattttggagttctcgcatttcttgattctgttgatatggtattctgatggatgtacccgcatacattactgcaaacggtctgaaataatatacgaagggaaattgtttgtattggaagacactgaagcttccggatgcaatctttatttatagtatta

SEQ ID NO: 8255 - DNA, 1733 bp, Zea Mays
ctcagtagttactgggacgagactgacatgtggttagtttctggaatcggtatagaataatccataaaagaaaagacaagctctgttctggtttagtggtttactgttgattgctagtctggtgctattttgacatttccataatgtaaaccatttgaatcagtttcatcctatgaaggaagcatgtcatctgagaaagtcccaccaactccacatcgaatacctccaagtccctctagatttgcgccgtctccacagatagctagagttggatctgtcaacttaagcatccagcagatcctcagggcaactcagaacttctcaccttcatttaagttaggtgaaggaggatttgggatggtctacagggctgtattgccagatggcaatgttgttgcggtcaagagagctaaaaaggatcagtttgcaggtcctagggatgagttcagcaatgaagtagacttgcttgctaagatagaccaccgaaatttggtgaggttactgggttttactgataaaggaaatgagcgcattatcatcactgagtatgttccaaatggtactcttagagaacatctagatggtcaacatggaagagtcctagattttaatcagcgtctagaaattgcaattgacgtggctcatgcacttacttatcttcatctgtatgcagagaagactataattcatcgtgatgtgaagtcatcaaacatcctgctgacagatagctatcgggccaaggtgtctgactttgggtttgcaagaagtggccctagtgacacggagaagacacacatatcaacgaaagtgaaaggcacagctgggtacctggaccccgaatacttgaggacataccagctaactccaaagagtgatgtcttctcatttggcatattgcttgtagaaattctttctgctcgcagacccgtagagctgaagcgaacccctgaagagaggatcacaatcagatggactttcaaaaaattcaacgaaggcaacacgagagagatactggacccattgctggaagatcacgtggacgacgaggtgcttgaaaagctccttagcctggctttccaatgcgctgctccgacacgggacgaccggccgaccatgaaggaagttggggagcagctgtgggagataaggaaagagtacggaaagagtgttaggaaggtgtgaagatcatggaaaacatttccctgtttctcaagactttccctggaccaaggggactaagggggtgtttggttttatagggattaaattttagttcttccattttattctatttaagtccctaaattaccaaacacggaaatcaaaactttattttagttttagtatttggtaatttagagacttgaatggaataaaatggatagactaaaaataagttcctagaaatcaaacaccctctaagcatgcgaagtatttgtgcccattggataaacacctgatcatctatgtttcttggaagatgtgacctgaagaaatgtacagtgcgataacaccgccatcagtttgtgctttcttgtctcagtttgcagtgcactccctctatggagaatgtatattttggagttctcgcatttcttgattctgttgatatggtattctgatggatgtacccgcatacattactgcaaacggtctgaaataatatacgaagggaaattgtttgtattggaagacactgaagcttccggatgcaatctttatttatagtatta

SEQ ID NO: 8256 - DNA, 1834 bp, Zea Mays
gttggattccacgacacggaaatgaagctccaaaattattggcttgcaaatccagacaatagtataaatatatttgttcttttatcgtcgagtctcggagccatgcaactttacatcaagatgtgccaaggaagctcttgaggtggtccacagaaaatagctcaaggaatgcatgtgaaaggtctgggttgaatgaaaataatcaggacattggtgattcttcagaaaagcaggagcatctcctggctgtgccagttgaatcagtttcatcctatgaaggaagcatgtcatctgagaaagtcccaccaactccacatcgaatacctccaagtccctctagatttgcgccgtctccacagatagctagagttggatctgtcaacttaagcatccagcagatcctcagggcaactcagaacttctcaccttcatttaagttaggtgaaggaggatttgggatggtctacagggctgtattgccagatggcaatgttgttgcggtcaagagagctaaaaaggatcagtttgcaggtcctagggatgagttcagcaatgaagtagacttgcttgctaagatagaccaccgaaatttggtgaggttactgggttttactgataaaggaaatgagcgcattatcatcactgagtatgttccaaatggtactcttagagaacatctagatggtcaacatggaagagtcctagattttaatcagcgtctagaaattgcaattgacgtggctcatgcacttacttatcttcatctgtatgcagagaagactataattcatcgtgatgtgaagtcatcaaacatcctgctgacagatagctatcgggccaaggtgtctgactttgggtttgcaagaagtggccctagtgacacggagaagacacacatatcaacgaaagtgaaaggcacagctgggtacctggaccccgaatacttgaggacataccagctaactccaaagagtgatgtcttctcatttggcatattgcttgtagaaattctttctgctcgcagacccgtagagctgaagcgaacccctgaagagaggatcacaatcagatggactttcaaaaaattcaacgaaggcaacacgagagagatactggacccattgctggaagatcacgtggacgacgaggtgcttgaaaagctccttagcctggctttccaatgcgctgctccgacacgggacgaccggccgaccatgaaggaagttggggagcagctgtgggagataaggaaagagtacggaaagagtgttaggaaggtgtgaagatcatggaaaacatttccctgtttctcaagactttccctggaccaaggggactaagggggtgtttggttttatagggattaaattttagttcttccattttattctatttaagtccctaaattaccaaacacggaaatcaaaactttattttagttttagtatttggtaatttagagacttgaatggaataaaatggatagactaaaaataagttcctagaaatcaaacaccctctaagcatgcgaagtatttgtgcccattggataaacacctgatcatctatgtttcttggaagatgtgacctgaagaaatgtacagtgcgataacaccgccatcagtttgtgctttcttgtctcagtttgcagtgcactccctctatggagaatgtatattttggagttctcgcatttcttgattctgttgatatggtattctgatggatgtacccgcatacattactgcaaacggtctgaaataatatacgaagggaaattgtttgtattggaagacactgaagcttccggatgcaatctttatttatagtatta

SEQ ID NO: 8257 - DNA, 1960 bp, Zea Mays
aaactccgaatcggtgcagcacatcgtgttggattccacgacacggaaatgaagctccaaaattattggcttgcaaatccagacaatagtataaatatatttgttcttttatcgtcgagtctcggagccatgcaactttacatcaagatgtgccaaggaagctcttgaggtggtccacagaaaatagctcaaggaatgcatgtgaaaggtctgggttgaatgaaaataatcaggacattggtgattcttcagaaaagcaggagcatctcctggctgtgccaggtgtgattctcttatgctgtggccttatgttaccatgctttcatgctgaaaggaaagaagtcagcaggcatgacaatgcaaccattcagcgcaacgcacttgaatcagtttcatcctatgaaggaagcatgtcatctgagaaagtcccaccaactccacatcgaatacctccaagtccctctagatttgcgccgtctccacagatagctagagttggatctgtcaacttaagcatccagcagatcctcagggcaactcagaacttctcaccttcatttaagttaggtgaaggaggatttgggatggtctacagggctgtattgccagatggcaatgttgttgcggtcaagagagctaaaaaggatcagtttgcaggtcctagggatgagttcagcaatgaagtagacttgcttgctaagatagaccaccgaaatttggtgaggttactgggttttactgataaaggaaatgagcgcattatcatcactgagtatgttccaaatggtactcttagagaacatctagatggtcaacatggaagagtcctagattttaatcagcgtctagaaattgcaattgacgtggctcatgcacttacttatcttcatctgtatgcagagaagactataattcatcgtgatgtgaagtcatcaaacatcctgctgacagatagctatcgggccaaggtgtctgactttgggtttgcaagaagtggccctagtgacacggagaagacacacatatcaacgaaagtgaaaggcacagctgggtacctggaccccgaatacttgaggacataccagctaactccaaagagtgatgtcttctcatttggcatattgcttgtagaaattctttctgctcgcagacccgtagagctgaagcgaacccctgaagagaggatcacaatcagatggactttcaaaaaattcaacgaaggcaacacgagagagatactggacccattgctggaagatcacgtggacgacgaggtgcttgaaaagctccttagcctggctttccaatgcgctgctccgacacgggacgaccggccgaccatgaaggaagttggggagcagctgtgggagataaggaaagagtacggaaagagtgttaggaaggtgtgaagatcatggaaaacatttccctgtttctcaagactttccctggaccaaggggactaagggggtgtttggttttatagggattaaattttagttcttccattttattctatttaagtccctaaattaccaaacacggaaatcaaaactttattttagttttagtatttggtaatttagagacttgaatggaataaaatggatagactaaaaataagttcctagaaatcaaacaccctctaagcatgcgaagtatttgtgcccattggataaacacctgatcatctatgtttcttggaagatgtgacctgaagaaatgtacagtgcgataacaccgccatcagtttgtgctttcttgtctcagtttgcagtgcactccctctatggagaatgtatattttggagttctcgcatttcttgattctgttgatatggtattctgatggatgtacccgcatacattactgcaaacggtctgaaataatatacgaagggaaattgtttgtattggaagacactgaagcttccggatgcaatctttatttatagtatta

SEQ ID NO: 8258 - DNA, 2711 bp, Zea Mays
ttcccaactgcccactacctctcgttcccgtctccttcctctattcgtgttgtccgttcgctgccgccgtcgcctggttcgcatcgcatacagcgcctcagtccagatcgatcctccctcttcccagatcgggtctagttggacggcagcagccgccgccgcggcatctgtcatattcacgccgcgtgtgctctctctttctgtctccctctctatctgcgacgactgggtgtgataccgcagccgccgccctacgctgggttcccgagccttcgccgatctcttctccggcgaagagcgcccaccagatccgccgcgcatcgatgtctcctttggctcttctccaagctctcatcttcatcctgtgctgctcgcctctggcttctgcttcgtcgtcggagctaacccttgcaggagctgcttgtggagatgatcagcttgtcatcttcgatgcttctgatggcctccttaacctgtcggtcaatggggttctgatgcaagatcgcgtttttgcctgccagaagctcggcttctactttggcagtggatgcctccgctgcagcaacctttcagatgcgtggaggagtgccgtaaagcagtactgtggtgaagggagcgaaaagagccatgcaactttacatcaagatgtgccaaggaagctcttgaggtggtccacagaaaatagctcaaggaatgcatgtgaaaggtctgggttgaatgaaaataatcaggacattggtgattcttcagaaaagcaggagcatctcctggctgtgccaggtgtgattctcttatgctgtggccttatgttaccatgctttcatgctgaaaggaaagaagtcagcaggcatgacaatgcaaccattcagcgcaacgcacttgaatcagtttcatcctatgaaggaagcatgtcatctgagaaagtcccaccaactccacatcgaatacctccaagtccctctagatttgcgccgtctccacagatagctagagttggatctgtcaacttaagcatccagcagatcctcagggcaactcagaacttctcaccttcatttaagttaggtgaaggaggatttgggatggtctacagggctgtattgccagatggcaatgttgttgcggtcaagagagctaaaaaggatcagtttgcaggtcctagggatgagttcagcaatgaagtagacttgcttgctaagatagaccaccgaaatttggtgaggttactgggttttactgataaaggaaatgagcgcattatcatcactgagtatgttccaaatggtactcttagagaacatctagatggtcaacatggaagagtcctagattttaatcagcgtctagaaattgcaattgacgtggctcatgcacttacttatcttcatctgtatgcagaagctttaatctgtaaagcaagcaatgaaccaagaaaaaagtatatggcataaggctgtataagcttcggatatgaaagggtaacgaaagggatcgagttcctgtacaaccctatatgaaataacatcttcaccctcccttttacatagtaacgctttacattcgaaggtgtatatttccgaccttccactatatagacatgtcacacacgatttctctcggtcgaagcttcttttaggcgccacttttaaagagaagactataattcatcgtgatgtgaagtcatcaaacatcctgctgacagatagctatcgggccaaggtgtctgactttgggtttgcaagaagtggccctagtgacacggagaagacacacatatcaacgaaagtgaaaggcacagctgggtacctggaccccgaatacttgaggacataccagctaactccaaagagtgatgtcttctcatttggcatattgcttgtagaaattctttctgctcgcagacccgtagagctgaagcgaacccctgaagagaggatcacaatcagatggactttcaaaaaattcaacgaaggcaacacgagagagatactggacccattgctggaagatcacgtggacgacgaggtgcttgaaaagctccttagcctggctttccaatgcgctgctccgacacgggacgaccggccgaccatgaaggaagttggggagcagctgtgggagataaggaaagagtacggaaagagtgttaggaaggtgtgaagatcatggaaaacatttccctgtttctcaagactttccctggaccaaggggactaagggggtgtttggttttatagggattaaattttagttcttccattttattctatttaagtccctaaattaccaaacacggaaatcaaaactttattttagttttagtatttggtaatttagagacttgaatggaataaaatggatagactaaaaataagttcctagaaatcaaacaccctctaagcatgcgaagtatttgtgcccattggataaacacctgatcatctatgtttcttggaagatgtgacctgaagaaatgtacagtgcgataacaccgccatcagtttgtgctttcttgtctcagtttgcagtgcactccctctatggagaatgtatattttggagttctcgcatttcttgattctgttgatatggtattctgatggatgtacccgcatacattactgcaaacggtctgaaataatatacgaagggaaattgtttgtattggaagacactgaagcttccggatgcaatctttatttatagtatta

SEQ ID NO: 8259 - DNA, 2159 bp, Zea Mays
ttcccaactgcccactacctctcgttcccgtctccttcctctattcgtgttgtccgttcgctgccgccgtcgcctggttcgcatcgcatacagcgcctcagtccagatcgatcctccctcttcccagatcgggtctagttggacggcagcagccgccgccgcggcatctgtcatattcacgccgcgtgtgctctctctttctgtctccctctctatctgcgacgactgggtgtgataccgcagccgccgccctacgctgggttcccgagccttcgccgatctcttctccggcgaagagcgcccaccagatccgccgcgcatcgatgtctcctttggctcttctccaagctctcatcttcatcctgtgctgctcgcctctggcttctgcttcgtcgtcggagctaacccttgcaggagctgcttgtggagatgatcagcttgtcatcttcgatgcttctgatggcctccttaacctgtcggtcaatggggttctgatgcaagatcgcgtttttgcctgccagaagctcggcttctactttggcagtggatgcctccgctgcagcaacctttcagatgcgtggaggagtgccgtaaagcagtactgtggtgaagggagcgaaaagagccatgcaactttacatcaagatgtgccaaggaagctcttgaggtggtccacagaaaatagctcaaggaatgcatgtgaaaggtctgggttgaatgaaaataatcaggacattggtgattcttcagaaaagcaggagcatctcctggctgtgccaggtgtgattctcttatgctgtggccttatgttaccatgctttcatgctgaaaggaaagaagtcagcaggcatgacaatgcaaccattcagcgcaacgcacttgaatcagtttcatcctatgaaggaagcatgtcatctgagaaagtcccaccaactccacatcgaatacctccaagtccctctagatttgcgccgtctccacagatagctagagttggatctgtcaacttaagcatccagcagatcctcagggcaactcagaacttctcaccttcatttaagttaggtgaaggaggatttgggatggtctacagggctgtattgccagatggcaatgttgttgcggtcaagagagctaaaaaggatcagtttgcaggtcctagggatgagttcagcaatgaagtagacttgcttgctaagatagaccaccgaaatttggtgaggttactgggttttactgataaaggaaatgagcgcattatcatcactgagtatgttccaaatggtactcttagagaacatctagatggtcaacatggaagagtcctagattttaatcagcgtctagaaattgcaattgacgtggctcatgcacttacttatcttcatctgtatgcagactttcaaaaaattcaacgaaggcaacacgagagagatactggacccattgctggaagatcacgtggacgacgaggtgcttgaaaagctccttagcctggctttccaatgcgctgctccgacacgggacgaccggccgaccatgaaggaagttggggagcagctgtgggagataaggaaagagtacggaaagagtgttaggaaggtgtgaagatcatggaaaacatttccctgtttctcaagactttccctggaccaaggggactaagggggtgtttggttttatagggattaaattttagttcttccattttattctatttaagtccctaaattaccaaacacggaaatcaaaactttattttagttttagtatttggtaatttagagacttgaatggaataaaatggatagactaaaaataagttcctagaaatcaaacaccctctaagcatgcgaagtatttgtgcccattggataaacacctgatcatctatgtttcttggaagatgtgacctgaagaaatgtacagtgcgataacaccgccatcagtttgtgctttcttgtctcagtttgcagtgcactccctctatggagaatgtatattttggagttctcgcatttcttgattctgttgatatggtattctgatggatgtacccgcatacattactgcaaacggtctgaaataatatacgaagggaaattgtttgtattggaagacactgaagcttccggatgcaatctttatttatagtatta

SEQ ID NO: 8260 - DNA, 2749 bp, Zea Mays
ttcccaactgcccactacctctcgttcccgtctccttcctctattcgtgttgtccgttcgctgccgccgtcgcctggttcgcatcgcatacagcgcctcagtccagatcgatcctccctcttcccagatcgggtctagttggacggcagcagccgccgccgcggcatctgtcatattcacgccgcgtgtgctctctctttctgtctccctctctatctgcgacgactgggtgtgataccgcagccgccgccctacgctgggttcccgagccttcgccgatctcttctccggcgaagagcgcccaccagatccgccgcgcatcgatgtctcctttggctcttctccaagctctcatcttcatcctgtgctgctcgcctctggcttctgcttcgtcgtcggagctaacccttgcaggagctgcttgtggagatgatcagcttgtcatcttcgatgcttctgatggcctccttaacctgtcggtcaatggggttctgatgcaagatcgcgtttttgcctgccagaagctcggcttctactttggcagtggatgcctccgctgcagcaacctttcagatgcgtggaggagtgccgtaaagcagtactgtggtgaagggagcgaaaagagccatgcaactttacatcaagatgtgccaaggaagctcttgaggtggtccacagaaaatagctcaaggaatgcatgtgaaaggtctgggttgaatgaaaataatcaggacattggtgattcttcagaaaagcaggagcatctcctggctgtgccaggtgtgattctcttatgctgtggccttatgttaccatgctttcatgctgaaaggaaagaagtcagcaggcatgacaatgcaaccattcagcgcaacgcacgaagcatgtcatctgagaaagtcccaccaactccacatcgaatacctccaagtccctctagatttgcgccgtctccacagatagctagagttggatctgtcaacttaagcatccagcagatcctcagggcaactcagaacttctcaccttcatttaagttaggtgaaggaggatttgggatggtctacagggctgtattgccagatggcaatgttgttgcggtcaagagagctaaaaaggtaatctgatgctacctcatgtcttatacatgttagttattaaactctattgactattctcattcatgggctttttcagcatatattgagttaaattctattccttgccaaattatgttctcttcatatctatttcactatattttaataaagttataaaatattttacaacttatatttgtacctcagctcaatagtttgtctgtaaatttgtctgcctctggcaacaacgaatgaagttttttcctgggtgttgttggagctgcgctggcgccctccacccaatcctatgcataacttgctctgctgttacaggatcagtttgcaggtcctagggatgagttcagcaatgaagtagacttgcttgctaagatagaccaccgaaatttggtgaggttactgggttttactgataaaggaaatgagcgcattatcatcactgagtatgttccaaatggtactcttagagaacatctagatggtcaacatggaagagtcctagattttaatcagcgtctagaaattgcaattgacgtggctcatgcacttacttatcttcatctgtatgcagagaagactataattcatcgtgatgtgaagtcatcaaacatcctgctgacagatagctatcgggccaaggtgtctgactttgggtttgcaagaagtggccctagtgacacggagaagacacacatatcaacgaaagtgaaaggcacagctgggtacctggaccccgaatacttgaggacataccagctaactccaaagagtgatgtcttctcatttggcatattgcttgtagaaattctttctgctcgcagacccgtagagctgaagcgaacccctgaagagaggatcacaatcagatggactttcaaaaaattcaacgaaggcaacacgagagagatactggacccattgctggaagatcacgtggacgacgaggtgcttgaaaagctccttagcctggctttccaatgcgctgctccgacacgggacgaccggccgaccatgaaggaagttggggagcagctgtgggagataaggaaagagtacggaaagagtgttaggaaggtgtgaagatcatggaaaacatttccctgtttctcaagactttccctggaccaaggggactaagggggtgtttggttttatagggattaaattttagttcttccattttattctatttaagtccctaaattaccaaacacggaaatcaaaactttattttagttttagtatttggtaatttagagacttgaatggaataaaatggatagactaaaaataagttcctagaaatcaaacaccctctaagcatgcgaagtatttgtgcccattggataaacacctgatcatctatgtttcttggaagatgtgacctgaagaaatgtacagtgcgataacaccgccatcagtttgtgctttcttgtctcagtttgcagtgcactccctctatggagaatgtatattttggagttctcgcatttcttgattctgttgatatggtattctgatggatgtacccgcatacattactgcaaacggtctgaaataatatacgaagggaaattgtttgtattggaagacactgaagcttccggatgcaatctttatttatagtatta

SEQ ID NO: 8261 - DNA, 1749 bp, Zea Mays
tctccccctctcctcctctagcttctccttctctctctctccttcctggaccattctctctatctcctttctctctctacacatactcagacgagcagaagcagctagggacaccataggcaaactacttcagcaagaaattaaactatctcctacgcaagatcagaagaaactgtgtatggagcaagaagaggttggcctcgccctgggcctctccctcggctccggccaccaccaccaggagctcaagccccaacatccgtcgcatccgtgtgcggcgttgttggagccttctctgtcgctcagcggcccggcgaccaaggatgatggcccgaccgcaccggtgaggaggttcgctgccgtgaagagggagctgcagacgatggaggggaacgacgacgaggccaccggcagggtacttgtctactcagtggcgtcgtcggcggtggttactgccgacgacgacgaagggtgcaacagcagccggaagaagctgaggctgtccaaggagcagtcggcgctgctggaggaccacttcaaggagcacagcaccctcaaccctaagcagaaggctgctttggccagacaactgaacctgagcccaaggcaagtggaggtttggttccaaaacagaagagccaggttagtcatcactcatatattcacctcaaaatccatatctcctttcagttttttttcgttccatcatatattcttcgtccccaattattcttaatatctattcctaaaaaatcattcagaaattaaacacatatataattactttttaacaacgaattatcttaagtacgtactatatgatctattggatatatatataaaaactatcctgatgtgttctccatgcagaaccaagctgaagcagacagaagtggactgcgagattctcaagcgctgctgcgagacgttaacagaggagaaccggcgtctccaccgcgagctccagcagctccgcgccctcagccacccgcacccccacccggctgcctttttcatgcccaccgccgctgccgctgcgctctccatctgcccctcctgccagcgccttgttgccaccggagcatctgccgccgccgcaaccaccgccggtgcagataataagcctaaggcgggcggccccggcggccgagcgccacacgtgttcagccctttcaccaattctgccgcctgctgaacacgcatacatatgtatatacatgcatgcgcacacatacatatatacgtatttttctttagcgctagccacgctctatcattcatcgatggtcatctactagctagatagtaattggttcactagatggcatatattcctgtcccctccccccttaattcattagctttgttttttcacaagctaattaatgaattgatagcggcgtcgcgtgaggacgatggagcaccacgcatgcatatgattctagtagcaaaaacaagagatatatgtcttgtttaatttggtgttgcttctgcttagtatagtgcccactgctggtgctgtagctgtagctttaattagtaggtgttcctgatggatttcctcttgtattagttaactgtcagtcagggaatagtaatgatgacagcatgacaccacatacacatcccagtttatttggatgtggatccatgtatatatgcacatgccacatgacggatctgtttcaacaattaaatactatattgatttgtcttcagaagttttgcatatatatctttgtgggcaag

SEQ ID NO: 8262 - DNA, 1839 bp, Zea Mays
agctataaaggtttgcgcagccgtagaggatccgagcagcagccacgtgggccgtgctcatggtccctttacgtctacaaataccctcccgctctccctctccttcttctctagactccccttcgtccctttctctctcttcacactcgcctcgccattaaagctccaaaaaagaaaaaaaggctgcgaaaaaaatcatcttctcttctcctaaaatcttccaccttgaaccgtccctgtccgcgaatttctagatgccccgatcgcttccgatttttttctggatttctccgattttttgaagtatttttccttgtggacggtttcattgccattcctcgacggggttagggtttgcggggatgagggtgcacggcgaggtgtcggacgatgaggcggccgtggctgtggttggggaaacggtgccctcctcgccgcctcccgcctccgtggtgcagccgctggtggtggggtacgccctcaccaagaagaaagtcaagagcttcctgcagcccaagctgctcgcgctggccaggaagaaaggcattcatttcgtatcaattgatgagacttgccccctctctgaacaaggtccatttgacatcattttgcacaagcttactagtaaggagtggcagcaagttttggaggactatcgtgaagagcatccagaagtgactgtcctcgacccaccaaatgctatccaacatttgcacaatcgccaatcaatgctacaagaagttgctgatttgaacctgtccaatggttatggagaggtttgcgctccacgacaactagtcatcatgaaagatccgtcttccatacctgatgcagttgccaaggctggactaaccttgcctttggttgccaaaccattggtcgctgatggtacatcaaaatctcatgagctatcccttgcatatgtggaagcatcattgcctttgcttgaccctcctttggttctccaggaatttgtcaatcatggtgggatcctatttaaggtatatattgttggtgaaacaatacaggtagtccgcaggttttcacttcctgatgttaatacatatgacctgggaaacaatgacggtatctttcgattcccaagagtttcttgtgctacaaataatgcagaagatgcagatgttgacccttgtattgcagaacttcctccaaagccacttcttgagaaacttggccgggagcttcgacgccggctggctgtttaacatagatatgattagagaacatggaagaaaggaccggtactatgtcattgacatcaactattttcctggatatggcaagatgccaggatatgagcacatattcactgacttcctgctaagcctcgtgcaaagcaagtacaagaggctaagtgggagctgaagcgtagagaagatttactttcgatggagactattaacagatgccagctagcctggccatataacagtggcagctagaaaggtcttccaggttgtacatagcaagggggtgggtcttagcatgaatgcggtgtttgggccggggccttgactgaaggcgcatagcagaactaagataaaaaatgcagtgtttgggccggggcagtatctgaagaaaggttttggctccgtgcccagcctactgtgtaattcgtttgaccgagtggccgacctgtgtaaatcgttttaccgagtgccgacctgggcttctttagtttcaaaaacaaacaaacaaaacctttgcttcgtttttgcattcattgtttatcacccgactgatgccccgttctttgattgagatttgctgtagttaattttgcggagatttcgctgttaaccctgtccagagattttg

SEQ ID NO: 8263 - DNA, 1772 bp, Zea Mays
agctataaaggtttgcgcagccgtagaggatccgagcagcagccacgtgggccgtgctcatggtccctttacgtctacaaataccctcccgctctccctctccttcttctctagactccccttcgtccctttctctctcttcacactcgcctcgccattaaagctccaaaaaagaaaaaaaggctgcgaaaaaaatcatcttctcttctcctaaaatcttccaccttgaaccgtccctgtccgcgaatttctagatgccccgatcgcttccgatttttttctggatttctccgattttttgaagtatttttccttgtggacggtttcattgccattcctcgacggggttagggtttgcggggatgagggtgcacggcgaggtgtcggacgatgaggcggccgtggctgtggttggggaaacggtgccctcctcgccgcctcccgcctccgtggtgcagccgctggtggtggggtacgccctcaccaagaagaaagtcaagagcttcctgcagcccaagctgctcgcgctggccaggaagaaaggcattcatttcgtatcaattgatgagacttgccccctctctgaacaaggtccatttgacatcattttgcacaagcttactagtaaggagtggcagcaagttttggaggactatcgtgaagagcatccagaagtgactgtcctcgacccaccaaatgctatccaacatttgcacaatcgccaatcaatgctacaagaagttgctgatttgaacctgtccaatggttatggagaggtttgcgctccacgacaactagtcatcatgaaagatccgtcttccatacctgatgcagttgccaaggctggactaaccttgcctttggttgccaaaccattggtcgctgatggtacatcaaaatctcatgagctatcccttgcatatgtggaagcatcattgcctttgcttgaccctcctttggttctccaggaatttgtcaatcatggtgggatcctatttaaggtatatattgttggtgaaacaatacaggtagtccgcaggttttcacttcctgatgttaatacatatgacctgggaaacaatgacgaacttcctccaaagccacttcttgagaaacttggccgggagcttcgacgccggctgggtcttaggctgtttaacatagatatgattagagaacatggaagaaaggaccggtactatgtcattgacatcaactattttcctggatatggcaagatgccaggatatgagcacatattcactgacttcctgctaagcctcgtgcaaagcaagtacaagaggctaagtgggagctgaagcgtagagaagatttactttcgatggagactattaacagatgccagctagcctggccatataacagtggcagctagaaaggtcttccaggttgtacatagcaagggggtgggtcttagcatgaatgcggtgtttgggccggggccttgactgaaggcgcatagcagaactaagataaaaaatgcagtgtttgggccggggcagtatctgaagaaaggttttggctccgtgcccagcctactgtgtaattcgtttgaccgagtggccgacctgtgtaaatcgttttaccgagtgccgacctgggcttctttagtttcaaaaacaaacaaacaaaacctttgcttcgtttttgcattcattgtttatcacccgactgatgccccgttctttgattgagatttgctgtagttaattttgcggagatttcgctgttaaccctgtccagagattttg

SEQ ID NO: 8264 - DNA, 1596 bp, Zea Mays
ctccgctctgtgacccgcgctgtcatcaacgtcgtcctccccccagatctcgtgcagaccgtctcgcctgccaatccggcgtccaccgccgaggagtacacgcacatggtcgcgctctccagacggttcgtcgcgctctccagaccggtcgtcccgctcgccgtcgggaccacgcccaccgccgggacagcgtgcagatcgctctctcctgccgcacccagcgccctggactctggaggctatggagccacaggcagaccagactacggaccgtacgtactacgccgccgtctgtatcccttgaatgcatccacctgtcggtccatcctggccgggtacagtgcatcggttgctgtcagccgctagatgcgtggctggtgaatggcgatctgattccgacgctgctgcagcagcttcattccctagcgaactctgcaggtaaaaccatcgagaagaggaagctggtcattgatgtcaagtatttcttcttctatgtgcactcggaaccccgcgacatctacggagagacttcatgcctagcaaccggagacttcatgctgtccctcgactttgccacgaataccttttatcagaaaaatggggggaacaataaaggatgttggaaaatgaaatatattattatagctaataaattggctttcccggaggcactaggatttggacccagccaagtggccaagtgtatggaagaatcatgtcgtggcacagacgaccagttgcttgactctccctcttctgtcttattacatttgtacgcaagatatagatagtactactatacagtggagtcttcttgcagtttgtctattttacacaactgacagtcttcaggtatctcattgtctgttctcagttagttatattaatgatgtttactattaattttgaccatcacaactttgacttgtccagctctgcctctattagtcggttcagctctgcctctataatttttttggtccactgtacaatgggctcctttattacctccttgagaatccttttcagtttggtccactgtctcatcatccatcgaatcacggcccaggcacacaatctaaaaggcaaaataattatagaggcagagctggacatagtcttcaggtatctcattgtctattctcagatagtactacaatgatctagcctctataaaatttattttagtgattcattgcatcatattactcctatctttttgcaatatagtttggattcacattagccttgtaacaaaaaataaattctcaaaacgttattatgatactcctaattagattggtatgctagacaatgtgccatacaactaattcgtttgaattttgcatgcagttgaatttaaggttcctcttcccttgtttggaagaggttatgatcattgtacgctctcggctcaatgttgaacactcttgaaatacactgtgaagttgcagaggatggtcatcagaatctcaaagatgaagaattgccataaaggtgctgatgagttctttgatgatatatgtaatttcaattacatgaactacaagaaagtgcaaattgaataagtggagatgatatagtattacatattta

SEQ ID NO: 8265 - DNA, 1444 bp, Zea Mays
gagtaccaagaggaactcgcgggggatgagcctcttcgcatgcagatggctgccggcagttgcaggcaagagggggagggctccagctccaaaggcgctcgtcttcctctgccacggctacgccgtggagtgcagcgtgacgatgcgcggcaccggcgagcgcctggcgcgtgccggctacgccgtctacggcctggactacgagggccacggccgctccgacgggctgcagggctacgtgccggatttcgacgcgctggtgctggactgcgacgagtacttcacctcggtggtggcggcggcggcgcagtcgcagtccaaggacgcccaccaacttccccggttcctgctcggggagtccatgggcggcgccgtggctctcctcctccaccgccggcgccccgagtactggagcggcgccgtgctggtggcgcccatgtgcaagatcgccgacgacatgcggcctcacccgctggtggtcaacatcctcagggccatgaccaccatcatcccgacgtggaagatcgtgcccagcaacgacgtcatcgacgcggcgtacaggagccaggagaagagggacgagatccgcagcaacccttactgctacaaggacaagccgcgactcaagaccgcctacgagctgctcaaagtcagcttggacctcgagcacaacctcctccaccaggtgtcgttgccgttcctgatcgtgcacggcggggcagacaaggtgacggacccgtcggtgagcgagctgctgtaccaatcggcggcgagccaggacaagacgctcaagttctatccgggcatgtggcacgccctcacctccggcgagtcgcccgacaacatccaagccgttttccaagacatcatcgcctggctcgaccacaggtcacccgacacggaacaggaggagctggtgtcgtcggaggtggagcagaaggccaagcacgacgaccagcgccaccaggagcagctccaggacggcaacaaatagctagctgcttgcttgcctgctgctttcttctctttacagaacgaaccgtttcatttggtcatgcatggatacacatcatgtctcagtgatacgtaccgactaaattaaattattagatcgaccgcgcttacctagaaattaaacaatcagctgttcgacatcatatatcatcaggtcctttattaattttagactccaacgtgatgcattatatatatggtttactgcagcaatctagctacatcatatacctatctacattatcgcctaatgagttagatatgaaactttacattaatgaaaaaactcgcttctattttgatagaagaggaaatctgtatattccggcgggcaaaagtgaaattaaacatctattggaggaagatgataacacaaaatacttctaattagtggtaaatggcaaacaccaaaaataaagaaaatatagtc

SEQ ID NO: 8266 - DNA, 1854 bp, Zea Mays
cgaaaatatgacttttacttgaacacttattgcctctttggtatgcgtattcatgtccaaaataactagtatttcaatggagtaggtacagagtggtctctaaagtttctgtaaaacagtggccacgcgtcaccaccgagtcgcgcccgcacactatgctgcgtgccggcgtgccctcgtgtaaaagtcctcgcgagggctgagtcgaggacagagtacagactcgacaaccgtcgatgggtggtgtgggctggtggcggatgaacaatggccctgtttgtttcggcttttcgcagcttctggtcaccaaaagttgctgtgtactaccaaacactcagcttttcagccagcttctgtaaaattcgtttgggtaaaactcattcaaaatcaacataaacatataatcggttgactcgtcgcaatagtagtaatccgtcactttatagatcctgagccacatggacaactttatcttcctccgcacgtaattctaatgatactcagattctctacacagctagattctccccatagctagattctcggaaaagcttgtcagaaaaaagctgaaccaaacaaatgtctatctctttcacgtgacagaacgagagagaaaagaatcgttattctttataaccgacggtatgtacgtacgtggctattttttaaagctaatgactagtttaaacacttaaatcgtcttcaggattctaaaagatcgaggagaaataagctaatttctcacccaatctctagaaatactaaagaaaacttaagtttctaacttagccctaaaaaaggtgaggtgagtttattgccttttcatcttttgattagcttttggtttttacaaaataaaaataaattaaaaggattagtcaaagagagccttatcttaggtgtttaaaatagtagcagtaataatagtagtaataataaaacaatatgagaacgattaaagacccgacgacctgacctgacctgacctgacccagtcatcacgtcgataggtccattctttagccaagcccggcccggtccgttgtgtaataaactgataactacgaccttaacgactagagttcgagtattctcgtctcatctgtggaagaggagagaagactgaagagaagggaagacatggccgtgacggcggaagcggcggcagagatggtgttggagcggcgggcgtacgcgcgggtggggctcctcggcaaccccagcgacgtgtacggcggcagggccctgtccttcgccatcgccgacttttccgccaccgtccacctccgcccttcgcccgagctgctcatccagccgcatccgcaccacgacctcgtcgccttcccctctctccctcaactcccaactgaccaagcatcgtgccggaggggctacagtcacagatgggccaaggcgtaaggctaaggaagagaagcgtaaagacgtttggaccggcttgggttaatgggctgagtgagtgcgcgtgagagcgatatgtacactgttgtctgctggggagggtagcgaataatcagaactcatcttcatctccaagacattgtgctctctgcttcctgccttcttcctccttactctgaatctactctgagtattgtatccagtatatgcgagagtgtaacaagtggtatcagattcgtcgatccttggccatagcgcaagctatatcatcctggagtcgagtggtgttcatcctcatttcaccctatttcggcgacaacaagtgctcatgaatccggatacccaaaccatcctggtagaaatcgcaaggcgtttctcggatcatgacgccgagtgggatcgccgtgtggcggagctgatgaggacatcactatg

SEQ ID NO: 8267 - DNA, 392 bp, Zea Mays
aagcccggcccggtccgttgtgtaataaactgataactacgaccttaacgactagagttcgagtattctcgtctcatctgtggaagaggagagaagactgaagagaagggaagacatggccgtgacggcggaagcggcggcagagatggtgttggagcggcgggcgtacgcgcgggtggggctcctcggcaaccccagcgacgtgtacggcggcagggccctgtccttcgccatcgccgacttttccgccaccgtccacctccgcccttcgcccgagctgctcatccagccgcatccgcaccacgacctcgtcgccttcccctctctccctcaactcgtaggaagatcgagaacttacattacctccaagtccgaggctaggtcgatccgat

SEQ ID NO: 8268 - DNA, 3566 bp, Zea Mays
cgatcaccagtggaggagtataatgccattgagcgatgaggaacgccgcgtcggcactcccgtggtggtcacttgcaatgaccagagacgcgaggtctccgttgcccagaacatcgctaacaagcaaattgatcgcacctttgcattcgacaaggtgctaggaccaaagtctcaacagcaggacgtcttcaaccatgctgttgtgccacttgtcagcgaggttttggacggttataattgcacaatatttgcatatggccaaactggaactggcaaaacatacacaatggaaggaggagggggcaaagcactgaatgctgacctcccgactgatgccggtgtcattccaagggctgttaagtgcatatttgacatcctcgaggcacagagtgcagagtacagcatgaaggtttcttttcttgagctgtacaatgaggagctcacagatcttctagccgcagaggaatcgaaattctccgatgacaagtccaagaagcctttggcactcatggaggatggcaagggtggagtctttgttagagggctcgaggaagagctagtttcttcagctgccgagatctacaggatactggagagaggctctgcaaagagaaaaactgctgaaactcttctcaacaagcaaagcagtcgctcacactctattttctctatcaccatccatattaaggaatgcacacctgagggtgaggaaatgatcaagtgcggaaagcttaatctcgttgaccttgctggctctgaaaacatatctcggtccggtgctagagacgggcgagctcgcgaagcaggagaaattaacaagagtctgcttacacttgggcgtgtcattaatactcttgtcgagcactctggacacataccatacagggatagcaagttaacaagattgttaagagattctttgggagggaagacaaagacttgcattatagcgaccatttcaccttcagtacactgccttgaggagacgctaagcaccctggattatgcgcatcgtgcaaagcacatcaagaataagccagaggtcaatcagaagatgatgaaatctgcgctcatcaaagatttgtattttcaaatggaccgtctcaagcaagaactatatgctgcaagggagaaaaacggtgtttacattccgagggaacaatacatagcagatgaatctgaaaagaaggctatgtcagagaaactggatcgtttggagcttgttttggaatcaaaagataagcaattggaagagcttcatggactctatgaatctcagaaagtactgagtgcagatctaagtgatcaacttcagacattacagaaaagaatgaaggaaacagagtgcaccctagcggatcttgaaacgagatacatgaaggcaaatgatactattaaggagaagcaatatttgatagaaaatcttcttaaatcagaaaaagttcttgttggtgaagcacaaacactccgatcagagctggagaatacagcaggggatctacatgggctattttcaaaattagaaaggaaggaaaagatcgaagacaaaaatggaagtataattcaatatttccattcccagctgatccaggaaatgaatgtattgcatagaacagtctcaacctcggtctctcaacaggagagacaactaaaagcacttgaagaagagatgcagtcttttgtcacctcaaagggcaaggttgccggaggacttcaagagcatgtaagaaagctcaaagagagctttaattctaggatagcagaattgcatggttttgcaaatgaactcaagcataaatctatgttgagctttgaaaaccttaattcgcaagttaccacacacacatctagccttgaggattgcatgaaggacctattggttgatgccgatgaactactcattgcactacaaaatgggctttctcagcatgaagtgaactttgctacgtttattgagcaacagcatgaggggctctctagaaatttagagggaacaaagtttgtttcggcaactacaatgaacttcttcagaactatagattcacatgcattgggactcctaaagattttggaagaatcaaagatggaacatcaaaagcaactcttccagcttcagaagaagtttgaggccgttgttgctgacgaagagaagtacttgatggagaaggttgcagggttgtttgcagaatcaaacgctcgaaagaaaaatatggttcaagatgacatatgcagcctcaataggactgtttctgagagttcgaacaatttacaaaccgaaactaccaagctgcatgattttacatcttctatgaaagagcaatgggaaggctacatgaagaaaactgaagaggcattccagcaaaatgtatcatctattgaacagaaaagaggcttcttggcagggaattttcagcagtgcaaggaaaaggtagaatcatgctcagaacaatggattactgcacaaaatttggtgttggcacttggaagaaggaatgcagaagccatcggtttggttataagtgatgggaatgaggtgagcaaccaactgggtgcaagaatttcatctgctgttgctgctggatttgaagataatgacatttcaagcaaatcccttctaagttgtattgacgattcattgaagttggaccatggtattcgcgagaatgtgaaatccatcgtcatgacatccagagcacaacttcatgacttggaacatggtcactatgagatgacaaaagcaataacagggaatgccgataggtctctgggagaagattataaggtggatgaagcaacttgttcaacaccgagaaggcgtgagataaacattccggacagccaatcgatcattgagttggtaacccccctagaagatatcgtgaagtcattttgggacagcagaacaccgacgaagcctgctctaaatgcaaaagggaagcagcagttggtagggtcgacgacccctgaaacacaaagagcccctctttccgcaataaattaggagtttcattactgtatatactacaaacattcttgtgtggtcaagtaatgttgatcaagaatgttgagagaagttactggtaaaggagagctgtgtattctccagattcatccaatgtatgaacggaatcatacatccaatgtattttggagtggagtgcaactccaaaatacagagcaaatcgagcatgaccatttgtcaagttccgtgaaatggactcatttatttgtatctatgctgttgtgcacttgtttttaataccttcgtccttaaaccttcgtccgtgaaatggactcatttattcgcgagaatgtgaaatccatcgtcatgacatccagagcacaacttcatgacttggaacatggtcactatgagatgacaaaagcaataacagggaatgccgataggtctctgggagaagattataaggttagcgatacttatcgtctaaaagaagaaggctaagtaggaaaaagtatgatggaatgacgaagggaatgtaaaaaaggacattgagcaggacatttcaagtacatatacaaagacatgctatatacaattttac

SEQ ID NO: 8269 - DNA, 3620 bp, Zea Mays
cagtcgaccgatccccatttcccctcctcatctgcgtttcatttcattcatcatcatcatccatggaggcttccacccccaccgctcgccgaggtggagcccccgccgactacgccgccatgtccctttctccctccccctccttctcccacacgccgaggagcggcgcctcgtcctccgcccacaagccccccaccacaagcaggcaccgggatcgggggcccctcctcttcaacggcaacagtaacagtaacagcagcatcgctgcccagcaggccgcacagctgcagcaaacctccaccaccacctcctccaaggggtcctccggatccggaggcgttaacatccaggtcctcctccgatgcagaatgctgacctcccgactgatgccggtgtcattccaagggctgttaagtgcatatttgacatcctcgaggcacagagtgcagagtacagcatgaaggtttcttttcttgagctgtacaatgaggagctcacagatcttctagccgcagaggaatcgaaattctccgatgacaagtccaagaagcctttggcactcatggaggatggcaagggtggagtctttgttagagggctcgaggaagagctagtttcttcagctgccgagatctacaggatactggagagaggctctgcaaagagaaaaactgctgaaactcttctcaacaagcaaagcagtcgctcacactctattttctctatcaccatccatattaaggaatgcacacctgagggtgaggaaatgatcaagtgcggaaagcttaatctcgttgaccttgctggctctgaaaacatatctcggtccggtgctagagacgggcgagctcgcgaagcaggagaaattaacaagagtctgcttacacttgggcgtgtcattaatactcttgtcgagcactctggacacataccatacagggatagcaagttaacaagattgttaagagattctttgggagggaagacaaagacttgcattatagcgaccatttcaccttcagtacactgccttgaggagacgctaagcaccctggattatgcgcatcgtgcaaagcacatcaagaataagccagaggtcaatcagaagatgatgaaatctgcgctcatcaaagatttgtattttcaaatggaccgtctcaagcaagaactatatgctgcaagggagaaaaacggtgtttacattccgagggaacaatacatagcagatgaatctgaaaagaaggctatgtcagagaaactggatcgtttggagcttgttttggaatcaaaagataagcaattggaagagcttcatggactctatgaatctcagaaagtactgagtgcagatctaagtgatcaacttcagacattacagaaaagaatgaaggaaacagagtgcaccctagcggatcttgaaacgagatacatgaaggcaaatgatactattaaggagaagcaatatttgatagaaaatcttcttaaatcagaaaaagttcttgttggtgaagcacaaacactccgatcagagctggagaatacagcaggggatctacatgggctattttcaaaattagaaaggaaggaaaagatcgaagacaaaaatggaagtataattcaatatttccattcccagctgatccaggaaatgaatgtattgcatagaacagtctcaacctcggtctctcaacaggagagacaactaaaagcacttgaagaagagatgcagtcttttgtcacctcaaagggcaaggttgccggaggacttcaagagcatgtaagaaagctcaaagagagctttaattctaggatagcagaattgcatggttttgcaaatgaactcaagcataaatctatgttgagctttgaaaaccttaattcgcaagttaccacacacacatctagccttgaggattgcatgaaggacctattggttgatgccgatgaactactcattgcactacaaaatgggctttctcagcatgaagtgaactttgctacgtttattgagcaacagcatgaggggctctctagaaatttagagggaacaaagtttgtttcggcaactacaatgaacttcttcagaactatagattcacatgcattgggactcctaaagattttggaagaatcaaagatggaacatcaaaagcaactcttccagcttcagaagaagtttgaggccgttgttgctgacgaagagaagtacttgatggagaaggttgcagggttgtttgcagaatcaaacgctcgaaagaaaaatatggttcaagatgacatatgcagcctcaataggactgtttctgagagttcgaacaatttacaaaccgaaactaccaagctgcatgattttacatcttctatgaaagagcaatgggaaggctacatgaagaaaactgaagaggcattccagcaaaatgtatcatctattgaacagaaaagaggcttcttggcagggaattttcagcagtgcaaggaaaaggtagaatcatgctcagaacaatggattactgcacaaaatttggtgttggcacttggaagaaggaatgcagaagccatcggtttggttataagtgatgggaatgaggtgagcaaccaactgggtgcaagaatttcatctgctgttgctgctggatttgaagataatgacatttcaagcaaatcccttctaagttgtattgacgattcattgaagttggaccatggtattcgcgagaatgtgaaatccatcgtcatgacatccagagcacaacttcatgacttggaacatggtcactatgagatgacaaaagcaataacagggaatgccgataggtctctgggagaagattataaggtggatgaagcaacttgttcaacaccgagaaggcgtgagataaacattccggacagccaatcgatcattgagttggtaacccccctagaagatatcgtgaagtcattttgggacagcagaacaccgacgaagcctgctctaaatgcaaaagggaagcagcagttggtagggtcgacgacccctgaaacacaaagagcccctctttccgcaataaattaggagtttcattactgtatatactacaaacattcttgtgtggtcaagtaatgttgatcaagaatgttgagagaagttactggtaaaggagagctgtgtattctccagattcatccaatgtatgaacggaatcatacatccaatgtattttggagtggagtgcaactccaaaatacagagcaaatcgagcatgaccatttgtcaagttccgtgaaatggactcatttatttgtatctatgctgttgtgcacttgtttttaataccttcgtccttaaaccttcgtccgtgaaatggactcatttattcgcgagaatgtgaaatccatcgtcatgacatccagagcacaacttcatgacttggaacatggtcactatgagatgacaaaagcaataacagggaatgccgataggtctctgggagaagattataaggttagcgatacttatcgtctaaaagaagaaggctaagtaggaaaaagtatgatggaatgacgaagggaatgtaaaaaaggacattgagcaggacatttcaagtacatatacaaagacatgctatatacaattttac

SEQ ID NO: 8270 - DNA, 3948 bp, Zea Mays
aagcaagtgccgcgtccgcgtgcgtgccggcgggcggcggcctagccctaaataagaggcaagaagcattgaggcattcttcaccgattcaaaatcagtcgaccgatccccatttcccctcctcatctgcgtttcatttcattcatcatcatcatccatggaggcttccacccccaccgctcgccgaggtggagcccccgccgactacgccgccatgtccctttctccctccccctccttctcccacacgccgaggagcggcgcctcgtcctccgcccacaagccccccaccacaagcaggcaccgggatcgggggcccctcctcttcaacggcaacagtaacagtaacagcagcatcgctgcccagcaggccgcacagctgcagcaaacctccaccaccacctcctccaaggggtcctccggatccggaggcgttaacatccaggtcctcctccgatgcaggccattgagcgatgaggaacgccgcgtcggcactcccgtggtggtcacttgcaatgaccagagacgcgaggtctccgttgcccagaacatcgctaacaagcaaattgatcgcacctttgcattcgacaaggtgctaggaccaaagtctcaacagcaggacgtcttcaaccatgctgttgtgccacttgtcagcgaggttttggacggttataattgcacaatatttgcatatggccaaactggaactggcaaaacatacacaatggaaggaggagggggcaaagcactgaatgctgacctcccgactgatgccggtgtcattccaagggctgttaagtgcatatttgacatcctcgaggcacagagtgcagagtacagcatgaaggtttcttttcttgagctgtacaatgaggagctcacagatcttctagccgcagaggaatcgaaattctccgatgacaagtccaagaagcctttggcactcatggaggatggcaagggtggagtctttgttagagggctcgaggaagagctagtttcttcagctgccgagatctacaggatactggagagaggctctgcaaagagaaaaactgctgaaactcttctcaacaagcaaagcagtcgctcacactctattttctctatcaccatccatattaaggaatgcacacctgagggtgaggaaatgatcaagtgcggaaagcttaatctcgttgaccttgctggctctgaaaacatatctcggtccggtgctagagacgggcgagctcgcgaagcaggagaaattaacaagagtctgcttacacttgggcgtgtcattaatactcttgtcgagcactctggacacataccatacagggatagcaagttaacaagattgttaagagattctttgggagggaagacaaagacttgcattatagcgaccatttcaccttcagtacactgccttgaggagacgctaagcaccctggattatgcgcatcgtgcaaagcacatcaagaataagccagaggtcaatcagaagatgatgaaatctgcgctcatcaaagatttgtattttcaaatggaccgtctcaagcaagcatgatggaggaattcttcaggctatgtcagagaaactggatcgtttggagcttgttttggaatcaaaagataagcaattggaagagcttcatggactctatgaatctcagaaagtactgagtgcagatctaagtgatcaacttcagacattacagaaaagaatgaaggaaacagagtgcaccctagcggatcttgaaacgagatacatgaaggcaaatgatactattaaggagaagcaatatttgatagaaaatcttcttaaatcagaaaaagttcttgttggtgaagcacaaacactccgatcagagctggagaatacagcaggggatctacatgggctattttcaaaattagaaaggaaggaaaagatcgaagacaaaaatggaagtataattcaatatttccattcccagctgatccaggaaatgaatgtattgcatagaacagtctcaacctcggtctctcaacaggagagacaactaaaagcacttgaagaagagatgcagtcttttgtcacctcaaagggcaaggttgccggaggacttcaagagcatgtaagaaagctcaaagagagctttaattctaggatagcagaattgcatggttttgcaaatgaactcaagcataaatctatgttgagctttgaaaaccttaattcgcaagttaccacacacacatctagccttgaggattgcatgaaggacctattggttgatgccgatgaactactcattgcactacaaaatgggctttctcagcatgaagtgaactttgctacgtttattgagcaacagcatgaggggctctctagaaatttagagggaacaaagtttgtttcggcaactacaatgaacttcttcagaactatagattcacatgcattgggactcctaaagattttggaagaatcaaagatggaacatcaaaagcaactcttccagcttcagaagaagtttgaggccgttgttgctgacgaagagaagtacttgatggagaaggttgcagggttgtttgcagaatcaaacgctcgaaagaaaaatatggttcaagatgacatatgcagcctcaataggactgtttctgagagttcgaacaatttacaaaccgaaactaccaagctgcatgattttacatcttctatgaaagagcaatgggaaggctacatgaagaaaactgaagaggcattccagcaaaatgtatcatctattgaacagaaaagaggcttcttggcagggaattttcagcagtgcaaggaaaaggtagaatcatgctcagaacaatggattactgcacaaaatttggtgttggcacttggaagaaggaatgcagaagccatcggtttggttataagtgatgggaatgaggtgagcaaccaactgggtgcaagaatttcatctgctgttgctgctggatttgaagataatgacatttcaagcaaatcccttctaagttgtattgacgattcattgaagttggaccatggtattcgcgagaatgtgaaatccatcgtcatgacatccagagcacaacttcatgacttggaacatggtcactatgagatgacaaaagcaataacagggaatgccgataggtctctgggagaagattataaggtggatgaagcaacttgttcaacaccgagaaggcgtgagataaacattccggacagccaatcgatcattgagttggtaacccccctagaagatatcgtgaagtcattttgggacagcagaacaccgacgaagcctgctctaaatgcaaaagggaagcagcagttggtagggtcgacgacccctgaaacacaaagagcccctctttccgcaataaattaggagtttcattactgtatatactacaaacattcttgtgtggtcaagtaatgttgatcaagaatgttgagagaagttactggtaaaggagagctgtgtattctccagattcatccaatgtatgaacggaatcatacatccaatgtattttggagtggagtgcaactccaaaatacagagcaaatcgagcatgaccatttgtcaagttccgtgaaatggactcatttatttgtatctatgctgttgtgcacttgtttttaataccttcgtccttaaaccttcgtccgtgaaatggactcatttattcgcgagaatgtgaaatccatcgtcatgacatccagagcacaacttcatgacttggaacatggtcactatgagatgacaaaagcaataacagggaatgccgataggtctctgggagaagattataaggttagcgatacttatcgtctaaaagaagaaggctaagtaggaaaaagtatgatggaatgacgaagggaatgtaaaaaaggacattgagcaggacatttcaagtacatatacaaagacatgctatatacaattttac

SEQ ID NO: 8271 - DNA, 1448 bp, Zea Mays
atgaaccaggatgctccaacaagcagaagggattattttgaagataggagggactgtgccagagcatctaatgctgaagacttaatgaatgctacaaaaaatggtgtgcttaattcacacgccagaagggatgattatgaagaagggagggacagtgccagggcacccaattctgaaaactatgaggaggggagggactgtaccagggcatccaatgccgaaaacattgtgaatgctacaaaaaaagctgatagaactgaagagaagaggggccgtgacaaaaacaaatgtaaaaaacttgctaaactaaagcctggagaaaaaattaaagtaacgttctacaacaaccgtgctctttgtacaacattcgcacgacacataggtagaatcgttcgtgatcctagtattacctctgtgagagtaaagaagtggactgacattactgagacatctctaaaacatatttttgctgcagtcaaggacaagtttgaaaacatggatgaaaacattgaaattgatgtctacaaaaatgacatcatggagcatgctagggatttgtggaacaattggcgcggtgacttaagtcgacactatgtcaagccgacaaagaatatgcagcaagccattaagaattgtccgaatgattttgcacaagctgattgggagtggttggtcaaagagcatttttgcagtaaggaattcattgcaagttatcctattactgcatagtgcaacaatttattttttacctctgattatgttgttagcatccatttcatgtaattcctcatgatattctaggcaaagagcaagagaaattctagaaaccgatccaatttgacaatccttcatcacagtggcagcaaaccattcaggaaagtgatttatgacaatggcggcaaggataataatccaccagctttggatgccttattttttatgactcacacaaagggtgacaattttattgattctgagtcctccagcaagcatgcacaaattcaggaacaaatgttttcagatccttctctttccaatgcacaacttatggacaagtgcttcccttcaaaacggcaggaccatatcattggatatggtggtcgagtgaaagcaagacatcttcgaagtccatatgttagtaaggctgaattgttagagaagctaaaacagtcggaggatgagaaacgagcaatgcttgaggagaacagagagcttcgagaagaaaatcgggctacaaacagtcgtgtaagccaaatggaaaaggagtgggcagagttgaagaaacaaataagtagtagttagcatagaaatcttgatttgagtagagtttgagtgatatgaatatttacaacttttataccattggataaatacgtgatactagatttattatatgtaataatcagattaccaccgatatatatatacaagctgcaaatggttcattg

SEQ ID NO: 8272 - DNA, 2035 bp, Zea Mays
gtatgaactagtttttatagccgttttttattgtctccttgaggtgcagccacgtgcctccttataatgcagcttatgtatgaccattgcatcaatatttttgtatcaaccacatccttgcatcaatagtcgtttttatatttctatcttgccattaatctgttttcttgcttctattcacagcttaccatttttgtgcatttgttatctatgtaggctgtagcaatgcaaagcaagtatggaaatgtgagatcccctccaaggtcacacttcatcagcccaggattgcttcgtcaacaacatgtgaaaaggtcctatccaaaccccaatataggcataggaacaaacaatgagagttcgtctagaaagcgagctatgaaagctatgggcaatgttaaccaaccaaaagtagcatatgataatttagaagatgaatgtgtgaatcttgaaagcaaaaaatggggactaaagattaatagggtcactggcgagcctatgtatgatacagatgatgaaagtgaacatgattctgaatatgaaaatgagtactctgaagatgaaaacatagtgaataacatgacagcaggggagaagaacttatattttcaaaaaaaagattcctgaataaggagagacatccaaagaagtcaaaatccatgaaccaggatgctccaacaagcagaagggattattttgaagataggagggactgtgccagagcatctaatgctgaagacttaatgaatgctacaaaaaatggtgtgcttaattcacacgccagaagggatgattatgaagaagggagggacagtgccagggcacccaattctgaaaactatgaggaggggagggactgtaccagggcatccaatgccgaaaacattgtgaatgctacaaaaaaaggtataggaacacaactaatagttgaagtataaatgtttcagctgatagaactgaagagaagaggggccgtgacaaaaacaaatgtaaaaaacttgctaaactaaagcctggagaaaaaattaaagtaacgttctacaacaaccgtgctctttgtacaacattcgcacgacacataggtagaatcgttcgtgatcctagtattacctctgtgagagtaaagaagtggactgacattactgagacatctctaaaacatatttttgctgcagtcaaggacaagtttgaaaacatggatgaaaacattgaaattgatgtctacaaaaatgacatcatggagcatgctagggatttgtggaacaattggcgcggtgacttaagtcgacactatgtcaagccgacaaagaatatgcagcaagccattaagaattgtccgaatgattttgcacaagctgattgggagtggttggtcaaagagcatttttgcagcaaagagcaagagaaattctagaaaccgatccaatttgacaatccttcatcacagtggcagcaaaccattcaggaaagtgatttatgacaatggcggcaaggataataatccaccagctttggatgccttattttttatgactcacacaaagggtgacaattttattgattctgagtcctccagcaagcatgcacaaattcaggaacaaatgttttcagatccttctctttccaatgcacaacttatggacaagtgcttcccttcaaaacggcaggaccatatcattggatatggtggtcgagtgaaagcaagacatcttcgaagtccatatgttagtaaggctgaattgttagagaagctaaaacagtcggaggatgagaaacgagcaatgcttgaggagaacagagagcttcgagaagaaaatcgggctacaaacagtcgtgtaagccaaatggaaaaggagtgggcagagttgaagaaacaaataagtagtagttagcatagaaatcttgatttgagtagagtttgagtgatatgaatatttacaacttttataccattggataaatacgtgatactagatttattatatgtaataatcagattaccaccgatatatatatacaagctgcaaatggttcattg

SEQ ID NO: 8273 - DNA, 1775 bp, Zea Mays
gtatgaactagtttttatagccgttttttattgtctccttgaggtgcagccacgtgcctccttataatgcagcttatgtatgaccattgcatcaatatttttgtatcaaccacatccttgcatcaatagtcgtttttatatttctatcttgccattaatctgttttcttgcttctattcacagcttaccatttttgtgcatttgttatctatgtaggctgtagcaatgcaaagcaagtatggaaatgtgagatcccctccaaggtcacacttcatcagcccaggattgcttcgtcaacaacatgtgaaaaggtcctatccaaaccccaatataggcataggaacaaacaatgagagttcgtctagaaagcgagctatgaaagctatgggcaatgttaaccaaccaaaagtagcatatgataatttagaagatgaatgtgtgaatcttgaaagcaaaaaatggggactaaagattaatagggtcactggcgagcctatgtatgatacagatgatgaaagtgaacatgattctgaatatgaaaatgagtactctgaagatgaaaacatagtgaataacatgacagcaggggagaagaacttatattttcaaaaaaaagattcctgaataaggagagacatccaaagaagtcaaaatccatgaaccaggatgctccaacaagcagaagggattattttgaagataggagggactgtgccagagcatctaatgctgaagacttaatgaatgctacaaaaaatggtgtgcttaattcacacgccagaagggatgattatgaagaagggagggacagtgccagggcacccaattctgaaaactatgaggaggggagggactgtaccagggcatccaatgccgaaaacattgtgaatgctacaaaaaaaggacaagtttgaaaacatggatgaaaacattgaaattgatgtctacaaaaatgacatcatggagcatgctagggatttgtggaacaattggcgcggtgacttaagtcgacactatgtcaagccgacaaagaatatgcagcaagccattaagaattgtccgaatgattttgcacaagctgattgggagtggttggtcaaagagcatttttgcagtaaggaattcattgcaaagagcaagagaaattctagaaaccgatccaatttgacaatccttcatcacagtggcagcaaaccattcaggaaagtgatttatgacaatggcggcaaggataataatccaccagctttggatgccttattttttatgactcacacaaagggtgacaattttattgattctgagtcctccagcaagcatgcacaaattcaggaacaaatgttttcagatccttctctttccaatgcacaacttatggacaagtgcttcccttcaaaacggcaggaccatatcattggatatggtggtcgagtgaaagcaagacatcttcgaagtccatatgttagtaaggctgaattgttagagaagctaaaacagtcggaggatgagaaacgagcaatgcttgaggagaacagagagcttcgagaagaaaatcgggctacaaacagtcgtgtaagccaaatggaaaaggagtgggcagagttgaagaaacaaataagtagtagttagcatagaaatcttgatttgagtagagtttgagtgatatgaatatttacaacttttataccattggataaatacgtgatactagatttattatatgtaataatcagattaccaccgatatatatatacaagctgcaaatggttcattg

SEQ ID NO: 8274 - DNA, 2406 bp, Zea Mays
aaagaaggacacttatggacttgttagtgtcaattttaagtgcctccttcgaacagatgagccgtttgtattagctagccaagcttctcaagtcttttttgttaaagacaatgtgatcaaaggatggcacttggttgtcaaaatgcagccacgtgacacatatgatgtagccgacgtttcagatgatgaagacgttgaagatgaggatgccaatgcagaggaagacacgtgatgaatatccttcaaccacatccttgagtggaaataggaaatattgttatgaattttgtttccatatcttaggatatgaaatctgtgaccattgcatcaatatttgtttttatattgacaacttatgtatgaactagtttttatagccgttttttattgtctccttgaggtgcagccacgtgcctccttataatgcagcttatgtatgaccattgcatcaatatttttgtatcaaccacatccttgcatcaatagtcgtttttatatttctatcttgccattaatctgttttcttgcttctattcacagcttaccatttttgtgcatttgttatctatgtaggctgtagcaatgcaaagcaagtatggaaatgtgagatcccctccaaggtcacacttcatcagcccaggattgcttcgtcaacaacatgtgaaaaggtcctatccaaaccccaatataggcataggaacaaacaatgagagttcgtctagaaagcgagctatgaaagctatgggcaatgttaaccaaccaaaagtagcatatgataatttagaagatgaatgtgtgaatcttgaaagcaaaaaatggggactaaagattaatagggtcactggcgagcctatgtatgatacagatgatgaaagtgaacatgattctgaatatgaaaatgagtactctgaagatgaaaacatagtgaataacatgacagcaggggagaagaacttatattttcaaaaaaaagattcctgaataaggagagacatccaaagaagtcaaaatccatgaaccaggatgctccaacaagcagaagggattattttgaagataggagggactgtgccagagcatctaatgctgaagacttaatgaatgctacaaaaaatggtgtgcttaattcacacgccagaagggatgattatgaagaagggagggacagtgccagggcacccaattctgaaaactatgaggaggggagggactgtaccagggcatccaatgccgaaaacattgtgaatgctacaaaaaaaggtataggaacacaactaatagttgaagtataaatgtttcagctgatagaactgaagagaagaggggccgtgacaaaaacaaatgtaaaaaacttgctaaactaaagcctggagaaaaaattaaagtaacgttctacaacaaccgtgctctttgtacaacattcgcacgacacataggtagaatcgttcgtgatcctagtattacctctgtgagagtaaagaagtggactgacattactgagacatctctaaaacatatttttgctgcagtcaaggacaagtttgaaaacatggatgaaaacattgaaattgatgtctacaaaaatgacatcatggagcatgctagggatttgtggaacaattggcgcggtgacttaagtcgacactatgtcaagccgacaaagaatatgcagcaagccattaagaattgtccgaatgattttgcacaagctgattgggagtggttggtcaaagagcatttttgcagtaaggaattcattgcaaagagcaagagaaattctagaaaccgatccaatttgacaatccttcatcacagtggcagcaaaccattcaggaaagtgatttatgacaatggcggcaaggataataatccaccagctttggatgccttattttttatgactcacacaaagggtgacaattttattgattctgagtcctccagcaagcatgcacaaattcaggaacaaatgttttcagatccttctctttccaatgcacaacttatggacaagtgcttcccttcaaaacggcaggaccatatcattggatatggtggtcgagtgaaagcaagacatcttcgaagtccatatgttagtaaggctgaattgttagagaagctaaaacagtcggaggatgagaaacgagcaatgcttgaggagaacagagagcttcgagaagaaaatcgggctacaaacagtcgtgtaagccaaatggaaaaggagtgggcagagttgaagaaacaaataagtagtagttagcatagaaatcttgatttgagtagagtttgagtgatatgaatatttacaacttttataccattggataaatacgtgatactagatttattatatgtaataatcagattaccaccgatatatatatacaagctgcaaatggttcattg

SEQ ID NO: 8275 - DNA, 1973 bp, Zea Mays
gtcagaaacacgatgaaaggagactccatcatcacgagtgaggcggaggagtcgaccctgccccttcttcttcctctccatgccgcgccttcacaggactatgaacaatttacttgcaatggatctgtcgatatcagaggttacccagcgtccaaacggcatacggggaactggagagcctgctactcaattcttgggggtgaattttgtggcgctatggcctactacggagttgggacaaacctggtgagctacttgaccaaggcgcagaagaaaagcaatgtcgctgcagcgagcaacatcgcttcctggcagggaacatgctacctgactgccctcctcggagctttcctggcagattcatatctgggaaggcaccggacaatcgtggtgtccctaatggtagttaccatgggagtgctcctactgacactttcagcaaccataccagcaagcattcatgtaatggcgacggcgacctcaaactctcaggaagccttgtcttctctgggcctcttcctgaccgctctgggtttgggtgggatctggccttgtgtccccacgtttggagccgatcagttcgacgacaccgacgcggccgagaaggagcagaagcagctctactacaactggtactacttcgctgtcaacggaggcttcttgttcgcgagcacggtcctcgtgtgggtgcaggacgaccatggctggggctggggttttggcatccctgctgcggtttccgcggtcggagtcgctggattccttgcctgcatgaagctgtacaggtaccagaaaccaggaggcagcgcgttgactaggatctgccaggttgtggtggcagccgcccgcaaggtgaacgtggatgtgccgacggacagctctcttctgcatgagatgccgccgggggaggagtcggcgattgtcgggagccggaagctgatgcacactgatggactaaagttctttgatcgagctgctaccatcaccacctctgaagacaaatctaccgatgcaactaacccgtggaagctttgcacggtgacccaagtggaggagctcaagatcctggcaagaatgcttcctgtctttctgacaggcatagtcttcaacaccgctgaagctttcttcccgttgttcatagagcaaggacaggtcatggacaaccacatcatcgagcagctctggataccttcagccactctgacgaccttcaactgcctctgcatcatcatcctggcaccagcgtatgacaaagttgtgatgcccgtggtgagtaggatcaccggcatgaagcgagggctgtccgagctgcaacgcatcggcgtcggcatggtcttcgccatgttttcgatggtttcggcagcactagttgagacggtgcgccttgacaccgccaagaacaggctcctgatgagtatcctgtggcaggctccgcagtacatgtttgtcggagtagccaaggttttcagcatagttggttttatcgagttcgcttatgaacagtcgccggacgccatgaggagcttgtgccaggcttgctccctcctcatggttacgcttggaagctaccttgtctctatcatgttaaagatgatcgattcagtgacagccggaagggggagccatggctggatacctgaggacctcaacgaagggcgtcttgatctgctcttctggttgatggctgtactgcacttgctgaacctgcttgcattcgcatattgcgctgcgaggtacaagtgcaaactagctacttgaatttcttctcatacttagaggatgggaggagagtgcctaagtaaagttggtgagaatttacaatttgtaattatctatttgctagcagctcatgttttggaagttctcttattaaatctttagtgcagtattggaacatgttgttcggtaaaaggatggaaacaatgtataattaatccctcatcttgtgatttgtgatgaattacaacgagcat

SEQ ID NO: 8276 - DNA, 2099 bp, Zea Mays
ctccgcttcaacaggtaggggcgtagggtatccggctaccgctcgtcctcgtgcacgcggctgttaaacacagtgaccccctcgttagctctccgtccatcccctcttccatcaggatcagcggtggggtatcgatctgctctagttggacggcggcatccctgattctaccctgatcgatcccatggatgcccaagacggcgatgagagaccgctgatcatccatcgcctgccactactccaggatgaaagtacttccgaattcactagcgacgggacggttgatcttcgcaatcagcctgctcggaagcagagaactgggaagtggaaagcatgcttcttcatcttaggtgccgagtttgctgaatgtgtggccttcttcgcgatctcgaagaacctggtgacgtacctcacgggcgttctgcacgagagcaacgtggacgccgcgacgactgtgtccacctggatcgggacctcgttcttcacgccgctcgtcggcgcgttcttggccgacacattctgggggcgatactggacgatactggccttcctctccgtgtacgtcacggggatgacggtcctgactgcttcagctcttctcccgctgctcatgggcgcgtcctacagccgtagcgcccaccgcctcttcgcgtacctgggcctctacctcgccgctctcggcaccggcggaatcaagccgtgcgtctgcgcgctcggtgccgaccagttcgacgcgtctgaccccgtggagcggcgggccaagggctccttcttcaactggtactacttctccatcaacatcggctccctgctgtccgcgacggtggtcgtctgggtgcaggacaacgttgggtggggagtcgggttcgcgatcccgaccctgctcatgctgtcgggactcgtgctgttcgtcgccggtaggaaggtttacaggtaccagagagtgggagggagccctctgacaagagcctcgcaggtggtggttgctgctgtcaggaactaccgtttggtgctgcctgagcctgacgacagctcggccctgctgcatcaggcgcctcccggaacgacggaaggaaatgattccacgatgcagcatacgagtcaattcagcgccatcctccggcgagaaaggagcgacggcaagcccatggcggctctgcacggtctcccaggtcgaggagctgaagacggtgctgcggatgttccccgtgtgggtgtcgatggtgctcttcttcgcggccaccgcgcagatgtcgtccaccttcatcgagcaaggcgagaccatggacaaccgcgtggggccgttcaccgtgccgccggcgtccctctccaccttcgacgtcatcagcgtcatggtctgcatacccatctacgacaaagcgctggtgccgctggcccggcgcgccacgggcaaggagcggggcctgtcgcagctgcagcggctgggcgtcggcctcgcgctgtccgtggccggcatggtgtacgcggcgctgctcgaggccaggcggctgtcgctcgcccgcgcagcggcggacgggcggccgccgatgtccatcatgtggcaggcgccggcgttcgcggtgctcggcgccggggaggtgttcgcgaccatcggcatcctcgagttcttctacgaccagtcgcccgacggcatgaagagcctcggcacggcccttgcgcagctcgccgtcgcggcaggcaactacttcaactctgccgtgctcgccgccgtcgccgccgtcaccacgcgcaacggggaggcaggatggatccccgacgacctggacaagggccacctcgactatttcttctggttcatggctgttctcggcgtggtcaacctgctgcacttcctgcattgctccgtcaggtacagaggcagcagcaacaacagcacatactcttcttgagtcttcacacgatctgtgccaagtatatggcaaaatgtcaacaaagagagatgtcaatcgaacttgttaacgagacacaacaggatgcccgcattctccatttggcgtctccacaataataatgtgtccctgcgtcggtccattgttttgtgacaaacacacgaatacctttgcgttgttattgagcct

SEQ ID NO: 8277 - DNA, 2297 bp, Zea Mays
atgtcccttggtcctctctctgacatctcttgtctcctcttcattgcaaatgtttctcttcctctctcccacctctcctctcctctccattgcaaaccttcgggatgaaggttgagagcctgctctgaaacgacgtacgtaaagggagcaaggaaccggagagcgtgcggcgggcttctggattttaggcacctgtcgcttggacgtgcttcggagaagtaggtgtccaaaagttgcttacagtggatccagatccttcgaacaacattgctcaagctcatgatatagactgtcatggaggcagctgcagatgaggagaggccactgattcagtacctggctccagaggatgatgaagcttcctcacgatacactagcgacggaacgctcgatatcaacaagcagcgtgctctgaagaagagcaccgggaactggagagcatgcttcatgattctgggtaccgagttcgccgaatgcctggcattttacgcgaccgcaaagaacctggtcacctacctcacggctgagcttggtgagaccaacatcgatgccgcgacgaacgtgtccacctggattggcagctgctacctcacgccgctcatcggcgccttcttggccgacacgtactggggaagatacaagacgatgatagtcttcctcttgctctacatcgttcgtcggcgtggctccccttggccatggaggacgactcacctgacaacagcggacttcggcgtgccacagcgtacctggggctctacctcgtttccctaggcacaggaggcatcaagccctgcacggcggccctcggggccgaccagttcgacggcggcgacgcggcggagcgggtcaccaaggcctccttcttcaactggtactacttctgcaccaacatcggctccctgctgtcggggaccgtgctcgtctgggtgcaggaaaatattggatggggagtcgggtttacggtgcagacggtgttcatgctgttcggcctcgccgtgttcgtcgccggtcgcaaggtgtataggtacaagaagctgggcgggagccctctcacaagggtagcccaggtggttgtcgcagctgtgaggaactgccatctcgtgctgcctgatgatacgtcagccctgtaccacgataagcttctaccaactgaaccaaatttcaggattgagtctgccagacaattcagattctttgacaaggctgccataatcaccggcgagaagggtgcagcagcgccgacgagcccgtggagactgtgcacggtgtcccaggtggaggagctgaagatgctgctccggttgctgccggtctgggcatccatggtgctcttcttcgccgtcagtgcgcagacggtaaccacgttcattgagcaggctagggtgatggacaaccgcatcggcccgttcaccattcctccggcgtcgatagcgaccttcgacgtgatcagcgtcatggtctgcgtccccgtctacgacgccgtgctggtgcctctggcccggcgtgccactggcaacgaccgcggcctgtcgcagctgcaccggctctccatcgggatcgcgctgtccgtggtcgtcatggtgtacgcggcgctgctcgagggcaggcgcctggccctcgcgcgggccaacatgcccgccatgaacatcgcgtggcaggcacccatgttcgccgtgcacggcgcggcggcggtcttcgccaccgtcggcgtgctcgagttcttctacgaccagtcgccggacgggatgaagagcctcggcaacgcgctcgcgctgctctccatggcggccgggagctatttcaactcgcttgcgctcagcgctgtcgggtcgatcacggcgcgcggcggggaacgcgggtggctcccggacgacctgaacaagggtcatatggactatttcttctggatgatggccgctcttggaacgctcaacctgctgcacttcttgcactactgcaacagacgatacagaggcaacaacaacaacacttcttgacgtgtgctgtcatgctgtgtgcaccatgtttctcaaaatcatagtttgataatactatattttgtaattatcataataatactatagttttagccagctccaaaaatactaggttctaagaaacattgcttaaatacaacatcatggcgttaggagcttactcttgagtaagttctcgagttattgataggatctaaatctccagtgttccgaaggaataacaggtgacccaccttcgtcctaacaatatgcatgaagattaagttgaaggccacggtcttacattccaaatacaaa

SEQ ID NO: 8278 - DNA, 2302 bp, Zea Mays
atgtcccttggtcctctctctgacatctcttgtctcctcttcattgcaaatgtttctcttcctctctcccacctctcctctcctctccattgcaaaccttcgggatgaaggttgagagcctgctctgaaacgacgtacgtaaagggagcaaggaaccggagagcgtgcggcgggcttctggattttagagtaggcacctgtcgcttggacgtgcttcggagaagtaggtgtccaaaagttgcttacagtggatccagatccttcgaacaacattgctcaagctcatgatatagactgtcatggaggcagctgcagatgaggagaggccactgattcagtacctggctccagaggatgatgaagcttcctcacgatacactagcgacggaacgctcgatatcaacaagcagcgtgctctgaagaagagcaccgggaactggagagcatgcttcatgattctgggtaccgagttcgccgaatgcctggcattttacgcgaccgcaaagaacctggtcacctacctcacggctgagcttggtgagaccaacatcgatgccgcgacgaacgtgtccacctggattggcagctgctacctcacgccgctcatcggcgccttcttggccgacacgtactggggaagatacaagacgatgatagtcttcctcttgctctacatcgttcgtcggcgtggctccccttggccatggaggacgactcacctgacaacagcggacttcggcgtgccacagcgtacctggggctctacctcgtttccctaggcacaggaggcatcaagccctgcacggcggccctcggggccgaccagttcgacggcggcgacgcggcggagcgggtcaccaaggcctccttcttcaactggtactacttctgcaccaacatcggctccctgctgtcggggaccgtgctcgtctgggtgcaggaaaatattggatggggagtcgggtttacggtgcagacggtgttcatgctgttcggcctcgccgtgttcgtcgccggtcgcaaggtgtataggtacaagaagctgggcgggagccctctcacaagggtagcccaggtggttgtcgcagctgtgaggaactgccatctcgtgctgcctgatgatacgtcagccctgtaccacgataagcttctaccaactgaaccaaatttcaggattgagtctgccagacaattcagattctttgacaaggctgccataatcaccggcgagaagggtgcagcagcgccgacgagcccgtggagactgtgcacggtgtcccaggtggaggagctgaagatgctgctccggttgctgccggtctgggcatccatggtgctcttcttcgccgtcagtgcgcagacggtaaccacgttcattgagcaggctagggtgatggacaaccgcatcggcccgttcaccattcctccggcgtcgatagcgaccttcgacgtgatcagcgtcatggtctgcgtccccgtctacgacgccgtgctggtgcctctggcccggcgtgccactggcaacgaccgcggcctgtcgcagctgcaccggctctccatcgggatcgcgctgtccgtggtcgtcatggtgtacgcggcgctgctcgagggcaggcgcctggccctcgcgcgggccaacatgcccgccatgaacatcgcgtggcaggcacccatgttcgccgtgcacggcgcggcggcggtcttcgccaccgtcggcgtgctcgagttcttctacgaccagtcgccggacgggatgaagagcctcggcaacgcgctcgcgctgctctccatggcggccgggagctatttcaactcgcttgcgctcagcgctgtcgggtcgatcacggcgcgcggcggggaacgcgggtggctcccggacgacctgaacaagggtcatatggactatttcttctggatgatggccgctcttggaacgctcaacctgctgcacttcttgcactactgcaacagacgatacagaggcaacaacaacaacacttcttgacgtgtgctgtcatgctgtgtgcaccatgtttctcaaaatcatagtttgataatactatattttgtaattatcataataatactatagttttagccagctccaaaaatactaggttctaagaaacattgcttaaatacaacatcatggcgttaggagcttactcttgagtaagttctcgagttattgataggatctaaatctccagtgttccgaaggaataacaggtgacccaccttcgtcctaacaatatgcatgaagattaagttgaaggccacggtcttacattccaaatacaaa

SEQ ID NO: 8279 - DNA, 2305 bp, Zea Mays
atgtcccttggtcctctctctgacatctcttgtctcctcttcattgcaaatgtttctcttcctctctcccacctctcctctcctctccattgcaaaccttcgggatgaaggttgagagcctgctctgaaacgacgtacgtaaagggagcaaggaaccggagagcgtgcggcgggcttctggattttagcagagtaggcacctgtcgcttggacgtgcttcggagaagtaggtgtccaaaagttgcttacagtggatccagatccttcgaacaacattgctcaagctcatgatatagactgtcatggaggcagctgcagatgaggagaggccactgattcagtacctggctccagaggatgatgaagcttcctcacgatacactagcgacggaacgctcgatatcaacaagcagcgtgctctgaagaagagcaccgggaactggagagcatgcttcatgattctgggtaccgagttcgccgaatgcctggcattttacgcgaccgcaaagaacctggtcacctacctcacggctgagcttggtgagaccaacatcgatgccgcgacgaacgtgtccacctggattggcagctgctacctcacgccgctcatcggcgccttcttggccgacacgtactggggaagatacaagacgatgatagtcttcctcttgctctacatcgttcgtcggcgtggctccccttggccatggaggacgactcacctgacaacagcggacttcggcgtgccacagcgtacctggggctctacctcgtttccctaggcacaggaggcatcaagccctgcacggcggccctcggggccgaccagttcgacggcggcgacgcggcggagcgggtcaccaaggcctccttcttcaactggtactacttctgcaccaacatcggctccctgctgtcggggaccgtgctcgtctgggtgcaggaaaatattggatggggagtcgggtttacggtgcagacggtgttcatgctgttcggcctcgccgtgttcgtcgccggtcgcaaggtgtataggtacaagaagctgggcgggagccctctcacaagggtagcccaggtggttgtcgcagctgtgaggaactgccatctcgtgctgcctgatgatacgtcagccctgtaccacgataagcttctaccaactgaaccaaatttcaggattgagtctgccagacaattcagattctttgacaaggctgccataatcaccggcgagaagggtgcagcagcgccgacgagcccgtggagactgtgcacggtgtcccaggtggaggagctgaagatgctgctccggttgctgccggtctgggcatccatggtgctcttcttcgccgtcagtgcgcagacggtaaccacgttcattgagcaggctagggtgatggacaaccgcatcggcccgttcaccattcctccggcgtcgatagcgaccttcgacgtgatcagcgtcatggtctgcgtccccgtctacgacgccgtgctggtgcctctggcccggcgtgccactggcaacgaccgcggcctgtcgcagctgcaccggctctccatcgggatcgcgctgtccgtggtcgtcatggtgtacgcggcgctgctcgagggcaggcgcctggccctcgcgcgggccaacatgcccgccatgaacatcgcgtggcaggcacccatgttcgccgtgcacggcgcggcggcggtcttcgccaccgtcggcgtgctcgagttcttctacgaccagtcgccggacgggatgaagagcctcggcaacgcgctcgcgctgctctccatggcggccgggagctatttcaactcgcttgcgctcagcgctgtcgggtcgatcacggcgcgcggcggggaacgcgggtggctcccggacgacctgaacaagggtcatatggactatttcttctggatgatggccgctcttggaacgctcaacctgctgcacttcttgcactactgcaacagacgatacagaggcaacaacaacaacacttcttgacgtgtgctgtcatgctgtgtgcaccatgtttctcaaaatcatagtttgataatactatattttgtaattatcataataatactatagttttagccagctccaaaaatactaggttctaagaaacattgcttaaatacaacatcatggcgttaggagcttactcttgagtaagttctcgagttattgataggatctaaatctccagtgttccgaaggaataacaggtgacccaccttcgtcctaacaatatgcatgaagattaagttgaaggccacggtcttacattccaaatacaaa

SEQ ID NO: 8280 - DNA, 2156 bp, Zea Mays
atgtcccttggtcctctctctgacatctcttgtctcctcttcattgcaaatgtttctcttcctctctcccacctctcctctcctctccattgcaaaccttcgggatgaaggttgagagcctgctctgaaacgacgtacgtaaagggagcaaggaaccggagagcgtgcggcgggcttctggattttaggatgatgaagcttcctcacgatacactagcgacggaacgctcgatatcaacaagcagcgtgctctgaagaagagcaccgggaactggagagcatgcttcatgattctgggtaccgagttcgccgaatgcctggcattttacgcgaccgcaaagaacctggtcacctacctcacggctgagcttggtgagaccaacatcgatgccgcgacgaacgtgtccacctggattggcagctgctacctcacgccgctcatcggcgccttcttggccgacacgtactggggaagatacaagacgatgatagtcttcctcttgctctacatcgttgggatgcttactctgacagcgtcggcgtggctccccttggccatggaggacgactcacctgacaacagcggacttcggcgtgccacagcgtacctggggctctacctcgtttccctaggcacaggaggcatcaagccctgcacggcggccctcggggccgaccagttcgacggcggcgacgcggcggagcgggtcaccaaggcctccttcttcaactggtactacttctgcaccaacatcggctccctgctgtcggggaccgtgctcgtctgggtgcaggaaaatattggatggggagtcgggtttacggtgcagacggtgttcatgctgttcggcctcgccgtgttcgtcgccggtcgcaaggtgtataggtacaagaagctgggcgggagccctctcacaagggtagcccaggtggttgtcgcagctgtgaggaactgccatctcgtgctgcctgatgatacgtcagccctgtaccacgataagcttctaccaactgaaccaaatttcaggattgagtctgccagacaattcagattctttgacaaggctgccataatcaccggcgagaagggtgcagcagcgccgacgagcccgtggagactgtgcacggtgtcccaggtggaggagctgaagatgctgctccggttgctgccggtctgggcatccatggtgctcttcttcgccgtcagtgcgcagacggtaaccacgttcattgagcaggctagggtgatggacaaccgcatcggcccgttcaccattcctccggcgtcgatagcgaccttcgacgtgatcagcgtcatggtctgcgtccccgtctacgacgccgtgctggtgcctctggcccggcgtgccactggcaacgaccgcggcctgtcgcagctgcaccggctctccatcgggatcgcgctgtccgtggtcgtcatggtgtacgcggcgctgctcgagggcaggcgcctggccctcgcgcgggccaacatgcccgccatgaacatcgcgtggcaggcacccatgttcgccgtgcacggcgcggcggcggtcttcgccaccgtcggcgtgctcgagttcttctacgaccagtcgccggacgggatgaagagcctcggcaacgcgctcgcgctgctctccatggcggccgggagctatttcaactcgcttgcgctcagcgctgtcgggtcgatcacggcgcgcggcggggaacgcgggtggctcccggacgacctgaacaagggtcatatggactatttcttctggatgatggccgctcttggaacgctcaacctgctgcacttcttgcactactgcaacagacgatacagaggcaacaacaacaacacttcttgacgtgtgctgtcatgctgtgtgcaccatgtttctcaaaatcatagtttgataatactatattttgtaattatcataataatactatagttttagccagctccaaaaatactaggttctaagaaacattgcttaaatacaacatcatggcgttaggagcttactcttgagtaagttctcgagttattgataggatctaaatctccagtgttccgaaggaataacaggtgacccaccttcgtcctaacaatatgcatgaagattaagttgaaggccacggtcttacattccaaatacaaa

SEQ ID NO: 8281 - DNA, 391 bp, Zea Mays
catggatgggaagtgctctcgaaaaagacgactatggctcctgtaccaatgcaagacatgacgcgctgacgacagcaactcgatctcctagcaaaccaggattacgtgttgcatatatgcacagtttgtgtgttatgtggctatgtcagcaagtaaatggatcggagtctatgagtggataaaattaagtggatgtgttcgcgtcttagtaataagtgaataaaatttcataagtgttactaaaataggtaaatagggtacatgtatgtttggatcccattatgaactatttgtaataatagctatatatacaaaagttgtggaattagcttgtagtaaaagaaaaataagtgatacctatacatttctgtaaatttcacaacatcgtaga

SEQ ID NO: 8282 - DNA, 723 bp, Zea Mays
catcgccatctgcagcccatgttccctggccgggcccatgttgcctgtcgttcttgtgcccgtgtatcccgttcggacaggtggcagaggtcttggacaagggcatgacatcctgtggtctggccggcctcctctactgtttgctgctgcatgccggggtggctgtggtcccgtgccactgcatctacacctgcacctaccgtcgcaagctccgggcggcgtacgacctgccgccggagccgtgcgccgattgctgcgtccacatgtggtgcgggccatgcgccatctcccagatgtaccgggagctcaagaacagaggcgccgacccggccatgggatgggaagtgctctcgaaaaagacgactatggctcctgtaccaatgcaagacatgacgcgctgacgacagcaactcgatctcctagcaaaccaggattacgtgttgcatatatgcacagtttgtgtgttatgtggctatgtcagcaagtaaatggatcggagtctatgagtggataaaattaagtggatgtgttcgcgtcttagtaataagtgaataaaatttcataagtgttactaaaataggtaaatagggtacatgtatgtttggatcccattatgaactatttgtaataatagctatatatacaaaagttgtggaattagcttgtagtaaaagaaaaataagtgatacctatacatttctgtaaatttcacaacatcgtaga

SEQ ID NO: 8283 - DNA, 835 bp, Zea Mays
ggaaaaaaaacagaaaggatttagacaattagacggggaacagcgagaatggtaagcacgcgcggcttcatggacggacagataaggaagacgaggcgtcggttctgattccattccatggcttctcctcttgcatgcttattaaatgcaggttgcctgtcgttcttgtgcccgtgtatcccgttcggacaggtggcagaggtcttggacaagggcatgacatcctgtggtctggccggcctcctctactgtttgctgctgcatgccggggtggctgtggtcccgtgccactgcatctacacctgcacctaccgtcgcaagctccgggcggcgtacgacctgccgccggagccgtgcgccgattgctgcgtccacatgtggtgcgggccatgcgccatctcccagatgtaccgggagctcaagaacagaggcgccgacccggccatgggatgggaagtgctctcgaaaaagacgactatggctcctgtaccaatgcaagacatgacgcgctgacgacagcaactcgatctcctagcaaaccaggattacgtgttgcatatatgcacagtttgtgtgttatgtggctatgtcagcaagtaaatggatcggagtctatgagtggataaaattaagtggatgtgttcgcgtcttagtaataagtgaataaaatttcataagtgttactaaaataggtaaatagggtacatgtatgtttggatcccattatgaactatttgtaataatagctatatatacaaaagttgtggaattagcttgtagtaaaagaaaaataagtgatacctatacatttctgtaaatttcacaacatcgtaga

SEQ ID NO: 8284 - DNA, 2246 bp, Zea Mays
cttaaatccagatacgacaatagcccatagtaacataaatgactgatgcaaacatcaacaagacaacactctgcaaagtgccagaactatccgtagatcaacatacaagcagagtatcatgccacttataaacagaaaaatcagtgctacaaacatggtaacatattacaacaatatgcacagaacaaattaacaagaacaaaggggaacaacatgagctgaatgaaataatgaactttttttctctctagatctcgaccctgtatacagaaggaatttgtcatatgaatatgatacagaagcgttgcctatgttagcatactgatcctaccagacatatcaagcatgcaacgatcgcggcagcaatcaggcaacaatgctggagacctatcctcatctagaaccagtgagctttctcctggcatgcaacgatcgcagcagcaaaatggaaatgcccatgcatgtacatatatacggaaagatggagctggctaaagcaaggactgcaacgtcaaaacacagcagacagcttcgatctaaaaaagaaaatcctgcaaagttcataacactgagggctacagcagcctttcttccacctgacatcatgagcctttaatcacctatcatgaatgtgtctcgatccaggtcacaacatggtagattcgcacatcctccgctgacagcaatgctttattgtgaccacccccaccaaaggttgcaaggaatctaatgcacaagcaactgatcttcagaacatgcatctgcaccttgctgaatcttggactgttcagagctcttcatcaatgttccatgctgtaccagagttattgatagcaacactacttagacttctctcctaccattagaagcatttggcctcctaggatgtccaaactgcatattatccctggagcgatctccagggtggacaaaatcatccaaattcctgtagctaccatttcttggaacagaattcagacgctcatattcatcaggcctcatgttcataccagcccttggttctgagaacatgtccaagcgtcttggtctaggtccaccaccagtcctccggatgttgttggaagaattcctacctggagtattggatggaaccctcatgggtaagaagtccttgggaatgctatccaggtccataaaacatttcctggcctttgcatccgctattagtgatgcccaatcctcagactgcatgagagcattagcattaccaacaacctgaaaagcaatgaagaccaagtaacatgggatacatcaagaagatcactgaagaaaagtagaatgcacttaatgcatattgtagaggcagagacatacccatagagctctccttgctcgagttagagctacattcatacgacgtatatcagcgacaaaacctacaccatggtttgaagcacggacacaagacataataatgatatcacgctcctggccttgaaaagcatcaactgtatttatgtagatatccttcccttcctcagtattcataacatccttgaattcccgctgaaggcatttcaactgcaacttatatggtgtgattataccaacagaaaccttcttggcaccattagctttcagaaacttctgaaggtgctcatataaacgcaatgcaaactgcgcttcatgaatattctgatatgaagatgacccacccctatgagactcacggccatgtgacatgtcgtaaaagatataaggtgccataagtgcatctctgtaataggcttcatcaggtaatttaacaacactctcactatctgtaaggcgaccttgatagaagtattttgatggaaattcacggatctggggatgcatcctgtattgcactgacaacaaaatggtaggacaaccagcctgctgaaacctctcgaaaagactcctactgtaaagcaaagttccagctgctttgctaataacagtagcagggagttgttgtggatcaccaaccaggacacatctagctgcaccaagagccaatggagggaggactcctacttcactagcctgagcagcctcatcaataacaaccatatcaaagccatgactcaggcgagaaaataacttacgcccgctacttgacacagttgtaaaaacaatctcagcttcattggcaaaactggcttccagactagccctagcatcttcaatattaaagctgctgccaggacggaacctgctttctaatatcagcagctgtgacatctccaccagtactttatccc

SEQ ID NO: 8285 - DNA, 1762 bp, Zea Mays
ggagaatgatattcagatgcttgtcccaacagaaaggcaacagtaactttcttccattgggtgctcttgtattccaggaaattgcctggttctactacttgaaagattcaagctatatgcatctacacatgacatgggttctcgagaaaggatgttatttgaccttaacaaactcccagcagaagttgaagaagaagctgctgctgtcgtaccaaatgaatctgctgttgttgtgtcacaagaagctgctgttgtcgcgtcacaagctgctgttgttgtgtcacaacctcagaaatccctccctgttccaatgacgtatgccccatcattgtttcagccagggggaggatcacagtcacaggggatattgaacgataataatgccttcaagcatgcatccattggatctggctttcagccctttgtgaagaacaacaaagattcaaacaatacaaaggagccgatgaaggtggaagataatcagaattctagtatacaatcaacggccatggtaaacaatcgaaccactgatagtgcttctcctaaggctgaaacttgcaatcaggtgtcacaagccgttgaaagagaagaaggagaatgctttgatgcagatagcatttctgaaaatgcagggagtagcaacaaagatgagatcactggtacggcaagcactcatttgaagaaagaatcccaagagagcgagccccatctcattaaatctggtggtgtgactaaagatgatactgctgctgaatgtagtgatgctgaaatggttgatgcgtctaaagatctggttcatggttcttctacaggatcagagaacatgcaaatttctgaatgtaaaggaaatcagcctggtgatgatctagatccttgcaacaggtcaaaggatgttaaaggagtggaagccaattatgcgtttaggtttgcgagcaatcccgcaaagagacccaagttaaatgaacacaaagaggccatgcttggcaaaaaacgagctaggcaaaccgtcttcatcggtgtagaggatgcgaaacaagctggtactatgaagacgacaacgcccaggaggcagtcgtcctttccagcaccgattgttacacgtactgtgaaggaagcttctcgtggtattggtgaaaaggctgcagaaaaacaaaatcagcaagcaatcagagatcagagacaacctgaaatgatgggatcagaacgaagcaattctgtagatcctagtgaccaacacactgaacccaatggtgacactgagttgggtacccagggctggtcaaagaaaatgaatacagaagagccagcctcagatggttatcagcatcctgcccaaagacaagcttcattaaagcaaaccatggacttcaagcagccaaagggccgaccattctcttcccaaagaacaattctaacagggcaaaacaatgctgatcagaagccagccaacaaaaggtctattatttctaaaaagaaaacttttttaaacaatgtacagtatcaggactcatctattgagcgacttataagggaagtgacaaacgacaagttctggcataatccagagctcagctttatagttcgtatgaggagagtcttgaggctgtgggaagggatgcacatgtagcggtgcaagtaaaaaccgtggataaacgtgaaagaggttggtatgatgttgtcgtcctaccgatacatgaacgtaaatggaatttcaaagaaggcgatgttgctattctgtcgtttccacatcctggttcaggta

SEQ ID NO: 8286 - DNA, 2058 bp, Zea Mays
gtaaatacccgcacggccatagatccgcacgctaccctcggcatcgttgccggctgcccttcctcgctccccaccactccgttccatccctcgcctgccttcgcacgggtgtgccgcccgttcgacggccacgccgcgccgctgccccggcgcccgcccttcctcgtcgagctcgggatcgacgtctcccacacctcctcgcgcccgttccgggctccgcatccggcccctccccgtccccaacaccattccgcagcaggcgaccagcacaacatccggaatcccccgccgcgccttcggctcgtcgtcgctcctcctccgcgtcccgccaccccccgcacgatgcttgtcccaacagaaaggcaacagtaactttcttccattgggtgctcttgtattccaggaaattgcctggttctactacttgaaagattcaagctatatgcatctacacatgacatgggttctcgagaaaggatgttatttgaccttaacaaactcccagcagaagttgaagaagaagctgctgctgtcgtaccaaatgaatctgctgttgttgtgtcacaagaagctgctgttgtcgcgtcacaagctgctgttgttgtgtcacaacctcagaaatccctccctgttccaatgacgtatgccccatcattgtttcagccagggggaggatcacagtcacaggggatattgaacgataataatgccttcaagcatgcatccattggatctggctttcagccctttgtgaagaacaacaaagattcaaacaatacaaaggagccgatgaaggtggaagataatcagaattctagtatacaatcaacggccatgggagtagcaacaaagatgagatcactggtacggcaagcactcatttgaagaaagaatcccaagagagcgagccccatctcattaaatctggtggtgtgactaaagatgatactgctgctgaatgtagtgatgctgaaatggttgatgcgtctaaagatctggttcatggttcttctacaggatcagagaacatgcaaatttctgaatgtaaaggaaatcagcctggtgatgatctagatccttgcaacaggtcaaaggatgttaaaggagtggaagccaattatgcgtttaggtttgcgagcaatcccgcaaagagacccaagttaaatgaacacaaagaggccatgcttggcaaaaaacgagctaggcaaaccgtcttcatcggtgtagaggatgcgaaacaagctggtactatgaagacgacaacgcccaggaggcagtcgtcctttccagcaccgattgttacacgtactgtgaaggaagcttctcgtggtattggtgaaaaggctgcagaaaaacaaaatcagcaagcaatcagagatcagagacaacctgaaatgatgggatcagaacgaagcaattctgtagatcctagtgaccaacacactgaacccaatggtgacactgagttgggtacccagggctggtcaaagaaaatgaatacagaagagccagcctcagatggttatcagcatcctgcccaaagacaagcttcattaaagcaaaccatggacttcaagcagccaaagggccgaccattctcttcccaaagaacaattctaacagggcaaaacaatgctgatcagaagccagccaacaaaaggtctattatttctaaaaagaaaacttttttaaacaatgtacagtatcaggactcatctattgagcgacttataagggaagtgacaaacgacaagttctggcataatccagaggaggctgaacttgagtgtgttcctggaagttttgaatctgctgaggagtacattagagtttttgagcctttgctttttgaggaatgcagagctcagctttatagttcgtatgaggagagtcttgaggctgtgggaagggatgcacatgtagcggtgcaagtaaaaaccgtggataaacgtgaaagaggttggtatgatgttgtcgtcctaccgatacatgaacgtaaatggaatttcaaagaaggcgatgttgctattctgtcgtttccacatcctggttcaggta

SEQ ID NO: 8287 - DNA, 2088 bp, Zea Mays
gtaaatacccgcacggccatagatccgcacgctaccctcggcatcgttgccggctgcccttcctcgctccccaccactccgttccatccctcgcctgccttcgcacgggtgtgccgcccgttcgacggccacgccgcgccgctgccccggcgcccgcccttcctcgtcgagctcgggatcgacgtctcccacacctcctcgcgcccgttccgggctccgcatccggcccctccccgtccccaacaccattccgcagcaggcgaccagcacaacatccggaatcccccgccgcgccttcggctcgtcgtcgctcctcctccgcgtcccgccaccccccgcacgatgcttgtcccaacagaaaggcaacagtaactttcttccattgggtgctcttgtattccaggaaattgcctggttctactacttgaaagattcaagctatatgcatctacacatgacatgggttctcgagaaaggatgttatttgaccttaacaaactcccagcagaagttgaagaagaagctgctgctgtcgtaccaaatgaatctgctgttgttgtgtcacaagaagctgctgttgtcgcgtcacaagctgctgttgttgtgtcacaacctcagaaatccctccctgttccaatgacgtatgccccatcattgtttcagccagggggaggatcacagtcacaggggatattgaacgataataatgccttcaagcatgcatccattggatctggctttcagccctttgtgaagaacaacaaagattcaaacaatacaaaggagccgatgaaggtggaagataatcagaattctagtatacaatcaacggccatggtaaacaatcgaaccactgatagtgcttctcctaaggctgaaacttgcaatcaggtgtcacaagccgttgaaagagaagaaggagaatgctttgatgcagatagcatttctgaaaatgcagggagtagcaacaaagatgagatcactggtacggcaagcactcatttgaagaaagaatcccaagagagcgagccccatctcattaaatctggtggtgtgactaaagatgatactgctgctgaatgtagtgatgctgaaatggttgatgcgtctaaagatctggttcatggttcttctacaggatcagagaacatgcaaatttctgaatgtaaaggaaatcagcctggtgatgatctagatccttgcaacaggtcaaaggatgttaaaggagtggaagccaattatgcgtttaggtttgcgagcaatcccgcaaagagacccaagttaaatgaacacaaagaggccatgcttggcaaaaaacgagctaggcaaaccgtcttcatcggtgtagaggatgcgaaacaagctggtactatgaagacgacaacgcccaggaggcagtcgtcctttccagcaccgattgttacacgtactgtgaaggaagcttctcgtggtattggtgaaaaggctgcagaaaaacaaaatcagcaagcaatcagagatcagagacaacctgaaatgatgggatcagaacgaagcaattctgtagatcctagtgaccaacacactgaacccaatggtgacactgagttgggtacccagggctggtcaaagaaaatgaatacagaagagccagcctcagatggttatcagcatcctgcccaaagacaagcttcattaaagcaaaccatggacttcaagcagccaaagggccgaccattctcttcccaaagaacaattctaacagggcaaaacaatgctgatcagaagccagccaacaaaaggtctattatttctaaaaagaaaacttttttaaacaatgtacagtatcaggactcatctattgagcgacttataagggaagtgacaaacgacaagttctggcataatccagagctcagctttatagttcgtatgaggagagtcttgaggctgtgggaagggatgcacatgtagcggtgcaagtaaaaaccgtggataaacgtgaaagaggttggtatgatgttgtcgtcctaccgatacatgaacgtaaatggaatttcaaagaaggcgatgttgctattctgtcgtttccacatcctggttcaggta

SEQ ID NO: 8288 - DNA, 2199 bp, Zea Mays
gtaaatacccgcacggccatagatccgcacgctaccctcggcatcgttgccggctgcccttcctcgctccccaccactccgttccatccctcgcctgccttcgcacgggtgtgccgcccgttcgacggccacgccgcgccgctgccccggcgcccgcccttcctcgtcgagctcgggatcgacgtctcccacacctcctcgcgcccgttccgggctccgcatccggcccctccccgtccccaacaccattccgcagcaggcgaccagcacaacatccggaatcccccgccgcgccttcggctcgtcgtcgctcctcctccgcgtcccgccaccccccgcacgggtctgcctggatgctgagatcctgtatcactagaatccaaattcttgggatgggtaggaagtggacaacaagaggagaaaatggcctgggtcagaacatgaaaagaatccagcggagaatgatattcagatgcttgtcccaacagaaaggcaacagtaactttcttccattgggtgctcttgtattccaggaaattgcctggttctactacttgaaagattcaagctatatgcatctacacatgacatgggttctcgagaaaggatgttatttgaccttaacaaactcccagcagaagttgaagaagaagctgctgctgtcgtaccaaatgaatctgctgttgttgtgtcacaagaagctgctgttgtcgcgtcacaagctgctgttgttgtgtcacaacctcagaaatccctccctgttccaatgacgtatgccccatcattgtttcagccagggggaggatcacagtcacaggggatattgaacgataataatgccttcaagcatgcatccattggatctggctttcagccctttgtgaagaacaacaaagattcaaacaatacaaaggagccgatgaaggtggaagataatcagaattctagtatacaatcaacggccatggtaaacaatcgaaccactgatagtgcttctcctaaggctgaaacttgcaatcaggtgtcacaagccgttgaaagagaagaaggagaatgctttgatgcagatagcatttctgaaaatgcagggagtagcaacaaagatgagatcactggtacggcaagcactcatttgaagaaagaatcccaagagagcgagccccatctcattaaatctggtggtgtgactaaagatgatactgctgctgaatgtagtgatgctgaaatggttgatgcgtctaaagatctggttcatggttcttctacaggatcagagaacatgcaaatttctgaatgtaaaggaaatcagcctggtgatgatctagatccttgcaacaggtcaaaggatgttaaaggagtggaagccaattatgcgtttaggtttgcgagcaatcccgcaaagagacccaagttaaatgaacacaaagaggccatgcttggcaaaaaacgagctaggcaaaccgtcttcatcggtgtagaggatgcgaaacaagctggtactatgaagacgacaacgcccaggaggcagtcgtcctttccagcaccgattgttacacgtactgtgaaggaagcttctcgtggtattggtgaaaaggctgcagaaaaacaaaatcagcaagcaatcagagatcagagacaacctgaaatgatgggatcagaacgaagcaattctgtagatcctagtgaccaacacactgaacccaatggtgacactgagttgggtacccagggctggtcaaagaaaatgaatacagaagagccagcctcagatggttatcagcatcctgcccaaagacaagcttcattaaagcaaaccatggacttcaagcagccaaagggccgaccattctcttcccaaagaacaattctaacagggcaaaacaatgctgatcagaagccagccaacaaaagaggaggctgaacttgagtgtgttcctggaagttttgaatctgctgaggagtacattagagtttttgagcctttgctttttgaggaatgcagagctcagctttatagttcgtatgaggagagtcttgaggctgtgggaagggatgcacatgtagcggtgcaagtaaaaaccgtggataaacgtgaaagaggttggtatgatgttgtcgtcctaccgatacatgaacgtaaatggaatttcaaagaaggcgatgttgctattctgtcgtttccacatcctggttcaggta

SEQ ID NO: 8289 - DNA, 450 bp, Zea Mays
atggagcagagacgcgcggtccgagctaggaggccgaggcgctgggaatggcgggcgactagggcgagatccgagaggggtgccatggggacgagcttgacgagctggaagtcgtgtgccggccaggagatccgcaccaggagccgagcgccagaggagcagaggtgggggcgaccgaggatgcaacgacaagaaaactccggcggccatggaggtgagctgcagcagggggccacgacgaggtcgtggcttggcgagtccagggctccaggcggggtcgatgactttgaggatgaaggccggggcgagcacgcagcggtggccaacatccatggcgagctccggagagagaagcgatgtggcggtggcgcagatgagccagagcgggagcgggagatccggatggcatggcgcgcggaatggctcggcgtggtggccatggccgtgtag

SEQ ID NO: 8290 - DNA, 761 bp, Zea Mays
tttaaaacacaaggaaagggataatgcaccggggcttgcctggaataacactaggttagtgtttgttagacgtcgatcacttgacgatcatcctttgtcttggcactcgttcagattatccatcttcaggttcctccatcagcatcacttttcgaagtaggtcgtgctttacaacatcttggggttgacccggctcgtctttcacatcacgtgtcaattaacgtacctcatgggatgcacaatgcacatgtatgaatttatagaggaatagcattagacagataatctacaccgaagattaacaatacttagacgcaacaaccatggatacctataacttaaaataacagatagtagcattttaagtgacttagaattactactctaaactattatgcacatcatatcagctaaacacgatatcaacgcaaatcaatcatacagaaatcatgatatatataagcatcgctaatgcttaccgggtagacgatagaaacacgtacaccaccctttacattactaaattgaccattcatcacaaatgacgaaccaatttatgcacacttaacttatacgttctctaagacattcttcaaaaatcctgcattttagacctaagttgtaccataatacgcaattatttcacacgattacgttatcagaggtgctgaggtattttagcaaacatctaacacaaacacgacacgactgttaaacaggagaattattacgactaataagtctagttaatccaatcatca

SEQ ID NO: 8291 - DNA, 2235 bp, Zea Mays
cttctccctccctctgcccgtttccatggccgtcgccctgccctgccttccactgccgcgccgcgtgctctgctctctgcgcgccgcggtcgcctagctcgcgaaggccgccgagtccgaccccgccgtgagctcaccctgggtgcttggccgctcttcatcgcacttgctcactggacaccggctccttgctcggcctctgctcctctctacgcgcgtctccctgcgcacgcgccgccgtcgagcttcctgctcgcgcctatctccctcccatggcgcgctctctgctcgccggttctccttgtaccagctcggttacccatctccctagctcgcgcccccacagagcagcttgagtctggcatgacaaacagggaaagaagtagccgagctcctctgtgcgcagccgcgcccttctgcttggctatggccaccgtcgtgccgaggatttgtggatccctctgtgttcggcctcgacaaaaactctggacgctcggacctcgccgtggacgctgatcgcctctgtttttctctggtgcgcgcccctgtgcttgggtccttgctagcagccgagcagctccttcgcgccgcagtgctccctcgtgtgcgcgccctgccgaagccccttccgactgtcggcaactccccatcctctagttgtgctcgctgctggccctgtggtgagctccctgcttcatcctcgccatggacgccatctagcacgcgcgccggatgtatttcctccttcgcgcagtgccttggtgactgtcgagtagcacaccaggcctgcgcagcctcgccgcgtctgtatagccccagttgcaatgcatccaccgctccggtcgttgacgtcgtgcctcgcataccgcctattcgataaaatgctccagctaagcttcgtcaccgatctcatgaatcccgatcgacattgttgtcgtgccctgcgtcttcaacatgtccgtgaagccgttgtggcattgctgtcgttcgtctccatgtggtgggtgcagcaatgtcgtcgttcactccatggggcttatcgtcgactttgtcttccggagagtgatcctagagtggaatgaaaatgtgagggaagtctgtgtagcgattgccaggagctcgatcggatgtctaaactgagaaccgtcgtcgcactcgcggttatcaaatcgattcgatcgtggtgagccaatttattatttcagttagttaaattgggtagttatatttgtcataagatgaaatgtcttagtgtgcatagtggtataattaataatgtgaagaataagtttagcatttatttaattagtatgtatttcaaattaatctagaaacatgatttaaaagattagttaaattgttcctgcacatactataactctgggtgcccaataataggagtctgaatattgttaggccctcgatgttatgctttagctaaggataacatagcgtgtattcatatttattgctgcttgatgtttgaattagatttggttaagctagaaaggcacggctattgcgcttagtcatacatcgataactagtgtttccgtatgaaacggtacaacgcctcgttactagtgtaattcgatatcatgtagcactatttagtcttgtactattcctgtctatatgcattcatgtacaacatgcatttcaattaggtacgcttattaatcacgagatgtggaggacaagagccgagtcgaccccaaaatgacgtaacgggtggactactccccatagctgatggatgagtctgaagatggataatctgaacaagtgcgaagaaaaagatggttgtcaagtgatcgacgtctaacaaacactaacatagtgtttattccaggcaagccccggtgcatttgccacctacttgctgttttaaaatctttatcaccttatttgatgcattaggtgataggggttgtgtgctaaaccgttgatgcatttctttcattggaaaattgattacccttccttgatacccttttatgaaaatttttttatgatgcttagccttgctctagaagaacaaaaatgttttgttttaaaaccaaagtgatgctttagtggatgagaatttttacaaaagaaaatactaatgatggtgaatccgtcaaaggccttgatgggttcaacatcggaaaagatgtacctctgccaggtaccaaattttgggttgaaaataataaagctaagactgggtggttgacttgcacgagaaggaag

SEQ ID NO: 8292 - DNA, 1402 bp, Zea Mays
cttcccatggcactcgcccctccctgctcgctctctagctcggtctccagctccctcctctccctccatctccctcacagccgcgccctgctcgcccttgcttctccctccctctgcccgtttccatggccgtcgccctgccctgccttccactgccgcgccgcgtgctctgctctctgcgcgccgcggtcgcctagctcgcgaaggccgccgagtccgaccccgccgtgagctcaccctgggtgcttggccgctcttcatcgcacttgctcactggacaccggctccttgctcggcctctgctcctctctacgcgcgtctccctgcgcacgcgccgccgtcgagcttcctgctcgcgcctatctccctcccatggcgcgctctctgctcgccggttctccttgtaccagctcggttacccatctccctagctcgcgcccccacagagcagcttgagtctggcatgacaaacagggaaagaagtagccgagctcctctgtgcgcagccgcgcccttctgcttggctatggccaccgtcgtgccgaggatttgtggatccctctgtgttcggcctcgacaaaaactctggacgctcggacctcgccgtggacgctgatcgcctctgtttttctctggtgcgcgcccctgtgcttgggtccttgctagcagccgagcagctccttcgcgccgcagtgctccctcgtgtgcgcgccctgccgaagccccttccgactgtcggcaactccccatcctctagttgtgctcgctgctggccctgtggtgagctccctgcttcatcctcgccatggacgccatctagcacgcgcgccggatgtatttcctccttcgcgcagtgccttggtgactgtcgagtagcacaccaggcctgcgcagcctcgccgcgtctgtatagccccagttgcaatgcatccaccgctccggtcgttgacgtcgtgcctcgcataccgcctattcgataaaatgctccagctaagcttcgtcaccgatctcatgaatcccgatcgacattgttgtcgtgccctgcgtcttcaacatgtccgtgaagccgttgtggcattgctgtcgttcgtctccatgtggtgggtgcagcaatgtcgtcgttcactccatggggcttatcgtcgactttgtcttccggagagtgatcctagagtggaatgaaaatgtgagggaagtctgtgtagcgattgccaggagctcgatcggatgtctaaactgagaaccgtcgtcgcactcgcggttatcaaatcgattcgatcgtggtacgcttattaatcacgagatgtggaggacaagagccgagtcgaccccaaaatgacgtaacgggtggactactccccatagctgatggatgagtctgaagatggataatctgaacaag

SEQ ID NO: 8293 - DNA, 400 bp, Zea Mays
ctggagcctaggttacgtttgcccccggcgaggtgtgggttggtcggatccgcccgacaccggtgagtgtccccggtgtccaaatgctttcccccgagcccaactctgctacacccaggctcggtgcatggcggtgaaaaatcgcctggctggcttctcggtcggagcgccgatgaatcgcgtgtgcagggacggcggtcccggtgcacaagcgccctctctcgaatttctctcaatacgaccgtaattgcacagcgaggttcgcgggggtggaagcagggttgactcgggatcatggcaccttatataggagcagggcggcccgggaatgagcaacagactcccgagatcgcgacgcagttccgccattgacggcgagatggttggggcagggactgac

SEQ ID NO: 8294 - DNA, 898 bp, Zea Mays
aagattagaaactcacatacacaacaattacacaatatgacatcatcacacattgctcaaagtaaatagcggaaaggtactttattacatcaagatgtccaagacatccacagagtctataacatagtcatttaacattagcaaagtgcggactacaaaacgtagtagataagaccttcataggcagctgattaggggtttgccactaagataactagaactcgtcgtagtcctgaaactcctcaaagttctccatgttgccagcatctcctcctgagcattgaatatagtggggacaacctggggtcgggtggtttttaaagcaagggtgagtacacatcaacgtactcagcaaatgccccatttggctaaagtggactagctgtatgtggagttaaggttaagcagttgcttttagttggtcaagtatttattactatcagtagagccaagttttagtaataaacccagttattacccaaatgtactccctccaagaggaaataccagagatcataattgtaaccatcatcattaaacatcataataagagtaaccgaaattcttctgatcaaagagaatccaaggccgctcttaaccgtgagcacgactgatataccagtttctaacactctacagaggtcgcacaatttacccacaagtcgtgattcccattctgcctagagatcatgactctcctttgatcactaccaaggtgacctagtagggtctcactacgtagactttacaaagatttcccagaggtcatagccgcccgttaggtttctttggtttgataaacacagtacctctccccaaaggaagggtgactaacaaaaccaaatcaaagaacctctacaaccagcctcggtagagcaagtactgtgcccagacccca

SEQ ID NO: 8295 - DNA, 709 bp, Zea Mays
gaaaaatcttgctcaaggtgaatagtcatagatttcctgtggtatcttctatggcaaagaggttcttggctgttccagctagcagtgtgtcatcagaatccacttttagcactgggggtaggatccttgatgattacaggagttcattgaagccagcaacagttcaggctttggtgtgtgcttctagttggatacgcgggtctcgaagttcacctattcttttaactggagaaggtgatgatggtgacatcgagtccgtggaatttccaaagtgtgtggtggcaagtaattaggcacatggtcacatactcacatggaggagatggaggagagggagagataggacccgagagaggacatgagaggcacatggtcattatattttgttggctgtaactgtaagcctgtaattgttggttgcaactgttgctaacctggcatattttgttggctccctacaactttgtcctgaactcctgaacctgaagtcctgatctataattgttggctgcatcactgcgtgtattttggttctagaactgaaactctgaaagtatggaattatggattatggaatggaactattatgaactataagtctataattggtggctgcatgtatttcaatatacaattattttttgtttgtttaagtgaatgagatggctgctattttgtaaatagttatatctgatattatatatgattg

SEQ ID NO: 8296 - DNA, 532 bp, Zea Mays
cacacagtatttgaacaagctggcacaagctaagaaaaatcttgctcaagggagaaggtgatgatggtgacatcgagtccgtggaatttccaaagtgtgtggtggcaagtaattaggcacatggtcacatactcacatggaggagatggaggagagggagagataggacccgagagaggacatgagaggcacatggtcattatattttgttggctgtaactgtaagcctgtaattgttggttgcaactgttgctaacctggcatattttgttggctccctacaactttgtcctgaactcctgaacctgaagtcctgatctataattgttggctgcatcactgcgtgtattttggttctagaactgaaactctgaaagtatggaattatggattatggaatggaactattatgaactataagtctataattggtggctgcatgtatttcaatatacaattattttttgtttgtttaagtgaatgagatggctgctattttgtaaatagttatatctgatattatatatgattg

SEQ ID NO: 8297 - DNA, 812 bp, Zea Mays
ccgacacctagacaagtgcacacagtatttgaacaagctggcacaagctaagaaaaatcttgctcaagaggttcttggctgttccagctagcagtgtgtcatcagaatccacttttagcactgggggtaggatccttgatgattacaggagttcattgaagccagcaacagttcaggctttggtgtgtgcttctagttggatacgcgggtctcgaagttcacctattcttttaactgtaagtgtatggtggcaatacttgtaacttctaagtgtttacttgacatttcactatctgaatatgtgacactcactttgtacatattttgtagggagaaggtgatgatggtgacatcgagtccgtggaatttccaaagtgtgtggtggcaagtaattaggcacatggtcacatactcacatggaggagatggaggagagggagagataggacccgagagaggacatgagaggcacatggtcattatattttgttggctgtaactgtaagcctgtaattgttggttgcaactgttgctaacctggcatattttgttggctccctacaactttgtcctgaactcctgaacctgaagtcctgatctataattgttggctgcatcactgcgtgtattttggttctagaactgaaactctgaaagtatggaattatggattatggaatggaactattatgaactataagtctataattggtggctgcatgtatttcaatatacaattattttttgtttgtttaagtgaatgagatggctgctattttgtaaatagttatatctgatattatatatgattg

SEQ ID NO: 8298 - DNA, 729 bp, Zea Mays
cactacaacactaaaccgacacctagacaagtgcacacagtatttgaacaagctggcacaagctaagaaaaatcttgctcaagaggttcttggctgttccagctagcagtgtgtcatcagaatccacttttagcactgggggtaggatccttgatgattacaggagttcattgaagccagcaacagttcaggctttggtgtgtgcttctagttggatacgcgggtctcgaagttcacctattcttttaactaaggtgatgatggtgacatcgagtccgtggaatttccaaagtgtgtggtggcaagtaattaggcacatggtcacatactcacatggaggagatggaggagagggagagataggacccgagagaggacatgagaggcacatggtcattatattttgttggctgtaactgtaagcctgtaattgttggttgcaactgttgctaacctggcatattttgttggctccctacaactttgtcctgaactcctgaacctgaagtcctgatctataattgttggctgcatcactgcgtgtattttggttctagaactgaaactctgaaagtatggaattatggattatggaatggaactattatgaactataagtctataattggtggctgcatgtatttcaatatacaattattttttgtttgtttaagtgaatgagatggctgctattttgtaaatagttatatctgatattatatatgattg

SEQ ID NO: 8299 - DNA, 568 bp, Zea Mays
cagcactacaacactaaaccgacacctagacaagtgcacacagtatttgaacaagctggcacaagctaagaaaaatcttgctcaagggagaaggtgatgatggtgacatcgagtccgtggaatttccaaagtgtgtggtggcaagtaattaggcacatggtcacatactcacatggaggagatggaggagagggagagataggacccgagagaggacatgagaggcacatggtcattatattttgttggctgtaactgtaagcctgtaattgttggttgcaactgttgctaacctggcatattttgttggctccctacaactttgtcctgaactcctgaacctgaagtcctgatctataattgttggctgcatcactgcgtgtattttggttctagaactgaaactctgaaagtatggaattatggattatggaatggaactattatgaactataagtctataattggtggctgcatgtatttcaatatacaattattttttgtttgtttaagtgaatgagatggctgctattttgtaaatagttatatctgatattatatatgattg

SEQ ID NO: 8300 - DNA, 822 bp, Zea Mays
gcagcactacaacactaaaccgacacctagacaagtgcacacagtatttgaacaagctggcacaagctaagaaaaatcttgctcaaggtagtctctcctttacttcagatggtggacctgttgttgttaatcccactgaatatgatcatgagcacactagagtgttaattgccaagatgataattgtccatgaatatgcatttagaatggtagagcataaatggttcaatatcttgatgaaatggatgaataacaattatgaatctattggtaggaagactattaaaaatgaatgcatgaagatctatgaatctgagaaagaactaatcaagaagagtcttagagaggctgaatcaataagtttaaccactgatttatggacatcaaatcaaaacattcagtatatgtgtttagtggcacattatgttgatgttgattggatcttgcaatgtcgtgttttgaactttattgaattggatcctccacacactggtattgtcatagctcaggctgtttttgaatgtttggttgaatggaaaattgaggataagatcttgacaatcactcttgataatgcttctagtaatgattctgctattacaaatctgaagtccaagtttcttgctagaaagaactcgagctttgaccctatgtactttgtagaagtttgcaaccaatattctgttaaagtaggacaagggttgtgccttgatgttaaaacaaggtggggttcaacatacaaaatgctagattcttgccttgactataaggaggcctttggttactattctgaaatagacaacaactatgaatggaaacctt

SEQ ID NO: 8301 - DNA, 499 bp, Zea Mays
gtctgttcttcgctgtctgttcgtcttccccgacggcgccctcgccctgtattgctgtccggcctccgacgcccacttgcctccatggaagcccaagaaccggatgcacacgaaggtcattcacgtccgccaataccacgaatttccggatcaatgattaagcgcacgagcacgaggaagaagcttatgccagcagctaagaagatttcagcggctgctagcactgcaccttcatcatccacatcttgttgtggtgctgtctctgtatctatagaaaagcaacttgatgttgtgatggaggaggggcaaggggaggaattggaggttatgttgtcggaatcagatgacagtgaatttgatcttgatgatgagtttccaccttccactgatggagatgagttgtcaaaaactgaaaagacaaagagaggaggaaagaggtcaagagctggtattcagttgtccccatccaagtgcaaggcgaatagagtaaagagggctg

SEQ ID NO: 8302 - DNA, 180 bp, Zea Mays
atgccgcacgacctgtacgctgctaccctcaaggaacggctcgacaacttgatcgtcaccatcaacaccacggagaaggatgccggcacacgcaaacgggtgcaggccgcccaccaactccttgaagaggagcatgtccctgtcgacgacctggaacgagagatcgttgtcggtaaatag

SEQ ID NO: 8303 - DNA, 930 bp, Zea Mays
cccggataggagcgactagcgagaagccaagcggcttggcacctcagcctgctgcctctgctcgctctcttcgccctctttctgcactaatcctcggctcaggcagccaatattctgtctagcgttgagatggcggacaacgtcctcatcgaccgatcagccagcggctttgagttccggcgctgggcggccggcgacgagttccagagcctcgccaccatgagcgtgctgcagcctgacgctcgcgctgctgctaaagggatgaagcaggcggcgcagaggaggacggggccgagagagtgcaagaggaagaagccgccgcggacgccgaggctgggggaagagcctccgagcgcgcagcgcaggaagccgctggagcgtgccacgccgctgccgcccgcgcccgcggtgcacgaggcgctggacgaccttgagcgccaggtgaccatggggttcgtcgaggacctcaagcacgcgctcgcgctcgctccgccgccaagcagcctaccgctgcccaccttctcacttgtcagagctgcggctgccgcagccaaggccgtgccatcctgtactgtgtaaccactgcacagtgcggcgagccaacccccgtaccggcgacggtatccagcaccgccagtcgtcttcctttctccaagactttttctttggatggatcggaagaaaaatgctacaaggcattattctttttctttcataaaagaagggcggctatttaattactcccttattttctttacagtcccttttttatttcgtcttatatatggctgtgatgtgaaagtgaacctaatttatatggtcgtttgcatcacatatccaaagttaacttcttgatgggaagtctgtttttattggcttgtatcaagaattcaagattaagataagttgtacgcttcattatgtgtcggt

SEQ ID NO: 8304 - DNA, 2123 bp, Zea Mays
accgatcgatgcgctcgtcggggccggcgggcaaagccaccagtggtcagagatctagctatggcgccggcgcttctgctgctgcgacttctggcattgattgcgacggcaagggaggcctgcgcggcgagggcgttcgccgcggcgtccaacgcgacggcgcatggggcgacggtggtggccgggaagctgaacgtgcacctggtgccgcactcgcatgacgacgtcgggtggctcaagaccgtcgaccagtactatgtcggatctaacaacagcatccagggcgcgtgcgtgatgaacaccctcgactccgtggtcgacgcgctcgccagggaccccgcccgcaagttcgtcgtcgtcgagcaggcttttttccaaaggtggtgggcagagaaaatcccaaacattcaggcagtagtccgcaagctcgtggattcgggtcagctagagttcataaatggtggatggtgcatgcatgatgaagctgctgtccattatattgacatgattgatcagaccacgcttggtcaccggatgatcaagaaacaattcaacaagactccaagagctggctggcaaatcgatccttttggacattctgcagttcaagcttatttgcttggagcagagattgaaatttgtaggatgacatgctgatgtttgactataatgttgaagaacgagttaatgattttgttgttgcagccatagaacaggcaaattttacgcgtacaaaccacataatgtggaccatgggagatgattttagttatcagtatgcagaatcttggttccggaatatggacaaacttatctatcacgtgaacaaggatggccgagtgcatgcgctgtattctaccccatccatttacacagatgcaaaacatttttcaaatatatcttggccagtaaaatatgacgatgatttcccctatgctgattcgaaaaattcatattggactgggtactatacaagccgtccaactttcaagcgatatgttcgagtgcttagtggttattacctggctgcacgtcaaatagaatttttagtgggtaggagtttcttagggatgttcacgaccagcttggaagacccaatggcaattgcccagcatcatgatgcagtctcaggtacagcaaaacaacacacgacagatgactactcgaaacgccttgctcttggagcatctaaggttgagaaaggagtcaatgttgctctgacctgtttactaagttccaacggaacatgtgcgccttcagtacaaaaatttagtcagtgcccacttctcaatataagctactgcccttcaactgaggaaacagtttcaggggcaaagaatttagttgtagttgtttacaatcctcttggaagggaacgtagtgacttcatacagattcctgtcaatgatgaaaaccttgttgtaaaaagctctgatgggactattattgagtcacaactagttgaggttgataatgtgacaagaaatttaaggaaagtttatgtaaaagcgtatcttggaatcacaacaaacaaaccaccaatgtattggttactttttcaagcttctgtgccgccaatggggtggaattcttactacatttcgagatccacaggatccaacagcattaggtatgttgcaaccatggtttctccaaggaatgacacggttgaagttggaccagggtctctaaaactttccttctcatcagcatctggacaactggagagaatattcaattctgtctcaggagtggatctaccaattcaacaaagctttttttggtatagttcaaatcaaggtgatatcgtggatgcacagggatctggagcatatgtatttagacccaatggtactacaccaactattgtatcatcatcggtgctgctcagcgttatccatggacctttggttcatgaagtgcatcaacaattcggcccatggattaatcaaattactcgactctacaagaacaaggagcatgcagaagttgaatacacgattgggccaatccctattgatgatgatgttgggaaggaggtcattacccgattgacaacaaacatggttacaaatagtacattttataccgactctaatggaagagatttcctcaaaagggta

SEQ ID NO: 8305 - DNA, 2109 bp, Zea Mays
accgatcgatgcgctcgtcggggccggcgggcaaagccaccagtggtcagagatctagctatggcgccggcgcttctgctgctgcgacttctggcattgattgcgacggcaagggaggcctgcgcggcgagggcgttcgccgcggcgtccaacgcgacggcgcatggggcgacggtggtggccgggaagctgaacgtgcacctggtgccgcactcgcatgacgacgtcgggtggctcaagaccgtcgaccagtactatgtcggatctaacaacagcatccagggcgcgtgcgtgatgaacaccctcgactccgtggtcgacgcgctcgccagggaccccgcccgcaagttcgtcgtcgtcgagcaggcttttttccaaaggtggtgggcagagaaaatcccaaacattcaggcagtagtccgcaagctcgtggattcgggtcagctagagttcataaatggtggatggtgcatgcatgatgaagctgctgtccattatattgacatgattgatcagaccacgcttggtcaccggatgatcaagaaacaattcaacaagactccaagagctggctggcaaatcgatccttttggacattctgcagttcaagcttatttgcttggagcagaggatgacatgctgatgtttgactataatgttgaagaacgagttaatgattttgttgttgcagccatagaacaggcaaattttacgcgtacaaaccacataatgtggaccatgggagatgattttagttatcagtatgcagaatcttggttccggaatatggacaaacttatctatcacgtgaacaaggatggccgagtgcatgcgctgtattctaccccatccatttacacagatgcaaaacatttttcaaatatatcttggccagtaaaatatgacgatgatttcccctatgctgattcgaaaaattcatattggactgggtactatacaagccgtccaactttcaagcgatatgttcgagtgcttagtggttattacctggctgcacgtcaaatagaatttttagtgggtaggagtttcttagggatgttcacgaccagcttggaagacccaatggcaattgcccagcatcatgatgcagtctcaggtacagcaaaacaacacacgacagatgactactcgaaacgccttgctcttggagcatctaaggttgagaaaggagtcaatgttgctctgacctgtttactaagttccaacggaacatgtgcgccttcagtacaaaaatttagtcagtgcccacttctcaatataagctactgcccttcaactgaggaaacagtttcaggggcaaagaatttagttgtagttgtttacaatcctcttggaagggaacgtagtgacttcatacagattcctgtcaatgatgaaaaccttgttgtaaaaagctctgatgggactattattgagtcacaactagttgaggttgataatgtgacaagaaatttaaggaaagtttatgtaaaagcgtatcttggaatcacaacaaacaaaccaccaatgtattggttactttttcaagcttctgtgccgccaatggggtggaattcttactacatttcgagatccacaggatccaacagcattaggtatgttgcaaccatggtttctccaaggaatgacacggttgaagttggaccagggtctctaaaactttccttctcatcagcatctggacaactggagagaatattcaattctgtctcaggagtggatctaccaattcaacaaagctttttttggtatagttcaaatcaaggtgatatcgtggatgcacagggatctggagcatatgtatttagacccaatggtactacaccaactattgtatcatcatcggtgctgctcagcgttatccatggacctttggttcatgaagtgcatcaacaattcggcccatggattaatcaaattactcgactctacaagaacaaggagcatgcagaagttgaatacacgattgggccaatccctattgatgatgatgttgggaaggaggtcattacccgattgacaacaaacatggttacaaatagtacattttataccgactctaatggaagagatttcctcaaaagggta

SEQ ID NO: 8306 - DNA, 2037 bp, Zea Mays
accgatcgatgcgctcgtcggggccggcgggcaaagccaccagtggtcagagatctagctatggcgccggcgcttctgctgctgcgacttctggcattgattgcgacggcaagggaggcctgcgcggcgagggcgttcgccgcggcgtccaacgcgacggcgcatggggcgacggtggtggccgggaagctgaacgtgcacctggtgccgcactcgcatgacgacgtcgggtggctcaagaccgtcgaccagtactatgtcggatctaacaacagcatccagggcgcgtgcgtgatgaacaccctcgactccgtggtcgacgcgctcgccagggaccccgcccgcaagttcgtcgtcgtcgagcaggcttttttccaaaggtggtgggcagagaaaatcccaaacattcaggcagtagtccgcaagctcgtggattcgggtcagctagagttcataaatggtggatggtgcatgcatgatgaagctgctgtccattatattgacatgattgatcagaccacgcttggtcaccggatgatcaagaaacaattcaacaagactccaagagctggctggcaaatcgatccttttggacattctgcagttcaagcttatttgcttggagcagaggcaaattttacgcgtacaaaccacataatgtggaccatgggagatgattttagttatcagtatgcagaatcttggttccggaatatggacaaacttatctatcacgtgaacaaggatggccgagtgcatgcgctgtattctaccccatccatttacacagatgcaaaacatttttcaaatatatcttggccagtaaaatatgacgatgatttcccctatgctgattcgaaaaattcatattggactgggtactatacaagccgtccaactttcaagcgatatgttcgagtgcttagtggttattacctggctgcacgtcaaatagaatttttagtgggtaggagtttcttagggatgttcacgaccagcttggaagacccaatggcaattgcccagcatcatgatgcagtctcaggtacagcaaaacaacacacgacagatgactactcgaaacgccttgctcttggagcatctaaggttgagaaaggagtcaatgttgctctgacctgtttactaagttccaacggaacatgtgcgccttcagtacaaaaatttagtcagtgcccacttctcaatataagctactgcccttcaactgaggaaacagtttcaggggcaaagaatttagttgtagttgtttacaatcctcttggaagggaacgtagtgacttcatacagattcctgtcaatgatgaaaaccttgttgtaaaaagctctgatgggactattattgagtcacaactagttgaggttgataatgtgacaagaaatttaaggaaagtttatgtaaaagcgtatcttggaatcacaacaaacaaaccaccaatgtattggttactttttcaagcttctgtgccgccaatggggtggaattcttactacatttcgagatccacaggatccaacagcattaggtatgttgcaaccatggtttctccaaggaatgacacggttgaagttggaccagggtctctaaaactttccttctcatcagcatctggacaactggagagaatattcaattctgtctcaggagtggatctaccaattcaacaaagctttttttggtatagttcaaatcaaggtgatatcgtggatgcacagggatctggagcatatgtatttagacccaatggtactacaccaactattgtatcatcatcggtgctgctcagcgttatccatggacctttggttcatgaagtgcatcaacaattcggcccatggattaatcaaattactcgactctacaagaacaaggagcatgcagaagttgaatacacgattgggccaatccctattgatgatgatgttgggaaggaggtcattacccgattgacaacaaacatggttacaaatagtacattttataccgactctaatggaagagatttcctcaaaagggta

SEQ ID NO: 8307 - DNA, 2075 bp, Zea Mays
accgatcgatgcgctcgtcggggccggcgggcaaagccaccagtggtcagagatctagctatggcgccggcgcttctgctgctgcgacttctggcattgattgcgacggcaagggaggcctgcgcggcgagggcgttcgccgcggcgtccaacgcgacggcgcatggggcgacggtggtggccgggaagctgaacgtgcacctggtgccgcactcgcatgacgacgtcgggtggctcaagaccgtcgaccagtactatgtcggatctaacaacagcatccagggcgcgtgcgtgatgaacaccctcgactccgtggtcgacgcgctcgccagggaccccgcccgcaagttcgtcgtcgtcgagcaggcttttttccaaaggtggtgggcagagaaaatcccaaacattcaggcagtagtccgcaagctcgtggattcgggtcagctagagttcataaatggtggatggtgcatgcatgatgaagctgctgtccattatattgacatgattgatcagaccacgcttggtcaccggatgatcaagaaacaattcaacaagactccaagagctggctggcaaatcgatccttttggacattctgcagttcaagcttatttgcttggagcagagaacgagttaatgattttgttgttgcagccatagaacaggcaaattttacgcgtacaaaccacataatgtggaccatgggagatgattttagttatcagtatgcagaatcttggttccggaatatggacaaacttatctatcacgtgaacaaggatggccgagtgcatgcgctgtattctaccccatccatttacacagatgcaaaacatttttcaaatatatcttggccagtaaaatatgacgatgatttcccctatgctgattcgaaaaattcatattggactgggtactatacaagccgtccaactttcaagcgatatgttcgagtgcttagtggttattacctggctgcacgtcaaatagaatttttagtgggtaggagtttcttagggatgttcacgaccagcttggaagacccaatggcaattgcccagcatcatgatgcagtctcaggtacagcaaaacaacacacgacagatgactactcgaaacgccttgctcttggagcatctaaggttgagaaaggagtcaatgttgctctgacctgtttactaagttccaacggaacatgtgcgccttcagtacaaaaatttagtcagtgcccacttctcaatataagctactgcccttcaactgaggaaacagtttcaggggcaaagaatttagttgtagttgtttacaatcctcttggaagggaacgtagtgacttcatacagattcctgtcaatgatgaaaaccttgttgtaaaaagctctgatgggactattattgagtcacaactagttgaggttgataatgtgacaagaaatttaaggaaagtttatgtaaaagcgtatcttggaatcacaacaaacaaaccaccaatgtattggttactttttcaagcttctgtgccgccaatggggtggaattcttactacatttcgagatccacaggatccaacagcattaggtatgttgcaaccatggtttctccaaggaatgacacggttgaagttggaccagggtctctaaaactttccttctcatcagcatctggacaactggagagaatattcaattctgtctcaggagtggatctaccaattcaacaaagctttttttggtatagttcaaatcaaggtgatatcgtggatgcacagggatctggagcatatgtatttagacccaatggtactacaccaactattgtatcatcatcggtgctgctcagcgttatccatggacctttggttcatgaagtgcatcaacaattcggcccatggattaatcaaattactcgactctacaagaacaaggagcatgcagaagttgaatacacgattgggccaatccctattgatgatgatgttgggaaggaggtcattacccgattgacaacaaacatggttacaaatagtacattttataccgactctaatggaagagatttcctcaaaagggta

SEQ ID NO: 8308 - DNA, 1097 bp, Zea Mays
acacgtaatttgttaaatgagagaaggaacctgaaatatgggggcatcaacatctttattaaccttcgagtctcattcgatcattcctgccaagtgctgtatcgctccagatactccaaaagcatggcatagagttatggaactatatgacttgtacctaaaaacaaagataaaaagaactataagaattgtacctgaaaaacaaagataaaagaactatagaactcaaccttctcatctatcattataaaaacaaagatgagtgtgttagctgggcaatagcaggagctaaggagcttgagagcctaggcttagttgtagctctggccgaggtcgggtcaagttacggttccagtttgtaatttccttcgggtttttgtgtgggggccttgagagacttgcccagcaaaatctcctttttgtaaggttttttattcctctctaatatataagatgtgcagttctcctgcgcgttcgataaaaaaataaaaaaattaaaaattgttggtggtgctttgctcgcatcgcatgttcttcttgcatagcattgacgccttggcgttgctaatccttccatctaccaagctcgtgtcttcatcattcttggcgctgatcgattgtgacgccgaaaagtcggcatccatgcatggacagtagtccactcttcgtcccgcgcccgcatcctccgttctccaggacaacgtcgttgatgtccagaactgagaaatttgcaagatcaccaccccagaaaggtggcttcgctgcattgccactatcaaatgatcctcactgttgttatgccatccagcctcatataatccatcaacttgttcttttacagctcttcagccacgggaaaaaatagctctgtccttaggtcaagatacggtcatcttgcctctgtttgcttggactaaaaatgaacgagcgttgtgttctccccggcggcgcacagaggattggacactcaagcacgcataactcaacatttggttctcctccaagcccacaggcagcagatttgaggtaagaatggtgttccagttgtattccctctgtttctgttatccaccttcgatttctaaaatcccttgttt

SEQ ID NO: 8309 - DNA, 4669 bp, Zea Mays
ggaactatatgacttgtacctaaaaacaaagataaaaagaactataagaattgtacctgaaaaacaaagataaaagaactatagaactcaaccttctcatctatcattataaaaacaaagatgagtgtgttagctgggcaatagcaggagctaaggagcttgagagcctaggcttagttgtagctctggccgaggtcgggtcaagttacggttccagtttgtaatttccttcgggtttttgtgtgggggccttgagagacttgcccagcaaaatctcctttttgtaaggttttttattcctctctaatatataagatgtgcagttctcctgcgtgttcgataaaaaaataaaaaaataaaaaattgttggtggtgctttgctcgcatcgcatgttcttcttgcatagcattgacgccttggcgttgctaatccttccatctaccaagctcgtgtcttcatcattcttggcgctgatcgattgtgacgccgaaaagtcggcatccatgcatggacagtagtccactcttcgtcccgcgcccgcatcctccgttctccaggacaacgtcgttgatgtccagaactgagaaatttgcaagatcaccaccccagaaaggtggcttcgctgcattgccactatcaaatgatcctcactgttgttatgccatccagcctcatataatccatcaacttgttcttttacagctcttcagccacgggaaaaaatagctctgtccttaggtcaagatacggtcatcttgcctctgtttgcttggactaaaaatgaacgagcgttgtgttctccccggcggcgcacagaggattggacactcaagcacgcataactcaacatttggttctcctccaagcccacaggcagcagatttgaggtaagaatggtgttccagttgtattccctctgtttctgttatccaccttcgatttctaaaatcccttgtttttttggacgcatgaaccaatagattttgtgatgttggctctaaatctgtgatccattgcccatggagaggtggtgctatgccagatttggacatggaacccacctccaactcttgggacatgaacctaaggtatataatctattctgctatgtggttttgtttacgtatttcggctgttcgaactgctaaccaaagataggtcgcccctctaactcgattttattgtgcacttgctccttgcattgagggttttttagcaggatgtaggccttatctgcactaaatggtaggtggaacggccaattggaatcagtaacagatatagatggtcataactggatgtatcctgttgcatttggattaatacaatctgaaccagagtataactgggtttggtttatgaagcagttgcgtagggctataggagacatgccccagctagcaatttgcacagatgcttgtaagggattagaaaaggcagtggtacaagtgtttccttatgcaaatcaaagggaatgttttaggtacctcacgcaaaactttatgaagagatatagtggtgtcatttattcacgtatgtaccctgcagttgagacttataagaaggacaaatttcagtaccacatgacccaaatgttctcaggtagcaatgatgtgttcaagtaccttgatgaacaccattcactgaaatggatgagatgtgacttcaaccaagaaattaagtgtgattatattactaacaatctagcggagtgtttcaacaattggattagagagtagagacataaaggacttgccagtgactgatcatgttgataagataagggaaatgataatgataccacgggagaagataagaaaaattggagaacgacttcaaggcaagatactaccagctgtcctccaccaattgaatgcaagaactagagggttgggacacttaactgttgtgaaagctgacttacatgatgcagaggtgtacgacagcagccacaatcatcatgatcgacatgctatcaaggaacatttacatgactgcacttgtgaagagtagcaacatactggcaagccttgcgagcatgcattggccttgctaacagcagtgcaaaacagaaatgtgaagcttgaggatttgttcatgaatactactctgttccaatgttcagataggcatataaaagattgatagagccactgcctgacaagtcacaatggcccacagtagaaattccatttgatatgggtgcaccaatttgcaaaagaactgttggcagacagaaatttgaggttcaaaagttcccttcaaggcggcaacagttcagagacaaaacatgatgaaggtggcatcagttcaaaggcaaaaccaactgaacaagaaaagcccaaaacgatggtaagaggaaaacgtaggtgcaaaagatgcggtacattgggtcacacaaaagttagttacaaatgccaactcaatggtacaaagaaaacgaagagaaagcctaggaatagtaaatcaagtggtaaaagtcagatggcaagaccatatagccaataacaactagggaaaccataattcaagatactccaaaagcatggcatagagttatggaactatatgaaatgtacctaaaaacaaagataaaaagatggcttcgctgagaaatttgcaagatccccaccccggaaaggtggcttcgctgcattgccactatcaactgatccctcactgttgttatgccatccagcctcatataatccatcaacttgttcttttacagctctccagcccacgggaaaaaaatagctctgtccttaggtcaagataaggtcatcttgcctctgtttgcttggactaaaaatgaacgagcgttgagttctccccggcggcgcacagaggattggacactcaagcacgcataactcaacatttggttctccaagcccacaggcagcagatttgaggtaagaatggtgttccagttgtattcccttcgtttctgttatcctccttcgatttctaaaatcccttgttttttggacgcatgaaccaatagattttgtgatgttagctctaaatatgtgatccattgcccttggagaggtggtgctatgccagatttggacatggaacccaactccaactcttgggacatgaacctaaggtatataatctattctgctatgtggttttgtttacgtatttcggctgttcgagttgctaaccaaagataggtcgcccctctaactcgattttattgtgcacttgctccttgcattgagagttttttagcaggatgtaggccttatctgcactaaatggtaggtggaacggccaattggcatcagtaacagatatagatggtcataactggatgtatcctgttgcatttggattaatacaatctgaaccagagtataactgggtttggtttatgaagcagttgcgtagggccataggagacatgcctcagctagcaatttgcacagatgcttgtaagggattagaaaaggcagtggtacaagtgtttccttatgctgatcaaagggaatgttttaggtacctcatgcactttatgaagagatatagtggtgtcatttattcacgtatgtaccctgcagttgaggcttataagaaggacaaatttaagtaccacatgacccaaatgttctcaggtagaaatgatgtgttcaagtaccttgatgaacaccattcactgaaatggatgagatgtgacttcaaccaagaaattaagtgtgattatattactaacaatctagcggagtgtttcaacaattggattagagagtagagacataaaggacttgccagtgactgatattgttgataaggtaagggaaatgataatgataccacgggagaagataagaaaaattggagaacgacttcaaggcaagatactaccagctgtcctacaccaaataaatgcaagaactagatggttgggacacttaaatgttgtgaaagctgacaacatgatgcagaagtgtacgacagcagccacaatcatcatgatcgacatgctatcaaggaacatttacatgactgcacttgtgaagagtagcaacataccggcaagccttgcgagcatgcattggccttgctaacagcagtgtaaaacagaaatgtgaagcttgaggatttgttcatgaatactactctgttgcaaagttcagataggcatataaaagattgatagagccactgcctgacaagtcacaatggcccacagtagaacttccatttgatatgggtgcaccaatttgcaaaagaactgttagcagacagaaatttgaggttcaaaagttcccttcaaggcggcaacagttcagagacaaaacatgatgaaggtggcaccagttcaaaggcaaaaccaactgaacaagaaaagcccaaaacgatgataagaggaaaacgtaggtgcaaaagatgcggtacattgggtcacacaaaagttagttagaaatgcccactcaatggtacgaagaaaacgatgagaaagcctaggaagaatagtactaaatcaagtggtaaaagtcagatggcaacaccatataggccaataacaactagggaaaccataattcaagagcgccctggagcaacaatgacaaaaaggtaattccaaaatttgtgcaggcgacttgctgctctgttagaaagcaattcttctcagacaactatgcctacttcaac

SEQ ID NO: 8310 - DNA, 424 bp, Zea Mays
gaaaaaaaggtgtttagtaactcaaactcctcgaataacaaactagttttacattgaggtcccgtttgtttcttttcgttttgaggaattgaaatcttactattgtaataggctatttttttagaatgcgacattccaccactttccaaagttatcatataagcctatctcaaattcatggggtgagaaatgaaaattgattctatagatttacatgttattttttcgatgtacaacttatagcacactcttctacttgcttagttataacatgaatgtagtatataactatctctctcatatggtttaagataatatataaatatattacatatataaatatatgaacttaattaattttgtctaaattataattattaaaatagaattcaattccaacgaaacaaacggggcctgagggtat

SEQ ID NO: 8311 - DNA, 3924 bp, Zea Mays
cattaacatctgcctaaacacatgatggccgagtgcatgcattatattctactccgtccatctacacagatgctaaacatgcatcaaacgaatcttggccagtaaaatacgatgattatttcccctacgccgattcaacaaatgcatactggactgggtattttacaagccgtccaactttcaagcgatacattcgagtgtacagtggatactatctggctgcgcgtcaaatagaatttttgatgggtaggagctccttgggattgttcacttccagcttggaagatgcaatgggtattgcccagcatcatgatgcaatctcaggtactgcaaaacagcacacgactgatgactactcaaaacggattgctattggagcatcaaaggtcgaaaaaggtgtaaacgctgctctgacttgtctaaccaactctaacaaaacatgtgtatcctctgtaccaaaatttagtcagtgtccacttctcaatataagctactgcccttcgactgaggaagcaatttcagcaacaaagcatttagttgtagttgtttacaatcctcttggttggaaacgtagtgacttcataagggttcctgtcaatgatgaagacctggtggtcaaaagctctgatggaaatactgttgtgtcacaaatagttgtggttgataatgtgacaaacaacttaagaaagttatatgtgaaggcttatcttggagtcacagcaaacaaggcccctaagtattggctaacatttcaagcttctgtaccaccaatgggatggaattcttactttattttgaaatcaactggatctggatacaacaacactgaacatgtccccgtcgtggttcctccaagtaacaacacaattgaagctggacaagggcatttaaagatgtcattctcttcagcatctggacaactagagagaatattcaattctgcctcaggaggagacttaccaattcaacaaagctttctttggtatagatcaagtaaaggagatgccttggacccacaggcatctggagcttatatatttagaccagatggtaatacaccaactattgcctcatcatcggtgactcttaaagttatccgtggacctctatttgatgaagtccatcaacaattcagctcgtggatttatcagattacacgactctacaagaacaaggagcatgctgaagttgaatacacgattgggccaatccctgttgacgatgacgtaggaaaggaggttatcacacagttgacagcaaatatgagtacaaacagtacattttatacagattccaatggaagggatttcctcaaaagggtgagaaactacagggaggattggaaccttcaagtgactcaaccagttgcaggaaattactacccggttaatctcggagtgtacatagtagatgagaaatatgaactatctgtccttgtggaccgtgctgccggagcatccagcattcaggatggtcagctagagattatgctacacaggcgtttgcttaaagatgatggcagaggtgtcgcggagccacttgatgaagtggtttgtgtggatcaagattgccaagggctaacggccaggggcacttactatatcaatgtcgagaagctaggccatggagctcattggcgccgtacatatggccagcaagtctactctccctttctccttgcttttactcatgaggatgcgacaagctcaaaaccctacagtgtggccaaagatagtatgatggatgggaattacagccttcctgacaacgttgcgattgtcactttgcagaatcttgatgatggtaccacactactccgcttggcccatcttttccaagctggcgaggacccgagatattcagaggtagcagaggttgatctgaaaaaggtctttggaaagagaactatcaaggaactgaccgagactaacctctccgcaaatcaaaagaagtcagagatgaagcagctcaactggagagttattgaggacgctgaaagtggtcctgccccggtaaaaggtggcccagttgattgtcgtgctctggtcgttgcgctgggacccatggagatacgcaccttcttgctgaaattttaatcgcatttaccgtgcttgtaattgtaaagaaaaaacaatgataaatggagaacttgctatcgttatttccttttgtaaaaaaaagatgaaatacccaaatagaacgttaaatttgcgcaaggtatgtacaatctacatcatgtgttttctattatatggttgctcatattagatcgcatcttggcttacaaaatgcatgatatccatgctgtggtggatgccatgtgagcttgcatatcctcaaagcacacacgtggctgcattaagcaatattactccctcctttcttttttatttgttgcattttagttaaaaagaaactagccgacgataaatagtcgagaacgagagtagtaacacctattagattattttcaacatattacttgtatcttttattttaaattttactatagttttattctctattttaaacttcaagtggcttatgcggtagatggaatccgctcacctctgccacacctccatggcaatgacatcacctccacactgatgcgtggctgtctgccagcatcgtcgcaacaggctcacgctgcttatcgtggcaagaaccactttaaatcctgcagtattaaggtatgcataatcttatttaatatagcatctcttaaggagtctctagagattaattaaaatatatataaaagataagttcttagtgagccgtctctatacaactctccatatatattgtctattaattgtatttatgatccaaatactgaaagttgttaaagaatttgttaaagacttcacttatttaagtgttagaaaggatagtggtagcttgtccttacctttcaattatcattgttaaagactccacttatttgggatgaataatcttcacaagcttctaaagggaacacattttatgactaaaaaaatgttgattttgaggaagacaagatttgtagcgtatgtcaagtagggaaacatgttggaggtcatcatccacataagaacatcatgacgaccgagagaccgcttgagctattccacatggatctattgcttacataagcatcggcggaagtaagtattgtcttataattgtggatgattattctcgcttcacttgagtattctttttgtaggaaaaatctcaaacccaagagaccttaaagagattcttgagatgggctcaaaatgagttcggattgagaatcaagaagattagaagcgacaatgaaacggagttcaagaactctcaaattgaaggatttcttgaggaggaggacatcaagcatgagttctcttctccctacacacctcaataaaatggtgttgtggagagaaaaaatagaactctcttggatatggcaagaaccatgcttgatgagtacaagacaccggaccggttttaggcggaggcaattaacaccgcctgcaactccatcaaccatctctaccttcactgaatcctcaagaaaacatcatatgaactcctcactggtaaaaagcccaacgtttcttattttagagtttttgggagcaaatgttttattcttattaaaagaggtagaaattctaaatttgaccctaaagcagtagaaggctgtttgcttggttatgactcaaacacaagggcatatagaatattcaacaagtccactgaattacttgaagtttcttgtgacattgtgtttgatgagactaatagctctcaagtagagcaagttgatcttgatgaattagatgatgaagaggctccgtgcgtcgcgctaaggaacatgtacattaggaatgtgtgtctaaaagaatccgaagagccttcacaagcacaagatcaaccatcatcttccat

SEQ ID NO: 8312 - DNA, 5356 bp, Zea Mays
gccatcatggcgccgacgcttctgctggtagcccttgtagcgctcgcggtggcagcagcaacgccgatggtgatggaggcatcggcgttcacggaggggtgcaacaataggagcacgccgggtggtggtggaggcaccgcggtggggaacaagctgaacgtgcacttggtgccgcactcgcacgacgacgtcgggtggctcatgaccatcgaccagtactacgtcggatccaacaactccatccagggcgcgtgtgtgatgaacacactcgactccgtggtggacgcgctcgccaaggatcctgctcgcaagttcatcgtcgtcgagcaggctttcttccaaaggtggtgggcacagaaaagcctgacagtccaggccacagtacacaaactggtcgattcgggtcagctagagttcataaatggtgggtggtgtatgcatgatgaagctgttgtgcattacattgacatgattgatcagaccacacttggccaccgggtgatcaagaaacaattcaaaaagattccgagagctggctggcaaatcgatcctttcggtcattctgcagttcaagcttatttgcttggagcagagaatcgattaccaagatagggcaacccggaaagcaaataagggcctagaagttatatggcgtggctcaagacctgttggttcatcatcacagatcttcacgaatgtatttccagtccattatagcgcaccagttggcttcagcttcgaagttttggctgaaaatgtcatacccgttcaggatgacatgtcgctgtttgactacaatgtccaagaacgtgtagatgattttgttgctgcagccatagcacaggcaaacgttacacgtacaaaccacataatgtggaccatgggggatgattttaactaccagtatgctgaatcctggttccgaaatatggacaaacttatccagtatgtgaacaaggatggccgagtgcatgcattatattctactccgtccatctacacagatgctaaacatgcatcaaacgaatcttggccagtaaaatacgatgattatttcccctacgccgattcaacaaatgcatactggactgggtattttacaagccgtccaactttcaagcgatacattcgagtgtacagtggatactatctggctgcgcgtcaaatagaatttttgatgggtaggagctccttgggattgttcacttccagcttggaagatgcaatgggtattgcccagcatcatgatgcaatctcaggtactgcaaaacagcacacgactgatgactactcaaaacggattgctattggagcatcaaaggtcgaaaaaggtgtaaacgctgctctgacttgtctaaccaactctaacaaaacatgtgtatcctctgtaccaaaatttagtcagtgtccacttctcaatataagctactgcccttcgactgaggaagcaatttcagcaacaaagcatttagttgtagttgtttacaatcctcttggttggaaacgtagtgacttcataagggttcctgtcaatgatgaagacctggtggtcaaaagctctgatggaaatactgttgtgtcacaaatagttgtggttgataatgtgacaaacaacttaagaaagttatatgtgaaggcttatcttggagtcacagcaaacaaggcccctaagtattggctaacatttcaagcttctgtaccaccaatgggatggaattcttactttattttgaaatcaactggatctggtgaatgacttcatcttaatacttattttcatcaaactacaagtccttgagaaaatactattgttctttatgccaacaatttaatatcgttcttcttcaaacatgaaaccgctttatcaatagagagttatgatataacagagtaaggcatgcggcatggtaatatcacatattcacatgtctcataactagctttagttgtcacattaaactaccataaggacatgcaaagtttattttggctatttacaccaacttcagctttagtcactatataaaattgaaaaaaacccttacccaacaagattggttgtagacttgtagttatataacttatattcgattaagatgatagattttgatccgttttggatctttttccctctcttcttaatgaaatgatgcgcatgtctcttgcgcgttcgagaaaaaaaagagatagattttgaacacttttttaagttaagaaacagaaattgttcctaccacctatccaggatacaacaacactgaacatgtccccgtcgtggttcctccaagtaacaacacaattgaagctggacaagggcatttaaagatgtcattctcttcagcatctggacaactagagagaatattcaattctgcctcaggaggagacttaccaattcaacaaagctttctttggtatagatcaagtaaaggagatgccttggacccacaggcatctggagcttatatatttagaccagatggtaatacaccaactattgcctcatcatcggtgactcttaaagttatccgtggacctctatttgatgaagtccatcaacaattcagctcgtggatttatcagattacacgactctacaagaacaaggagcatgctgaagttgaatacacgattgggccaatccctgttgacgatgacgtaggaaaggaggttatcacacagttgacagcaaatatgagtacaaacagtacattttatacagattccaatggaagggatttcctcaaaagggtgagaaactacagggaggattggaaccttcaagtgactcaaccagttgcaggaaattactacccggttaatctcggagtgtacatagtagatgagaaatatgaactatctgtccttgtggaccgtgctgccggagcatccagcattcaggatggtcagctagagattatgctacacaggcgtttgcttaaagatgatggcagaggtgtcgcggagccacttgatgaagtggtttgtgtggatcaagattgccaagggctaacggccaggggcacttactatatcaatgtcgagaagctaggccatggagctcattggcgccgtacatatggccagcaagtctactctccctttctccttgcttttactcatgaggatgcgacaagctcaaaaccctacagtgtggccaaagatagtatgatggatgggaattacagccttcctgacaacgttgcgattgtcactttgcagaatcttgatgatggtaccacactactccgcttggcccatcttttccaagctggcgaggacccgagatattcagaggtagcagaggttgatctgaaaaaggtctttggaaagagaactatcaaggaactgaccgagactaacctctccgcaaatcaaaagaagtcagagatgaagcagctcaactggagagttattgaggacgctgaaagtggtcctgccccggtaaaaggtggcccagttgattgtcgtgctctggtcgttgcgctgggacccatggagatacgcaccttcttgctgaaattttaatcgcatttaccgtgcttgtaattgtaaagaaaaaacaatgataaatggagaacttgctatcgttatttccttttgtaaaaaaaagatgaaatacccaaatagaacgttaaatttgcgcaaggtatgtacaatctacatcatgtgttttctattatatggttgctcatattagatcgcatcttggcttacaaaatgcatgatatccatgctgtggtggatgccatgtgagcttgcatatcctcaaagcacacacgtggctgcattaagcaatattactccctcctttcttttttatttgttgcattttagttaaaaagaaactagccgacgataaatagtcgagaacgagagtagtaacacctattagattattttcaacatattacttgtatcttttattttaaattttactatagttttattctctattttaaacttcaagtggcttatgcggtagatggaatccgctcacctctgccacacctccatggcaatgacatcacctccacactgatgcgtggctgtctgccagcatcgtcgcaacaggctcacgctgcttatcgtggcaagaaccactttaaatcctgcagtattaaggtatgcataatcttatttaatatagcatctcttaaggagtctctagagattaattaaaatatatataaaagataagttcttagtgagccgtctctatacaactctccatatatattgtctattaattgtatttatgatccaaatactgaaagttgttaaagaatttgttaaagacttcacttatttaagtgttagaaaggatagtggtagcttgtccttacctttcaattatcattgttaaagactccacttatttgggatgaataatcttcacaagcttctaaagggaacacattttatgactaaaaaaatgttgattttgaggaagacaagatttgtagcgtatgtcaagtagggaaacatgttggaggtcatcatccacataagaacatcatgacgaccgagagaccgcttgagctattccacatggatctattgcttacataagcatcggcggaagtaagtattgtcttataattgtggatgattattctcgcttcacttgagtattctttttgtaggaaaaatctcaaacccaagagaccttaaagagattcttgagatgggctcaaaatgagttcggattgagaatcaagaagattagaagcgacaatgaaacggagttcaagaactctcaaattgaaggatttcttgaggaggaggacatcaagcatgagttctcttctccctacacacctcaataaaatggtgttgtggagagaaaaaatagaactctcttggatatggcaagaaccatgcttgatgagtacaagacaccggaccggttttaggcggaggcaattaacaccgcctgcaactccatcaaccatctctaccttcactgaatcctcaagaaaacatcatatgaactcctcactggtaaaaagcccaacgtttcttattttagagtttttgggagcaaatgttttattcttattaaaagaggtagaaattctaaatttgaccctaaagcagtagaaggctgtttgcttggttatgactcaaacacaagggcatatagaatattcaacaagtccactgaattacttgaagtttcttgtgacattgtgtttgatgagactaatagctctcaagtagagcaagttgatcttgatgaattagatgatgaagaggctccgtgcgtcgcgctaaggaacatgtacattaggaatgtgtgtctaaaagaatccgaagagccttcacaagcacaagatcaaccatcatcttccat

SEQ ID NO: 8313 - DNA, 4722 bp, Zea Mays
gccatcatggcgccgacgcttctgctggtagcccttgtagcgctcgcggtggcagcagcaacgccgatggtgatggaggcatcggcgttcacggaggggtgcaacaataggagcacgccgggtggtggtggaggcaccgcggtggggaacaagctgaacgtgcacttggtgccgcactcgcacgacgacgtcgggtggctcatgaccatcgaccagtactacgtcggatccaacaactccatccagggcgcgtgtgtgatgaacacactcgactccgtggtggacgcgctcgccaaggatcctgctcgcaagttcatcgtcgtcgagcaggctttcttccaaaggtggtgggcacagaaaagcctgacagtccaggccacagtacacaaactggtcgattcgggtcagctagagttcataaatggtgggtggtgtatgcatgatgaagctgttgtgcattacattgacatgattgatcagaccacacttggccaccgggtgatcaagaaacaattcaaaaagattccgagagctggctggcaaatcgatcctttcggtcattctgcagttcaagcttatttgcttggagcagagaatcgattaccaagatagggcaacccggaaagcaaataagggcctagaagttatatggcgtggctcaagacctgttggttcatcatcacagatcttcacgaatgtatttccagtccattatagcgcaccagttggcttcagcttcgaagttttggctgaaaatgtcatacccgttcaggatgacatgtcgctgtttgactacaatgtccaagaacgtgtagatgattttgttgctgcagccatagcacaggcaaacgttacacgtacaaaccacataatgtggaccatgggggatgattttaactaccagtatgctgaatcctggttccgaaatatggacaaacttatccagtatgtgaacaaggatggccgagtgcatgcattatattctactccgtccatctacacagatgctaaacatgcatcaaacgaatcttggccagtaaaatacgatgattatttcccctacgccgattcaacaaatgcatactggactgggtattttacaagccgtccaactttcaagcgatacattcgagtgtacagtggatactatctggctgcgcgtcaaatagaatttttgatgggtaggagctccttgggattgttcacttccagcttggaagatgcaatgggtattgcccagcatcatgatgcaatctcaggtactgcaaaacagcacacgactgatgactactcaaaacggattgctattggagcatcaaaggtcgaaaaaggtgtaaacgctgctctgacttgtctaaccaactctaacaaaacatgtgtatcctctgtaccaaaatttagtcagtgtccacttctcaatataagctactgcccttcgactgaggaagcaatttcagcaacaaagcatttagttgtagttgtttacaatcctcttggttggaaacgtagtgacttcataagggttcctgtcaatgatgaagacctggtggtcaaaagctctgatggaaatactgttgtgtcacaaatagttgtggttgataatgtgacaaacaacttaagaaagttatatgtgaaggcttatcttggagtcacagcaaacaaggcccctaagtattggctaacatttcaagcttctgtaccaccaatgggatggaattcttactttattttgaaatcaactggatctgggagacttaccaattcaacaaagctttctttggtatagatcaagtaaaggagatgccttggacccacaggcatctggagcttatatatttagaccagatggtaatacaccaactattgcctcatcatcggtgactcttaaagttatccgtggacctctatttgatgaagtccatcaacaattcagctcgtggatttatcagattacacgactctacaagaacaaggagcatgctgaagttgaatacacgattgggccaatccctgttgacgatgacgtaggaaaggaggttatcacacagttgacagcaaatatgagtacaaacagtacattttatacagattccaatggaagggatttcctcaaaagggtgagaaactacagggaggattggaaccttcaagtgactcaaccagttgcaggaaattactacccggttaatctcggagtgtacatagtagatgagaaatatgaactatctgtccttgtggaccgtgctgccggagcatccagcattcaggatggtcagctagagattatgctacacaggcgtttgcttaaagatgatggcagaggtgtcgcggagccacttgatgaagtggtttgtgtggatcaagattgccaagggctaacggccaggggcacttactatatcaatgtcgagaagctaggccatggagctcattggcgccgtacatatggccagcaagtctactctccctttctccttgcttttactcatgaggatgcgacaagctcaaaaccctacagtgtggccaaagatagtatgatggatgggaattacagccttcctgacaacgttgcgattgtcactttgcagaatcttgatgatggtaccacactactccgcttggcccatcttttccaagctggcgaggacccgagatattcagaggtagcagaggttgatctgaaaaaggtctttggaaagagaactatcaaggaactgaccgagactaacctctccgcaaatcaaaagaagtcagagatgaagcagctcaactggagagttattgaggacgctgaaagtggtcctgccccggtaaaaggtggcccagttgattgtcgtgctctggtcgttgcgctgggacccatggagatacgcaccttcttgctgaaattttaatcgcatttaccgtgcttgtaattgtaaagaaaaaacaatgataaatggagaacttgctatcgttatttccttttgtaaaaaaaagatgaaatacccaaatagaacgttaaatttgcgcaaggtatgtacaatctacatcatgtgttttctattatatggttgctcatattagatcgcatcttggcttacaaaatgcatgatatccatgctgtggtggatgccatgtgagcttgcatatcctcaaagcacacacgtggctgcattaagcaatattactccctcctttcttttttatttgttgcattttagttaaaaagaaactagccgacgataaatagtcgagaacgagagtagtaacacctattagattattttcaacatattacttgtatcttttattttaaattttactatagttttattctctattttaaacttcaagtggcttatgcggtagatggaatccgctcacctctgccacacctccatggcaatgacatcacctccacactgatgcgtggctgtctgccagcatcgtcgcaacaggctcacgctgcttatcgtggcaagaaccactttaaatcctgcagtattaaggtatgcataatcttatttaatatagcatctcttaaggagtctctagagattaattaaaatatatataaaagataagttcttagtgagccgtctctatacaactctccatatatattgtctattaattgtatttatgatccaaatactgaaagttgttaaagaatttgttaaagacttcacttatttaagtgttagaaaggatagtggtagcttgtccttacctttcaattatcattgttaaagactccacttatttgggatgaataatcttcacaagcttctaaagggaacacattttatgactaaaaaaatgttgattttgaggaagacaagatttgtagcgtatgtcaagtagggaaacatgttggaggtcatcatccacataagaacatcatgacgaccgagagaccgcttgagctattccacatggatctattgcttacataagcatcggcggaagtaagtattgtcttataattgtggatgattattctcgcttcacttgagtattctttttgtaggaaaaatctcaaacccaagagaccttaaagagattcttgagatgggctcaaaatgagttcggattgagaatcaagaagattagaagcgacaatgaaacggagttcaagaactctcaaattgaaggatttcttgaggaggaggacatcaagcatgagttctcttctccctacacacctcaataaaatggtgttgtggagagaaaaaatagaactctcttggatatggcaagaaccatgcttgatgagtacaagacaccggaccggttttaggcggaggcaattaacaccgcctgcaactccatcaaccatctctaccttcactgaatcctcaagaaaacatcatatgaactcctcactggtaaaaagcccaacgtttcttattttagagtttttgggagcaaatgttttattcttattaaaagaggtagaaattctaaatttgaccctaaagcagtagaaggctgtttgcttggttatgactcaaacacaagggcatatagaatattcaacaagtccactgaattacttgaagtttcttgtgacattgtgtttgatgagactaatagctctcaagtagagcaagttgatcttgatgaattagatgatgaagaggctccgtgcgtcgcgctaaggaacatgtacattaggaatgtgtgtctaaaagaatccgaagagccttcacaagcacaagatcaaccatcatcttccat

SEQ ID NO: 8314 - DNA, 4859 bp, Zea Mays
gccatcatggcgccgacgcttctgctggtagcccttgtagcgctcgcggtggcagcagcaacgccgatggtgatggaggcatcggcgttcacggaggggtgcaacaataggagcacgccgggtggtggtggaggcaccgcggtggggaacaagctgaacgtgcacttggtgccgcactcgcacgacgacgtcgggtggctcatgaccatcgaccagtactacgtcggatccaacaactccatccagggcgcgtgtgtgatgaacacactcgactccgtggtggacgcgctcgccaaggatcctgctcgcaagttcatcgtcgtcgagcaggctttcttccaaaggtggtgggcacagaaaagcctgacagtccaggccacagtacacaaactggtcgattcgggtcagctagagttcataaatggtgggtggtgtatgcatgatgaagctgttgtgcattacattgacatgattgatcagaccacacttggccaccgggtgatcaagaaacaattcaaaaagattccgagagctggctggcaaatcgatcctttcggtcattctgcagttcaagcttatttgcttggagcagagaatcgattaccaagatagggcaacccggaaagcaaataagggcctagaagttatatggcgtggctcaagacctgttggttcatcatcacagatcttcacgaatgtatttccagtccattatagcgcaccagttggcttcagcttcgaagttttggctgaaaatgtcatacccgttcaggatgacatgtcgctgtttgactacaatgtccaagaacgtgtagatgattttgttgctgcagccatagcacaggcaaacgttacacgtacaaaccacataatgtggaccatgggggatgattttaactaccagtatgctgaatcctggttccgaaatatggacaaacttatccagtatgtgaacaaggatggccgagtgcatgcattatattctactccgtccatctacacagatgctaaacatgcatcaaacgaatcttggccagtaaaatacgatgattatttcccctacgccgattcaacaaatgcatactggactgggtattttacaagccgtccaactttcaagcgatacattcgagtgtacagtggatactatctggctgcgcgtcaaatagaatttttgatgggtaggagctccttgggattgttcacttccagcttggaagatgcaatgggtattgcccagcatcatgatgcaatctcaggtactgcaaaacagcacacgactgatgactactcaaaacggattgctattggagcatcaaaggtcgaaaaaggtgtaaacgctgctctgacttgtctaaccaactctaacaaaacatgtgtatcctctgtaccaaaatttagtcagtgtccacttctcaatataagctactgcccttcgactgaggaagcaatttcagcaacaaagcatttagttgtagttgtttacaatcctcttggttggaaacgtagtgacttcataagggttcctgtcaatgatgaagacctggtggtcaaaagctctgatggaaatactgttgtgtcacaaatagttgtggttgataatgtgacaaacaacttaagaaagttatatgtgaaggcttatcttggagtcacagcaaacaaggcccctaagtattggctaacatttcaagcttctgtaccaccaatgggatggaattcttactttattttgaaatcaactggatctggatacaacaacactgaacatgtccccgtcgtggttcctccaagtaacaacacaattgaagctggacaagggcatttaaagatgtcattctcttcagcatctggacaactagagagaatattcaattctgcctcaggaggagacttaccaattcaacaaagctttctttggtatagatcaagtaaaggagatgccttggacccacaggcatctggagcttatatatttagaccagatggtaatacaccaactattgcctcatcatcggtgactcttaaagttatccgtggacctctatttgatgaagtccatcaacaattcagctcgtggatttatcagattacacgactctacaagaacaaggagcatgctgaagttgaatacacgattgggccaatccctgttgacgatgacgtaggaaaggaggttatcacacagttgacagcaaatatgagtacaaacagtacattttatacagattccaatggaagggatttcctcaaaagggtgagaaactacagggaggattggaaccttcaagtgactcaaccagttgcaggaaattactacccggttaatctcggagtgtacatagtagatgagaaatatgaactatctgtccttgtggaccgtgctgccggagcatccagcattcaggatggtcagctagagattatgctacacaggcgtttgcttaaagatgatggcagaggtgtcgcggagccacttgatgaagtggtttgtgtggatcaagattgccaagggctaacggccaggggcacttactatatcaatgtcgagaagctaggccatggagctcattggcgccgtacatatggccagcaagtctactctccctttctccttgcttttactcatgaggatgcgacaagctcaaaaccctacagtgtggccaaagatagtatgatggatgggaattacagccttcctgacaacgttgcgattgtcactttgcagaatcttgatgatggtaccacactactccgcttggcccatcttttccaagctggcgaggacccgagatattcagaggtagcagaggttgatctgaaaaaggtctttggaaagagaactatcaaggaactgaccgagactaacctctccgcaaatcaaaagaagtcagagatgaagcagctcaactggagagttattgaggacgctgaaagtggtcctgccccggtaaaaggtggcccagttgattgtcgtgctctggtcgttgcgctgggacccatggagatacgcaccttcttgctgaaattttaatcgcatttaccgtgcttgtaattgtaaagaaaaaacaatgataaatggagaacttgctatcgttatttccttttgtaaaaaaaagatgaaatacccaaatagaacgttaaatttgcgcaaggtatgtacaatctacatcatgtgttttctattatatggttgctcatattagatcgcatcttggcttacaaaatgcatgatatccatgctgtggtggatgccatgtgagcttgcatatcctcaaagcacacacgtggctgcattaagcaatattactccctcctttcttttttatttgttgcattttagttaaaaagaaactagccgacgataaatagtcgagaacgagagtagtaacacctattagattattttcaacatattacttgtatcttttattttaaattttactatagttttattctctattttaaacttcaagtggcttatgcggtagatggaatccgctcacctctgccacacctccatggcaatgacatcacctccacactgatgcgtggctgtctgccagcatcgtcgcaacaggctcacgctgcttatcgtggcaagaaccactttaaatcctgcagtattaaggtatgcataatcttatttaatatagcatctcttaaggagtctctagagattaattaaaatatatataaaagataagttcttagtgagccgtctctatacaactctccatatatattgtctattaattgtatttatgatccaaatactgaaagttgttaaagaatttgttaaagacttcacttatttaagtgttagaaaggatagtggtagcttgtccttacctttcaattatcattgttaaagactccacttatttgggatgaataatcttcacaagcttctaaagggaacacattttatgactaaaaaaatgttgattttgaggaagacaagatttgtagcgtatgtcaagtagggaaacatgttggaggtcatcatccacataagaacatcatgacgaccgagagaccgcttgagctattccacatggatctattgcttacataagcatcggcggaagtaagtattgtcttataattgtggatgattattctcgcttcacttgagtattctttttgtaggaaaaatctcaaacccaagagaccttaaagagattcttgagatgggctcaaaatgagttcggattgagaatcaagaagattagaagcgacaatgaaacggagttcaagaactctcaaattgaaggatttcttgaggaggaggacatcaagcatgagttctcttctccctacacacctcaataaaatggtgttgtggagagaaaaaatagaactctcttggatatggcaagaaccatgcttgatgagtacaagacaccggaccggttttaggcggaggcaattaacaccgcctgcaactccatcaaccatctctaccttcactgaatcctcaagaaaacatcatatgaactcctcactggtaaaaagcccaacgtttcttattttagagtttttgggagcaaatgttttattcttattaaaagaggtagaaattctaaatttgaccctaaagcagtagaaggctgtttgcttggttatgactcaaacacaagggcatatagaatattcaacaagtccactgaattacttgaagtttcttgtgacattgtgtttgatgagactaatagctctcaagtagagcaagttgatcttgatgaattagatgatgaagaggctccgtgcgtcgcgctaaggaacatgtacattaggaatgtgtgtctaaaagaatccgaagagccttcacaagcacaagatcaaccatcatcttccat

SEQ ID NO: 8315 - DNA, 5566 bp, Zea Mays
agcggcgggccgtgtggccaccgctacactccgagtccagagaaatacagcgcattggcgcatggcctcccggcggagttcgcccgcggcggcctctgtggccgcgcgctctcggcatgtgagcccatgaggcgcgtgagcaggagctcgtggctggcaccaaggtgcggcactgcggccgctgccacttaaatcgcctggctcgcgcgcggaagacgggagggagaggcctcctctcatatccaccgcaactagtccaccgtaaaagcatgagctcccgcgcggctcggccatggcgagccagcgcaacccgtgaacgcggcggccggcgcaagcacaggatggactgcgcgccctttgcggccatctgtgagcggcggcgcaagatccgcgtctggcgcagagaagaaaggcgcggcggcgctcgggaccctggctcgcgtgcgcagggccgcgatgtcatggcagcgcctcccatccgctgcggcctggcgaccccgacgtccatgacaatatcacgcgcgggagcggaggtcccagaagataagcggcggcgtgaggagcagagcacgtctgttgatgattaatatgaggtcttgttggagccttaagtcttgccgaagatacaaaggtcccaccaggcagggtgaccacagctggttggttggttacgaaggagcccatcgtgagggcagggcccggtactcatcacaaaagaaacgccaactccaagaaaccaacgggtctgcgctgtaggcgaattcccactccacgccatcatggcgccgacgcttctgctggtagcccttgtagcgctcgcggtggcagcagcaacgccgatggtgatggaggcatcggcgttcacggaggggtgcaacaataggagcacgccgggtggtggtggaggcaccgcggtggggaacaagctgaacgtgcacttggtgccgcactcgcacgacgacgtcgggtggctcatgaccatcgaccagtactacgtcggatccaacaactccatccagggcgcgtgtgtgatgaacacactcgactccgtggtggacgcgctcgccaaggatcctgctcgcaagttcatcgtcgtcgagcaggctttcttccaaaggtggtgggcacagaaaagcctgacagtccaggccacagtacacaaactggtcgattcgggtcagctagagttcataaatggtgggtggtgtatgcatgatgaagctgttgtgcattacattgacatgattgatcagaccacacttggccaccgggtgatcaagaaacaattcaaaaagattccgagagctggctggcaaatcgatcctttcggtcattctgcagttcaagcttatttgcttggagcagagaatcgattaccaagatagggcaacccggaaagcaaataagggcctagaagttatatggcgtggctcaagacctgttggttcatcatcacagatcttcacgaatgtatttccagtccattatagcgcaccagttggcttcagcttcgaagttttggctgaaaatgtcatacccgttcaggatgacatgtcgctgtttgactacaatgtccaagaacgtgtagatgattttgttgctgcagccatagcacaggcaaacgttacacgtacaaaccacataatgtggaccatgggggatgattttaactaccagtatgctgaatcctggttccgaaatatggacaaacttatccagtatgtgaacaaggatggccgagtgcatgcattatattctactccgtccatctacacagatgctaaacatgcatcaaacgaatcttggccagtaaaatacgatgattatttcccctacgccgattcaacaaatgcatactggactgggtattttacaagccgtccaactttcaagcgatacattcgagtgtacagtggatactatctggctgcgcgtcaaatagaatttttgatgggtaggagctccttgggattgttcacttccagcttggaagatgcaatgggtattgcccagcatcatgatgcaatctcaggtactgcaaaacagcacacgactgatgactactcaaaacggattgctattggagcatcaaaggtcgaaaaaggtgtaaacgctgctctgacttgtctaaccaactctaacaaaacatgtgtatcctctgtaccaaaatttagtcaggttgtagttgtttacaatcctcttggttggaaacgtagtgacttcataagggttcctgtcaatgatgaagacctggtggtcaaaagctctgatggaaatactgttgtgtcacaaatagttgtggttgataatgtgacaaacaacttaagaaagttatatgtgaaggcttatcttggagtcacagcaaacaaggcccctaagtattggctaacatttcaagcttctgtaccaccaatgggatggaattcttactttattttgaaatcaactggatctggatacaacaacactgaacatgtccccgtcgtggttcctccaagtaacaacacaattgaagctggacaagggcatttaaagatgtcattctcttcagcatctggacaactagagagaatattcaattctgcctcaggaggagacttaccaattcaacaaagctttctttggtatagatcaagtaaaggagatgccttggacccacaggcatctggagcttatatatttagaccagatggtaatacaccaactattgcctcatcatcggtgactcttaaagttatccgtggacctctatttgatgaagtccatcaacaattcagctcgtggatttatcagattacacgactctacaagaacaaggagcatgctgaagttgaatacacgattgggccaatccctgttgacgatgacgtaggaaaggaggttatcacacagttgacagcaaatatgagtacaaacagtacattttatacagattccaatggaagggatttcctcaaaagggtgagaaactacagggaggattggaaccttcaagtgactcaaccagttgcaggaaattactacccggttaatctcggagtgtacatagtagatgagaaatatgaactatctgtccttgtggaccgtgctgccggagcatccagcattcaggatggtcagctagagattatgctacacaggcgtttgcttaaagatgatggcagaggtgtcgcggagccacttgatgaagtggtttgtgtggatcaagattgccaagggctaacggccaggggcacttactatatcaatgtcgagaagctaggccatggagctcattggcgccgtacatatggccagcaagtctactctccctttctccttgcttttactcatgaggatgcgacaagctcaaaaccctacagtgtggccaaagatagtatgatggatgggaattacagccttcctgacaacgttgcgattgtcactttgcagaatcttgatgatggtaccacactactccgcttggcccatcttttccaagctggcgaggacccgagatattcagaggtagcagaggttgatctgaaaaaggtctttggaaagagaactatcaaggaactgaccgagactaacctctccgcaaatcaaaagaagtcagagatgaagcagctcaactggagagttattgaggacgctgaaagtggtcctgccccggtaaaaggtggcccagttgattgtcgtgctctggtcgttgcgctgggacccatggagatacgcaccttcttgctgaaattttaatcgcatttaccgtgcttgtaattgtaaagaaaaaacaatgataaatggagaacttgctatcgttatttccttttgtaaaaaaaagatgaaatacccaaatagaacgttaaatttgcgcaaggtatgtacaatctacatcatgtgttttctattatatggttgctcatattagatcgcatcttggcttacaaaatgcatgatatccatgctgtggtggatgccatgtgagcttgcatatcctcaaagcacacacgtggctgcattaagcaatattactccctcctttcttttttatttgttgcattttagttaaaaagaaactagccgacgataaatagtcgagaacgagagtagtaacacctattagattattttcaacatattacttgtatcttttattttaaattttactatagttttattctctattttaaacttcaagtggcttatgcggtagatggaatccgctcacctctgccacacctccatggcaatgacatcacctccacactgatgcgtggctgtctgccagcatcgtcgcaacaggctcacgctgcttatcgtggcaagaaccactttaaatcctgcagtattaaggtatgcataatcttatttaatatagcatctcttaaggagtctctagagattaattaaaatatatataaaagataagttcttagtgagccgtctctatacaactctccatatatattgtctattaattgtatttatgatccaaatactgaaagttgttaaagaatttgttaaagacttcacttatttaagtgttagaaaggatagtggtagcttgtccttacctttcaattatcattgttaaagactccacttatttgggatgaataatcttcacaagcttctaaagggaacacattttatgactaaaaaaatgttgattttgaggaagacaagatttgtagcgtatgtcaagtagggaaacatgttggaggtcatcatccacataagaacatcatgacgaccgagagaccgcttgagctattccacatggatctattgcttacataagcatcggcggaagtaagtattgtcttataattgtggatgattattctcgcttcacttgagtattctttttgtaggaaaaatctcaaacccaagagaccttaaagagattcttgagatgggctcaaaatgagttcggattgagaatcaagaagattagaagcgacaatgaaacggagttcaagaactctcaaattgaaggatttcttgaggaggaggacatcaagcatgagttctcttctccctacacacctcaataaaatggtgttgtggagagaaaaaatagaactctcttggatatggcaagaaccatgcttgatgagtacaagacaccggaccggttttaggcggaggcaattaacaccgcctgcaactccatcaaccatctctaccttcactgaatcctcaagaaaacatcatatgaactcctcactggtaaaaagcccaacgtttcttattttagagtttttgggagcaaatgttttattcttattaaaagaggtagaaattctaaatttgaccctaaagcagtagaaggctgtttgcttggttatgactcaaacacaagggcatatagaatattcaacaagtccactgaattacttgaagtttcttgtgacattgtgtttgatgagactaatagctctcaagtagagcaagttgatcttgatgaattagatgatgaagaggctccgtgcgtcgcgctaaggaacatgtacattaggaatgtgtgtctaaaagaatccgaagagccttcacaagcacaagatcaaccatcatcttccat

SEQ ID NO: 8316 - DNA, 5826 bp, Zea Mays
agcggcgggccgtgtggccaccgctacactccgagtccagagaaatacagcgcattggcgcatggcctcccggcggagttcgcccgcggcggcctctgtggccgcgcgctctcggcatgtgagcccatgaggcgcgtgagcaggagctcgtggctggcaccaaggtgcggcactgcggccgctgccacttaaatcgcctggctcgcgcgcggaagacgggagggagaggcctcctctcatatccaccgcaactagtccaccgtaaaagcatgagctcccgcgcggctcggccatggcgagccagcgcaacccgtgaacgcggcggccggcgcaagcacaggatggactgcgcgccctttgcggccatctgtgagcggcggcgcaagatccgcgtctggcgcagagaagaaaggcgcggcggcgctcgggaccctggctcgcgtgcgcagggccgcgatgtcatggcagcgcctcccatccgctgcggcctggcgaccccgacgtccatgacaatatcacgcgcgggagcggaggtcccagaagataagcggcggcgtgaggagcagagcacgtctgttgatgattaatatgaggtcttgttggagccttaagtcttgccgaagatacaaaggtcccaccaggcagggtgaccacagctggttggttggttacgaaggagcccatcgtgagggcagggcccggtactcatcacaaaagaaacgccaactccaagaaaccaacgggtctgcgctgtaggcgaattcccactccacgccatcatggcgccgacgcttctgctggtagcccttgtagcgctcgcggtggcagcagcaacgccgatggtgatggaggcatcggcgttcacggaggggtgcaacaataggagcacgccgggtggtggtggaggcaccgcggtggggaacaagctgaacgtgcacttggtgccgcactcgcacgacgacgtcgggtggctcatgaccatcgaccagtactacgtcggatccaacaactccatccagggcgcgtgtgtgatgaacacactcgactccgtggtggacgcgctcgccaaggatcctgctcgcaagttcatcgtcgtcgagcaggctttcttccaaaggtggtgggcacagaaaagcctgacagtccaggccacagtacacaaactggtcgattcgggtcagctagagttcataaatggtgggtggtgtatgcatgatgaagctgttgtgcattacattgacatgattgatcagaccacacttggccaccgggtgatcaagaaacaattcaaaaagattccgagagctggctggcaaatcgatcctttcggtcattctgcagttcaagcttatttgcttggagcagagcttggtttcgattccgtgcattttgcaagaatcgattaccaagatagggcaacccggaaagcaaataagggcctagaagttatatggcgtggctcaagacctgttggttcatcatcacaggattttattgcagatcttcacgaatgtatttccagtccattatagcgcaccagttggcttcagcttcgaagttttggctgaaaatgtcatacccgttcaggatgacatgtcgctgtttgactacaatgtccaagaacgtgtagatgattttgttgctgcagccatagcacaggcaaacgttacacgtacaaaccacataatgtggaccatgggggatgattttaactaccagtatgctgaatcctggttccgaaatatggacaaacttatccagtatgtgaacaaggatggccgagtgcatgcattatattctactccgtccatctacacagatgctaaacatgcatcaaacgaatcttggccagtaaaatacgatgattatttcccctacgccgattcaacaaatgcatactggactgggtattttacaagccgtccaactttcaagcgatacattcgagtgtacagtggatactatctggctgcgcgtcaaatagaatttttgatgggtaggagctccttgggattgttcacttccagcttggaagatgcaatgggtattgcccagcatcatgatgcaatctcaggtactgcaaaacagcacacgactgatgactactcaaaacggattgctattggagcatcaaaggtcgaaaaaggtgtaaacgctgctctgacttgtctaaccaactctaacaaaacatgtgtatcctctgtaccaaaatttagtcagtgtccacttctcaatataagctactgcccttcgactgaggaagcaatttcagcaacaaagcatttagttgtagttgtttacaatcctcttggttggaaacgtagtgacttcataagggttcctgtcaatgatgaagacctggtggtcaaaagctctgatggaaatactgttgtgtcacaaatagttgtggttgataatgtgacaaacaacttaagaaagttatatgtgaaggcttatcttggagtcacagcaaacaaggcccctaagtattggctaacatttcaagcttctgtaccaccaatgggatggaattcttactttattttgaaatcaactggatctgaaattgttcctaccacctatccaggatacaacaacactgaacatgtccccgtcgtggttcctccaagtaacaacacaattgaagctggacaagggcatttaaagatgtcattctcttcagcatctggacaactagagagaatattcaattctgcctcaggaggagacttaccaattcaacaaagctttctttggtatagatcaagtaaaggagatgccttggacccacaggcatctggagcttatatatttagaccagatggtaatacaccaactattgcctcatcatcggtgactcttaaagttatccgtggacctctatttgatgaagtccatcaacaattcagctcgtggatttatcagttttggtctctgggaccttctttcttcttaatttaatggtgcgcagttctcctgcgcattcgagaaaaaaaagaagatttataccagcacttcagcaacaaacttgtgatcaatatttttctatatagattacacgactctacaagaacaaggagcatgctgaagttgaatacacgattgggccaatccctgttgacgatgacgtaggaaaggaggttatcacacagttgacagcaaatatgagtacaaacagtacattttatacagattccaatggaagggatttcctcaaaagggtgagaaactacagggaggattggaaccttcaagtgactcaaccagttgcaggaaattactacccggttaatctcggagtgtacatagtagatgagaaatatgaactatctgtccttgtggaccgtgctgccggagcatccagcattcaggatggtcagctagagattatgctacacaggcgtttgcttaaagatgatggcagaggtgtcgcggagccacttgatgaagtggtttgtgtggatcaagattgccaagggctaacggccaggggcacttactatatcaatgtcgagaagctaggccatggagctcattggcgccgtacatatggccagcaagtctactctccctttctccttgcttttactcatgaggatgcgacaagctcaaaaccctacagtgtggccaaagatagtatgatggatgggaattacagccttcctgacaacgttgcgattgtcactttgcagaatcttgatgatggtaccacactactccgcttggcccatcttttccaagctggcgaggacccgagatattcagaggtagcagaggttgatctgaaaaaggtctttggaaagagaactatcaaggaactgaccgagactaacctctccgcaaatcaaaagaagtcagagatgaagcagctcaactggagagttattgaggacgctgaaagtggtcctgccccggtaaaaggtggcccagttgattgtcgtgctctggtcgttgcgctgggacccatggagatacgcaccttcttgctgaaattttaatcgcatttaccgtgcttgtaattgtaaagaaaaaacaatgataaatggagaacttgctatcgttatttccttttgtaaaaaaaagatgaaatacccaaatagaacgttaaatttgcgcaaggtatgtacaatctacatcatgtgttttctattatatggttgctcatattagatcgcatcttggcttacaaaatgcatgatatccatgctgtggtggatgccatgtgagcttgcatatcctcaaagcacacacgtggctgcattaagcaatattactccctcctttcttttttatttgttgcattttagttaaaaagaaactagccgacgataaatagtcgagaacgagagtagtaacacctattagattattttcaacatattacttgtatcttttattttaaattttactatagttttattctctattttaaacttcaagtggcttatgcggtagatggaatccgctcacctctgccacacctccatggcaatgacatcacctccacactgatgcgtggctgtctgccagcatcgtcgcaacaggctcacgctgcttatcgtggcaagaaccactttaaatcctgcagtattaaggtatgcataatcttatttaatatagcatctcttaaggagtctctagagattaattaaaatatatataaaagataagttcttagtgagccgtctctatacaactctccatatatattgtctattaattgtatttatgatccaaatactgaaagttgttaaagaatttgttaaagacttcacttatttaagtgttagaaaggatagtggtagcttgtccttacctttcaattatcattgttaaagactccacttatttgggatgaataatcttcacaagcttctaaagggaacacattttatgactaaaaaaatgttgattttgaggaagacaagatttgtagcgtatgtcaagtagggaaacatgttggaggtcatcatccacataagaacatcatgacgaccgagagaccgcttgagctattccacatggatctattgcttacataagcatcggcggaagtaagtattgtcttataattgtggatgattattctcgcttcacttgagtattctttttgtaggaaaaatctcaaacccaagagaccttaaagagattcttgagatgggctcaaaatgagttcggattgagaatcaagaagattagaagcgacaatgaaacggagttcaagaactctcaaattgaaggatttcttgaggaggaggacatcaagcatgagttctcttctccctacacacctcaataaaatggtgttgtggagagaaaaaatagaactctcttggatatggcaagaaccatgcttgatgagtacaagacaccggaccggttttaggcggaggcaattaacaccgcctgcaactccatcaaccatctctaccttcactgaatcctcaagaaaacatcatatgaactcctcactggtaaaaagcccaacgtttcttattttagagtttttgggagcaaatgttttattcttattaaaagaggtagaaattctaaatttgaccctaaagcagtagaaggctgtttgcttggttatgactcaaacacaagggcatatagaatattcaacaagtccactgaattacttgaagtttcttgtgacattgtgtttgatgagactaatagctctcaagtagagcaagttgatcttgatgaattagatgatgaagaggctccgtgcgtcgcgctaaggaacatgtacattaggaatgtgtgtctaaaagaatccgaagagccttcacaagcacaagatcaaccatcatcttccat

SEQ ID NO: 8317 - DNA, 6158 bp, Zea Mays
agcggcgggccgtgtggccaccgctacactccgagtccagagaaatacagcgcattggcgcatggcctcccggcggagttcgcccgcggcggcctctgtggccgcgcgctctcggcatgtgagcccatgaggcgcgtgagcaggagctcgtggctggcaccaaggtgcggcactgcggccgctgccacttaaatcgcctggctcgcgcgcggaagacgggagggagaggcctcctctcatatccaccgcaactagtccaccgtaaaagcatgagctcccgcgcggctcggccatggcgagccagcgcaacccgtgaacgcggcggccggcgcaagcacaggatggactgcgcgccctttgcggccatctgtgagcggcggcgcaagatccgcgtctggcgcagagaagaaaggcgcggcggcgctcgggaccctggctcgcgtgcgcagggccgcgatgtcatggcagcgcctcccatccgctgcggcctggcgaccccgacgtccatgacaatatcacgcgcgggagcggaggtcccagaagataagcggcggcgtgaggagcagagcacgtctgttgatgattaatatgaggtcttgttggagccttaagtcttgccgaagatacaaaggtcccaccaggcagggtgaccacagctggttggttggttacgaaggagcccatcgtgagggcagggcccggtactcatcacaaaagaaacgccaactccaagaaaccaacgggtctgcgctgtaggcgaattcccactccacgccatcatggcgccgacgcttctgctggtagcccttgtagcgctcgcggtggcagcagcaacgccgatggtgatggaggcatcggcgttcacggaggggtgcaacaataggagcacgccgggtggtggtggaggcaccgcggtggggaacaagctgaacgtgcacttggtgccgcactcgcacgacgacgtcgggtggctcatgaccatcgaccagtactacgtcggatccaacaactccatccagggcgcgtgtgtgatgaacacactcgactccgtggtggacgcgctcgccaaggatcctgctcgcaagttcatcgtcgtcgagcaggctttcttccaaaggtggtgggcacagaaaagcctgacagtccaggccacagtacacaaactggtcgattcgggtcagctagagttcataaatggtgggtggtgtatgcatgatgaagctgttgtgcattacattgacatgattgatcagaccacacttggccaccgggtgatcaagaaacaattcaaaaagattccgagagctggctggcaaatcgatcctttcggtcattctgcagttcaagcttatttgcttggagcagagcttggtttcgattccgtgcattttgcaagaatcgattaccaagatagggcaacccggaaagcaaataagggcctagaagttatatggcgtggctcaagacctgttggttcatcatcacagatcttcacgaatgtatttccagtccattatagcgcaccagttggcttcagcttcgaagttttggctgaaaatgtcatacccgttcaggatgacatgtcgctgtttgactacaatgtccaagaacgtgtagatgattttgttgctgcagccatagcacaggcaaacgttacacgtacaaaccacataatgtggaccatgggggatgattttaactaccagtatgctgaatcctggttccgaaatatggacaaacttatccagtatgtgaacaaggatggccgagtgcatgcattatattctactccgtccatctacacagatgctaaacatgcatcaaacgaatcttggccagtaaaatacgatgattatttcccctacgccgattcaacaaatgcatactggactgggtattttacaagccgtccaactttcaagcgatacattcgagtgtacagtggatactatctggctgcgcgtcaaatagaatttttgatgggtaggagctccttgggattgttcacttccagcttggaagatgcaatgggtattgcccagcatcatgatgcaatctcaggtactgcaaaacagcacacgactgatgactactcaaaacggattgctattggagcatcaaaggtcgaaaaaggtgtaaacgctgctctgacttgtctaaccaactctaacaaaacatgtgtatcctctgtaccaaaatttagtcagtgtccacttctcaatataagctactgcccttcgactgaggaagcaatttcagcaacaaagcatttagttgtagttgtttacaatcctcttggttggaaacgtagtgacttcataagggttcctgtcaatgatgaagacctggtggtcaaaagctctgatggaaatactgttgtgtcacaaatagttgtggttgataatgtgacaaacaacttaagaaagttatatgtgaaggcttatcttggagtcacagcaaacaaggcccctaagtattggctaacatttcaagcttctgtaccaccaatgggatggaattcttactttattttgaaatcaactggatctggtgaatgacttcatcttaatacttattttcatcaaactacaagtccttgagaaaatactattgttctttatgccaacaatttaatatcgttcttcttcaaacatgaaaccgctttatcaatagagagttatgatataacagagtaaggcatgcggcatggtaatatcacatattcacatgtctcataactagctttagttgtcacattaaactaccataaggacatgcaaagtttattttggctatttacaccaacttcagctttagtcactatataaaattgaaaaaaacccttacccaacaagattggttgtagacttgtagttatataacttatattcgattaagatgatagattttgatccgttttggatctttttccctctcttcttaatgaaatgatgcgcatgtctcttgcgcgttcgagaaaaaaaagagatagattttgaacacttttttaagttaagaaacagaaattgttcctaccacctatccaggatacaacaacactgaacatgtccccgtcgtggttcctccaagtaacaacacaattgaagctggacaagggcatttaaagatgtcattctcttcagcatctggacaactagagagaatattcaattctgcctcaggaggagacttaccaattcaacaaagctttctttggtatagatcaagtaaaggagatgccttggacccacaggcatctggagcttatatatttagaccagatggtaatacaccaactattgcctcatcatcggtgactcttaaagttatccgtggacctctatttgatgaagtccatcaacaattcagctcgtggatttatcagattacacgactctacaagaacaaggagcatgctgaagttgaatacacgattgggccaatccctgttgacgatgacgtaggaaaggaggttatcacacagttgacagcaaatatgagtacaaacagtacattttatacagattccaatggaagggatttcctcaaaagggtgagaaactacagggaggattggaaccttcaagtgactcaaccagttgcaggaaattactacccggttaatctcggagtgtacatagtagatgagaaatatgaactatctgtccttgtggaccgtgctgccggagcatccagcattcaggatggtcagctagagattatgctacacaggcgtttgcttaaagatgatggcagaggtgtcgcggagccacttgatgaagtggtttgtgtggatcaagattgccaagggctaacggccaggggcacttactatatcaatgtcgagaagctaggccatggagctcattggcgccgtacatatggccagcaagtctactctccctttctccttgcttttactcatgaggatgcgacaagctcaaaaccctacagtgtggccaaagatagtatgatggatgggaattacagccttcctgacaacgttgcgattgtcactttgcagaatcttgatgatggtaccacactactccgcttggcccatcttttccaagctggcgaggacccgagatattcagaggtagcagaggttgatctgaaaaaggtctttggaaagagaactatcaaggaactgaccgagactaacctctccgcaaatcaaaagaagtcagagatgaagcagctcaactggagagttattgaggacgctgaaagtggtcctgccccggtaaaaggtggcccagttgattgtcgtgctctggtcgttgcgctgggacccatggagatacgcaccttcttgctgaaattttaatcgcatttaccgtgcttgtaattgtaaagaaaaaacaatgataaatggagaacttgctatcgttatttccttttgtaaaaaaaagatgaaatacccaaatagaacgttaaatttgcgcaaggtatgtacaatctacatcatgtgttttctattatatggttgctcatattagatcgcatcttggcttacaaaatgcatgatatccatgctgtggtggatgccatgtgagcttgcatatcctcaaagcacacacgtggctgcattaagcaatattactccctcctttcttttttatttgttgcattttagttaaaaagaaactagccgacgataaatagtcgagaacgagagtagtaacacctattagattattttcaacatattacttgtatcttttattttaaattttactatagttttattctctattttaaacttcaagtggcttatgcggtagatggaatccgctcacctctgccacacctccatggcaatgacatcacctccacactgatgcgtggctgtctgccagcatcgtcgcaacaggctcacgctgcttatcgtggcaagaaccactttaaatcctgcagtattaaggtatgcataatcttatttaatatagcatctcttaaggagtctctagagattaattaaaatatatataaaagataagttcttagtgagccgtctctatacaactctccatatatattgtctattaattgtatttatgatccaaatactgaaagttgttaaagaatttgttaaagacttcacttatttaagtgttagaaaggatagtggtagcttgtccttacctttcaattatcattgttaaagactccacttatttgggatgaataatcttcacaagcttctaaagggaacacattttatgactaaaaaaatgttgattttgaggaagacaagatttgtagcgtatgtcaagtagggaaacatgttggaggtcatcatccacataagaacatcatgacgaccgagagaccgcttgagctattccacatggatctattgcttacataagcatcggcggaagtaagtattgtcttataattgtggatgattattctcgcttcacttgagtattctttttgtaggaaaaatctcaaacccaagagaccttaaagagattcttgagatgggctcaaaatgagttcggattgagaatcaagaagattagaagcgacaatgaaacggagttcaagaactctcaaattgaaggatttcttgaggaggaggacatcaagcatgagttctcttctccctacacacctcaataaaatggtgttgtggagagaaaaaatagaactctcttggatatggcaagaaccatgcttgatgagtacaagacaccggaccggttttaggcggaggcaattaacaccgcctgcaactccatcaaccatctctaccttcactgaatcctcaagaaaacatcatatgaactcctcactggtaaaaagcccaacgtttcttattttagagtttttgggagcaaatgttttattcttattaaaagaggtagaaattctaaatttgaccctaaagcagtagaaggctgtttgcttggttatgactcaaacacaagggcatatagaatattcaacaagtccactgaattacttgaagtttcttgtgacattgtgtttgatgagactaatagctctcaagtagagcaagttgatcttgatgaattagatgatgaagaggctccgtgcgtcgcgctaaggaacatgtacattaggaatgtgtgtctaaaagaatccgaagagccttcacaagcacaagatcaaccatcatcttccat

SEQ ID NO: 8318 - DNA, 5524 bp, Zea Mays
agcggcgggccgtgtggccaccgctacactccgagtccagagaaatacagcgcattggcgcatggcctcccggcggagttcgcccgcggcggcctctgtggccgcgcgctctcggcatgtgagcccatgaggcgcgtgagcaggagctcgtggctggcaccaaggtgcggcactgcggccgctgccacttaaatcgcctggctcgcgcgcggaagacgggagggagaggcctcctctcatatccaccgcaactagtccaccgtaaaagcatgagctcccgcgcggctcggccatggcgagccagcgcaacccgtgaacgcggcggccggcgcaagcacaggatggactgcgcgccctttgcggccatctgtgagcggcggcgcaagatccgcgtctggcgcagagaagaaaggcgcggcggcgctcgggaccctggctcgcgtgcgcagggccgcgatgtcatggcagcgcctcccatccgctgcggcctggcgaccccgacgtccatgacaatatcacgcgcgggagcggaggtcccagaagataagcggcggcgtgaggagcagagcacgtctgttgatgattaatatgaggtcttgttggagccttaagtcttgccgaagatacaaaggtcccaccaggcagggtgaccacagctggttggttggttacgaaggagcccatcgtgagggcagggcccggtactcatcacaaaagaaacgccaactccaagaaaccaacgggtctgcgctgtaggcgaattcccactccacgccatcatggcgccgacgcttctgctggtagcccttgtagcgctcgcggtggcagcagcaacgccgatggtgatggaggcatcggcgttcacggaggggtgcaacaataggagcacgccgggtggtggtggaggcaccgcggtggggaacaagctgaacgtgcacttggtgccgcactcgcacgacgacgtcgggtggctcatgaccatcgaccagtactacgtcggatccaacaactccatccagggcgcgtgtgtgatgaacacactcgactccgtggtggacgcgctcgccaaggatcctgctcgcaagttcatcgtcgtcgagcaggctttcttccaaaggtggtgggcacagaaaagcctgacagtccaggccacagtacacaaactggtcgattcgggtcagctagagttcataaatggtgggtggtgtatgcatgatgaagctgttgtgcattacattgacatgattgatcagaccacacttggccaccgggtgatcaagaaacaattcaaaaagattccgagagctggctggcaaatcgatcctttcggtcattctgcagttcaagcttatttgcttggagcagagcttggtttcgattccgtgcattttgcaagaatcgattaccaagatagggcaacccggaaagcaaataagggcctagaagttatatggcgtggctcaagacctgttggttcatcatcacagatcttcacgaatgtatttccagtccattatagcgcaccagttggcttcagcttcgaagttttggctgaaaatgtcatacccgttcaggatgacatgtcgctgtttgactacaatgtccaagaacgtgtagatgattttgttgctgcagccatagcacaggcaaacgttacacgtacaaaccacataatgtggaccatgggggatgattttaactaccagtatgctgaatcctggttccgaaatatggacaaacttatccagtatgtgaacaaggatggccgagtgcatgcattatattctactccgtccatctacacagatgctaaacatgcatcaaacgaatcttggccagtaaaatacgatgattatttcccctacgccgattcaacaaatgcatactggactgggtattttacaagccgtccaactttcaagcgatacattcgagtgtacagtggatactatctggctgcgcgtcaaatagaatttttgatgggtaggagctccttgggattgttcacttccagcttggaagatgcaatgggtattgcccagcatcatgatgcaatctcaggtactgcaaaacagcacacgactgatgactactcaaaacggattgctattggagcatcaaaggtcgaaaaaggtgtaaacgctgctctgacttgtctaaccaactctaacaaaacatgtgtatcctctgtaccaaaatttagtcagtgtccacttctcaatataagctactgcccttcgactgaggaagcaatttcagcaacaaagcatttagttgtagttgtttacaatcctcttggttggaaacgtagtgacttcataagggttcctgtcaatgatgaagacctggtggtcaaaagctctgatggaaatactgttgtgtcacaaatagttgtggttgataatgtgacaaacaacttaagaaagttatatgtgaaggcttatcttggagtcacagcaaacaaggcccctaagtattggctaacatttcaagcttctgtaccaccaatgggatggaattcttactttattttgaaatcaactggatctgggagacttaccaattcaacaaagctttctttggtatagatcaagtaaaggagatgccttggacccacaggcatctggagcttatatatttagaccagatggtaatacaccaactattgcctcatcatcggtgactcttaaagttatccgtggacctctatttgatgaagtccatcaacaattcagctcgtggatttatcagattacacgactctacaagaacaaggagcatgctgaagttgaatacacgattgggccaatccctgttgacgatgacgtaggaaaggaggttatcacacagttgacagcaaatatgagtacaaacagtacattttatacagattccaatggaagggatttcctcaaaagggtgagaaactacagggaggattggaaccttcaagtgactcaaccagttgcaggaaattactacccggttaatctcggagtgtacatagtagatgagaaatatgaactatctgtccttgtggaccgtgctgccggagcatccagcattcaggatggtcagctagagattatgctacacaggcgtttgcttaaagatgatggcagaggtgtcgcggagccacttgatgaagtggtttgtgtggatcaagattgccaagggctaacggccaggggcacttactatatcaatgtcgagaagctaggccatggagctcattggcgccgtacatatggccagcaagtctactctccctttctccttgcttttactcatgaggatgcgacaagctcaaaaccctacagtgtggccaaagatagtatgatggatgggaattacagccttcctgacaacgttgcgattgtcactttgcagaatcttgatgatggtaccacactactccgcttggcccatcttttccaagctggcgaggacccgagatattcagaggtagcagaggttgatctgaaaaaggtctttggaaagagaactatcaaggaactgaccgagactaacctctccgcaaatcaaaagaagtcagagatgaagcagctcaactggagagttattgaggacgctgaaagtggtcctgccccggtaaaaggtggcccagttgattgtcgtgctctggtcgttgcgctgggacccatggagatacgcaccttcttgctgaaattttaatcgcatttaccgtgcttgtaattgtaaagaaaaaacaatgataaatggagaacttgctatcgttatttccttttgtaaaaaaaagatgaaatacccaaatagaacgttaaatttgcgcaaggtatgtacaatctacatcatgtgttttctattatatggttgctcatattagatcgcatcttggcttacaaaatgcatgatatccatgctgtggtggatgccatgtgagcttgcatatcctcaaagcacacacgtggctgcattaagcaatattactccctcctttcttttttatttgttgcattttagttaaaaagaaactagccgacgataaatagtcgagaacgagagtagtaacacctattagattattttcaacatattacttgtatcttttattttaaattttactatagttttattctctattttaaacttcaagtggcttatgcggtagatggaatccgctcacctctgccacacctccatggcaatgacatcacctccacactgatgcgtggctgtctgccagcatcgtcgcaacaggctcacgctgcttatcgtggcaagaaccactttaaatcctgcagtattaaggtatgcataatcttatttaatatagcatctcttaaggagtctctagagattaattaaaatatatataaaagataagttcttagtgagccgtctctatacaactctccatatatattgtctattaattgtatttatgatccaaatactgaaagttgttaaagaatttgttaaagacttcacttatttaagtgttagaaaggatagtggtagcttgtccttacctttcaattatcattgttaaagactccacttatttgggatgaataatcttcacaagcttctaaagggaacacattttatgactaaaaaaatgttgattttgaggaagacaagatttgtagcgtatgtcaagtagggaaacatgttggaggtcatcatccacataagaacatcatgacgaccgagagaccgcttgagctattccacatggatctattgcttacataagcatcggcggaagtaagtattgtcttataattgtggatgattattctcgcttcacttgagtattctttttgtaggaaaaatctcaaacccaagagaccttaaagagattcttgagatgggctcaaaatgagttcggattgagaatcaagaagattagaagcgacaatgaaacggagttcaagaactctcaaattgaaggatttcttgaggaggaggacatcaagcatgagttctcttctccctacacacctcaataaaatggtgttgtggagagaaaaaatagaactctcttggatatggcaagaaccatgcttgatgagtacaagacaccggaccggttttaggcggaggcaattaacaccgcctgcaactccatcaaccatctctaccttcactgaatcctcaagaaaacatcatatgaactcctcactggtaaaaagcccaacgtttcttattttagagtttttgggagcaaatgttttattcttattaaaagaggtagaaattctaaatttgaccctaaagcagtagaaggctgtttgcttggttatgactcaaacacaagggcatatagaatattcaacaagtccactgaattacttgaagtttcttgtgacattgtgtttgatgagactaatagctctcaagtagagcaagttgatcttgatgaattagatgatgaagaggctccgtgcgtcgcgctaaggaacatgtacattaggaatgtgtgtctaaaagaatccgaagagccttcacaagcacaagatcaaccatcatcttccat

SEQ ID NO: 8319 - DNA, 5656 bp, Zea Mays
agcggcgggccgtgtggccaccgctacactccgagtccagagaaatacagcgcattggcgcatggcctcccggcggagttcgcccgcggcggcctctgtggccgcgcgctctcggcatgtgagcccatgaggcgcgtgagcaggagctcgtggctggcaccaaggtgcggcactgcggccgctgccacttaaatcgcctggctcgcgcgcggaagacgggagggagaggcctcctctcatatccaccgcaactagtccaccgtaaaagcatgagctcccgcgcggctcggccatggcgagccagcgcaacccgtgaacgcggcggccggcgcaagcacaggatggactgcgcgccctttgcggccatctgtgagcggcggcgcaagatccgcgtctggcgcagagaagaaaggcgcggcggcgctcgggaccctggctcgcgtgcgcagggccgcgatgtcatggcagcgcctcccatccgctgcggcctggcgaccccgacgtccatgacaatatcacgcgcgggagcggaggtcccagaagataagcggcggcgtgaggagcagagcacgtctgttgatgattaatatgaggtcttgttggagccttaagtcttgccgaagatacaaaggtcccaccaggcagggtgaccacagctggttggttggttacgaaggagcccatcgtgagggcagggcccggtactcatcacaaaagaaacgccaactccaagaaaccaacgggtctgcgctgtaggcgaattcccactccacgccatcatggcgccgacgcttctgctggtagcccttgtagcgctcgcggtggcagcagcaacgccgatggtgatggaggcatcggcgttcacggaggggtgcaacaataggagcacgccgggtggtggtggaggcaccgcggtggggaacaagctgaacgtgcacttggtgccgcactcgcacgacgacgtcgggtggctcatgaccatcgaccagtactacgtcggatccaacaactccatccagggcgcgtgtgtgatgaacacactcgactccgtggtggacgcgctcgccaaggatcctgctcgcaagttcatcgtcgtcgagcaggctttcttccaaaggtggtgggcacagaaaagcctgacagtccaggccacagtacacaaactggtcgattcgggtcagctagagttcataaatggtgggtggtgtatgcatgatgaagctgttgtgcattacattgacatgattgatcagaccacacttggccaccgggtgatcaagaaacaattcaaaaagattccgagagctggctggcaaatcgatcctttcggtcattctgcagttcaagcttatttgcttggagcagagaatcgattaccaagatagggcaacccggaaagcaaataagggcctagaagttatatggcgtggctcaagacctgttggttcatcatcacagatcttcacgaatgtatttccagtccattatagcgcaccagttggcttcagcttcgaagttttggctgaaaatgtcatacccgttcaggatgacatgtcgctgtttgactacaatgtccaagaacgtgtagatgattttgttgctgcagccatagcacaggcaaacgttacacgtacaaaccacataatgtggaccatgggggatgattttaactaccagtatgctgaatcctggttccgaaatatggacaaacttatccagtatgtgaacaaggatggccgagtgcatgcattatattctactccgtccatctacacagatgctaaacatgcatcaaacgaatcttggccagtaaaatacgatgattatttcccctacgccgattcaacaaatgcatactggactgggtattttacaagccgtccaactttcaagcgatacattcgagtgtacagtggatactatctggctgcgcgtcaaatagaatttttgatgggtaggagctccttgggattgttcacttccagcttggaagatgcaatgggtattgcccagcatcatgatgcaatctcaggtactgcaaaacagcacacgactgatgactactcaaaacggattgctattggagcatcaaaggtcgaaaaaggtgtaaacgctgctctgacttgtctaaccaactctaacaaaacatgtgtatcctctgtaccaaaatttagtcagtgtccacttctcaatataagctactgcccttcgactgaggaagcaatttcagcaacaaagcatttagttgtagttgtttacaatcctcttggttggaaacgtagtgacttcataagggttcctgtcaatgatgaagacctggtggtcaaaagctctgatggaaatactgttgtgtcacaaatagttgtggttgataatgtgacaaacaacttaagaaagttatatgtgaaggcttatcttggagtcacagcaaacaaggcccctaagtattggctaacatttcaagcttctgtaccaccaatgggatggaattcttactttattttgaaatcaactggatctgaaattgttcctaccacctatccaggatacaacaacactgaacatgtccccgtcgtggttcctccaagtaacaacacaattgaagctggacaagggcatttaaagatgtcattctcttcagcatctggacaactagagagaatattcaattctgcctcaggaggagacttaccaattcaacaaagctttctttggtatagatcaagtaaaggagatgccttggacccacaggcatctggagcttatatatttagaccagatggtaatacaccaactattgcctcatcatcggtgactcttaaagttatccgtggacctctatttgatgaagtccatcaacaattcagctcgtggatttatcagattacacgactctacaagaacaaggagcatgctgaagttgaatacacgattgggccaatccctgttgacgatgacgtaggaaaggaggttatcacacagttgacagcaaatatgagtacaaacagtacattttatacagattccaatggaagggatttcctcaaaagggtgagaaactacagggaggattggaaccttcaagtgactcaaccagttgcaggaaattactacccggttaatctcggagtgtacatagtagatgagaaatatgaactatctgtccttgtggaccgtgctgccggagcatccagcattcaggatggtcagctagagattatgctacacaggcgtttgcttaaagatgatggcagaggtgtcgcggagccacttgatgaagtggtttgtgtggatcaagattgccaagggctaacggccaggggcacttactatatcaatgtcgagaagctaggccatggagctcattggcgccgtacatatggccagcaagtctactctccctttctccttgcttttactcatgaggatgcgacaagctcaaaaccctacagtgtggccaaagatagtatgatggatgggaattacagccttcctgacaacgttgcgattgtcactttgcagaatcttgatgatggtaccacactactccgcttggcccatcttttccaagctggcgaggacccgagatattcagaggtagcagaggttgatctgaaaaaggtctttggaaagagaactatcaaggaactgaccgagactaacctctccgcaaatcaaaagaagtcagagatgaagcagctcaactggagagttattgaggacgctgaaagtggtcctgccccggtaaaaggtggcccagttgattgtcgtgctctggtcgttgcgctgggacccatggagatacgcaccttcttgctgaaattttaatcgcatttaccgtgcttgtaattgtaaagaaaaaacaatgataaatggagaacttgctatcgttatttccttttgtaaaaaaaagatgaaatacccaaatagaacgttaaatttgcgcaaggtatgtacaatctacatcatgtgttttctattatatggttgctcatattagatcgcatcttggcttacaaaatgcatgatatccatgctgtggtggatgccatgtgagcttgcatatcctcaaagcacacacgtggctgcattaagcaatattactccctcctttcttttttatttgttgcattttagttaaaaagaaactagccgacgataaatagtcgagaacgagagtagtaacacctattagattattttcaacatattacttgtatcttttattttaaattttactatagttttattctctattttaaacttcaagtggcttatgcggtagatggaatccgctcacctctgccacacctccatggcaatgacatcacctccacactgatgcgtggctgtctgccagcatcgtcgcaacaggctcacgctgcttatcgtggcaagaaccactttaaatcctgcagtattaaggtatgcataatcttatttaatatagcatctcttaaggagtctctagagattaattaaaatatatataaaagataagttcttagtgagccgtctctatacaactctccatatatattgtctattaattgtatttatgatccaaatactgaaagttgttaaagaatttgttaaagacttcacttatttaagtgttagaaaggatagtggtagcttgtccttacctttcaattatcattgttaaagactccacttatttgggatgaataatcttcacaagcttctaaagggaacacattttatgactaaaaaaatgttgattttgaggaagacaagatttgtagcgtatgtcaagtagggaaacatgttggaggtcatcatccacataagaacatcatgacgaccgagagaccgcttgagctattccacatggatctattgcttacataagcatcggcggaagtaagtattgtcttataattgtggatgattattctcgcttcacttgagtattctttttgtaggaaaaatctcaaacccaagagaccttaaagagattcttgagatgggctcaaaatgagttcggattgagaatcaagaagattagaagcgacaatgaaacggagttcaagaactctcaaattgaaggatttcttgaggaggaggacatcaagcatgagttctcttctccctacacacctcaataaaatggtgttgtggagagaaaaaatagaactctcttggatatggcaagaaccatgcttgatgagtacaagacaccggaccggttttaggcggaggcaattaacaccgcctgcaactccatcaaccatctctaccttcactgaatcctcaagaaaacatcatatgaactcctcactggtaaaaagcccaacgtttcttattttagagtttttgggagcaaatgttttattcttattaaaagaggtagaaattctaaatttgaccctaaagcagtagaaggctgtttgcttggttatgactcaaacacaagggcatatagaatattcaacaagtccactgaattacttgaagtttcttgtgacattgtgtttgatgagactaatagctctcaagtagagcaagttgatcttgatgaattagatgatgaagaggctccgtgcgtcgcgctaaggaacatgtacattaggaatgtgtgtctaaaagaatccgaagagccttcacaagcacaagatcaaccatcatcttccat

SEQ ID NO: 8320 - DNA, 2132 bp, Zea Mays
gccatcatggcgccgacgcttctgctggtagcccttgtagcgctcgcggtggcagcagcaacgccgatggtgatggaggcatcggcgttcacggaggggtgcaacaataggagcacgccgggtggtggtggaggcaccgcggtggggaacaagctgaacgtgcacttggtgccgcactcgcacgacgacgtcgggtggctcatgaccatcgaccagtactacgtcggatccaacaactccatccagggcgcgtgtgtgatgaacacactcgactccgtggtggacgcgctcgccaaggatcctgctcgcaagttcatcgtcgtcgagcaggctttcttccaaaggtggtgggcacagaaaagcctgacagtccaggccacagtacacaaactggtcgattcgggtcagctagagttcataaatggtgggtggtgtatgcatgatgaagctgttgtgcattacattgacatgattgatcagaccacacttggccaccgggtgatcaagaaacaattcaaaaagattccgagagctggctggcaaatcgatcctttcggtcattctgcagttcaagcttatttgcttggagcagagcttggtttcgattccgtgcattttgcaagaatcgattaccaagatagggcaacccggaaagcaaataagggcctagaagttatatggcgtggctcaagacctgttggttcatcatcacagatcttcacgaatgtatttccagtccattatagcgcaccagttggcttcagcttcgaagttttggctgaaaatgtcatacccgttcaggatgacatgtcgctgtttgactacaatgtccaagaacgtgtagatgattttgttgctgcagccatagcacaggcaaacgttacacgtacaaaccacataatgtggaccatgggggatgattttaactaccagtatgctgaatcctggttccgaaatatggacaaacttatccagtatgtgaacaaggatggccgagtgcatgcattatattctactccgtccatctacacagatgctaaacatgcatcaaacgaatcttggccagtaaaatacgatgattatttcccctacgccgattcaacaaatgcatactggactgggtattttacaagccgtccaactttcaagcgatacattcgagtgtacagtggatactatctggctgcgcgtcaaatagaatttttgatgggtaggagctccttgggattgttcacttccagcttggaagatgcaatgggtattgcccagcatcatgatgcaatctcaggtactgcaaaacagcacacgactgatgactactcaaaacggattgctattggagcatcaaaggtcgaaaaaggtgtaaacgctgctctgacttgtctaaccaactctaacaaaacatgtgtatcctctgtaccaaaatttagtcagtgtccacttctcaatataagctactgcccttcgactgaggaagcaatttcagcaacaaagcatttagttgtagttgtttacaatcctcttggttggaaacgtagtgacttcataagggttcctgtcaatgatgaagacctggtggtcaaaagctctgatggaaatactgttgtgtcacaaatagttgtggttgataatgtgacaaacaacttaagaaagttatatgtgaaggcttatcttggagtcacagcaaacaaggcccctaagtattggctaacatttcaagcttctgtaccaccaatgggatggaattcttactttattttgaaatcaactggatctggatacaacaacactgaacatgtccccgtcgtggttcctccaagtaacaacacaattgaagctggacaagggcatttaaagatgtcattctcttcagcatctggacaactagagagaatattcaattctgcctcaggaggagacttaccaattcaacaaagctttctttggtatagatcaagtaaaggagatgccttggacccacaggcatctggagcttatatatttagaccagatggtaatacaccaactattgcctcatcatcggtgactcttaaagttatccgtggacctctatttgatgaagtccatcaacaattcagctcgtggatttatcaggctactgctgcgtgtct

SEQ ID NO: 8321 - DNA, 2520 bp, Zea Mays
aaaacatccatgtcgtactcactcaaaggtacacagcctgtctcccaaattgtgagtactagcagatacaaggataccccacacaagataacatggataagcattggaggattctgaggataccaaggaccacaaaggataggaagatgagagcacaagccacagggaagctttcttccaaaggtggtgggcacagaaaagcctgacagtccaggccacagtacacaaactggtcgattcgggtcagctagagttcataaatggtgggtggtgtatgcatgatgaagctgttgtgcattacattgacatgattgatcagaccacacttggccaccgggtgatcaagaaacaattcaaaaagattccgagagctggctggcaaatcgatcctttcggtcattctgcagttcaagcttatttgcttggagcagagcttggtttcgattccgtgcattttgcaagaatcgattaccaagatagggcaacccggaaagcaaataagggcctagaagttatatggcgtggctcaagacctgttggttcatcatcacagatcttcacgaatgtatttccagtccattatagcgcaccagttggcttcagcttcgaagttttggctgaaaatgtcatacccgttcaggatgacatgtcgctgtttgactacaatgtccaagaacgtgtagatgattttgttgctgcagccatagcacaggcaaacgttacacgtacaaaccacataatgtggaccatgggggatgattttaactaccagtatgctgaatcctggttccgaaatatggacaaacttatccagtatgtgaacaaggatggccgagtgcatgcattatattctactccgtccatctacacagatgctaaacatgcatcaaacgaatcttggccagtaaaatacgatgattatttcccctacgccgattcaacaaatgcatactggactgggtattttacaagccgtccaactttcaagcgatacattcgagtgtacagtggatactatctggctgcgcgtcaaatagaatttttgatgggtaggagctccttgggattgttcacttccagcttggaagatgcaatgggtattgcccagcatcatgatgcaatctcaggtactgcaaaacagcacacgactgatgactactcaaaacggattgctattggagcatcaaaggtcgaaaaaggtgtaaacgctgctctgacttgtctaaccaactctaacaaaacatgtgtatcctctgtaccaaaatttagtcagtgtccacttctcaatataagctactgcccttcgactgaggaagcaatttcagcaacaaagcatttagttgtagttgtttacaatcctcttggttggaaacgtagtgacttcataagggttcctgtcaatgatgaagacctggtggtcaaaagctctgatggaaatactgttgtgtcacaaatagttgtggttgataatgtgacaaacaacttaagaaagttatatgtgaaggcttatcttggagtcacagcaaacaaggcccctaagtattggctaacatttcaagcttctgtaccaccaatgggatggaattcttactttattttgaaatcaactggatctggtgaatgacttcatcttaatacttattttcatcaaactacaagtccttgagaaaatactattgttctttatgccaacaatttaatatcgttcttcttcaaacatgaaaccgctttatcaatagagagttatgatataacagagtaaggcatgcggcatggtaatatcacatattcacatgtctcataactagctttagttgtcacattaaactaccataaggacatgcaaagtttattttggctatttacaccaacttcagctttagtcactatataaaattgaaaaaaacccttacccaacaagattggttgtagacttgtagttatataacttatattcgattaagatgatagattttgatccgttttggatctttttccctctcttcttaatgaaatgatgcgcatgtctcttgcgcgttcgagaaaaaaaagagatagattttgaacacttttttaagttaagaaacagaaattgttcctaccacctatccaggatacaacaacactgaacatgtccccgtcgtggttcctccaagtaacaacacaattgaagctggacaagggcatttaaagatgtcattctcttcagcatctggacaactagagagaatattcaattctgcctcaggaggagacttaccaattcaacaaagctttctttggtatagatcaagtaaaggagatgccttggacccacaggcatctggagcttatatatttagaccagatggtaatacaccaactattgcctcatcatcggtgactcttaaagttatccgtggacctctatttgatgaagtccatcaacaattcagctcgtggatttatcaggggcgactggcataggtggtgctgaagaagaagctccagcaatagaggcatgagacactggtgactgag

SEQ ID NO: 8322 - DNA, 1820 bp, Zea Mays
gttaataaaatacctccactagacggttagtcacatgcagggaaaatagattgaacatcatgacgatacaggtgtaactattttctcctaccaaaggtcgaaattttggaagtttaatttgatgctttctaaaagaacaactattttagaaactaaggtcatatctatatagcgataaaattatgacaagagtaacaagccatgaaatggtgaaaacatgtgtatgttaatgtattgttagtgaacataccttacccatggtacttcgttggcggctctgtccaaccaattcatacgttttgcatcaaagtaacagactgtgcgcattccagtccaaacacctcattaaaattgggcaacatatactccacgaccctggtggccaatcctactaaaatgcatccacagaaaagaaatcgttgtcacttgaatcagtgtgcaatgacagatagctacaaaccactacaattaaaacacatgcccaattttagtaaacaatctagattcagtctagtcaagcataacagagtttcaaccgatcatttgaaaatgtgaatcaatcaaataactgcacaaaatactatgcagaacatggcactcaccttgctcgaaactgacatgtgatccacctccttatctaagtcatcctcatataaatcatcgtaggcatagagagcatacctagcgctctactgcaagaaatgctccatgcgtgtagaaacatttcataatatatgtgagatagtagcatattgttgtccattaatgatggcaatggaaagtacccagcttcgacactatatggtttatttggatattcataaaacaatttatttcgatatatatatatatatatatatatatataatttgcctcatctagttatacctgataacatagtttaattggccgaactacatagataacatgatataaccaaacaggtgtgtcacacatcatcaagattttattttttggtgaaaagaaaaacaacgaaagaccggttcaaaacaacaactaagagtgcatgggcagttgaggtttatgtcatattaggttatttaaaattttccagcctattgagataataccagcacaatcataaataaatatttacctaaataccaatacctccttcattacgaaatggttgaataggaaactaaccactgaactagtgcagtatgttgtggaagacaacatggaacaatagtaatttaccaaagtgatacagtaaacatgcagaggtgattacaaaatggaagaggacccattagtcgaggcaagaactggcgcataaaatcaattataaaatcaatatgactcacatactggactgatatagtgggcggcgatggaggattgagcgagcgcccgtccaccggccaatccagtggccacgccgtctgcgatgccgacgccgcagcagatggtggtggtgcgggctgcatctccatctacatctccctcttgatgtcagctgctcctccaccatcccgatcccgtggcaaagaaaaatgcaggtaacacagatctaggaccagaaatggcaaagggacagtggcaggtgtggcggatggctataccacctcattggcgatcttgcacttgtaggggaggaaacatttgatggtgagcgacggggtgccattgggaggggagagtcgagcggcggcggcgagtgcatgtgtgcattggcaagggagagccgagcggcggcggcggctgcgttagggataggaggagaaaagggaaaggcagaggcaagggtcatacaggccgtctgtgagcctgactttaacgtcgttagcggtattcag

SEQ ID NO: 8323 - DNA, 3378 bp, Zea Mays
cgaagaaaccaatacccaaacccaaaggttcgtccgcattgtcggccagccagctcccactccactgcccgttccgttctgcgctcgtcatcgtcggggccggccgggcaagccatcagcggccgtgatggtgatggcgccggcgattctgctggcagtgctagtgctcgcggcggtggcagcggcgacggcgtcggcgttcgccgtggcgtccaacaacgcgacggtggtggccgggaagctgaacgtgcacctggtgcctcactcccacgacgacgtcgggtggctcaagaccgtcgaccagtactatgtcggctccaacaacagcatccagggcgcgtgcgtgatgaacaccctcgactccgtggtggacgcgctcgccagggatcccgcccgcaagttcgtcgtcgtcgagcaggctttcttccaaaggtggtgggccgagaaaagccccacaatccaggacatagtccacaaactggttgattccggacagctagagttcataaatggtgggtggtgtatgcacgatgaagctgccgtgcattacattgacatgattgatcagaccacgcttggtcaccggatgatcaagaaacagttcaataagactccaagagctggctggcaaattgatccttttggtcactctgcagtgcaagcttatttgcttggagcagagcttggttttgattctgtacatttcgcaagaattgattaccaagatagggcaacacggaaagcagacaaaggcctagaggttatatggcgtggctcaagaactttcggctcatcttcacagatcttcacgaatgcctttcctgtccattatagcccaccagatggctttggcttcgaagttttggatgaaaatatcatacctgttcagggatgacctgtcactttttgactacaatgtccaagaacgtgtagatgattttgttgctgcagccttagcacaggcaaatgttacacgtacagaccacataatgtggaccatgggggatgattttaactaccagtacgctgaatcctggttccggaatatggacaaacttatccaacatgtgaacaaggacggcagagtgcatgcgttgtattctactccgtctatctacacagatgctaagcatgcatcgaatgaatcttggccagtaaaatatgacgactatttcccctacgctgattcaacgaatgcatactggactgggtactttacgagccgtccaactttcaagcgatatgttcgagtacacagcggatactacttggctgcacgtcagatagagtttttggtgggcggtaggagctccttgggattgttcacttccagcttggaagatgcgatggggattgcccagcatcacgatgcagtctcaggtactgcgaaacagcacacgactgatgactacgcgaaacggcttgcgctgggagcagcaaaggttgaaaaaggtgtaaacaccgctctggcttgtctgaccagctccaacgggacatgtggatcctctgttgtaaaatttagtcagtgttcacttctcaatataagctactgcccttcgaccgaggaagcaatttcatcaacaaagcgtttagttgtagttgtttacaatcctcttggatgggaacgtagtgacttcataagagttcctgtcaatgatcaaaacctagttgtaaaaggctctgatggaaatattgttgagtcacagctagttgaggttgataatgtgacgagaaatttaagaaagttttatgtgaaggcttatcttggaatcacaacacacaaggcccctaagtattggctactatttcaagcttctgtaccaccaatgggctggaattcctacttcatttcaaaatcaactggagcaggatacaacagtactgagcatgtctcggacgtggtttccccaagtaacagcacgattgaagttggaccaggacatctaaagatgtccttctcaaaagcatctggacaactcaataggatattcaattccatctcaggagtggatttaccagttcaacaaagctttctttggtacagatcaagtgagggtgatgcctcagactcacaggcatctggagcatatatatttcgaccagatggtaatacaccgactacggtttcatcctcggtgccactgaaagttatccgtggaccactggttgacgaagtgcatcagcaattcagctcatggatttatcagataacacgactctacaaaaacaaggagcatgctgaagttgaatacacgattgggccgatccctgtcgatgatgatgtagggaaggaggtcatcacacggctgacagcaaatatggtcacaaacagtacgttttatacagactccaatggaagggatttcctcaaaagggtgagaaactacagggaggactggaatcttcaagtaactcaaccagttgcaggaaattactatccggtgaacctaggagtgtatgtagcagatgaaaaatatgagctatctgtgcttgtggaccgtgctgtcggagcatcaagcattcaggatggtcagctagagattatgctacacaggcgtttacttaaggatgatggcaggggtgtcggagagccacttgacgaggtggtttgcgtggatcaagattgccaagggcttacggccaggggcaattactacgtcaatgtcgagaagctagggcatggagctcactggcgacgtacatatggccagcaagtctactcaccctttctccttgctttcactcatgaggatgagaccagctcgaaatcctacagcgtggccaaagctggtatgatgaatgccaactacagccttcctgataatgtcgccattgttactttgcagaatctagatgatggtaccacactactccgcttggcccatctctttcaagctgctgaggacccgagatattccaaggtggcaaaggttgatctgaaaaaggtgttcggaaagagaactatcaaggaattgacggagactagcctctccgcgaaccaaaagaagtcagacatgaagaagctcagctggagggtcattgggaacactgaaactggtcctgccgcagtaaaaggtggcccagttgacagtagggctctagtcgttgaactaggacccatggagatacgcaccttcttgctgaaattttagtggcagttgttcttttgtttgtaaacaaacaatagtccatagagtaatttctaccttttcattaacgtgcccaaatcttagttcaaataggatcaaatacttgggcaatggaggtgcacacccacaccaagtttgttcatgtaataatagctacatgtcgggaaaaaaaaaaggaacggttgtggtgcttttcattgtgtaaagcgggtatttcttcctagcggat

SEQ ID NO: 8324 - DNA, 3370 bp, Zea Mays
cgaagaaaccaatacccaaacccaaaggttcgtccgcattgtcggccagccagctcccactccactgcccgttccgttctgcgctcgtcatcgtcggggccggccgggcaagccatcagcggccgtgatggtgatggcgccggcgattctgctggcagtgctagtgctcgcggcggtggcagcggcgacggcgtcggcgttcgccgtggcgtccaacaacgcgacggtggtggccgggaagctgaacgtgcacctggtgcctcactcccacgacgacgtcgggtggctcaagaccgtcgaccagtactatgtcggctccaacaacagcatccagggcgcgtgcgtgatgaacaccctcgactccgtggtggacgcgctcgccagggatcccgcccgcaagttcgtcgtcgtcgagcaggctttcttccaaaggtggtgggccgagaaaagccccacaatccaggacatagtccacaaactggttgattccggacagctagagttcataaatggtgggtggtgtatgcacgatgaagctgccgtgcattacattgacatgattgatcagaccacgcttggtcaccggatgatcaagaaacagttcaataagactccaagagctggctggcaaattgatccttttggtcactctgcagtgcaagcttatttgcttggagcagagcttggttttgattctgtacatttcgcaagaattgattaccaagatagggcaacacggaaagcagacaaaggcctagaggttatatggcgtggctcaagaactttcggctcatcttcacagatcttcacgaatgcctttcctgtccattatagcccaccagatggctttggcttcgaagttttggatgaaaatatcatacctgttcagaggatgacctgtcactttttgactacaatgtccaagaacgtgtagatgattttgttgctgcagccttagcacaggcaaatgttacacgtacagaccacataatgtggaccatgggggatgattttaactaccagtacgctgaatcctggttccggaatatggacaaacttatccaacatgtgaacaaggacggcagagtgcatgcgttgtattctactccgtctatctacacagatgctaagcatgcatcgaatgaatcttggccagtaaaatatgacgactatttcccctacgctgattcaacgaatgcatactggactgggtactttacgagccgtccaactttcaagcgatatgttcgagtacacagcggatactacttggctgcacgtcagatagagtttttggtgggcggtaggagctccttgggattgttcacttccagcttggaagatgcgatggggattgcccagcatcacgatgcagtctcaggtactgcgaaacagcacacgactgatgactacgcgaaacggcttgcgctgggagcagcaaaggttgaaaaaggtgtaaacaccgctctggcttgtctgaccagctccaacgggacatgtggatcctctgttgtaaaatttagtcagtgttcacttctcaatataagctactgcccttcgaccgaggaagcaatttcatcaacaaagcgtttagttgtagttgtttacaatcctcttggatgggaacgtagtgacttcataagagttcctgtcaatgatcaaaacctagttgtaaaaggctctgatggaaatattgttgagtcacagctagttgaggttgataatgtgacgagaaatttaagaaagttttatgtgaaggcttatcttggaatcacaacacacaaggcccctaagtattggctactatttcaagcttctgtaccaccaatgggctggaattcctacttcatttcaaaatcaactggagcagtactgagcatgtctcggacgtggtttccccaagtaacagcacgattgaagttggaccaggacatctaaagatgtccttctcaaaagcatctggacaactcaataggatattcaattccatctcaggagtggatttaccagttcaacaaagctttctttggtacagatcaagtgagggtgatgcctcagactcacaggcatctggagcatatatatttcgaccagatggtaatacaccgactacggtttcatcctcggtgccactgaaagttatccgtggaccactggttgacgaagtgcatcagcaattcagctcatggatttatcaggataacacgactctacaaaaacaaggagcatgctgaagttgaatacacgattgggccgatccctgtcgatgatgatgtagggaaggaggtcatcacacggctgacagcaaatatggtcacaaacagtacgttttatacagactccaatggaagggatttcctcaaaagggtgagaaactacagggaggactggaatcttcaagtaactcaaccagttgcaggaaattactatccggtgaacctaggagtgtatgtagcagatgaaaaatatgagctatctgtgcttgtggaccgtgctgtcggagcatcaagcattcaggatggtcagctagagattatgctacacaggcgtttacttaaggatgatggcaggggtgtcggagagccacttgacgaggtggtttgcgtggatcaagattgccaagggcttacggccaggggcaattactacgtcaatgtcgagaagctagggcatggagctcactggcgacgtacatatggccagcaagtctactcaccctttctccttgctttcactcatgaggatgagaccagctcgaaatcctacagcgtggccaaagctggtatgatgaatgccaactacagccttcctgataatgtcgccattgttactttgcagaatctagatgatggtaccacactactccgcttggcccatctctttcaagctgctgaggacccgagatattccaaggtggcaaaggttgatctgaaaaaggtgttcggaaagagaactatcaaggaattgacggagactagcctctccgcgaaccaaaagaagtcagacatgaagaagctcagctggagggtcattgggaacactgaaactggtcctgccgcagtaaaaggtggcccagttgacagtagggctctagtcgttgaactaggacccatggagatacgcaccttcttgctgaaattttagtggcagttgttcttttgtttgtaaacaaacaatagtccatagagtaatttctaccttttcattaacgtgcccaaatcttagttcaaataggatcaaatacttgggcaatggaggtgcacacccacaccaagtttgttcatgtaataatagctacatgtcgggaaaaaaaaaaggaacggttgtggtgcttttcattgtgtaaagcgggtatttcttcctagcggat

SEQ ID NO: 8325 - DNA, 3441 bp, Zea Mays
gcggagcccagcccagagcccaccgtgagctcaacgacgcccacgcccggtgccggtgcaaaccaaacgccaactccaatctccaactccaagagcgaagaaaccaatacccaaacccaaaggttcgtccgcattgtcggccagccagctcccactccactgcccgttccgttctgcgctcgtcatcgtcggggccggccgggcaagccatcagcggccgtgatggtgatggcgccggcgattctgctggcagtgctagtgctcgcggcggtggcagcggcgacggcgtcggcgttcgccgtggcgtccaacaacgcgacggtggtggccgggaagctgaacgtgcacctggtgcctcactcccacgacgacgtcgggtggctcaagaccgtcgaccagtactatgtcggctccaacaacagcatccagggcgcgtgcgtgatgaacaccctcgactccgtggtggacgcgctcgccagggatcccgcccgcaagttcgtcgtcgtcgagcaggctttcttccaaaggtggtgggccgagaaaagccccacaatccaggacatagtccacaaactggttgattccggacagctagagttcataaatggtgggtggtgtatgcacgatgaagctgccgtgcattacattgacatgattgatcagaccacgcttggtcaccggatgatcaagaaacagttcaataagactccaagagctggctggcaaattgatccttttggtcactctgcagtgcaagcttatttgcttggagcagagcttggttttgattctgtacatttcgcaagaattgattaccaagatagggcaacacggaaagcagacaaaggcctagaggttatatggcgtggctcaagaactttcggctcatcttcacagatcttcacgaatgcctttcctgtccattatagcccaccagatggctttggcttcgaagttttggatgaaaatatcatacctgttcaggatgacctgtcactttttgactacaatgtccaagaacgtgtagatgattttgttgctgcagccttagcacaggcaaatgttacacgtacagaccacataatgtggaccatgggggatgattttaactaccagtacgctgaatcctggttccggaatatggacaaacttatccaacatgtgaacaaggacggcagagtgcatgcgttgtattctactccgtctatctacacagatgctaagcatgcatcgaatgaatcttggccagtaaaatatgacgactatttcccctacgctgattcaacgaatgcatactggactgggtactttacgagccgtccaactttcaagcgatatgttcgagtacacagcggatactacttggctgcacgtcagatagagtttttggtgggcggtaggagctccttgggattgttcacttccagcttggaagatgcgatggggattgcccagcatcacgatgcagtctcaggtactgcgaaacagcacacgactgatgactacgcgaaacggcttgcgctgggagcagcaaaggttgaaaaaggtgtaaacaccgctctggcttgtctgaccagctccaacgggacatgtggatcctctgttgtaaaatttagtcagtgttcacttctcaatataagctactgcccttcgaccgaggaagcaatttcatcaacaaagcgtttagttgtagttgtttacaatcctcttggatgggaacgtagtgacttcataagagttcctgtcaatgatcaaaacctagttgtaaaaggctctgatggaaatattgttgagtcacagctagttgaggttgataatgtgacgagaaatttaagaaagttttatgtgaaggcttatcttggaatcacaacacacaaggcccctaagtattggctactatttcaagcttctgtaccaccaatgggctggaattcctacttcatttcaaaatcaactggagcaggatacaacagtactgagcatgtctcggacgtggtttccccaagtaacagcacgattgaagttggaccaggacatctaaagatgtccttctcaaaagcatctggacaactcaataggatattcaattccatctcaggagtggatttaccagttcaacaaagctttctttggtacagatcaagtgagggtgatgcctcagactcacaggcatctggagcatatatatttcgaccagatggtaatacaccgactacggtttcatcctcggtgccactgaaagttatccgtggaccactggttgacgaagtgcatcagcaattcagctcatggatttatcagataacacgactctacaaaaacaaggagcatgctgaagttgaatacacgggaaggaggtcatcacacggctgacagcaaatatggtcacaaacagtacgttttatacagactccaatggaagggatttcctcaaaagggtgagaaactacagggaggactggaatcttcaagtaactcaaccagttgcaggaaattactatccggtgaacctaggagtgtatgtagcagatgaaaaatatgagctatctgtgcttgtggaccgtgctgtcggagcatcaagcattcaggatggtcagctagagattatgctacacaggcgtttacttaaggatgatggcaggggtgtcggagagccacttgacgaggtggtttgcgtggatcaagattgccaagggcttacggccaggggcaattactacgtcaatgtcgagaagctagggcatggagctcactggcgacgtacatatggccagcaagtctactcaccctttctccttgctttcactcatgaggatgagaccagctcgaaatcctacagcgtggccaaagctggtatgatgaatgccaactacagccttcctgataatgtcgccattgttactttgcagaatctagatgatggtaccacactactccgcttggcccatctctttcaagctgctgaggacccgagatattccaaggtggcaaaggttgatctgaaaaaggtgttcggaaagagaactatcaaggaattgacggagactagcctctccgcgaaccaaaagaagtcagacatgaagaagctcagctggagggtcattgggaacactgaaactggtcctgccgcagtaaaaggtggcccagttgacagtagggctctagtcgttgaactaggacccatggagatacgcaccttcttgctgaaattttagtggcagttgttcttttgtttgtaaacaaacaatagtccatagagtaatttctaccttttcattaacgtgcccaaatcttagttcaaataggatcaaatacttgggcaatggaggtgcacacccacaccaagtttgttcatgtaataatagctacatgtcgggaaaaaaaaaaggaacggttgtggtgcttttcattgtgtaaagcgggtatttcttcctagcggat

SEQ ID NO: 8326 - DNA, 3515 bp, Zea Mays
caagcctgtcgcagcacaagccggtcccgctcttttgactgaggcggagcccagcccagagcccaccgtgagctcaacgacgcccacgcccggtgccggtgcaaaccaaacgccaactccaatctccaactccaagagcgaagaaaccaatacccaaacccaaaggttcgtccgcattgtcggccagccagctcccactccactgcccgttccgttctgcgctcgtcatcgtcggggccggccgggcaagccatcagcggccgtgatggtgatggcgccggcgattctgctggcagtgctagtgctcgcggcggtggcagcggcgacggcgtcggcgttcgccgtggcgtccaacaacgcgacggtggtggccgggaagctgaacgtgcacctggtgcctcactcccacgacgacgtcgggtggctcaagaccgtcgaccagtactatgtcggctccaacaacagcatccagggcgcgtgcgtgatgaacaccctcgactccgtggtggacgcgctcgccagggatcccgcccgcaagttcgtcgtcgtcgagcaggctttcttccaaaggtggtgggccgagaaaagccccacaatccaggacatagtccacaaactggttgattccggacagctagagttcataaatggtgggtggtgtatgcacgatgaagctgccgtgcattacattgacatgattgatcagaccacgcttggtcaccggatgatcaagaaacagttcaataagactccaagagctggctggcaaattgatccttttggtcactctgcagtgcaagcttatttgcttggagcagagcttggttttgattctgtacatttcgcaagaattgattaccaagatagggcaacacggaaagcagacaaaggcctagaggttatatggcgtggctcaagaactttcggctcatcttcacagatcttcacgaatgcctttcctgtccattatagcccaccagatggctttggcttcgaagttttggatgaaaatatcatacctgttcaggatgacctgtcactttttgactacaatgtccaagaacgtgtagatgattttgttgctgcagccttagcacaggcaaatgttacacgtacagaccacataatgtggaccatgggggatgattttaactaccagtacgctgaatcctggttccggaatatggacaaacttatccaacatgtgaacaaggacggcagagtgcatgcgttgtattctactccgtctatctacacagatgctaagcatgcatcgaatgaatcttggccagtaaaatatgacgactatttcccctacgctgattcaacgaatgcatactggactgggtactttacgagccgtccaactttcaagcgatatgttcgagtacacagcggatactacttggctgcacgtcagatagagtttttggtgggcggtaggagctccttgggattgttcacttccagcttggaagatgcgatggggattgcccagcatcacgatgcagtctcaggtactgcgaaacagcacacgactgatgactacgcgaaacggcttgcgctgggagcagcaaaggttgaaaaaggtgtaaacaccgctctggcttgtctgaccagctccaacgggacatgtggatcctctgttgtaaaatttagtcagtgttcacttctcaatataagctactgcccttcgaccgaggaagcaatttcatcaacaaagcgtttagttgtagttgtttacaatcctcttggatgggaacgtagtgacttcataagagttcctgtcaatgatcaaaacctagttgtaaaaggctctgatggaaatattgttgagtcacagctagttgaggttgataatgtgacgagaaatttaagaaagttttatgtgaaggcttatcttggaatcacaacacacaaggcccctaagtattggctactatttcaagcttctgtaccaccaatgggctggaattcctacttcatttcaaaatcaactggagcaggatacaacagtactgagcatgtctcggacgtggtttccccaagtaacagcacgattgaagttggaccaggacatctaaagatgtccttctcaaaagcatctggacaactcaataggatattcaattccatctcaggagtggatttaccagttcaacaaagctttctttggtacagatcaagtgagggtgatgcctcagactcacaggcatctggagcatatatatttcgaccagatggtaatacaccgactacggtttcatcctcggtgccactgaaagttatccgtggaccactggttgacgaagtgcatcagcaattcagctcatggatttatcagataacacgactctacaaaaacaaggagcatgctgaagttgaatacacgattgggccgatccctgtcgatgatgatgtagggaaggaggtcatcacacggctgacagcaaatatggtcacaaacagtacgttttatacagactccaatggaagggatttcctcaaaagggtgagaaactacagggaggactggaatcttcaagtaactcaaccagttgcaggaaattactatccggtgaacctaggagtgtatgtagcagatgaaaaatatgagctatctgtgcttgtggaccgtgctgtcggagcatcaagcattcaggatggtcagctagagattatgctacacaggcgtttacttaaggatgatggcaggggtgtcggagagccacttgacgaggtggtttgcgtggatcaagattgccaagggcttacggccaggggcaattactacgtcaatgtcgagaagctagggcatggagctcactggcgacgtacatatggccagcaagtctactcaccctttctccttgctttcactcatgaggatgagaccagctcgaaatcctacagcgtggccaaagctggtatgatgaatgccaactacagccttcctgataatgtcgccattgttactttgcagaatctagatgatggtaccacactactccgcttggcccatctctttcaagctgctgaggacccgagatattccaaggtggcaaaggttgatctgaaaaaggtgttcggaaagagaactatcaaggaattgacggagactagcctctccgcgaaccaaaagaagtcagacatgaagaagctcagctggagggtcattgggaacactgaaactggtcctgccgcagtaaaaggtggcccagttgacagtagggctctagtcgttgaactaggacccatggagatacgcaccttcttgctgaaattttagtggcagttgttcttttgtttgtaaacaaacaatagtccatagagtaatttctaccttttcattaacgtgcccaaatcttagttcaaataggatcaaatacttgggcaatggaggtgcacacccacaccaagtttgttcatgtaataatagctacatgtcgggaaaaaaaaaaggaacggttgtggtgcttttcattgtgtaaagcgggtatttcttcctagcggat

SEQ ID NO: 8327 - DNA, 280 bp, Zea Mays
cagcagtgcagagaactaagcagcaaaaatctgtttgagtttctcaattcaaccttaaatgcagtaacattccaaatgcaagcatgacagtaaccagtacccccatacccacgtttcaggatggaaagtgggaaacattcatttccaccaggtagccttcactatacgatagcaaaatcctgacaaactgcacaactaaaaacgccagggccaaattatcagtgaattttctgaacatggaactactagaatatgctaggacctaggaattaactcccga

SEQ ID NO: 8328 - DNA, 318 bp, Zea Mays
accatgaggtgtaagaagctcgtcgtggacatgcactatgaggcacgaatccaggccatcatcagctaccatggctccatcctggggagaaggtgaccaagcagcaagcccgaaccatgtcgttgaccaggaaccagtacctgcagatgattccatattggtgcgccatatatcctctgtgctgggagcagatggtggataggtgctgctcgcctgagtgggacgaggcgcacaacgctagtcgaaaacgacgtctgatgatgcaatgtccctcccaccaccaaggcagccgcaacctaggccaatatgcagaagcat

SEQ ID NO: 8329 - DNA, 1956 bp, Zea Mays
ctccagttgctgaagtcgttcctgatcggcctccatctccagttcgcctctcttccctgagctccctcccaccgcgcgctctcctgctgccgctctttcccggcgtgtccctgctccagcgccgcggagctcccgcgcgcgcaagtccctctggtgggcgtcgcgctggtcgcatcccctccggtctcctccctcaagcgccgcttcttcgtgcccgtgattggagatcctcgcccatggctctgggctgccagctccgagctcctccctgcttctctgctccagcccgaccgccctcacctcatccccttcctgacgctcgtcctcggctccctctctcgtctggtggctggtgcgcgcaggcgtcaggctcagggagtccccgcgcgagctggcgctgtgtgggccggcggcggcgatggaggtgctggctgccgctcctcgtaggcgttgccttcctcggcctccttgacatggcgaagaacgtcgaggtggtcgagagctgcaccacctccttttaccgctgctcctcccatgggggtgaagccgtgggtcggggcgcggtcccgtggtcaggcgacgacggcgagggcgaagagacccggcggtgcgagcagcggtccgagagggaggacgccatgccctacgaccgcgacgttgacatggatgccgtgcttgtcggtggcgcagccaaggactggagtaaatgctacataggttgtgaatttggttttcttttctgccagtaagacaccttatgctacttttggaattgcaccagatccttctatagagggtatcctcagatcgatggagtcatctcaatattattcaaagaatagtattaatgtggctcgagggagagggtacaagattgtgattacaatcagcctttcttcagacttcccagttggcaactcttcatgggctgaatatgatgctgtggcacctgtgcctccaaagactgaagaagctcttgctgcagcctttatttctaactgttgtgcacggaactttcgtttgcaagccctcgagatgcttgaaaatttggatgtcaaaatagattcgtatggtggttgtcatcgcaaccgtgatggcaaagtggacaccttgaagcgatacaaattcagcttggcatttgagaattctaatgaggaggattacgtaacagaagagttttttcccaatcactggtacgataattgatcacgtgatgcgaaagaagagccaagtcgaccccaagatgacgtaacgagtggactaattcgcaaggtgatgcggatggacgaacctgaaggtggataaactgaacaagtgccaaaacaaaggatggtcgccaagtggacgtcacctaacaaacactaacgtagtgttaatccaggttgttggacaaagatggtgggaggttggctgaggaggagggggaggagcaggacggcggaggaggcacagcaggacgacgacatccaacagcaggcgacacggcaggacgacgatgaccaacaacaggatgacgatgatgctaagcaggatgcctcaggttctggtgcctcaggttcgagtaacgtctacctgcgaggtcccgcgagtctccctcagcgtcccatacttcgggacaggcggccgctgattcggtcggatggggagaggcatgtaactttatgttctccattcttgttcatattatgtgttcaaaatcataatataaactaatactttttatttatcacttggacaagtcttggatggttgtggagaaagctgggggtcatcgtcgcaaccccaatgacatccttggcctgctgtgtagggaacactttcctggactggttgagtacgaaggagtgatagacccagcctacaccttagaccactacgccgtcgcccacgatgcagtagaccgggacgacagggaattcaataacaaggcggagcaggtgaagcaagagctatggg

SEQ ID NO: 8330 - DNA, 1415 bp, Zea Mays
ttcctaaagtcgttcctgatcagcctccatctccagttcgcctctctccctgaactccctcccgccgcgcgctctccctgctgccgctcttccccggcgcgtccctgctccagctccggcgccgcggagctcctgcgcgcgcaagttgctctggtggccgtcgcgctggtcgcgtcccctccggtctcctccctcaagcgcagcttcttcgtgcccgtgatgggagatcctcgcccatggcgctcggctgcccagctccgagctcctcccagcttctctgctccagcccggccaccctcacctcatccccttcctgacgctcgtcctcggctccctctctcgtctggtggctggtgcgcgcaggcgtcgggctcagggagtccctgcgtgagctggcgctgtggtgggccggcggcggcgatggaggtgctggctgccgctcctcgtaggcgttgccttcagccttcctcgccgagatcgccttcctcggccgcctcgacatggcgaagaacgtcgaggtggtcgagagctgcaccacctccttttaccgctgctcctcccattggggtgaagccgtgggtcgaggcgcggtcccgtggtcaggcggcgacggcgagggtgaagagacccggcggtgcgagcagcggttcgagagggaggacgccgtgccctacgaccgcgacgttgacagggatcccgggcttgtcggtggcgcagccaaggactggagtaaatgctacataggttatgaatttggttttcttttctgccagtaagagacctgatgctacttttggaattgcaccagatccttctgtagagggtatcctcagatcgatggagtcatctcaatattattcaaagaatagtattgatgtggctcgagggagagggtacaagattgtgattacaatcagcctttcttcagacgtcccagttggctactcttcatgggctgaatatgatgttgtggcacctgtgcctccaaagactgaagaagctcttgctgcagactttatttctaaccgtggtacacggaactttcgtatgcaagccctcgagatgcttgaaaatttggatgtcaaaatagattcgtatggtggttgtcatcgcaaccgtggtgacaaagtggacaccttgaagcggtacagattcagcttggcatttgagaattctaatgaggaggattacgtaacagaaaagttttttttccgatcactggtactggtacgataattgatcacgtgatgcgaaagaagagccaagtcgaccccaagatgacgtaacgagtggactaattcgcaaggtgatgcggatggacgaacctgaagatggataaactgaacaagtgccaaaacaaaggatggtcgccaagtggacgttacctaacaaacactaacgtagtgttaatccag

SEQ ID NO: 8331 - DNA, 1614 bp, Zea Mays
gccccctctcctccgcgatcctccccaatcgcgcagatcccgtctctgcgccgccatccgcgccgctcgcggagccgcccctccccgcaccgcgcattgcccggcgcgacagacaccgcacgacccccaactcggcgccccacgctccgcgccccctctccccccggcatgagacaccgtccctctcgccatgtgcccccacgcccagcggcatatgaaattagcgaggggcgtacaggtcgctctcgtctgctcggggctgggtccgctgccgtggtggccgtccactgggcgagtcgtcgagttactaagtttgccagggagacaggagacacccaaacgctttcagatgttgatataaatattattgctttggcttacatgttagaagctgagatccatgggactagccatttgcgagagcaccctcctcctctgaaaattctcgaatacttcctctgaagaatattgagagtcaagatatcttcatgtgtgataccaacagtctttgtggggcacaagaggatatagagctctagccatcaaagaaggatgcacctgttgcatgggaggacgatgagaacgatgtaggttggatgcatgctattagccatagcatgcacagaagatatttgcagaggaaggcaaggcgtgatgccctcaaggaatctggacaaagttttgagacaagttctgttgttccatcaattgatgatgataaagttctctctgaaaatagtggattggagcatggtctgacttcaactgatggcctttcttctgtctctgagataattagtgcacgttctgatgattttgaacatcaagcagagaatgacactgaaattcctggagaacatttgcattctgatcagcgagcttacggtgatgatgctgatgcgtgcaccaaagaattggaaaacctagatatagaaggtgaggatgagggaggtggtgatgcacatttcattgttgatgagagcaacgagcagagttggaccctgaggtccttatctgaatcgagcattccacgttattcactatgcaaagaaagagacgtgaacttgaagtatgagaaacataaaaggtttaatgctactctttgcacttattgcaactatatttatttgcttttgttcatggaaggcttcaacgtgtggttctttttaagaagtccatggtcaatgggtcagtatactgtcacagaaaccgacaacacacatcgcaaaatcttgggcgtagagtttttttttctagactctagtaataagctgcaagaaaatctaaagatgcgtaatcatgtaatttgggggtcacttctttcagcttgtaattaaattagctcctatgatgtgggagcacgtgtgctgatctcaaacttacatgctgaaggtggtcagtgggatgacacagaaaataagagggcagatgggaagagcatgggtatagagaagtctcctgaccatagcttcatccaagtagaaacattcataatttagtttagcatgaatatgatatttgcctgcaatagacgactaacaagagtgatgccaaccaatgtagtttctgatttactgggcatgagccctcatatttcaatttccatagacatgt

SEQ ID NO: 8332 - DNA, 1616 bp, Zea Mays
gccccctctcctccgcgatcctccccaatcgcgcagatcccgtctctgcgccgccatccgcgccgctcgcggagccgcccctccccgcaccgcgcattgcccggcgcgacagacaccgcacgacccccaactcggcgccccacgctccgcgccccctctccccccggcatgagacaccgtccctctcgccatgtgcccccacgcccagcggcatatgaaattagcgaggggcgtacaggtcgctctcgtctgctcggggctgggtccgctgccgtggtggccgtccactgggcgagtcgtcgaggtacccaatttctgccatggcgatccgcccggaccaatggtcgattctccatctgaccatcctcagtaagcctcctgccccactactgccctccaaagcggcgcgcgcgccaccgccatctccacccacgcccaccttgctgccgtggccgccccataccgcgccctcgatctgaccccacggggcaggatggacaaagggaaatcggtggtggccgagctggcggcgtcgttcagcgatgtccttgtcacaccgcgcgagccgccagaaccccaagccaagagcttcctaccatcgccctccttctttactaagtttgccagggagacaggagacacccaaacgctttcagatgttgatataaatattattgctttggcttacatgttagaagctgagatccatgggactagccatttgcgagagcaccctcctcctctgaaaattctcgaatacttcctctgaagaatattgagagtcaagatatcttcatgtgtgataccaacagtctttgtggggcacaagaggatatagagctctagccatcaaagaaggatgcacctgttgcatgggaggacgatgagaacgatgtaggttggatgcatgctattagccatagcatgcacagaagatatttgcagaggaaggcaaggcgtgatgccctcaaggaatctggacaaagttttgagacaagttctgttgttccatcaattgatgatgataaagttctctctgaaaatagtggattggagcatggtctgacttcaactgatggcctttcttctgtctctgagataattagtgcacgttctgatgattttgaacatcaagcagagaatgacactgaaattcctggagaacatttgcattctgatcagcgagcttacggtgatgatgctgatgcgtgcaccaaagaattggaaaacctagatatagaaggtgaggatgagggaggtggtgatgcacatttcattgttgatgagagcaacgagcagagttggaccctgaggtccttatctgaatcgagcattccacgttattcactatgcaaagaaagagacgtgaacttgaagtatgagaaacataaaaggtggtcagtgggatgacacagaaaataagagggcagatgggaagagcatgggtatagagaagtctcctgaccatagcttcatccaagtagaaacattcataatttagtttagcatgaatatgatatttgcctgcaatagacgactaacaagagtgatgccaaccaatgtagtttctgatttactgggcatgagccctcatatttcaatttccatagacatgt

SEQ ID NO: 8333 - DNA, 629 bp, Zea Mays
cttgaaatcattggttgtccttcactctgttatatggctttggtgtagttgactagtaattatttccttcaaaggggatggatgctacatgggagaagagcttttggaaagggaagaaaggaacttgggctcaagaattgggaacaaagcaggtgacggtaacaatggaactactaccttttggagttatcttcaagaaatcaaagataggattgagggtcttgcactagttgattagaccaagaactaaagaaagcgcacatgtgacacatgcttgtcttttggtgatttgaaaccgtgtttgcttcaagatgagtggatgaacaagttcttgtgtcgaaatatgaaactgtgttgctgaacaagatgagtggttgtgaactatgaactatgcattttgtaatggtcactagtgcttaattgtgttatgaaactatacattatgttatgtactggtcactggtgcagtgggggcgtgatgcttaaatggtgctagtgaattatgtattttgtgatttatgaacactgaactggtcactgtctatgttgttgtcttgctgaaattattgaaactatgtattattgaaagtatgcaccttgctattgttgtgttattgaaagtattgaac

SEQ ID NO: 8334 - DNA, 919 bp, Zea Mays
cctagtcgtcctggtcgtccgactaatcgtcgactaggacgactagtcgtccgagttatgtgtcctggtcgtcccggctagggtttagctattgggccttttttagcccatctgcagtctaatttagagtaccctctcctcttctgttctatcctagccgccaacagctccaacctgcacgtctcctctcctctcttggcacagcccctgcagtcctgaactcctgattgccggcggctacagcaccctgcgtcccctgccccttctgcagtcctactcgcctgctgcactgctgcaatctccaaccggcggtggctgcgaaccagtgacgagatgagcacgtcatctgaagtttccttcaaaggggatggatgctacatgggagaagagcttttggaaagggaagaaaggaacttgggctcaagaattgggaacaaagcaggtgacggtaacaatggaactactaccttttggagttatcttcaagaaatcaaagataggattgagggtcttgcactagttgattagaccaagaactaaagaaagcgcacatgtgacacatgcttgtcttttggtgatttgaaaccgtgtttgcttcaagatgagtggatgaacaagttcttgtgtcgaaatatgaaactgtgttgctgaacaagatgagtggttgtgaactatgaactatgcattttgtaatggtcactagtgcttaattgtgttatgaaactatacattatgttatgtactggtcactggtgcagtgggggcgtgatgcttaaatggtgctagtgaattatgtattttgtgatttatgaacactgaactggtcactgtctatgttgttgtcttgctgaaattattgaaactatgtattattgaaagtatgcaccttgctattgttgtgttattgaaagtattgaac

SEQ ID NO: 8335 - DNA, 842 bp, Zea Mays
cttgaaatcattggttgtccttcactctgttatatggctttggtgtagttgactagtaattatttccttcaaaggggatggatgctacatgggagaagagcttttggaaagggaagaaaggaacttgggctcaagaattgggaacaaagcaggaaaaggaaaccacggaagaacaccaccaaaaattggattcctaaagagctgcgtacttcttcacagacagtacgtgaacaaccagagctagaagaggttgaagagccagaaggggtactacaaatatacagtccaaggggtactactgcatcacagccagagctttcagagccagaacaattgggtattgtactgcgagccagtcggtgcacaaatcacttcacaagtggccgatgcaacagcccagtagactccaccaacttctccaccaccgacaaggaaatgtctagttaagaatatcacccccaagaaaagaccggggattagtgctcagaagaaccagtattaactgctcagaagaaccagtttgttgttgtcaccaaacttctgttgttgctgttgtactgtcagttagtttcagtctgttgttgttgtcgccaaacttcaggattagtttctgttgtactgtaccaacttctgcacccacttttgcatccagttctgttgtattaattcagttggtgttgtcgccgaaccgaatgaactaagtttgttcctgttgtcgccagtcttctgtatgaaatcactatgtttctgtttctgttgtcgccagcctagttcattcagtttgtgttaattcagtttgtattgattcagtttgtgttgtcgccaaaccaaatgaactaagt

SEQ ID NO: 8336 - DNA, 1132 bp, Zea Mays
cctagtcgtcctggtcgtccgactaatcgtcgactaggacgactagtcgtccgagttatgtgtcctggtcgtcccggctagggtttagctattgggccttttttagcccatctgcagtctaatttagagtaccctctcctcttctgttctatcctagccgccaacagctccaacctgcacgtctcctctcctctcttggcacagcccctgcagtcctgaactcctgattgccggcggctacagcaccctgcgtcccctgccccttctgcagtcctactcgcctgctgcactgctgcaatctccaaccggcggtggctgcgaaccagtgacgagatgagcacgtcatctgaagtttccttcaaaggggatggatgctacatgggagaagagcttttggaaagggaagaaaggaacttgggctcaagaattgggaacaaagcaggaaaaggaaaccacggaagaacaccaccaaaaattggattcctaaagagctgcgtacttcttcacagacagtacgtgaacaaccagagctagaagaggttgaagagccagaaggggtactacaaatatacagtccaaggggtactactgcatcacagccagagctttcagagccagaacaattgggtattgtactgcgagccagtcggtgcacaaatcacttcacaagtggccgatgcaacagcccagtagactccaccaacttctccaccaccgacaaggaaatgtctagttaagaatatcacccccaagaaaagaccggggattagtgctcagaagaaccagtattaactgctcagaagaaccagtttgttgttgtcaccaaacttctgttgttgctgttgtactgtcagttagtttcagtctgttgttgttgtcgccaaacttcaggattagtttctgttgtactgtaccaacttctgcacccacttttgcatccagttctgttgtattaattcagttggtgttgtcgccgaaccgaatgaactaagtttgttcctgttgtcgccagtcttctgtatgaaatcactatgtttctgtttctgttgtcgccagcctagttcattcagtttgtgttaattcagtttgtattgattcagtttgtgttgtcgccaaaccaaatgaactaagt

SEQ ID NO: 8337 - DNA, 1756 bp, Zea Mays
cgtccaactaatcgcgattaatcgtgattagtcaggctggtcggcaattaggacacgatttgctggacgactcgactagaagacctagtcgtcctggtcgtccgactaatcgtcgactaggacgactagtcgtccgagttatgtgtcctggtcgtcccggctagggtttagctattgggccttttttagcccatctgcagtctaatttagagtaccctctcctcttctgttctatcctagccgccaacagctccaacctgcacgtctcctctcctctcttggcacagcccctgcagtcctgaactcctgattgccggcggctacagcaccctgcgtcccctgccccttctgcagtcctactcgcctgctgcactgctgcaatctccaaccggcggtggctgcgaaccagtgacgagatgagcacgtcatctgaaggtccctcctgctcccccacttctccccctaaaccctaaataaccctataccctaaacaatgaagcaacatgttactttgtttatcctagttgtttgttctaatttatataatgtatacatgtatatttatatatatacctatataagtataactactagtctaggacgaccagggaccgactaggggtcgactagtcgccctagtcgtcacctaatcacgactagtcgcctggtcggtcccagggttcgaccaggcgactaggcgacttgaaatcattggttgtccttcactctgttatatggctttggtgtagttgactagtaattagtaagctttagggttaaatacttcagtctctaagttcgtgggctactagagatagattatgatgtcatattgccatgctcatgcatgcactagtgcgtgctaatttgttatcttgcctctgaatattgtttcctattaattcccaacaactgataacctgttcatttacttatcttcctgtcatagactactgaatttggaattgccatgtagtttccttcaaaggggatggatgctacatgggagaagagcttttggaaagggaagaaaggaacttgggctcaagaattgggaacaaagcaggaaaaggaaaccacggaagaacaccaccaaaaattggattcctaaagagctgcgtacttcttcacagacagtacgtgaacaaccagagctagaagaggttgaagagccagaaggggtactacaaatatacagtccaaggggtactactgcatcacagccagagctttcagagccagaacaattgggtattgtactgcgagccagtcggtgcacaaatcacttcacaagtggccgatgcaacagcccagtagactccaccaacttctccaccaccgacaaggaaatgtctagttaagaatatcacccccaagaaaagaccggggattagtgctcagaagaaccagtattaactgctcagaagaaccagtttgttgttgtcaccaaacttctgttgttgctgttgtactgtcagttagtttcagtctgttgttgttgtcgccaaacttcaggattagtttctgttgtactgtaccaacttctgcacccacttttgcatccagttctgttgtattaattcagttggtgttgtcgccgaaccgaatgaactaagtttgttcctgttgtcgccagtcttctgtatgaaatcactatgtttctgtttctgttgtcgccagcctagttcattcagtttgtgttaattcagtttgtattgattcagtttgtgttgtcgccaaaccaaatgaactaagt

SEQ ID NO: 8338 - DNA, 1052 bp, Zea Mays
aagaagaccatggtggtgccgttgttcagctgctgcggtaacccggcggcctgagggttctgccccgtcgacttcacgctgttgcatgtattcaaatggtcagtgtcacagctactacaaggtagtattatattaggaactgctagcgacccaagagtacatacatactactacaattgtgctcataatacagtacatataactaagacatgcaagcatgttattgtttgtgctcatatagtcatactacactgtgtctgtatttgacctgctgtgggccgtgccaactctgcctggcccaaaggaccgaacaagcagcatccttgtcctgctcctggaccacgttgtgaaagcccaaacggccgaacagcagcatccttgactccttgtcctgctatgaccacgtggacagcttgctagccgttgtttctcactagccgttggtaacttacctcctcgaaatgcgtgactaacccaacccccacctgtcactactagtcacacaacaattactcctgcagtacgttctgacagcagaatggtgtgcaacttgctaatattatcttttatcagtcatttctaactactgtattatactgataatggtacgtactaatgaaggatgaaagtgcgtgtggtggtactacctggtgggcacggcggggcagaaggtgaacgtcgccgaccgcgcgccgcgcagctgcaggaccagcaagagcgccgcgaatgcccggcgccaagaaggcacggctgccgtcgccgccatttcgcttgtggaatgctgatgcgtgcttgcagctggagaccctggcagcagcgtgcttgggaaatccagccgatggatggatgacggtgctaggatggatgacggtgctaacagccaatccatggatggggtatttataatgtaactagccggtggaggatggcgacaattgaagcgcaggtgaagcaggggaggaggagctggctgcgaagcggagcagagctggagtctggagaggtgcatcggtgcgttgtgtcttacgtggacgcggacttttgtctttgac

SEQ ID NO: 8339 - DNA, 639 bp, Zea Mays
ctaggatcaagtctcacacatatgatgactcatggtacataaattaatgtcacatctttattgcataatagaggttctatacaaaatagctaaataaatacatcatatcatgacaacaatcctccgtaaccatagttaactaggagacgacagcctagacctctccgaactcatcgtaacatccttcatgctcctcatcttgcagtacttgttcttgatcggtaacgatgttgacatgttgtggtcgagccgattcacgacatgacacagcgcggctccgccgtgtaggggatactccggtgatgaattccttgtatccgatacatcctttcccctgccaagacctcacatacgttatacgtggcctatctaacctcctggagtgtttgcaaggggatagaactttgcaattgatgtggttccacggctgtggctcaatttgctcaatcccactcgcatcggaggtgctttgccttccccgcctctctatgcccacactctcgatccggatgggatgaggggtcacgaggttcctacttatactggttggcagacacgtttgttgagcgcagactctagatcagatgtgatgagatcgcccgagctcttggcaaacgtgggtgtagatttccattttgg

SEQ ID NO: 8340 - DNA, 3845 bp, Zea Mays
cacaaccgcagccgtcaaatgcccagtcatctgtctctgactctgttcccgttccccccttcaaagcgccgcgcacggggcacaccaagaaacaagcagcagcagcctactcaatgctcaaggcagcatactgcagctccctccaatgtcttgggccgccgcattcttgatccttgtcaccatcgccttctccgttacgccggcgccgtccgaaggcgctagtgaagcggccgtcctgcgcgccttcatcgcgtccctgccgccagcttcccggcgcgtcctccgcctgtcgtggagggcgacgaacgccaccaccagtggcggcaggtcgagccactgcgcgttcctgggcgtccagtgcaccgccacgggcgcggttgcggcagttaacctctccggagcggggttgtccggctcgctcacggcgtccgcgcctcggctctgcgctctaccggcgctcgccgtgctcgacctcagccggaaccgcttcacgggccccgtccccgccgccctcacggcgtgctccgtggtttctgcgctactactcagcggaaatctcctcaccggtgctgttcccccggagctcctctcctcgcgccagctccggaaggtcgacctcagctacaacacgctcgccggtgagatctccggctcgggctcgccggtcatcgagtacctcgacctcagcgtcaacatgctctccgggacaattccgccggatctcgccgcgctcccgtcgctcagctacttggacctgagcagcaacaatatgtctggaccattgccggagtttcctgcacggtgcaggatcgtctacctcagcctcttctacaaccagctctccggcgcgattccccggagcctcgccaactgcggcaacctcaccaccttgtacctgtcctacaatggcatcggcggaaaggtgccagattttttctcatccatgccgaacctgcagattctttaccttgacgacaacaagttcgtcggggagctgccagagagcatcggtaaggctctgagtctacaacaactggtggtgtccagtaacgggtttactggcactgtgccagatgcaattgggaagtgtcagtcactgaaaatgctctacttggatcgcaacaatttcaatggctcaattccggtgttcgtcagcaatattagcagcctaaagaagttctctatggctcacaataacatttctggaagaattccacctgaaattgggaagtgccaggagttggttgagctacagctccagaacaacagcctgtccggcacaataccaccggagatttgcatgcttagccagctgcagatatttttcctctacaataatagccttagcggcgagctacccgcagagatcactcaaatgaggaacctaagcgagatctccctgttcggcaataacttaactggagtgttgccgcaggccctggggttgaacacaacacctggactttttcaggtcgacctcactggcaaccacttccacggggaaattccacctggtctttgtactggaggtcaactcagcgttcttgatcttggatacaacaagttcaatggaagcttacctattggaattgttcaatgtgagtctctccggaggttaattctgaagaacaatgtcatcagtgggaccatacatggacatcagtggcaatctgctccatggtgtgatacctgctgtccttggttcatggcgcaatctaacaatgcttgatgtctccaataacctcttctctggaccaataccacgtgagctcggtgctttaacaaagctcgagactctgcgcatgtcgtcaaacaggcttaaaggtcgtataccacatgagttaggaaactgtacacatcttctccatttggatcttgggaagaatctcctcaacggaagtatacctgcagaaatcacgtcatttggtcgcctgcaaagccttctactcagcgcaaacaacctcacgggaacaataccggacacattcactgcagcacaggatttaattgagctgcagcttggtgacaatcgtttggaaggagcagttcctcgcagcctagggaaccttcagtacctgtccaaagctctcaacattagccacaacagattgagcggccaaatcccaagtagccttggcaacctagaagatctggagctgcttgacttgtcagtgaattctttgtccggcccaatcccaccacagctgagcaacatggtctcacttttggttgtgaacatttcgttcaacgaactatctggtcagctccctggaagctgggctaagcttgcagcaaagtcgcctgacggtttcgtgggcaatcctcagctatgcatagagtcggcttgtgctgatcactccaacagtcaacctgctgggaaactacgctacagcaagacaagagttgttgtggcattgctagtgtctactcttgctgccatggttgctggtgcgtgtgctgcttactacattgtgaagaggtcacatcacttgtcagcaagtcgtgcctctgtccgtagcctggacacaacagaggaattgcctgaagacctgacctacgaagacatccttcgggcgacagacaactggagtgagaaatacgtcattggaagaggccggcatggtacggtctaccggacagaatgcaaacttggcaaagactgggcagtcaagacggtcgacctgtcccagtgcaaattccccatcgaaatgaagattctgaacacagtgaagcaccggaacatcgtcaggatggacggctactgcatccgtggcagcgtcggcctaatcctgtacgagtacatgcccgagggaacgctcttcgaactgttgcacgaaaggaagcctcgagtgcgtcttgactgcatggcgcggtgccagattgcacttggtgtcgcacaagccctgtcctacttgcaccatgactctgtgcctatgattgttcatagggatgttaagtcaagcaacatactgatggatgcagagtttgtacccaaactcacagactttggcatggggaagattgtcgccgatgagaacgccgatgcaacagtgtctgccatcattggcacccttggctacattgctccagagcatggatacgctacaagattaaccgagaagagtgatgtctacagctatggagtagtgctacttgagctcctatgcaggaagacgcctgtggactcatcgttcggagatggtattgacattgtgacatggatgagaactaacctggagcatggagatcgccgcagcatcataagcctcatggatgaggagatgacgtgttggtctcaagatgagcaagaaaaggctctgagcttgctggaccttggggtttcatgcacgcaggtggcttgccagtctaggccttccatgagggaggtagtgaatatgttgttgaagatagaaaagtatagtgtctagagaagtgtctagcagtgttatgacatggagttgtatggttcggaaggtttggccagccttcacaaagtgcccccaaaaataatggtcaccagtcactcagagaagtttttgcagtattccactctgcaacaattgctgatgggaattgggtctcagtgttggaactgtatgtcaggtgggcccaacactcagtggataagtaagatcaggcgcacaggaagacactgagcggggaactgtagagctttattatgcgtgacccgtttgtatacaggttagtggtatttataggtaaccaaaaaggataatgggcctctaagtacagttatacccctagttacctgttacgttctcagaatatttctctcgacggggtcattacagtgatcagagtaatctggacgtactataaaatct

SEQ ID NO: 8341 - DNA, 1719 bp, Zea Mays
gcgggcgggagaggaagaaaagcgaagctgctgcgccctcccctcccccatctgcgccctccgctccccccatcccggtcatggtatggagccgtcccgtggcgccgctggcggcgcgcggcggtggggggaggcggagaccgagggcgatgcggcggaggaagggagacgagcggaggacggcggcgaggtgagcctacgggagtggctggaccgaccaggccgggcggtggaggcggcggagtgcttgcacgtgttcaggcaggtggcggaggcggtggccgtcgcgcacgcaccgggggtggtcgtgggcagcgcgcggccgtcgtgcttcgtcgtgtcgccgcccttcgcgcgcgtcgccttcatcgagtccgccttcggctccgatgcctcgggttcgtgctcgggctccgacgccgacccagatgcctcgcctccgcggcgaggggacggcgccggacgcggcgaggagcgcgcggggaagtccttcccgctcaagagcgtgctggccatggagctcaactggtacaccagtcccgaggaggcggacgacagcgccgctaccttcgcctctgatgtctatagactgggtgtgctcttgttcgagctgttctgcacattcgaaacgatggaggacaagatgcgggcaatggcgaccgcgaatctgaggcaccgggtgttgccgccacagttgctgctcaaatggcccaaggaagcatctttctgccagttgctaatgcaccctgtgccagaaaccagaccgaagatgaggtttgggatgttactaggagtcaagtttttgttgagatgagggagcatgagtgacgtgtgtggtcggtggacttctcaattgtggacccaacaaaattggtcagtgggagtgatgatggatctgtgaagctatgggatatgaatcaggctgggagtattggcactattaaaacaagggaaaatgtgtgttctgtgcaatttcaacctgatactgctcgctccattgccatcggctctgctgaccacaaaatttactgctatgatctacgtcacatacgagctccttattgtacactagttgggcacacaaagactgtaagctatgttaagtatctggatgcatcgacaatagtatctgcatctactgacaactcattgaagctttgggacttatcgatgagtccaggaaggataattgacagtccagttcaaacatttaaggggcatacaaatacaaaggtcactggagttgacgaagctaaagctgaacttgaggaaattgttcactacctacgagatcctaaggccgcacttgaagaaatcttatatcagtttgaggaaaaactccaagctgaaagagaggaagctgctaggaagcaggaagagttgcaagcacaagtacaagctcaacaggccgcatttgaagaaaaccaaagtttgctgcgccaggccaagcacaactaccttgctagaacatatctgtggttagaactttgtcagaactacgtgcaatctgtttgaatgcttcaaacctttgtggtggaacctttgtatgtttgaacctctgttgtggaagaactagtgtgctggaattgtgtatgacttgtgatgagtatgttgtgtatgatggcttttctgtgtattatgattctgtgagctatcatgagagctcagtgtgtcgtcactgtatggtcactgtatgtgggtgccataagtgacgatccc

SEQ ID NO: 8342 - DNA, 1981 bp, Zea Mays
gcgggcgggagaggaagaaaagcgaagctgctgcgccctcccctcccccatctgcgccctccgctccccccatcccggtcatggtatggagccgtcccgtggcgccgctggcggcgcgcggcggtggggggaggcggagaccgagggcgatgcggcggaggaagggagacgagcggaggacggcggcgaggtgagcctacgggagtggctggaccgaccaggccgggcggtggaggcggcggagtgcttgcacgtgttcaggcaggtggcggaggcggtggccgtcgcgcacgcaccgggggtggtcgtgggcagcgcgcggccgtcgtgcttcgtcgtgtcgccgcccttcgcgcgcgtcgccttcatcgagtccgccttcggctccgatgcctcgggttcgtgctcgggctccgacgccgacccagatgcctcgcctccgcggcgaggggacggcgccggacgcggcgaggagcgcgcggggaagtccttcccgctcaagagcgtgctggccatggagctcaactggtacaccagtcccgaggaggcggacgacagcgccgctaccttcgcctctgatgtctatagactgggtgtgctcttgttcgagctgttctgcacattcgaaacgatggaggacaagatgcgggcaatggcgaccgcgaatctgaggcaccgggtgttgccgccacagttgctgctcaaatggcccaaggaagcatctttctgccagttgctaatgcaccctgtgccagaaaccagaccgaagatgagttatatgaagagccatatagcatctagagattttgagggtatagtgcaggtttgggatgttactaggagtcaagtttttgttgagatgagggagcatgagtgacgtgtgtggtcggtggacttctcaattgtggacccaacaaaattggtcagtgggagtgatgatggatctgtgaagctatgggatatgaatcaggctgggagtattggcactattaaaacaagggaaaatgtgtgttctgtgcaatttcaacctgatactgctcgctccattgccatcggctctgctgaccacaaaatttactgctatgatctacgtcacatacgagctccttattgtacactagttgggcacacaaagactgtaagctatgttaagtatctggatgcatcgacaatagtatctgcatctactgacaactcattgaagctttgggacttatcgatgagtccaggaaggataattgacagtccagttcaaacatttaaggggcatacaaatacaaaggttggataaaacttccacatgtacttgttctcttttcataatattcgtctacaagtggttagtgtctggttttatcttttttaagtgtaactagtagaatgtctgatgaaaagaatatggtagtttaattttgaaagttgtactgttgcaatgaaacactagggtacggttggttacttcacttgctttgctcaccttgtctcgtccagcaaggtcactggagttgacgaagctaaagctgaacttgaggaaattgttcactacctacgagatcctaaggccgcacttgaagaaatcttatatcagtttgaggaaaaactccaagctgaaagagaggaagctgctaggaagcaggaagagttgcaagcacaagtacaagctcaacaggccgcatttgaagaaaaccaaagtttgctgcgccaggccaagcacaactaccttgctagaacatatctgtggttagaactttgtcagaactacgtgcaatctgtttgaatgcttcaaacctttgtggtggaacctttgtatgtttgaacctctgttgtggaagaactagtgtgctggaattgtgtatgacttgtgatgagtatgttgtgtatgatggcttttctgtgtattatgattctgtgagctatcatgagagctcagtgtgtcgtcactgtatggtcactgtatgtgggtgccataagtgacgatccc

SEQ ID NO: 8343 - DNA, 1746 bp, Zea Mays
gcgggcgggagaggaagaaaagcgaagctgctgcgccctcccctcccccatctgcgccctccgctccccccatcccggtcatggtatggagccgtcccgtggcgccgctggcggcgcgcggcggtggggggaggcggagaccgagggcgatgcggcggaggaagggagacgagcggaggacggcggcgaggtgagcctacgggagtggctggaccgaccaggccgggcggtggaggcggcggagtgcttgcacgtgttcaggcaggtggcggaggcggtggccgtcgcgcacgcaccgggggtggtcgtgggcagcgcgcggccgtcgtgcttcgtcgtgtcgccgcccttcgcgcgcgtcgccttcatcgagtccgccttcggctccgatgcctcgggttcgtgctcgggctccgacgccgacccagatgcctcgcctccgcggcgaggggacggcgccggacgcggcgaggagcgcgcggggaagtccttcccgctcaagagcgtgctggccatggagctcaactggtacaccagtcccgaggaggcggacgacagcgccgctaccttcgcctctgatgtctatagactgggtgtgctcttgttcgagctgttctgcacattcgaaacgatggaggacaagatgcgggcaatggcgaccgcgaatctgaggcaccgggtgttgccgccacagttgctgctcaaatggcccaaggaagcatctttctgccagttgctaatgcaccctgtgccagaaaccagaccgaagatgaggtttgggatgttactaggagtcaagtttttgttgagatgagggagcatgagtgacgtgtgtggtcggtggacttctcaattgtggacccaacaaaattggtcagtgggagtgatgatggatctgtgaagctatgggatatgaatcaggcaattttattcttgcacctattgctgggagtattggcactattaaaacaagggaaaatgtgtgttctgtgcaatttcaacctgatactgctcgctccattgccatcggctctgctgaccacaaaatttactgctatgatctacgtcacatacgagctccttattgtacactagttgggcacacaaagactgtaagctatgttaagtatctggatgcatcgacaatagtatctgcatctactgacaactcattgaagctttgggacttatcgatgagtccaggaaggataattgacagtccagttcaaacatttaaggggcatacaaatacaaagcaaggtcactggagttgacgaagctaaagctgaacttgaggaaattgttcactacctacgagatcctaaggccgcacttgaagaaatcttatatcagtttgaggaaaaactccaagctgaaagagaggaagctgctaggaagcaggaagagttgcaagcacaagtacaagctcaacaggccgcatttgaagaaaaccaaagtttgctgcgccaggccaagcacaactaccttgctagaacatatctgtggttagaactttgtcagaactacgtgcaatctgtttgaatgcttcaaacctttgtggtggaacctttgtatgtttgaacctctgttgtggaagaactagtgtgctggaattgtgtatgacttgtgatgagtatgttgtgtatgatggcttttctgtgtattatgattctgtgagctatcatgagagctcagtgtgtcgtcactgtatggtcactgtatgtgggtgccataagtgacgatccc

SEQ ID NO: 8344 - DNA, 2425 bp, Zea Mays
gcgggcgggagaggaagaaaagcgaagctgctgcgccctcccctcccccatctgcgccctccgctccccccatcccggtcatggtatggagccgtcccgtggcgccgctggcggcgcgcggcggtggggggaggcggagaccgagggcgatgcggcggaggaagggagacgagcggaggacggcggcgaggtgagcctacgggagtggctggaccgaccaggccgggcggtggaggcggcggagtgcttgcacgtgttcaggcaggtggcggaggcggtggccgtcgcgcacgcaccgggggtggtcgtgggcagcgcgcggccgtcgtgcttcgtcgtgtcgccgcccttcgcgcgcgtcgccttcatcgagtccgccttcggctccgatgcctcgggttcgtgctcgggctccgacgccgacccagatgcctcgcctccgcggcgaggggacggcgccggacgcggcgaggagcgcgcggggaagtccttcccgctcaagagcgtgctggccatggagctcaactggtacaccagtcccgaggaggcggacgacagcgccgctaccttcgcctctgatgtctatagactgggtgtgctcttgttcgagctgttctgcacattcgaaacgatggaggacaagatgcgggcaatggcgaccgcgaatctgaggcaccgggtgttgccgccacagttgctgctcaaatggcccaaggaagcatctttctgccagttgctaatgcaccctgtgccagaaaccagaccgaagatgaggtgcgtcgtgtgctgtgtactatttttgtttctgccagttgctaatgcgtctcctcaaagctgggaactgatttgtttgttagtatatgtgttgtggtcgtacactccataagacagaacgtggattgacagacacgagcatgcagttgtttgaagatcaagctagcctgggaaattggctgaatcttgcagataggaaaaccaatattcatggggcagtaagaaacactagaattaaaacaaacacttagtatgctccgtagggtttgaccgagatagagagtttttttgcaactgctggtgtaaataagaagataaaagtgtttgagtataatatgattgtaaatgaacaccgtgatattcactatcctgtggtagagatgtctaatagatcaaaactgagttgtatttcctggaacagttatatgaagagccatatagcatctagagattttgagggtatagtgcaggtttgggatgttactaggagtcaagtttttgttgagatgagggagcatgagtgacgtgtgtggtcggtggacttctcaattgtggacccaacaaaattggtcagtgggagtgatgatggatctgtgaagctatgggatatgaatcaggcaattttattcttgcacctattgctgggagtattggcactattaaaacaagggaaaatgtgtgttctgtgcaatttcaacctgatactgctcgctccattgccatcggctctgctgaccacaaaatttactgctatgatctacgtcacatacgagctccttattgtacactagttgggcacacaaagactgtaagctatgttaagtatctggatgcatcgacaatagtatctgcatctactgacaactcattgaagctttgggacttatcgatgagtccaggaaggataattgacagtccagttcaaacatttaaggggcatacaaatacaaaggttggataaaacttccacatgtacttgttctcttttcataatattcgtctacaagtggttagtgtctggttttatcttttttaagtgtaactagtagaatgtctgatgaaaagaatatggtagtttaattttgaaagttgtactgttgcaatgaaacactagggtacggttggttacttcacttgctttgctcaccttgtctcgtccagcaaggtcactggagttgacgaagctaaagctgaacttgaggaaattgttcactacctacgagatcctaaggccgcacttgaagaaatcttatatcagtttgaggaaaaactccaagctgaaagagaggaagctgctaggaagcaggaagagttgcaagcacaagtacaagctcaacaggccgcatttgaagaaaaccaaagtttgctgcgccaggccaagcacaactaccttgctagaacatatctgtggttagaactttgtcagaactacgtgcaatctgtttgaatgcttcaaacctttgtggtggaacctttgtatgtttgaacctctgttgtggaagaactagtgtgctggaattgtgtatgacttgtgatgagtatgttgtgtatgatggcttttctgtgtattatgattctgtgagctatcatgagagctcagtgtgtcgtcactgtatggtcactgtatgtgggtgccataagtgacgatccc

SEQ ID NO: 8345 - DNA, 2127 bp, Zea Mays
gcgggcgggagaggaagaaaagcgaagctgctgcgccctcccctcccccatctgcgccctccgctccccccatcccggtcatggtatggagccgtcccgtggcgccgctggcggcgcgcggcggtggggggaggcggagaccgagggcgatgcggcggaggaagggagacgagcggaggacggcggcgaggtgagcctacgggagtggctggaccgaccaggccgggcggtggaggcggcggagtgcttgcacgtgttcaggcaggtggcggaggcggtggccgtcgcgcacgcaccgggggtggtcgtgggcagcgcgcggccgtcgtgcttcgtcgtgtcgccgcccttcgcgcgcgtcgccttcatcgagtccgccttcggctccgatgcctcgggttcgtgctcgggctccgacgccgacccagatgcctcgcctccgcggcgaggggacggcgccggacgcggcgaggagcgcgcggggaagtccttcccgctcaagagcgtgctggccatggagctcaactggtacaccagtcccgaggaggcggacgacagcgccgctaccttcgcctctgatgtctatagactgggtgtgctcttgttcgagctgttctgcacattcgaaacgatggaggacaagatgcgggcaatggcgaccgcgaatctgaggcaccgggtgttgccgccacagttgctgctcaaatggcccaaggaagcatctttctgccagttgctaatgcaccctgtgccagaaaccagaccgaagatgagacagaacgtggattgacagacacgagcatgcagttgtttgaagatcaagctagcctgggaaattggctgaatcttgcagataggaaaaccaatattcatggggcagtaagaaacactagaattaaaacaaacacttagtatgctccgtagggtttgaccgagatagagagtttttttgcaactgctggtgtaaataagaagataaaagtgtttgagtataatatgattgtaaatgaacaccgtgatattcactatcctgtggtagagatgtctaatagatcaaaactgagttgtatttcctggaacagttatatgaagagccatatagcatctagagattttgagggtatagtgcaggtttgggatgttactaggagtcaagtttttgttgagatgagggagcatgagtgacgtgtgtggtcggtggacttctcaattgtggacccaacaaaattggtcagtgggagtgatgatggatctgtgaagctatgggatatgaatcaggctgggagtattggcactattaaaacaagggaaaatgtgtgttctgtgcaatttcaacctgatactgctcgctccattgccatcggctctgctgaccacaaaatttactgctatgatctacgtcacatacgagctccttattgtacactagttgggcacacaaagactgtaagctatgttaagtatctggatgcatcgacaatagtatctgcatctactgacaactcattgaagctttgggacttatcgatgagtccaggaaggataattgacagtccagttcaaacatttaaggggcatacaaatacaaagggtacggttggttacttcacttgctttgctcaccttgtctcgtccagcaaggtcactggagttgacgaagctaaagctgaacttgaggaaattgttcactacctacgagatcctaaggccgcacttgaagaaatcttatatcagtttgaggaaaaactccaagctgaaagagaggaagctgctaggaagcaggaagagttgcaagcacaagtacaagctcaacaggccgcatttgaagaaaaccaaagtttgctgcgccaggccaagcacaactaccttgctagaacatatctgtggttagaactttgtcagaactacgtgcaatctgtttgaatgcttcaaacctttgtggtggaacctttgtatgtttgaacctctgttgtggaagaactagtgtgctggaattgtgtatgacttgtgatgagtatgttgtgtatgatggcttttctgtgtattatgattctgtgagctatcatgagagctcagtgtgtcgtcactgtatggtcactgtatgtgggtgccataagtgacgatccc

SEQ ID NO: 8346 - DNA, 1815 bp, Zea Mays
caaaattcccctaacggacggacgggctgaggcaagggcgcctgcgggcgggagaggaagaaaagcgaagctgctgcgccctcccctcccccatctgcgccctccgctccccccatcccggtcatggtatggagccgtcccgtggcgccgctggcggcgcgcggcggtggggggaggcggagaccgagggcgatgcggcggaggaagggagacgagcggaggacggcggcgaggtgagcctacgggagtggctggaccgaccaggccgggcggtggaggcggcggagtgcttgcacgtgttcaggcaggtggcggaggcggtggccgtcgcgcacgcaccgggggtggtcgtgggcagcgcgcggccgtcgtgcttcgtcgtgtcgccgcccttcgcgcgcgtcgccttcatcgagtccgccttcggctccgatgcctcgggttcgtgctcgggctccgacgccgacccagatgcctcgcctccgcggcgaggggacggcgccggacgcggcgaggagcgcgcggggaagtccttcccgctcaagagcgtgctggccatggagctcaactggtacaccagtcccgaggaggcggacgacagcgccgctaccttcgcctctgatgtctatagactgggtgtgctcttgttcgagctgttctgcacattcgaaacgatggaggacaagatgcgggcaatggcgaccgcgaatctgaggcaccgggtgttgccgccacagttgctgctcaaatggcccaaggaagcatctttctgccagttgctaatgcaccctgtgccagaaaccagaccgaagatgagttatatgaagagccatatagcatctagagattttgagggtatagtgcaggtttgggatgttactaggagtcaagtttttgttgagatgagggagcatgagtgacgtgtgtggtcggtggacttctcaattgtggacccaacaaaattggtcagtgggagtgatgatggatctgtgaagctatgggatatgaatcaggctgggagtattggcactattaaaacaagggaaaatgtgtgttctgtgcaatttcaacctgatactgctcgctccattgccatcggctctgctgaccacaaaatttactgctatgatctacgtcacatacgagctccttattgtacactagttgggcacacaaagactgtaagctatgttaagtatctggatgcatcgacaatagtatctgcatctactgacaactcattgaagctttgggacttatcgatgagtccaggaaggataattgacagtccagttcaaacatttaaggggcatacaaatacaaagcaaggtcactggagttgacgaagctaaagctgaacttgaggaaattgttcactacctacgagatcctaaggccgcacttgaagaaatcttatatcagtttgaggaaaaactccaagctgaaagagaggaagctgctaggaagcaggaagagttgcaagcacaagtacaagctcaacaggccgcatttgaagaaaaccaaagtttgctgcgccaggccaagcacaactaccttgctagaacatatctgtggttagaactttgtcagaactacgtgcaatctgtttgaatgcttcaaacctttgtggtggaacctttgtatgtttgaacctctgttgtggaagaactagtgtgctggaattgtgtatgacttgtgatgagtatgttgtgtatgatggcttttctgtgtattatgattctgtgagctatcatgagagctcagtgtgtcgtcactgtatggtcactgtatgtgggtgccataagtgacgatccc

SEQ ID NO: 8347 - DNA, 1766 bp, Zea Mays
caaaattcccctaacggacggacgggctgaggcaagggcgcctgcgggcgggagaggaagaaaagcgaagctgctgcgccctcccctcccccatctgcgccctccgctccccccatcccggtcatggtatggagccgtcccgtggcgccgctggcggcgcgcggcggtggggggaggcggagaccgagggcgatgcggcggaggaagggagacgagcggaggacggcggcgaggtgagcctacgggagtggctggaccgaccaggccgggcggtggaggcggcggagtgcttgcacgtgttcaggcaggtggcggaggcggtggccgtcgcgcacgcaccgggggtggtcgtgggcagcgcgcggccgtcgtgcttcgtcgtgtcgccgcccttcgcgcgcgtcgccttcatcgagtccgccttcggctccgatgcctcgggttcgtgctcgggctccgacgccgacccagatgcctcgcctccgcggcgaggggacggcgccggacgcggcgaggagcgcgcggggaagtccttcccgctcaagagcgtgctggccatggagctcaactggtacaccagtcccgaggaggcggacgacagcgccgctaccttcgcctctgatgtctatagactgggtgtgctcttgttcgagctgttctgcacattcgaaacgatggaggacaagatgcgggcaatggcgaccgcgaatctgaggcaccgggtgttgccgccacagttgctgctcaaatggcccaaggaagcatctttctgccagttgctaatgcaccctgtgccagaaaccagaccgaagatgaggtttgggatgttactaggagtcaagtttttgttgagatgagggagcatgagtgacgtgtgtggtcggtggacttctcaattgtggacccaacaaaattggtcagtgggagtgatgatggatctgtgaagctatgggatatgaatcaggctgggagtattggcactattaaaacaagggaaaatgtgtgttctgtgcaatttcaacctgatactgctcgctccattgccatcggctctgctgaccacaaaatttactgctatgatctacgtcacatacgagctccttattgtacactagttgggcacacaaagactgtaagctatgttaagtatctggatgcatcgacaatagtatctgcatctactgacaactcattgaagctttgggacttatcgatgagtccaggaaggataattgacagtccagttcaaacatttaaggggcatacaaatacaaagcaaggtcactggagttgacgaagctaaagctgaacttgaggaaattgttcactacctacgagatcctaaggccgcacttgaagaaatcttatatcagtttgaggaaaaactccaagctgaaagagaggaagctgctaggaagcaggaagagttgcaagcacaagtacaagctcaacaggccgcatttgaagaaaaccaaagtttgctgcgccaggccaagcacaactaccttgctagaacatatctgtggttagaactttgtcagaactacgtgcaatctgtttgaatgcttcaaacctttgtggtggaacctttgtatgtttgaacctctgttgtggaagaactagtgtgctggaattgtgtatgacttgtgatgagtatgttgtgtatgatggcttttctgtgtattatgattctgtgagctatcatgagagctcagtgtgtcgtcactgtatggtcactgtatgtgggtgccataagtgacgatccc

SEQ ID NO: 8348 - DNA, 2160 bp, Zea Mays
gatgaccaaaattcccctaacggacggacgggctgaggcaagggcgcctgcgggcgggagaggaagaaaagcgaagctgctgcgccctcccctcccccatctgcgccctccgctccccccatcccggtcatggtatggagccgtcccgtggcgccgctggcggcgcgcggcggtggggggaggcggagaccgagggcgatgcggcggaggaagggagacgagcggaggacggcggcgaggtgagcctacgggagtggctggaccgaccaggccgggcggtggaggcggcggagtgcttgcacgtgttcaggcaggtggcggaggcggtggccgtcgcgcacgcaccgggggtggtcgtgggcagcgcgcggccgtcgtgcttcgtcgtgtcgccgcccttcgcgcgcgtcgccttcatcgagtccgccttcggctccgatgcctcgggttcgtgctcgggctccgacgccgacccagatgcctcgcctccgcggcgaggggacggcgccggacgcggcgaggagcgcgcggggaagtccttcccgctcaagagcgtgctggccatggagctcaactggtacaccagtcccgaggaggcggacgacagcgccgctaccttcgcctctgatgtctatagactgggtgtgctcttgttcgagctgttctgcacattcgaaacgatggaggacaagatgcgggcaatggcgaccgcgaatctgaggcaccgggtgttgccgccacagttgctgctcaaatggcccaaggaagcatctttctgccagttgctaatgcaccctgtgccagaaaccagaccgaagatgaggtgcgtcgtgtgctgtgtactatttttgtttctgccagttgctaatgcgtctcctcaaagctgggaactgatttgtttgttagtatatgtgttgtggtcgtacactccataagacagaacgtggattgacagacacgagcatgcagttgtttgaagatcaagctagcctgggaaattggctgaatcttgcagataggaaaaccaatattcatggggcagtaagaaacactagaattaaaacaaacacttagtatgctccgtagggtttgaccgagatagagagtttttttgcaactgctggtgtaaataagaagataaaagtgtttgagtataatatgattgtaaatgaacaccgtgatattcactatcctgtggtagagatgtctaatagatcaaaactgagttgtatttcctggaacagttatatgaagagccatatagcatctagagattttgagggtatagtgcaggtttgggatgttactaggagtcaagtttttgttgagatgagggagcatgagtgacgtgtgtggtcggtggacttctcaattgtggacccaacaaaattggtcagtgggagtgatgatggatctgtgaagctatgggatatgaatcaggctgggagtattggcactattaaaacaagggaaaatgtgtgttctgtgcaatttcaacctgatactgctcgctccattgccatcggctctgctgaccacaaaatttactgctatgatctacgtcacatacgagctccttattgtacactagttgggcacacaaagactgtaagctatgaaggataattgacagtccagttcaaacatttaaggggcatacaaatacaaagcaaggtcactggagttgacgaagctaaagctgaacttgaggaaattgttcactacctacgagatcctaaggccgcacttgaagaaatcttatatcagtttgaggaaaaactccaagctgaaagagaggaagctgctaggaagcaggaagagttgcaagcacaagtacaagctcaacaggccgcatttgaagaaaaccaaagtttgctgcgccaggccaagcacaactaccttgctagaacatatctgtggttagaactttgtcagaactacgtgcaatctgtttgaatgcttcaaacctttgtggtggaacctttgtatgtttgaacctctgttgtggaagaactagtgtgctggaattgtgtatgacttgtgatgagtatgttgtgtatgatggcttttctgtgtattatgattctgtgagctatcatgagagctcagtgtgtcgtcactgtatggtcactgtatgtgggtgccataagtgacgatccc

SEQ ID NO: 8349 - DNA, 325 bp, Zea Mays
gcagccagcagatgcaacaaacaacccaagtctggttttttttttacccctggtgcagggctctctgggctcgagtgtagtcatctcctctgcacgctgtttcaacacaatgatcatggcatcagccttttacaagtttgggtaccagtcgtgtaaactgagtggtcctggtgcatgcaaacaacctacagccaccgccgctgctagcggcggcaacggtgtccatgccctagcgacaatcacgcgcaggaactgacgtacgtgtcttgcgttgagtgattgttgacgtatgcaacgcaactacatatatgccatgcatgctgag

SEQ ID NO: 8350 - DNA, 2512 bp, Zea Mays
agactggactggactacatggagacctgaaccaattcttcttaattgcttgagtcctatttctaacaaaaacttggacttacctgatggaggcatatcagtagcggccacacaatcagcaattaaatgtgcatgtaaatcatttgagtcaactgttgattcactgctgcctcaagctcatacagatgaggttttgtttcccctcttgtccgggcaagtggaattattgcttactttggcccgaatattgtttcatcaagcaaagaacaagaaatcaagccatctctgtccagatattgtacttctaatgaaaacttcaggtgccagcacttgtttgtttgttgatctcatgccatctgctcatgctcttaagcaaccagtgaagacacttcttgttctgcttttgtcgtcatatgagttcatgtacagcaaggttgacataaaagacctaccaaatgatattaacatttttggcgaattagcccttttaagtgtgagcttgctacctatactgtgcaaattggcagagaatagggaatgctctgatcttgctgttgcatcaatggacctaatattgaagggatctgtaccttctaatttatggatgcctattctgcaaaagcattttcatctccagactatactgcataaatgccagaatggtgatttattatctactcaagttatacttaatttcctcttgaccttggggcgaacaaaggatggtgctaaagttcttcagtctgccaatatttttgcattcttaaagttacttttgagtcagttgtctctggatgactcctgtttgagaaattccttgagcgcccaagtgaaggatgtgaacctatggggcttgggtctcggtattgttgcgtccctgaaccattgtttggatgatgacatttctcataacaatgtcgtgagcaacactatcagcttcctttcaggacatgtgcctttggtgtcatcatatctgtctacacagagtgctactactcatcagagcaagaaacgggcattgtcgcagaagtcacagacatcgctttcagcccttagtcttactgagaatattctcatacttctatgcatcttggcaaaataccattttccacgggacactggaaagaaggaagtagattcagaactaagagagattattatccacctgctagcatttataagcaaaggaagtgtaaagactggcaatgcctctaaatggaactcatcgtttttctgccctgctgttatcaaagaggaagtagcgcttaatgagaaaccaccactcatttgtagcaagtatgggtggttcagatttgcagcaagttgtactttgtcaactgcaggtgtttcagtttctcccagtgcagctttatcagtggtgagacgggacaagacttcaggagattctgattctataaggcagactcgttttactgagatattagctgttcagatatacaggattgcttttcttatcatgaagtttctctgtagtcaagcaaaagaagcagtaaaaagggcagaagaactggagtttcttgacctcgcccattttcctgagcttcccatgccagatattcttcatggtttacaggatcaagtggtttgtattgtcactgaaatattcgaggcaaatgggtcaagcactctaaatcccgagacagagaaggtatgccagctcctattggtgacacttgaaacgtcactttacatggaactatgtgtatcccaatcatgtggcatcaggccagtacttggtcggcttgaagatttctgcaaaggaattaaggctatgcttcaagctatagagaagcactccagttttgaaccttttgtcaggtcgctaactgaaattacttctcttttgtatcccgggcttttgcataataaccttctcatgtgactcttgtaaattgtcactgttaaagagatgtgttgttggctaactttgaattgagccacatatggacttgcatactcagttgacgtcacccgaggaagcttcgttttcgcacgttactgtcaccaaagtaaagtgggttccagcggctacgaagcaaattcgcagagccagggcaccaaatcaaactgaaggcgacgacgcccgaggaagcttcgttttcgcatcacctttgttcggtttcacagccgaggctcccaaagtggccagagaatcttggtggacttgcctttccgggactccacactgccgaccacgcttattcacccgtgtaaattatgctgggattctcctttgctggctcgtctggccgatgtgcgtcccatcatcacagagaactagaaacaaatgatacatatgtagatgctatgcgttcttgatcaatcagacacgcatttttttttctgtagaggaatacatgttcggcgcgttgcatctttacactaccatttgtttgccttctccatcctgtttaagccctgtttcaaaacgctaccatgcaaattaaccctaagggataatttgggagccgtaaaaccggaggggattggag

SEQ ID NO: 8351 - DNA, 3028 bp, Zea Mays
gtcaccttggtatcactcctccaggtagctgcctgcctatgtatcatccatttaataacaaagttgtcaaccggtgatactgggagcttgtctttctcattcatgaagaaaattcagatcatatcaacaaaattgttgcagcaccatgcatttttagctctcctgtcacagtattccctgcatggatacagcggtgaacaagaacttaataatttggttctcaatgatctttattaccttatacgtggagaactcgaaggacgtcagattagctctggcccttttcaggagttgctcagttttcttcttgggtttagaatttttgaacacaatcccttggagcaactacaaaacacatacctgatggcaaatgacaaatttttatttgatgtggagcacatacatgacgagcttggagttgatctctggactgattcagacaagaggtctaaagaagtagctaaaaaaatgctggatattatgagtaaagcaaatttaatgaagtattatgctgatgcaaaactttctgcattgatgtccttcttgaaatttttatctgtctacaaaggagcgatttctaacaaaaacttggacttacctgatggaggcatatcagtagcggccacacaatcagcaattaaatgtgcatgtaaatcatttgagtcaactgttgattcactgctgcctcaagctcatacagatgaggttttgtttcccctcttgtccgggcaagtggaattattgcttactttggcccgaatattgtttcatcaagcaaagaacaagaaatcaagccatctctgtccagatattgtacttctaatgaaaacttcaggtgccagcacttgtttgtttgttgatctcatgccatctgctcatgctcttaagcaaccagtgaagacacttcttgttctgcttttgtcgtcatatgagttcatgtacagcaaggttgacataaaagacctaccaaatgatattaacatttttggcgaattagcccttttaagtgtgagcttgctacctatactgtgcaaattggcagagaatagggaatgctctgatcttgctgttgcatcaatggacctaatattgaagggatctgtaccttctaatttatggatgcctattctgcaaaagcattttcatctccagactatactgcataaatgccagaatggtgatttattatctactcaagttatacttaatttcctcttgaccttggggcgaacaaaggatggtgctaaagttcttcagtctgccaatatttttgcattcttaaagttacttttgagtcagttgtctctggatgactcctgtttgagaaattccttgagcgcccaagtgaaggatgtgaacctatggggcttgggtctcggtattgttgcgtccctgaaccattgtttggatgatgacatttctcataacaatgtcgtgagcaacactatcagcttcctttcaggacatgtgcctttggtgtcatcatatctgtctacacagagtgctactactcatcagagcaagaaacgggcattgtcgcagaagtcacagacatcgctttcagcccttagtcttactgagaatattctcatacttctatgcatcttggcaaaataccattttccacgggacactggaaagaaggaagtagattcagaactaagagagattattatccacctgctagcatttataagcaaaggaagtgtaaagactggcaatgcctctaaatggaactcatcgtttttctgccctgctgttatcaaagaggaagtagcgcttaatgagaaaccaccactcatttgtagcaagtatgggtggttcagatttgcagcaagttgtactttgtcaactgcaggtgtttcagtttctcccagtgcagctttatcagtggtgagacgggacaagacttcaggagattctgattctataaggcagactcgttttactgagatattagctgttcagatatacaggattgcttttcttatcatgaagtttctctgtagtcaagcaaaagaagcagtaaaaagggcagaagaactggagtttcttgacctcgcccattttcctgagcttcccatgccagatattcttcatggtttacaggatcaagtggtttgtattgtcactgaaatattcgaggcaaatgggtcaagcactctaaatcccgagacagagaaggtatgccagctcctattggtgacacttgaaacgtcactttacatggaactatgtgtatcccaatcatgtggcatcaggccagtacttggtcggcttgaagatttctgcaaaggaattaaggctatgcttcaagctatagagaagcactccagttttgaaccttttgtcaggtcgctaactgaaattacttctcttttgtatcccgggcttttgcataataaccttctcatgtgactcttgtaaattgtcactgttaaagagatgtgttgttggctaactttgaattgagccacatatggacttgcatactcagttgacgtcacccgaggaagcttcgttttcgcacgttactgtcaccaaagtaaagtgggttccagcggctacgaagcaaattcgcagagccagggcaccaaatcaaactgaaggcgacgacgcccgaggaagcttcgttttcgcatcacctttgttcggtttcacagccgaggctcccaaagtggccagagaatcttggtggacttgcctttccgggactccacactgccgaccacgcttattcacccgtgtaaattatgctgggattctcctttgctggctcgtctggccgatgtgcgtcccatcatcacagagaactagaaacaaatgatacatatgtagatgctatgcgttcttgatcaatcagacacgcatttttttttctgtagaggaatacatgttcggcgcgttgcatctttacactaccatttgtttgccttctccatcctgtttaagccctgtttcaaaacgctaccatgcaaattaaccctaagggataatttgggagccgtaaaaccggaggggattggag

SEQ ID NO: 8352 - DNA, 3050 bp, Zea Mays
agtcaccttggtatcactcctccaggtagctgcctgcctatgtatcatccatttaataacaaagttgtcaaccggtgatactgggagcttgtctttctcattcatgaagaaaattcagatcatatcaacaaaattgttgcagcaccatgcatttttagctctcctgtcacagtattccctgcatggatacagcggtgaacaagaacttaataatttggttctcaatgatctttattaccttatacgtggagaactcgaaggacgtcagattagctctggcccttttcaggagttgctcagttttcttcttgggtttagaatttttgaacacaatcccttggagcaactacaaaacacatacctgatggcaaatgacaaatttttatttgatgtggagcacatacatgacgagcttggagttgatctctggactgattcagacaagaggtctaaagaagtagctaaaaaaatgctggatattatgagtaaagcaaatttaatgaagtattatgctgatgcaaaactttctgcattgatgtccttcttgaaatttttatctgtctacaaaggagcgctaatcttagaacttctacagatttctaacaaaaacttggacttacctgatggaggcatatcagtagcggccacacaatcagcaattaaatgtgcatgtaaatcatttgagtcaactgttgattcactgctgcctcaagctcatacagatgaggttttgtttcccctcttgtccgggcaagtggaattattgcttactttggcccgaatattgtttcatcaagcaaagaacaagaaatcaagccatctctgtccagatattgtacttctaatgaaaacttcaggtgccagcacttgtttgtttgttgatctcatgccatctgctcatgctcttaagcaaccagtgaagacacttcttgttctgcttttgtcgtcatatgagttcatgtacagcaaggttgacataaaagacctaccaaatgatattaacatttttggcgaattagcccttttaagtgtgagcttgctacctatactgtgcaaattggcagagaatagggaatgctctgatcttgctgttgcatcaatggacctaatattgaagggatctgtaccttctaatttatggatgcctattctgcaaaagcattttcatctccagactatactgcataaatgccagaatggtgatttattatctactcaagttatacttaatttcctcttgaccttggggcgaacaaaggatggtgctaaagttcttcagtctgccaatatttttgcattcttaaagttacttttgagtcagttgtctctggatgactcctgtttgagaaattccttgagcgcccaagtgaaggatgtgaacctatggggcttgggtctcggtattgttgcgtccctgaaccattgtttggatgatgacatttctcataacaatgtcgtgagcaacactatcagcttcctttcaggacatgtgcctttggtgtcatcatatctgtctacacagagtgctactactcatcagagcaagaaacgggcattgtcgcagaagtcacagacatcgctttcagcccttagtcttactgagaatattctcatacttctatgcatcttggcaaaataccattttccacgggacactggaaagaaggaagtagattcagaactaagagagattattatccacctgctagcatttataagcaaaggaagtgtaaagactggcaatgcctctaaatggaactcatcgtttttctgccctgctgttatcaaagaggaagtagcgcttaatgagaaaccaccactcatttgtagcaagtatgggtggttcagatttgcagcaagttgtactttgtcaactgcaggtgtttcagtttctcccagtgcagctttatcagtggtgagacgggacaagacttcaggagattctgattctataaggcagactcgttttactgagatattagctgttcagatatacaggattgcttttcttatcatgaagtttctctgtagtcaagcaaaagaagcagtaaaaagggcagaagaactggagtttcttgacctcgcccattttcctgagcttcccatgccagatattcttcatggtttacaggatcaagtggtttgtattgtcactgaaatattcgaggcaaatgggtcaagcactctaaatcccgagacagagaaggtatgccagctcctattggtgacacttgaaacgtcactttacatggaactatgtgtatcccaatcatgtggcatcaggccagtacttggtcggcttgaagatttctgcaaaggaattaaggctatgcttcaagctatagagaagcactccagttttgaaccttttgtcaggtcgctaactgaaattacttctcttttgtatcccgggcttttgcataataaccttctcatgtgactcttgtaaattgtcactgttaaagagatgtgttgttggctaactttgaattgagccacatatggacttgcatactcagttgacgtcacccgaggaagcttcgttttcgcacgttactgtcaccaaagtaaagtgggttccagcggctacgaagcaaattcgcagagccagggcaccaaatcaaactgaaggcgacgacgcccgaggaagcttcgttttcgcatcacctttgttcggtttcacagccgaggctcccaaagtggccagagaatcttggtggacttgcctttccgggactccacactgccgaccacgcttattcacccgtgtaaattatgctgggattctcctttgctggctcgtctggccgatgtgcgtcccatcatcacagagaactagaaacaaatgatacatatgtagatgctatgcgttcttgatcaatcagacacgcatttttttttctgtagaggaatacatgttcggcgcgttgcatctttacactaccatttgtttgccttctccatcctgtttaagccctgtttcaaaacgctaccatgcaaattaaccctaagggataatttgggagccgtaaaaccggaggggattggag

SEQ ID NO: 8353 - DNA, 3678 bp, Zea Mays
gtcattgttaatttctccaaatcagcatctgttgttgagtcctgctacacgtacaaccacctgcttttcttatttccttgatagagcagagtacgaagtcaactgatcataatgcttccaccaatgatcgtgacaatagagttttggttacttcaaaaagtaatgctagacttgttgaccaaatcttggactatattgataggtccattgagctcatgaatagatctcccttggtgttactcagtattctggacttgttgaaggcactatgggaaagtggtatacgatttttgtttattttagagaagctaagaagctctgtaacattctgggataacttatcacggtgtattcgtgctacacttgatatctcccctattgacaatattgatgccattgacgagaaattttcgttaaggtaccattgtcagggtaaaatatttgagatcatgtcacacgagttatttttgcaaggaaaattgcttacagagacttctaatactgtccaagatgatccaaaggggcaaaaagagcataaaagtgggccttgtcgtatcagtgtagtcttgaaatggttcgataatgctattttggccgatctggtcagtaatttgtcaagtaatgcatacaaaaaggaacttcatcatgcaaaggtagctgcctgcctatgtatcatccatttaataacaaagttgtcaaccggtgatactgggagcttgtctttctcattcatgaagaaaattcagatcatatcaacaaaattgttgcagcaccatgcatttttagctctcctgtcacagtattccctgcatggatacagcggtgaacaagaacttaataatttggttctcaatgatctttattaccttatacgtggagaactcgaaggacgtcagattagctctggcccttttcaggagttgctcagttttcttcttgggtttagaatttttgaacacaatcccttggagcaactacaaaacacatacctgatggcaaatgacaaatttttatttgatgtggagcacatacatgacgagcttggagttgatctctggactgattcagacaagaggtctaaagaagtagctaaaaaaatgctggatattatgagtaaagcaaatttaatgaagtattatgctgatgcaaaactttctgcattgatgtccttcttgaaatttttatctgtctacaaaggagcgctaatcttagaacttctacagatttctaacaaaaacttggacttacctgatggaggcatatcagtagcggccacacaatcagcaattaaatgtgcatgtaaatcatttgagtcaactgttgattcactgctgcctcaagctcatacagatgaggttttgtttcccctcttgtccgggcaagtggaattattgcttactttggcccgaatattgtttcatcaagcaaagaacaagaaatcaagccatctctgtccagatattgtacttctaatgaaaacttcaggtgccagcacttgtttgtttgttgatctcatgccatctgctcatgctcttaagcaaccagtgaagacacttcttgttctgcttttgtcgtcatatgagttcatgtacagcaaggttgacataaaagacctaccaaatgatattaacatttttggcgaattagcccttttaagtgtgagcttgctacctatactgtgcaaattggcagagaatagggaatgctctgatcttgctgttgcatcaatggacctaatattgaagggatctgtaccttctaatttatggatgcctattctgcaaaagcattttcatctccagactatactgcataaatgccagaatggtgatttattatctactcaagttatacttaatttcctcttgaccttggggcgaacaaaggatggtgctaaagttcttcagtctgccaatatttttgcattcttaaagttacttttgagtcagttgtctctggatgactcctgtttgagaaattccttgagcgcccaagtgaaggatgtgaacctatggggcttgggtctcggtattgttgcgtccctgaaccattgtttggatgatgacatttctcataacaatgtcgtgagcaacactatcagcttcctttcaggacatgtgcctttggtgtcatcatatctgtctacacagagtgctactactcatcagagcaagaaacgggcattgtcgcagaagtcacagacatcgctttcagcccttagtcttactgagaatattctcatacttctatgcatcttggcaaaataccattttccacgggacactggaaagaaggaagtagattcagaactaagagagattattatccacctgctagcatttataagcaaaggaagtgtaaagactggcaatgcctctaaatggaactcatcgtttttctgccctgctgttatcaaagaggaagtagcgcttaatgagaaaccaccactcatttgtagcaagtatgggtggttcagatttgcagcaagttgtactttgtcaactgcaggtgtttcagtttctcccagtgcagctttatcagtggtgagacgggacaagacttcaggagattctgattctataaggcagactcgttttactgagatattagctgttcagatatacaggattgcttttcttatcatgaagtttctctgtagtcaagcaaaagaagcagtaaaaagggcagaagaactggagtttcttgacctcgcccattttcctgagcttcccatgccagatattcttcatggtttacaggatcaagtggtttgtattgtcactgaaatattcgaggcaaatgggtcaagcactctaaatcccgagacagagaaggtatgccagctcctattggtgacacttgaaacgtcactttacatggaactatgtgtatcccaatcatgtggcatcaggccagtacttggtcggcttgaagatttctgcaaaggaattaaggctatgcttcaagctatagagaagcactccagttttgaaccttttgtcaggtcgctaactgaaattacttctcttttgtatcccgggcttttgcataataaccttctcatgtgactcttgtaaattgtcactgttaaagagatgtgttgttggctaactttgaattgagccacatatggacttgcatactcagttgacgtcacccgaggaagcttcgttttcgcacgttactgtcaccaaagtaaagtgggttccagcggctacgaagcaaattcgcagagccagggcaccaaatcaaactgaaggcgacgacgcccgaggaagcttcgttttcgcatcacctttgttcggtttcacagccgaggctcccaaagtggccagagaatcttggtggacttgcctttccgggactccacactgccgaccacgcttattcacccgtgtaaattatgctgggattctcctttgctggctcgtctggccgatgtgcgtcccatcatcacagagaactagaaacaaatgatacatatgtagatgctatgcgttcttgatcaatcagacacgcatttttttttctgtagaggaatacatgttcggcgcgttgcatctttacactaccatttgtttgccttctccatcctgtttaagccctgtttcaaaacgctaccatgcaaattaaccctaagggataatttgggagccgtaaaaccggaggggattggag

SEQ ID NO: 8354 - DNA, 3769 bp, Zea Mays
ttatgcctgtatcttagcaatgtatttattgttgagactgaggatcctcatttgtttctcaagggtatgcaagtagctgccgctagagcattctcagcattgtgtttcattgcatataaggcccaacctcagttgatggaaaatgccagctttacaagtgatgtttctgagcctgcttttcttatttccttgatagagcagagtacgaagtcaactgatcataatgcttccaccaatgatcgtgacaatagagttttggttacttcaaaaagtaatgctagacttgttgaccaaatcttggactatattgataggtccattgagctcatgaatagatctcccttggtgttactcagtattctggacttgttgaaggcactatgggaaagtggtatacgatttttgtttattttagagaagctaagaagctctgtaacattctgggataacttatcacggtgtattcgtgctacacttgatatctcccctattgacaatattgatgccattgacgagaaattttcgttaaggtaccattgtcagggtaaaatatttgagatcatgtcacacgagttatttttgcaaggaaaattgcttacagagacttctaatactgtccaagatgatccaaaggggcaaaaagagcataaaagtgggccttgtcgtatcagtgtagtcttgaaatggttcgataatgctattttggccgatctggtcagtaatttgtcaagtaatgcatacaaaaaggaacttcatcatgcaaaggtagctgcctgcctatgtatcatccatttaataacaaagttgtcaaccggtgatactgggagcttgtctttctcattcatgaagaaaattcagatcatatcaacaaaattgttgcagcaccatgcatttttagctctcctgtcacagtattccctgcatggatacagcggtgaacaagaacttaataatttggttctcaatgatctttattaccttatacgtggagaactcgaaggacgtcagattagctctggcccttttcaggagttgctcagttttcttcttgggtttagaatttttgaacacaatcccttggagcaactacaaaacacatacctgatggcaaatgacaaatttttatttgatgtggagcacatacatgacgagcttggagttgatctctggactgattcagacaagaggtctaaagaagtagctaaaaaaatgctggatattatgagtaaagcaaatttaatgaagtattatgctgatgcaaaactttctgcattgatgtccttcttgaaatttttatctgtctacaaaggagcgatttctaacaaaaacttggacttacctgatggaggcatatcagtagcggccacacaatcagcaattaaatgtgcatgtaaatcatttgagtcaactgttgattcactgctgcctcaagctcatacagatgaggttttgtttcccctcttgtccgggcaagtggaattattgcttactttggcccgaatattgtttcatcaagcaaagaacaagaaatcaagccatctctgtccagatattgtacttctaatgaaaacttcaggtgccagcacttgtttgtttgttgatctcatgccatctgctcatgctcttaagcaaccagtgaagacacttcttgttctgcttttgtcgtcatatgagttcatgtacagcaaggttgacataaaagacctaccaaatgatattaacatttttggcgaattagcccttttaagtgtgagcttgctacctatactgtgcaaattggcagagaatagggaatgctctgatcttgctgttgcatcaatggacctaatattgaagggatctgtaccttctaatttatggatgcctattctgcaaaagcattttcatctccagactatactgcataaatgccagaatggtgatttattatctactcaagttatacttaatttcctcttgaccttggggcgaacaaaggatggtgctaaagttcttcagtctgccaatatttttgcattcttaaagttacttttgagtcagttgtctctggatgactcctgtttgagaaattccttgagcgcccaagtgaaggatgtgaacctatggggcttgggtctcggtattgttgcgtccctgaaccattgtttggatgatgacatttctcataacaatgtcgtgagcaacactatcagcttcctttcaggacatgtgcctttggtgtcatcatatctgtctacacagagtgctactactcatcagagcaagaaacgggcattgtcgcagaagtcacagacatcgctttcagcccttagtcttactgagaatattctcatacttctatgcatcttggcaaaataccattttccacgggacactggaaagaaggaagtagattcagaactaagagagattattatccacctgctagcatttataagcaaaggaagtgtaaagactggcaatgcctctaaatggaactcatcgtttttctgccctgctgttatcaaagaggaagtagcgcttaatgagaaaccaccactcatttgtagcaagtatgggtggttcagatttgcagcaagttgtactttgtcaactgcaggtgtttcagtttctcccagtgcagctttatcagtggtgagacgggacaagacttcaggagattctgattctataaggcagactcgttttactgagatattagctgttcagatatacaggattgcttttcttatcatgaagtttctctgtagtcaagcaaaagaagcagtaaaaagggcagaagaactggagtttcttgacctcgcccattttcctgagcttcccatgccagatattcttcatggtttacaggatcaagtggtttgtattgtcactgaaatattcgaggcaaatgggtcaagcactctaaatcccgagacagagaaggtatgccagctcctattggtgacacttgaaacgtcactttacatggaactatgtgtatcccaatcatgtggcatcaggccagtacttggtcggcttgaagatttctgcaaaggaattaaggctatgcttcaagctatagagaagcactccagttttgaaccttttgtcaggtcgctaactgaaattacttctcttttgtatcccgggcttttgcataataaccttctcatgtgactcttgtaaattgtcactgttaaagagatgtgttgttggctaactttgaattgagccacatatggacttgcatactcagttgacgtcacccgaggaagcttcgttttcgcacgttactgtcaccaaagtaaagtgggttccagcggctacgaagcaaattcgcagagccagggcaccaaatcaaactgaaggcgacgacgcccgaggaagcttcgttttcgcatcacctttgttcggtttcacagccgaggctcccaaagtggccagagaatcttggtggacttgcctttccgggactccacactgccgaccacgcttattcacccgtgtaaattatgctgggattctcctttgctggctcgtctggccgatgtgcgtcccatcatcacagagaactagaaacaaatgatacatatgtagatgctatgcgttcttgatcaatcagacacgcatttttttttctgtagaggaatacatgttcggcgcgttgcatctttacactaccatttgtttgccttctccatcctgtttaagccctgtttcaaaacgctaccatgcaaattaaccctaagggataatttgggagccgtaaaaccggaggggattggag

SEQ ID NO: 8355 - DNA, 5775 bp, Zea Mays
gtgacgtgtctgattcaactgatcccattcgagatgaggcttcattattgattagtgaagagatagacagaaaactgatatctatcattgaagattctttttcaactgcatcttctgtaaaagcggaagcggaatttacaatttctagtctggaagaaactttgattgaagttaacttgattcttgacatattgtttcttactttttatgataacttctcaagatgtaatggtagacagtggataactttgtgttcaatttttaaggacattctatgtggttcttatggtgtcgggaaatttgttgcatctgttgaggcaaagaattcatttcattatgctaaagctcagctacttctcatccttattgaaactttggactttgagaatctcctccggatgattcatgatgaagttcctctgagtggagggtgttctgcattttctgtcggtgatattctggagatggatgttgaaatatcaaaattgcctgaattttcattggtagaatcaggaccacttatactggcttgggcagttttcctttgcctagttctgtctcttccagaaagtaacaccaacttggaaattgatcatacatcctatgcccgacgggcctttgagtttgcgccattcaattatttactaggagttctttgttcaagcatcttcagggagtcagatggtcctgtttctggttatcggggtatattgcggacattcatttcagcattcatcgcttcatatgaggtatcttatcagaaagaacacagttcctttgacatgatttcgagtattttatgtgaagtttatgatggagaggaatctctctgtatgcaattttgggataaagatagctttgttgatggtcctatcagatataattatcttgagaggatgaatggagttacaacaatctataccatcccttgtgttgctgatggtgttggttatggccatcaaattgaaagtcatcatccagtcagcattcctagtattgaaggcattacaattccacaaggaacccatggctacattttgaaagttcttcaagaggataccacattagttcgctgggagttcccgcattctggggtatcctttttgctcataactctggcgcaagagctccattcatgcaattacaagaaggcatgtgatatcataggtctactttatcggatggtgtcgtcaaataaggacctgtgcttcgctttgatgcatgttgacaagtcactggctgttcaaacatcaaataacttaggacaaattgaaaagcatgtcaggattgatattgctaaggtattttgcaattccattttcaaatatgtgcgagatgttaataatgctgacatattgtccaaaacctttggtctactagcagaaatgatgaaatgcgctccatatcacgtgtttgatgcggcgttcgagtgcaacatcttcacttcacaattaagtagtccatcaagtgattggttactttctggtgccctagctagaatgctttttgctgcctatgaaggaaatggagattgttcttcgcttacatcttcagcagtgcttgactttaccactcaggttcttcggaaaggagcagatgctgatgatataatatcacctttaattgttttctcaattaaatacatcatgattaatcatgtgaactggaaacacaaggaatgtagtcgttggaagacaaccctacgggtgtttgaattggtgaaaagctgtcttcaagtaaaaccattctcatcaaagcttggtggcatcatttgggaaattctactatatgattcatctgtccacggtgtactctggagcatattatctgtactaacacgattactgcatgactcatataggagcaattatcatggtcttaaggatattgaagatatccagcttgtcctttgcaatggacttgatattatatatcacatcctgtccaatttaccagagggtatgcaagtagctgccgctagagcattctcagcattgtgtttcattgcatataaggcccaacctcagttgatggaaaatgccagctttacaagtgatgtttctgagatacggagattggaatcaaatatatcctgcattctagatgaggatgataaaaataatgattgtttggttgtggctgtattcaaccttttgacatctgctgctcgttatcagcctgcttttcttatttccttgatagagcagagtacgaagtcaactgatcataatgcttccaccaatgatcgtgacaatagagttttggttacttcaaaaagtaatgctagacttgttgaccaaatcttggactatattgataggtccattgagctcatgaatagatctcccttggtgttactcagtattctggacttgttgaaggcactatgggaaagtggtatacgatttttgtttattttagagaagctaagaagctctgtaacattctgggataacttatcacggtgtattcgtgctacacttgatatctcccctattgacaatattgatgccattgacgagaaattttcgttaaggtaccattgtcagggtaaaatatttgagatcatgtcacacgagttatttttgcaaggaaaattgcttacagagacttctaatactgtccaagatgatccaaaggggcaaaaagagcataaaagtgggccttgtcgtatcagtgtagtcttgaaatggttcgataatgctattttggccgatctggtcagtaatttgtcaagtaatgcatacaaaaaggaacttcatcatgcaaaggtagctgcctgcctatgtatcatccatttaataacaaagttgtcaaccggtgatactgggagcttgtctttctcattcatgaagaaaattcagatcatatcaacaaaattgttgcagcaccatgcatttttagctctcctgtcacagtattccctgcatggatacagcggtgaacaagaacttaataatttggttctcaatgatctttattaccttatacgtggagaactcgaaggacgtcagattagctctggcccttttcaggagttgctcagttttcttcttgggtttagaatttttgaacacaatcccttggagcaactacaaaacacatacctgatggcaaatgacaaatttttatttgatgtggagcacatacatgacgagcttggagttgatctctggactgattcagacaagaggtctaaagaagtagctaaaaaaatgctggatattatgagtaaagcaaatttaatgaagtattatgctgatgcaaaactttctgcattgatgtccttcttgaaatttttatctgtctacaaaggagcgatttctaacaaaaacttggacttacctgatggaggcatatcagtagcggccacacaatcagcaattaaatgtgcatgtaaatcatttgagtcaactgttgattcactgctgcctcaagctcatacagatgaggttttgtttcccctcttgtccgggcaagtggaattattgcttactttggcccgaatattgtttcatcaagcaaagaacaagaaatcaagccatctctgtccagatattgtacttctaatgaaaacttcaggtgccagcacttgtttgtttgttgatctcatgccatctgctcatgctcttaagcaaccagtgaagacacttcttgttctgcttttgtcgtcatatgagttcatgtacagcaaggttgacataaaagacctaccaaatgatattaacatttttggcgaattagcccttttaagtgtgagcttgctacctatactgtgcaaattggcagagaatagggaatgctctgatcttgctgttgcatcaatggacctaatattgaagggatctgtaccttctaatttatggatgcctattctgcaaaagcattttcatctccagactatactgcataaatgccagaatggtgatttattatctactcaagttatacttaatttcctcttgaccttggggcgaacaaaggatggtgctaaagttcttcagtctgccaatatttttgcattcttaaagttacttttgagtcagttgtctctggatgactcctgtttgagaaattccttgagcgcccaagtgaaggatgtgaacctatggggcttgggtctcggtattgttgcgtccctgaaccattgtttggatgatgacatttctcataacaatgtcgtgagcaacactatcagcttcctttcaggacatgtgcctttggtgtcatcatatctgtctacacagagtgctactactcatcagagcaagaaacgggcattgtcgcagaagtcacagacatcgctttcagcccttagtcttactgagaatattctcatacttctatgcatcttggcaaaataccattttccacgggacactggaaagaaggaagtagattcagaactaagagagattattatccacctgctagcatttataagcaaaggaagtgtaaagactggcaatgcctctaaatggaactcatcgtttttctgccctgctgttatcaaagaggaagtagcgcttaatgagaaaccaccactcatttgtagcaagtatgggtggttcagatttgcagcaagttgtactttgtcaactgcaggtgtttcagtttctcccagtgcagctttatcagtggtgagacgggacaagacttcaggagattctgattctataaggcagactcgttttactgagatattagctgttcagatatacaggattgcttttcttatcatgaagtttctctgtagtcaagcaaaagaagcagtaaaaagggcagaagaactggagtttcttgacctcgcccattttcctgagcttcccatgccagatattcttcatggtttacaggatcaagtggtttgtattgtcactgaaatattcgaggcaaatgggtcaagcactctaaatcccgagacagagaaggtatgccagctcctattggtgacacttgaaacgtcactttacatggaactatgtgtatcccaatcatgtggcatcaggccagtacttggtcggcttgaagatttctgcaaaggaattaaggctatgcttcaagctatagagaagcactccagttttgaaccttttgtcaggtcgctaactgaaattacttctcttttgtatcccgggcttttgcataataaccttctcatgtgactcttgtaaattgtcactgttaaagagatgtgttgttggctaactttgaattgagccacatatggacttgcatactcagttgacgtcacccgaggaagcttcgttttcgcacgttactgtcaccaaagtaaagtgggttccagcggctacgaagcaaattcgcagagccagggcaccaaatcaaactgaaggcgacgacgcccgaggaagcttcgttttcgcatcacctttgttcggtttcacagccgaggctcccaaagtggccagagaatcttggtggacttgcctttccgggactccacactgccgaccacgcttattcacccgtgtaaattatgctgggattctcctttgctggctcgtctggccgatgtgcgtcccatcatcacagagaactagaaacaaatgatacatatgtagatgctatgcgttcttgatcaatcagacacgcatttttttttctgtagaggaatacatgttcggcgcgttgcatctttacactaccatttgtttgccttctccatcctgtttaagccctgtttcaaaacgctaccatgcaaattaaccctaagggataatttgggagccgtaaaaccggaggggattggag

SEQ ID NO: 8356 - DNA, 6393 bp, Zea Mays
ccctccctccattgtgtctcctttcccagaaaaaccctcgttcagctgctacactcaccgcggtctctctctgtccatttcccgcctcctcgccgcaactagggtttcttaagccctcaccgcccatggcgagcggcagggcggctacatccagttccatcctcgtcaacgccgccggcaccagcaagaccctgtccgcatcgctatggtgggactccttcgtcgtcctctccgacgacctcgaccgagccactgctggcccctctgtcccggatgccctcgctaagcggatcaaaagccaccacgcgtggctccgagggtcggtctctatgttcgggaagccgaacgacgcgtccaggagcgcactggaagttggcgaggttgccgtcggggagcgtcgcctcactgtcaagccagagctcaaggaggccgcgcttcgtgcaagcaaatgcctgaacctggatgaagtgcaatcatacattctggtcaagagatcttcagaagtctctccaacaatccgtgatgctgatgctgaggagtttcttcatctggtatctgtacgatattaccttgagcgtcagtgcttactgaagtgcatcagaagaatctttgtgcatgcaagtgacgtgtctgattcaactgatcccattcgagatgaggcttcattattgattagtgaagagatagacagaaaactgatatctatcattgaagattctttttcaactgcatcttctgtaaaagcggaagcggaatttacaatttctagtctggaagaaactttgattgaagttaacttgattcttgacatattgtttcttactttttatgataacttctcaagatgtaatggtagacagtggataactttgtgttcaatttttaaggacattctatgtggttcttatggtgtcgggaaatttgttgcatctgttgaggcaaagaattcatttcattatgctaaagctcagctacttctcatccttattgaaactttggactttgagaatctcctccggatgattcatgatgaagttcctctgagtggagggtgttctgcattttctgtcggtgatattctggagatggatgttgaaatatcaaaattgcctgaattttcattggtagaatcaggaccacttatactggcttgggcagttttcctttgcctagttctgtctcttccagaaagtaacaccaacttggaaattgatcatacatcctatgcccgacgggcctttgagtttgcgccattcaattatttactaggagttctttgttcaagcatcttcagggagtcagatggtcctgtttctggttatcggggtatattgcggacattcatttcagcattcatcgcttcatatgaggtatcttatcagaaagaacacagttcctttgacatgatttcgagtattttatgtgaagtttatgatggagaggaatctctctgtatgcaattttgggataaagatagctttgttgatggtcctatcagatataattatcttgagaggatgaatggagttacaacaatctataccatcccttgtgttgctgatggtgttggttatggccatcaaattgaaagtcatcatccagtcagcattcctagtattgaaggcattacaattccacaaggaacccatggctacattttgaaagttcttcaagaggataccacattagttcgctgggagttcccgcattctggggtatcctttttgctcataactctggcgcaagagctccattcatgcaattacaagaaggcatgtgatatcataggtctactttatcggatggtgtcgtcaaataaggacctgtgcttcgctttgatgcatgttgacaagtcactggctgttcaaacatcaaataacttaggacaaattgaaaagcatgtcaggattgatattgctaaggtattttgcaattccattttcaaatatgtgcgagatgttaataatgctgacatattgtccaaaacctttggtctactagcagaaatgatgaaatgcgctccatatcacgtgtttgatgcggcgttcgagtgcaacatcttcacttcacaattaagtagtccatcaagtgattggttactttctggtgccctagctagaatgctttttgctgcctatgaaggaaatggagattgttcttcgcttacatcttcagtgcttgactttaccactcaggttcttcggaaaggagcagatgctgatgatataatatcacctttaattgttttctcaattaaatacatcatgattaatcatgtgaactggaaacacaaggaatgtagtcgttggaagacaaccctacgggtgtttgaattggtgaaaagctgtcttcaagtaaaaccattctcatcaaagcttggtggcatcatttgggaaattctactatatgattcatctgtccacggtgtactctggagcatattatctgtactaacacgattactgcatgactcatataggagcaattatcatggtcttaaggatattgaagatatccagcttgtcctttgcaatggacttgatattatatatcacatcctgtccaatttaccagagggtatgcaagtagctgccgctagagcattctcagcattgtgtttcattgcatataaggcccaacctcagttgatggaaaatgccagctttacaagtgatgtttctgagatacggagattggaatcaaatatatcctgcattctagatgaggatgataaaaataatgattgtttggttgtggctgtattcaaccttttgacatctgctgctcgttatcagcctgcttttcttatttccttgatagagcagagtacgaagtcaactgatcataatgcttccaccaatgatcgtgacaatagagttttggttacttcaaaaagtaatgctagacttgttgaccaaatcttggactatattgataggtccattgagctcatgaatagatctcccttggtgttactcagtattctggacttgttgaaggcactatgggaaagtggtatacgatttttgtttattttagagaagctaagaagctctgtaacattctgggataacttatcacggtgtattcgtgctacacttgatatctcccctattgacaatattgatgccattgacgagaaattttcgttaaggtaccattgtcagggtaaaatatttgagatcatgtcacacgagttatttttgcaaggaaaattgcttacagagacttctaatactgtccaagatgatccaaaggggcaaaaagagcataaaagtgggccttgtcgtatcagtgtagtcttgaaatggttcgataatgctattttggccgatctggtcagtaatttgtcaagtaatgcatacaaaaaggaacttcatcatgcaaaggtagctgcctgcctatgtatcatccatttaataacaaagttgtcaaccggtgatactgggagcttgtctttctcattcatgaagaaaattcagatcatatcaacaaaattgttgcagcaccatgcatttttagctctcctgtcacagtattccctgcatggatacagcggtgaacaagaacttaataatttggttctcaatgatctttattaccttatacgtggagaactcgaaggacgtcagattagctctggcccttttcaggagttgctcagttttcttcttgggtttagaatttttgaacacaatcccttggagcaactacaaaacacatacctgatggcaaatgacaaatttttatttgatgtggagcacatacatgacgagcttggagttgatctctggactgattcagacaagaggtctaaagaagtagctaaaaaaatgctggatattatgagtaaagcaaatttaatgaagtattatgctgatgcaaaactttctgcattgatgtccttcttgaaatttttatctgtctacaaaggagcgatttctaacaaaaacttggacttacctgatggaggcatatcagtagcggccacacaatcagcaattaaatgtgcatgtaaatcatttgagtcaactgttgattcactgctgcctcaagctcatacagatgaggttttgtttcccctcttgtccgggcaagtggaattattgcttactttggcccgaatattgtttcatcaagcaaagaacaagaaatcaagccatctctgtccagatattgtacttctaatgaaaacttcaggtgccagcacttgtttgtttgttgatctcatgccatctgctcatgctcttaagcaaccagtgaagacacttcttgttctgcttttgtcgtcatatgagttcatgtacagcaaggttgacataaaagacctaccaaatgatattaacatttttggcgaattagcccttttaagtgtgagcttgctacctatactgtgcaaattggcagagaatagggaatgctctgatcttgctgttgcatcaatggacctaatattgaagggatctgtaccttctaatttatggatgcctattctgcaaaagcattttcatctccagactatactgcataaatgccagaatggtgatttattatctactcaagttatacttaatttcctcttgaccttggggcgaacaaaggatggtgctaaagttcttcagtctgccaatatttttgcattcttaaagttacttttgagtcagttgtctctggatgactcctgtttgagaaattccttgagcgcccaagtgaaggatgtgaacctatggggcttgggtctcggtattgttgcgtccctgaaccattgtttggatgatgacatttctcataacaatgtcgtgagcaacactatcagcttcctttcaggacatgtgcctttggtgtcatcatatctgtctacacagagtgctactactcatcagagcaagaaacgggcattgtcgcagaagtcacagacatcgctttcagcccttagtcttactgagaatattctcatacttctatgcatcttggcaaaataccattttccacgggacactggaaagaaggaagtagattcagaactaagagagattattatccacctgctagcatttataagcaaaggaagtgtaaagactggcaatgcctctaaatggaactcatcgtttttctgccctgctgttatcaaagaggaagtagcgcttaatgagaaaccaccactcatttgtagcaagtatgggtggttcagatttgcagcaagttgtactttgtcaactgcaggtgtttcagtttctcccagtgcagctttatcagtggtgagacgggacaagacttcaggagattctgattctataaggcagactcgttttactgagatattagctgttcagatatacaggattgcttttcttatcatgaagtttctctgtagtcaagcaaaagaagcagtaaaaagggcagaagaactggagtttcttgacctcgcccattttcctgagcttcccatgccagatattcttcatggtttacaggatcaagtggtttgtattgtcactgaaatattcgaggcaaatgggtcaagcactctaaatcccgagacagagaaggtatgccagctcctattggtgacacttgaaacgtcactttacatggaactatgtgtatcccaatcatgtggcatcaggccagtacttggtcggcttgaagatttctgcaaaggaattaaggctatgcttcaagctatagagaagcactccagttttgaaccttttgtcaggtcgctaactgaaattacttctcttttgtatcccgggcttttgcataataaccttctcatgtgactcttgtaaattgtcactgttaaagagatgtgttgttggctaactttgaattgagccacatatggacttgcatactcagttgacgtcacccgaggaagcttcgttttcgcacgttactgtcaccaaagtaaagtgggttccagcggctacgaagcaaattcgcagagccagggcaccaaatcaaactgaaggcgacgacgcccgaggaagcttcgttttcgcatcacctttgttcggtttcacagccgaggctcccaaagtggccagagaatcttggtggacttgcctttccgggactccacactgccgaccacgcttattcacccgtgtaaattatgctgggattctcctttgctggctcgtctggccgatgtgcgtcccatcatcacagagaactagaaacaaatgatacatatgtagatgctatgcgttcttgatcaatcagacacgcatttttttttctgtagaggaatacatgttcggcgcgttgcatctttacactaccatttgtttgccttctccatcctgtttaagccctgtttcaaaacgctaccatgcaaattaaccctaagggataatttgggagccgtaaaaccggaggggattggag

SEQ ID NO: 8357 - DNA, 6490 bp, Zea Mays
ccctccctccattgtgtctcctttcccagaaaaaccctcgttcagctgctacactcaccgcggtctctctctgtccatttcccgcctcctcgccgcaactagggtttcttaagccctcaccgcccatggcgagcggcagggcggctacatccagttccatcctcgtcaacgccgccggcaccagcaagaccctgtccgcatcgctatggtgggactccttcgtcgtcctctccgacgacctcgaccgagccactgctggcccctctgtcccggatgccctcgctaagcggatcaaaagccaccacgcgtggctccgagggtcggtctctatgttcgggaagccgaacgacgcgtccaggagcgcactggaagttggcgaggttgccgtcggggagcgtcgcctcactgtcaagccagagctcaaggaggccgcgcttcgtgcaagcaaatgcctgaacctggatgaagtgcaatcatacattctggtcaagagatcttcagaagtctctccaacaatccgtgatgctgatgctgaggagtttcttcatctggtatctgtacgatattaccttgagcgtcagtgcttactgaagtgcatcagaagaatctttgtgcatgcaagtgacgtgtctgattcaactgatcccattcgagatgaggcttcattattgattagtgaagagatagacagaaaactgatatctatcattgaagattctttttcaactgcatcttctgtaaaagcggaagcggaatttacaatttctagtctggaagaaactttgattgaagttaacttgattcttgacatattgtttcttactttttatgataacttctcaagatgtaatggtagacagtggataactttgtgttcaatttttaaggacattctatgtggttcttatggtgtcgggaaatttgttgcatctgttgaggcaaagaattcatttcattatgctaaagctcagctacttctcatccttattgaaactttggactttgagaatctcctccggatgattcatgatgaagttcctctgagtggagggtgttctgcattttctgtcggtgatattctggagatggatgttgaaatatcaaaattgcctgaattttcattggtagaatcaggaccacttatactggcttgggcagttttcctttgcctagttctgtctcttccagaaagtaacaccaacttggaaattgatcatacatcctatgcccgacgggcctttgagtttgcgccattcaattatttactaggagttctttgttcaagcatcttcagggagtcagatggtcctgtttctggttatcggggtatattgcggacattcatttcagcattcatcgcttcatatgaggtatcttatcagaaagaacacagttcctttgacatgatttcgagtattttatgtgaagtttatgatggagaggaatctctctgtatgcaattttgggataaagatagctttgttgatggtcctatcagatctgttcttcatatgctggaggaggagtatccttttcagatatctgaactgatacgtttcttatcagcagtttgccatgggacctggcctgctaattgtgtatataattatcttgagaggatgaatggagttacaacaatctataccatcccttgtgttgctgatggtgttggttatggccatcaaattgaaagtcatcatccagtcagcattcctagtattgaaggcattacaattccacaaggaacccatggctacattttgaaagttcttcaagaggataccacattagttcgctgggagttcccgcattctggggtatcctttttgctcataactctggcgcaagagctccattcatgcaattacaagaaggcatgtgatatcataggtctactttatcggatggtgtcgtcaaataaggacctgtgcttcgctttgatgcatgttgacaagtcactggctgttcaaacatcaaataacttaggacaaattgaaaagcatgattgatattgctaaggtattttgcaattccattttcaaatatgtgcgagatgttaataatgctgacatattgtccaaaacctttggtctactagcagaaatgatgaaatgcgctccatatcacgtgtttgatgcggcgttcgagtgcaacatcttcacttcacaattaagtagtccatcaagtgattggttactttctggtgccctagctagaatgctttttgctgcctatgaaggaaatggagattgttcttcgcttacatcttcagtgcttgactttaccactcaggttcttcggaaaggagcagatgctgatgatataatatcacctttaattgttttctcaattaaatacatcatgattaatcatgtgaactggaaacacaaggaatgtagtcgttggaagacaaccctacgggtgtttgaattggtgaaaagctgtcttcaagtaaaaccattctcatcaaagcttggtggcatcatttgggaaattctactatatgattcatctgtccacggtgtactctggagcatattatctgtactaacacgattactgcatgactcatataggagcaattatcatggtcttaaggatattgaagatatccagcttgtcctttgcaatggacttgatattatatatcacatcctgtccaatttaccagagggtatgcaagtagctgccgctagagcattctcagcattgtgtttcattgcatataaggcccaacctcagttgatggaaaatgccagctttacaagtgatgtttctgagatacggagattggaatcaaatatatcctgcattctagatgaggatgataaaaataatgattgtttggttgtggctgtattcaaccttttgacatctgctgctcgttatcagcctgcttttcttatttccttgatagagcagagtacgaagtcaactgatcataatgcttccaccaatgatcgtgacaatagagttttggttacttcaaaaagtaatgctagacttgttgaccaaatcttggactatattgataggtccattgagctcatgaatagatctcccttggtgttactcagtattctggacttgttgaaggcactatgggaaagtggtatacgatttttgtttattttagagaagctaagaagctctgtaacattctgggataacttatcacggtgtattcgtgctacacttgatatctcccctattgacaatattgatgccattgacgagaaattttcgttaaggtaccattgtcagggtaaaatatttgagatcatgtcacacgagttatttttgcaaggaaaattgcttacagagacttctaatactgtccaagatgatccaaaggggcaaaaagagcataaaagtgggccttgtcgtatcagtgtagtcttgaaatggttcgataatgctattttggccgatctggtcagtaatttgtcaagtaatgcatacaaaaaggaacttcatcatgcaaaggtagctgcctgcctatgtatcatccatttaataacaaagttgtcaaccggtgatactgggagcttgtctttctcattcatgaagaaaattcagatcatatcaacaaaattgttgcagcaccatgcatttttagctctcctgtcacagtattccctgcatggatacagcggtgaacaagaacttaataatttggttctcaatgatctttattaccttatacgtggagaactcgaaggacgtcagattagctctggcccttttcaggagttgctcagttttcttcttgggtttagaatttttgaacacaatcccttggagcaactacaaaacacatacctgatggcaaatgacaaatttttatttgatgtggagcacatacatgacgagcttggagttgatctctggactgattcagacaagaggtctaaagaagtagctaaaaaaatgctggatattatgagtaaagcaaatttaatgaagtattatgctgatgcaaaactttctgcattgatgtccttcttgaaatttttatctgtctacaaaggagcgatttctaacaaaaacttggacttacctgatggaggcatatcagtagcggccacacaatcagcaattaaatgtgcatgtaaatcatttgagtcaactgttgattcactgctgcctcaagctcatacagatgaggttttgtttcccctcttgtccgggcaagtggaattattgcttactttggcccgaatattgtttcatcaagcaaagaacaagaaatcaagccatctctgtccagatattgtacttctaatgaaaacttcaggtgccagcacttgtttgtttgttgatctcatgccatctgctcatgctcttaagcaaccagtgaagacacttcttgttctgcttttgtcgtcatatgagttcatgtacagcaaggttgacataaaagacctaccaaatgatattaacatttttggcgaattagcccttttaagtgtgagcttgctacctatactgtgcaaattggcagagaatagggaatgctctgatcttgctgttgcatcaatggacctaatattgaagggatctgtaccttctaatttatggatgcctattctgcaaaagcattttcatctccagactatactgcataaatgccagaatggtgatttattatctactcaagttatacttaatttcctcttgaccttggggcgaacaaaggatggtgctaaagttcttcagtctgccaatatttttgcattcttaaagttacttttgagtcagttgtctctggatgactcctgtttgagaaattccttgagcgcccaagtgaaggatgtgaacctatggggcttgggtctcggtattgttgcgtccctgaaccattgtttggatgatgacatttctcataacaatgtcgtgagcaacactatcagcttcctttcaggacatgtgcctttggtgtcatcatatctgtctacacagagtgctactactcatcagagcaagaaacgggcattgtcgcagaagtcacagacatcgctttcagcccttagtcttactgagaatattctcatacttctatgcatcttggcaaaataccattttccacgggacactggaaagaaggaagtagattcagaactaagagagattattatccacctgctagcatttataagcaaaggaagtgtaaagactggcaatgcctctaaatggaactcatcgtttttctgccctgctgttatcaaagaggaagtagcgcttaatgagaaaccaccactcatttgtagcaagtatgggtggttcagatttgcagcaagttgtactttgtcaactgcaggtgtttcagtttctcccagtgcagctttatcagtggtgagacgggacaagacttcaggagattctgattctataaggcagactcgttttactgagatattagctgttcagatatacaggattgcttttcttatcatgaagtttctctgtagtcaagcaaaagaagcagtaaaaagggcagaagaactggagtttcttgacctcgcccattttcctgagcttcccatgccagatattcttcatggtttacaggatcaagtggtttgtattgtcactgaaatattcgaggcaaatgggtcaagcactctaaatcccgagacagagaaggtatgccagctcctattggtgacacttgaaacgtcactttacatggaactatgtgtatcccaatcatgtggcatcaggccagtacttggtcggcttgaagatttctgcaaaggaattaaggctatgcttcaagctatagagaagcactccagttttgaaccttttgtcaggtcgctaactgaaattacttctcttttgtatcccgggcttttgcataataaccttctcatgtgactcttgtaaattgtcactgttaaagagatgtgttgttggctaactttgaattgagccacatatggacttgcatactcagttgacgtcacccgaggaagcttcgttttcgcacgttactgtcaccaaagtaaagtgggttccagcggctacgaagcaaattcgcagagccagggcaccaaatcaaactgaaggcgacgacgcccgaggaagcttcgttttcgcatcacctttgttcggtttcacagccgaggctcccaaagtggccagagaatcttggtggacttgcctttccgggactccacactgccgaccacgcttattcacccgtgtaaattatgctgggattctcctttgctggctcgtctggccgatgtgcgtcccatcatcacagagaactagaaacaaatgatacatatgtagatgctatgcgttcttgatcaatcagacacgcatttttttttctgtagaggaatacatgttcggcgcgttgcatctttacactaccatttgtttgccttctccatcctgtttaagccctgtttcaaaacgctaccatgcaaattaaccctaagggataatttgggagccgtaaaaccggaggggattggag

SEQ ID NO: 8358 - DNA, 6490 bp, Zea Mays
ccctccctccattgtgtctcctttcccagaaaaaccctcgttcagctgctacactcaccgcggtctctctctgtccatttcccgcctcctcgccgcaactagggtttcttaagccctcaccgcccatggcgagcggcagggcggctacatccagttccatcctcgtcaacgccgccggcaccagcaagaccctgtccgcatcgctatggtgggactccttcgtcgtcctctccgacgacctcgaccgagccactgctggcccctctgtcccggatgccctcgctaagcggatcaaaagccaccacgcgtggctccgagggtcggtctctatgttcgggaagccgaacgacgcgtccaggagcgcactggaagttggcgaggttgccgtcggggagcgtcgcctcactgtcaagccagagctcaaggaggccgcgcttcgtgcaagcaaatgcctgaacctggatgaagtgcaatcatacattctggtcaagagatcttcagaagtctctccaacaatccgtgatgctgatgctgaggagtttcttcatctggtatctgtacgatattaccttgagcgtcagtgcttactgaagtgcatcagaagaatctttgtgcatgcaagtgacgtgtctgattcaactgatcccattcgagatgaggcttcattattgattagtgaagagatagacagaaaactgatatctatcattgaagattctttttcaactgcatcttctgtaaaagcggaagcggaatttacaatttctagtctggaagaaactttgattgaagttaacttgattcttgacatattgtttcttactttttatgataacttctcaagatgtaatggtagacagtggataactttgtgttcaatttttaaggacattctatgtggttcttatggtgtcgggaaatttgttgcatctgttgaggcaaagaattcatttcattatgctaaagctcagctacttctcatccttattgaaactttggactttgagaatctcctccggatgattcatgatgaagttcctctgagggtgttctgcattttctgtcggtgatattctggagatggatgttgaaatatcaaaattgcctgaattttcattggtagaatcaggaccacttatactggcttgggcagttttcctttgcctagttctgtctcttccagaaagtaacaccaacttggaaattgatcatacatcctatgcccgacgggcctttgagtttgcgccattcaattatttactaggagttctttgttcaagcatcttcagggagtcagatggtcctgtttctggttatcggggtatattgcggacattcatttcagcattcatcgcttcatatgaggtatcttatcagaaagaacacagttcctttgacatgatttcgagtattttatgtgaagtttatgatggagaggaatctctctgtatgcaattttgggataaagatagctttgttgatggtcctatcagatctgttcttcatatgctggaggaggagtatccttttcagatatctgaactgatacgtttcttatcagcagtttgccatgggacctggcctgctaattgtgtatataattatcttgagaggatgaatggagttacaacaatctataccatcccttgtgttgctgatggtgttggttatggccatcaaattgaaagtcatcatccagtcagcattcctagtattgaaggcattacaattccacaaggaacccatggctacattttgaaagttcttcaagaggataccacattagttcgctgggagttcccgcattctggggtatcctttttgctcataactctggcgcaagagctccattcatgcaattacaagaaggcatgtgatatcataggtctactttatcggatggtgtcgtcaaataaggacctgtgcttcgctttgatgcatgttgacaagtcactggctgttcaaacatcaaataacttaggacaaattgaaaagcatgtcaggattgatattgctaaggtattttgcaattccattttcaaatatgtgcgagatgttaataatgctgacatattgtccaaaacctttggtctactagcagaaatgatgaaatgcgctccatatcacgtgtttgatgcggcgttcgagtgcaacatcttcacttcacaattaagtagtccatcaagtgattggttactttctggtgccctagctagaatgctttttgctgcctatgaaggaaatggagattgttcttcgcttacatcttcagtgcttgactttaccactcaggttcttcggaaaggagcagatgctgatgatataatatcacctttaattgttttctcaattaaatacatcatgattaatcatgtgaactggaaacacaaggaatgtagtcgttggaagacaaccctacgggtgtttgaattggtgaaaagctgtcttcaagtaaaaccattctcatcaaagcttggtggcatcatttgggaaattctactatatgattcatctgtccacggtgtactctggagcatattatctgtactaacacgattactgcatgactcatataggagcaattatcatggtcttaaggatattgaagatatccagcttgtcctttgcaatggacttgatattatatatcacatcctgtccaatttaccagagggtatgcaagtagctgccgctagagcattctcagcattgtgtttcattgcatataaggcccaacctcagttgatggaaaatgccagctttacaagtgatgtttctgagatacggagattggaatcaaatatatcctgcattctagatgaggatgataaaaataatgattgtttggttgtggctgtattcaaccttttgacatctgctgctcgttatcagcctgcttttcttatttccttgatagagcagagtacgaagtcaactgatcataatgcttccaccaatgatcgtgacaatagagttttggttacttcaaaaagtaatgctagacttgttgaccaaatcttggactatattgataggtccattgagctcatgaatagatctcccttggtgttactcagtattctggacttgttgaaggcactatgggaaagtggtatacgatttttgtttattttagagaagctaagaagctctgtaacattctgggataacttatcacggtgtattcgtgctacacttgatatctcccctattgacaatattgatgccattgacgagaaattttcgttaaggtaccattgtcagggtaaaatatttgagatcatgtcacacgagttatttttgcaaggaaaattgcttacagagacttctaatactgtccaagatgatccaaaggggcaaaaagagcataaaagtgggccttgtcgtatcagtgtagtcttgaaatggttcgataatgctattttggccgatctggtcagtaatttgtcaagtaatgcatacaaaaaggaacttcatcatgcaaaggtagctgcctgcctatgtatcatccatttaataacaaagttgtcaaccggtgatactgggagcttgtctttctcattcatgaagaaaattcagatcatatcaacaaaattgttgcagcaccatgcatttttagctctcctgtcacagtattccctgcatggatacagcggtgaacaagaacttaataatttggttctcaatgatctttattaccttatacgtggagaactcgaaggacgtcagattagctctggcccttttcaggagttgctcagttttcttcttgggtttagaatttttgaacacaatcccttggagcaactacaaaacacatacctgatggcaaatgacaaatttttatttgatgtggagcacatacatgacgagcttggagttgatctctggactgattcagacaagaggtctaaagaagtagctaaaaaaatgctggatattatgagtaaagcaaatttaatgaagtattatgctgatgcaaaactttctgcattgatgtccttcttgaaatttttatctgtctacaaaggagcgatttctaacaaaaacttggacttacctgatggaggcatatcagtagcggccacacaatcagcaattaaatgtgcatgtaaatcatttgagtcaactgttgattcactgctgcctcaagctcatacagatgaggttttgtttcccctcttgtccgggcaagtggaattattgcttactttggcccgaatattgtttcatcaagcaaagaacaagaaatcaagccatctctgtccagatattgtacttctaatgaaaacttcaggtgccagcacttgtttgtttgttgatctcatgccatctgctcatgctcttaagcaaccagtgaagacacttcttgttctgcttttgtcgtcatatgagttcatgtacagcaaggttgacataaaagacctaccaaatgatattaacatttttggcgaattagcccttttaagtgtgagcttgctacctatactgtgcaaattggcagagaatagggaatgctctgatcttgctgttgcatcaatggacctaatattgaagggatctgtaccttctaatttatggatgcctattctgcaaaagcattttcatctccagactatactgcataaatgccagaatggtgatttattatctactcaagttatacttaatttcctcttgaccttggggcgaacaaaggatggtgctaaagttcttcagtctgccaatatttttgcattcttaaagttacttttgagtcagttgtctctggatgactcctgtttgagaaattccttgagcgcccaagtgaaggatgtgaacctatggggcttgggtctcggtattgttgcgtccctgaaccattgtttggatgatgacatttctcataacaatgtcgtgagcaacactatcagcttcctttcaggacatgtgcctttggtgtcatcatatctgtctacacagagtgctactactcatcagagcaagaaacgggcattgtcgcagaagtcacagacatcgctttcagcccttagtcttactgagaatattctcatacttctatgcatcttggcaaaataccattttccacgggacactggaaagaaggaagtagattcagaactaagagagattattatccacctgctagcatttataagcaaaggaagtgtaaagactggcaatgcctctaaatggaactcatcgtttttctgccctgctgttatcaaagaggaagtagcgcttaatgagaaaccaccactcatttgtagcaagtatgggtggttcagatttgcagcaagttgtactttgtcaactgcaggtgtttcagtttctcccagtgcagctttatcagtggtgagacgggacaagacttcaggagattctgattctataaggcagactcgttttactgagatattagctgttcagatatacaggattgcttttcttatcatgaagtttctctgtagtcaagcaaaagaagcagtaaaaagggcagaagaactggagtttcttgacctcgcccattttcctgagcttcccatgccagatattcttcatggtttacaggatcaagtggtttgtattgtcactgaaatattcgaggcaaatgggtcaagcactctaaatcccgagacagagaaggtatgccagctcctattggtgacacttgaaacgtcactttacatggaactatgtgtatcccaatcatgtggcatcaggccagtacttggtcggcttgaagatttctgcaaaggaattaaggctatgcttcaagctatagagaagcactccagttttgaaccttttgtcaggtcgctaactgaaattacttctcttttgtatcccgggcttttgcataataaccttctcatgtgactcttgtaaattgtcactgttaaagagatgtgttgttggctaactttgaattgagccacatatggacttgcatactcagttgacgtcacccgaggaagcttcgttttcgcacgttactgtcaccaaagtaaagtgggttccagcggctacgaagcaaattcgcagagccagggcaccaaatcaaactgaaggcgacgacgcccgaggaagcttcgttttcgcatcacctttgttcggtttcacagccgaggctcccaaagtggccagagaatcttggtggacttgcctttccgggactccacactgccgaccacgcttattcacccgtgtaaattatgctgggattctcctttgctggctcgtctggccgatgtgcgtcccatcatcacagagaactagaaacaaatgatacatatgtagatgctatgcgttcttgatcaatcagacacgcatttttttttctgtagaggaatacatgttcggcgcgttgcatctttacactaccatttgtttgccttctccatcctgtttaagccctgtttcaaaacgctaccatgcaaattaaccctaagggataatttgggagccgtaaaaccggaggggattggag

SEQ ID NO: 8359 - DNA, 6483 bp, Zea Mays
ccctccctccattgtgtctcctttcccagaaaaaccctcgttcagctgctacactcaccgcggtctctctctgtccatttcccgcctcctcgccgcaactagggtttcttaagccctcaccgcccatggcgagcggcagggcggctacatccagttccatcctcgtcaacgccgccggcaccagcaagaccctgtccgcatcgctatggtgggactccttcgtcgtcctctccgacgacctcgaccgagccactgctggcccctctgtcccggatgccctcgctaagcggatcaaaagccaccacgcgtggctccgagggtcggtctctatgttcgggaagccgaacgacgcgtccaggagcgcactggaagttggcgaggttgccgtcggggagcgtcgcctcactgtcaagccagagctcaaggaggccgcgcttcgtgcaagcaaatgcctgaacctggatgaagtgcaatcatacattctggtcaagagatcttcagaagtctctccaacaatccgtgatgctgatgctgaggagtttcttcatctggtatctgtacgatattaccttgagcgtcagtgcttactgaagtgcatcagaagaatctttgtgcatgcaagtgacgtgtctgattcaactgatcccattcgagatgaggcttcattattgattagtgaagagatagacagaaaactgatatctatcattgaagattctttttcaactgcatcttctgtaaaagcggaagcggaatttacaatttctagtctggaagaaactttgattgaagttaacttgattcttgacatattgtttcttactttttatgataacttctcaagatgtaatggtagacagtggataactttgtgttcaatttttaaggacattctatgtggttcttatggtgtcgggaaatttgttgcatctgttgaggcaaagaattcatttcattatgctaaagctcagctacttctcatccttattgaaactttggactttgagaatctcctccggatgattcatgatgaagttcctctgagtggagggtgttctgcattttctgtcggtgatattctggagatggatgttgaaatatcaaaattgcctgaattttcattggtagaatcaggaccacttatactggcttgggcagttttcctttgcctagttctgtctcttccagaaagtaacaccaacttggaaattgatcatacatcctatgcccgacgggcctttgagtttgcgccattcaattatttactaggagttctttgttcaagcatcttcagggagtcagatggtcctgtttctggttatcggggtatattgcggacattcatttcagcattcatcgcttcatatgagaaagaacacagttcctttgacatgatttcgagtattttatgtgaagtttatgatggagaggaatctctctgtatgcaattttgggataaagatagctttgttgatggtcctatcagatctgttcttcatatgctggaggaggagtatccttttcagatatctgaactgatacgtttcttatcagcagtttgccatgggacctggcctgctaattgtgtatataattatcttgagaggatgaatggagttacaacaatctataccatcccttgtgttgctgatggtgttggttatggccatcaaattgaaagtcatcatccagtcagcattcctagtattgaaggcattacaattccacaaggaacccatggctacattttgaaagttcttcaagaggataccacattagttcgctgggagttcccgcattctggggtatcctttttgctcataactctggcgcaagagctccattcatgcaattacaagaaggcatgtgatatcataggtctactttatcggatggtgtcgtcaaataaggacctgtgcttcgctttgatgcatgttgacaagtcactggctgttcaaacatcaaataacttaggacaaattgaaaagcatgtcaggattgatattgctaaggtattttgcaattccattttcaaatatgtgcgagatgttaataatgctgacatattgtccaaaacctttggtctactagcagaaatgatgaaatgcgctccatatcacgtgtttgatgcggcgttcgagtgcaacatcttcacttcacaattaagtagtccatcaagtgattggttactttctggtgccctagctagaatgctttttgctgcctatgaaggaaatggagattgttcttcgcttacatcttcagtgcttgactttaccactcaggttcttcggaaaggagcagatgctgatgatataatatcacctttaattgttttctcaattaaatacatcatgattaatcatgtgaactggaaacacaaggaatgtagtcgttggaagacaaccctacgggtgtttgaattggtgaaaagctgtcttcaagtaaaaccattctcatcaaagcttggtggcatcatttgggaaattctactatatgattcatctgtccacggtgtactctggagcatattatctgtactaacacgattactgcatgactcatataggagcaattatcatggtcttaaggatattgaagatatccagcttgtcctttgcaatggacttgatattatatatcacatcctgtccaatttaccagagggtatgcaagtagctgccgctagagcattctcagcattgtgtttcattgcatataaggcccaacctcagttgatggaaaatgccagctttacaagtgatgtttctgagatacggagattggaatcaaatatatcctgcattctagatgaggatgataaaaataatgattgtttggttgtggctgtattcaaccttttgacatctgctgctcgttatcagcctgcttttcttatttccttgatagagcagagtacgaagtcaactgatcataatgcttccaccaatgatcgtgacaatagagttttggttacttcaaaaagtaatgctagacttgttgaccaaatcttggactatattgataggtccattgagctcatgaatagatctcccttggtgttactcagtattctggacttgttgaaggcactatgggaaagtggtatacgatttttgtttattttagagaagctaagaagctctgtaacattctgggataacttatcacggtgtattcgtgctacacttgatatctcccctattgacaatattgatgccattgacgagaaattttcgttaaggtaccattgtcagggtaaaatatttgagatcatgtcacacgagttatttttgcaaggaaaattgcttacagagacttctaatactgtccaagatgatccaaaggggcaaaaagagcataaaagtgggccttgtcgtatcagtgtagtcttgaaatggttcgataatgctattttggccgatctggtcagtaatttgtcaagtaatgcatacaaaaaggaacttcatcatgcaaaggtagctgcctgcctatgtatcatccatttaataacaaagttgtcaaccggtgatactgggagcttgtctttctcattcatgaagaaaattcagatcatatcaacaaaattgttgcagcaccatgcatttttagctctcctgtcacagtattccctgcatggatacagcggtgaacaagaacttaataatttggttctcaatgatctttattaccttatacgtggagaactcgaaggacgtcagattagctctggcccttttcaggagttgctcagttttcttcttgggtttagaatttttgaacacaatcccttggagcaactacaaaacacatacctgatggcaaatgacaaatttttatttgatgtggagcacatacatgacgagcttggagttgatctctggactgattcagacaagaggtctaaagaagtagctaaaaaaatgctggatattatgagtaaagcaaatttaatgaagtattatgctgatgcaaaactttctgcattgatgtccttcttgaaatttttatctgtctacaaaggagcgatttctaacaaaaacttggacttacctgatggaggcatatcagtagcggccacacaatcagcaattaaatgtgcatgtaaatcatttgagtcaactgttgattcactgctgcctcaagctcatacagatgaggttttgtttcccctcttgtccgggcaagtggaattattgcttactttggcccgaatattgtttcatcaagcaaagaacaagaaatcaagccatctctgtccagatattgtacttctaatgaaaacttcaggtgccagcacttgtttgtttgttgatctcatgccatctgctcatgctcttaagcaaccagtgaagacacttcttgttctgcttttgtcgtcatatgagttcatgtacagcaaggttgacataaaagacctaccaaatgatattaacatttttggcgaattagcccttttaagtgtgagcttgctacctatactgtgcaaattggcagagaatagggaatgctctgatcttgctgttgcatcaatggacctaatattgaagggatctgtaccttctaatttatggatgcctattctgcaaaagcattttcatctccagactatactgcataaatgccagaatggtgatttattatctactcaagttatacttaatttcctcttgaccttggggcgaacaaaggatggtgctaaagttcttcagtctgccaatatttttgcattcttaaagttacttttgagtcagttgtctctggatgactcctgtttgagaaattccttgagcgcccaagtgaaggatgtgaacctatggggcttgggtctcggtattgttgcgtccctgaaccattgtttggatgatgacatttctcataacaatgtcgtgagcaacactatcagcttcctttcaggacatgtgcctttggtgtcatcatatctgtctacacagagtgctactactcatcagagcaagaaacgggcattgtcgcagaagtcacagacatcgctttcagcccttagtcttactgagaatattctcatacttctatgcatcttggcaaaataccattttccacgggacactggaaagaaggaagtagattcagaactaagagagattattatccacctgctagcatttataagcaaaggaagtgtaaagactggcaatgcctctaaatggaactcatcgtttttctgccctgctgttatcaaagaggaagtagcgcttaatgagaaaccaccactcatttgtagcaagtatgggtggttcagatttgcagcaagttgtactttgtcaactgcaggtgtttcagtttctcccagtgcagctttatcagtggtgagacgggacaagacttcaggagattctgattctataaggcagactcgttttactgagatattagctgttcagatatacaggattgcttttcttatcatgaagtttctctgtagtcaagcaaaagaagcagtaaaaagggcagaagaactggagtttcttgacctcgcccattttcctgagcttcccatgccagatattcttcatggtttacaggatcaagtggtttgtattgtcactgaaatattcgaggcaaatgggtcaagcactctaaatcccgagacagagaaggtatgccagctcctattggtgacacttgaaacgtcactttacatggaactatgtgtatcccaatcatgtggcatcaggccagtacttggtcggcttgaagatttctgcaaaggaattaaggctatgcttcaagctatagagaagcactccagttttgaaccttttgtcaggtcgctaactgaaattacttctcttttgtatcccgggcttttgcataataaccttctcatgtgactcttgtaaattgtcactgttaaagagatgtgttgttggctaactttgaattgagccacatatggacttgcatactcagttgacgtcacccgaggaagcttcgttttcgcacgttactgtcaccaaagtaaagtgggttccagcggctacgaagcaaattcgcagagccagggcaccaaatcaaactgaaggcgacgacgcccgaggaagcttcgttttcgcatcacctttgttcggtttcacagccgaggctcccaaagtggccagagaatcttggtggacttgcctttccgggactccacactgccgaccacgcttattcacccgtgtaaattatgctgggattctcctttgctggctcgtctggccgatgtgcgtcccatcatcacagagaactagaaacaaatgatacatatgtagatgctatgcgttcttgatcaatcagacacgcatttttttttctgtagaggaatacatgttcggcgcgttgcatctttacactaccatttgtttgccttctccatcctgtttaagccctgtttcaaaacgctaccatgcaaattaaccctaagggataatttgggagccgtaaaaccggaggggattggag

SEQ ID NO: 8360 - DNA, 6396 bp, Zea Mays
ccctccctccattgtgtctcctttcccagaaaaaccctcgttcagctgctacactcaccgcggtctctctctgtccatttcccgcctcctcgccgcaactagggtttcttaagccctcaccgcccatggcgagcggcagggcggctacatccagttccatcctcgtcaacgccgccggcaccagcaagaccctgtccgcatcgctatggtgggactccttcgtcgtcctctccgacgacctcgaccgagccactgctggcccctctgtcccggatgccctcgctaagcggatcaaaagccaccacgcgtggctccgagggtcggtctctatgttcgggaagccgaacgacgcgtccaggagcgcactggaagttggcgaggttgccgtcggggagcgtcgcctcactgtcaagccagagctcaaggaggccgcgcttcgtgcaagcaaatgcctgaacctggatgaagtgcaatcatacattctggtcaagagatcttcagaagtctctccaacaatccgtgatgctgatgctgaggagtttcttcatctggtatctgtacgatattaccttgagcgtcagtgcttactgaagtgcatcagaagaatctttgtgcatgcaagtgacgtgtctgattcaactgatcccattcgagatgaggcttcattattgattagtgaagagatagacagaaaactgatatctatcattgaagattctttttcaactgcatcttctgtaaaagcggaagcggaatttacaatttctagtctggaagaaactttgattgaagttaacttgattcttgacatattgtttcttactttttatgataacttctcaagatgtaatggtagacagtggataactttgtgttcaatttttaaggacattctatgtggttcttatggtgtcgggaaatttgttgcatctgttgaggcaaagaattcatttcattatgctaaagctcagctacttctcatccttattgaaactttggactttgagaatctcctccggatgattcatgatgaagttcctctgagtggagggtgttctgcattttctgtcggtgatattctggagatggatgttgaaatatcaaaattgcctgaattttcattggtagaatcaggaccacttatactggcttgggcagttttcctttgcctagttctgtctcttccagaaagtaacaccaacttgggtcctgtttctggttatcggggtatattgcggacattcatttcagcattcatcgcttcatatgaggtatcttatcagaaagaacacagttcctttgacatgatttcgagtattttatgtgaagtttatgatggagaggaatctctctgtatgcaattttgggataaagatagctttgttgatggtcctatcagatctgttcttcatatgctggaggaggagtatccttttcagatatctgaactgatacgtttcttatcagcagtttgccatgggacctggcctgctaattgtgtatataattatcttgagaggatgaatggagttacaacaatctataccatcccttgtgttgctgatggtgttggttatggccatcaaattgaaagtcatcatccagtcagcattcctagtattgaaggcattacaattccacaaggaacccatggctacattttgaaagttcttcaagaggataccacattagttcgctgggagttcccgcattctggggtatcctttttgctcataactctggcgcaagagctccattcatgcaattacaagaaggcatgtgatatcataggtctactttatcggatggtgtcgtcaaataaggacctgtgcttcgctttgatgcatgttgacaagtcactggctgttcaaacatcaaataacttaggacaaattgaaaagcatgtcaggattgatattgctaaggtattttgcaattccattttcaaatatgtgcgagatgttaataatgctgacatattgtccaaaacctttggtctactagcagaaatgatgaaatgcgctccatatcacgtgtttgatgcggcgttcgagtgcaacatcttcacttcacaattaagtagtccatcaagtgattggttactttctggtgccctagctagaatgctttttgctgcctatgaaggaaatggagattgttcttcgcttacatcttcagtgcttgactttaccactcaggttcttcggaaaggagcagatgctgatgatataatatcacctttaattgttttctcaattaaatacatcatgattaatcatgtgaactggaaacacaaggaatgtagtcgttggaagacaaccctacgggtgtttgaattggtgaaaagctgtcttcaagtaaaaccattctcatcaaagcttggtggcatcatttgggaaattctactatatgattcatctgtccacggtgtactctggagcatattatctgtactaacacgattactgcatgactcatataggagcaattatcatggtcttaaggatattgaagatatccagcttgtcctttgcaatggacttgatattatatatcacatcctgtccaatttaccagagggtatgcaagtagctgccgctagagcattctcagcattgtgtttcattgcatataaggcccaacctcagttgatggaaaatgccagctttacaagtgatgtttctgagatacggagattggaatcaaatatatcctgcattctagatgaggatgataaaaataatgattgtttggttgtggctgtattcaaccttttgacatctgctgctcgttatcagcctgcttttcttatttccttgatagagcagagtacgaagtcaactgatcataatgcttccaccaatgatcgtgacaatagagttttggttacttcaaaaagtaatgctagacttgttgaccaaatcttggactatattgataggtccattgagctcatgaatagatctcccttggtgttactcagtattctggacttgttgaaggcactatgggaaagtggtatacgatttttgtttattttagagaagctaagaagctctgtaacattctgggataacttatcacggtgtattcgtgctacacttgatatctcccctattgacaatattgatgccattgacgagaaattttcgttaaggtaccattgtcagggtaaaatatttgagatcatgtcacacgagttatttttgcaaggaaaattgcttacagagacttctaatactgtccaagatgatccaaaggggcaaaaagagcataaaagtgggccttgtcgtatcagtgtagtcttgaaatggttcgataatgctattttggccgatctggtcagtaatttgtcaagtaatgcatacaaaaaggaacttcatcatgcaaaggtagctgcctgcctatgtatcatccatttaataacaaagttgtcaaccggtgatactgggagcttgtctttctcattcatgaagaaaattcagatcatatcaacaaaattgttgcagcaccatgcatttttagctctcctgtcacagtattccctgcatggatacagcggtgaacaagaacttaataatttggttctcaatgatctttattaccttatacgtggagaactcgaaggacgtcagattagctctggcccttttcaggagttgctcagttttcttcttgggtttagaatttttgaacacaatcccttggagcaactacaaaacacatacctgatggcaaatgacaaatttttatttgatgtggagcacatacatgacgagcttggagttgatctctggactgattcagacaagaggtctaaagaagtagctaaaaaaatgctggatattatgagtaaagcaaatttaatgaagtattatgctgatgcaaaactttctgcattgatgtccttcttgaaatttttatctgtctacaaaggagcgatttctaacaaaaacttggacttacctgatggaggcatatcagtagcggccacacaatcagcaattaaatgtgcatgtaaatcatttgagtcaactgttgattcactgctgcctcaagctcatacagatgaggttttgtttcccctcttgtccgggcaagtggaattattgcttactttggcccgaatattgtttcatcaagcaaagaacaagaaatcaagccatctctgtccagatattgtacttctaatgaaaacttcaggtgccagcacttgtttgtttgttgatctcatgccatctgctcatgctcttaagcaaccagtgaagacacttcttgttctgcttttgtcgtcatatgagttcatgtacagcaaggttgacataaaagacctaccaaatgatattaacatttttggcgaattagcccttttaagtgtgagcttgctacctatactgtgcaaattggcagagaatagggaatgctctgatcttgctgttgcatcaatggacctaatattgaagggatctgtaccttctaatttatggatgcctattctgcaaaagcattttcatctccagactatactgcataaatgccagaatggtgatttattatctactcaagttatacttaatttcctcttgaccttggggcgaacaaaggatggtgctaaagttcttcagtctgccaatatttttgcattcttaaagttacttttgagtcagttgtctctggatgactcctgtttgagaaattccttgagcgcccaagtgaaggatgtgaacctatggggcttgggtctcggtattgttgcgtccctgaaccattgtttggatgatgacatttctcataacaatgtcgtgagcaacactatcagcttcctttcaggacatgtgcctttggtgtcatcatatctgtctacacagagtgctactactcatcagagcaagaaacgggcattgtcgcagaagtcacagacatcgctttcagcccttagtcttactgagaatattctcatacttctatgcatcttggcaaaataccattttccacgggacactggaaagaaggaagtagattcagaactaagagagattattatccacctgctagcatttataagcaaaggaagtgtaaagactggcaatgcctctaaatggaactcatcgtttttctgccctgctgttatcaaagaggaagtagcgcttaatgagaaaccaccactcatttgtagcaagtatgggtggttcagatttgcagcaagttgtactttgtcaactgcaggtgtttcagtttctcccagtgcagctttatcagtggtgagacgggacaagacttcaggagattctgattctataaggcagactcgttttactgagatattagctgttcagatatacaggattgcttttcttatcatgaagtttctctgtagtcaagcaaaagaagcagtaaaaagggcagaagaactggagtttcttgacctcgcccattttcctgagcttcccatgccagatattcttcatggtttacaggatcaagtggtttgtattgtcactgaaatattcgaggcaaatgggtcaagcactctaaatcccgagacagagaaggtatgccagctcctattggtgacacttgaaacgtcactttacatggaactatgtgtatcccaatcatgtggcatcaggccagtacttggtcggcttgaagatttctgcaaaggaattaaggctatgcttcaagctatagagaagcactccagttttgaaccttttgtcaggtcgctaactgaaattacttctcttttgtatcccgggcttttgcataataaccttctcatgtgactcttgtaaattgtcactgttaaagagatgtgttgttggctaactttgaattgagccacatatggacttgcatactcagttgacgtcacccgaggaagcttcgttttcgcacgttactgtcaccaaagtaaagtgggttccagcggctacgaagcaaattcgcagagccagggcaccaaatcaaactgaaggcgacgacgcccgaggaagcttcgttttcgcatcacctttgttcggtttcacagccgaggctcccaaagtggccagagaatcttggtggacttgcctttccgggactccacactgccgaccacgcttattcacccgtgtaaattatgctgggattctcctttgctggctcgtctggccgatgtgcgtcccatcatcacagagaactagaaacaaatgatacatatgtagatgctatgcgttcttgatcaatcagacacgcatttttttttctgtagaggaatacatgttcggcgcgttgcatctttacactaccatttgtttgccttctccatcctgtttaagccctgtttcaaaacgctaccatgcaaattaaccctaagggataatttgggagccgtaaaaccggaggggattggag

SEQ ID NO: 8361 - DNA, 6409 bp, Zea Mays
ccctccctccattgtgtctcctttcccagaaaaaccctcgttcagctgctacactcaccgcggtctctctctgtccatttcccgcctcctcgccgcaactagggtttcttaagccctcaccgcccatggcgagcggcagggcggctacatccagttccatcctcgtcaacgccgccggcaccagcaagaccctgtccgcatcgctatggtgggactccttcgtcgtcctctccgacgacctcgaccgagccactgctggcccctctgtcccggatgccctcgctaagcggatcaaaagccaccacgcgtggctccgagggtcggtctctatgttcgggaagccgaacgacgcgtccaggagcgcactggaagttggcgaggttgccgtcggggagcgtcgcctcactgtcaagccagagctcaaggaggccgcgcttcgtgcaagcaaatgcctgaacctggatgaagtgcaatcatacattctggtcaagagatcttcagaagtctctccaacaatccgtgatgctgatgctgaggagtttcttcatctggtatctgtacgatattaccttgagcgtcagtgcttactgaagtgcatcagaagaatctttgtgcatgcaagtgacgtgtctgattcaactgatcccattcgagatgaggcttcattattgattagtgaagagatagacagaaaactgatatctatcattgaagattctttttcaactgcatcttctgtaaaagcggaagcggaatttacaatttctagtctggaagaaactttgattgaagttaacttgattcttgacatattgtttcttactttttatgataacttctcaagatgtaatggtagacagtggataactttgtgttcaatttttaaggacattctatgtggttcttatggtgtcgggaaatttgttgcatctgttgaggcaaagaattcatttcattatgctaaagctcagctacttctcatccttattgaaactttggactttgagaatctcctccggatgattcatgatgaagttcctctgagtggagggtgttctgcattttctgtcggtgatattctggagatggatgttgaaatatcaaaattgcctgaattttcattggtagaatcaggaccacttatactggcttgggcagttttcctttgcctagttctgtctcttccagaaagtaacaccaacttggaaattgatcatacatcctatgcccgacgggcctttgagtttgcgccattcaattatttactaggagttctttgttcaagcatcttcagggagtcagatggtcctgtttctggttatcggggtatattgcggacattcatttcagcattcatcgcttcatatgaggtatcttatcagaaagaacacagttcctttgacatgatttcgagtattttatgtgaagtttatgatggagaggaatctctctgtatgcaattttgggataaagatagctttgttgatggtcctatcagatctgttcttcatatgctggaggaggagtatccttttcagatatctgaactgatacgtttcttatcagcagtttgccatgggacctggcctgctaattgtgtatataattatcttgagaggatgaatggagttacaacaatctataccatcccttgtgttgctgatggtgttggttatggccatcaaattgaaagtcatcatccagtcagcattcctagtattgaaggcattacaattccacaaggaacccatggctacattttgaaagttcttcaagaggataccacattagttcgctgggagttcccgcattctggggtatcctttttgctcataactctggcgcaagagctccattcatgcaattacaagaaggcatgtgatatcataggtctactttatcggatggtgtcgtcaaataaggattgatattgctaaggtattttgcaattccattttcaaatatgtgcgagatgttaataatgctgacatattgtccaaaacctttggtctactagcagaaatgatgaaatgcgctccatatcacgtgtttgatgcggcgttcgagtgcaacatcttcacttcacaattaagtagtccatcaagtgattggttactttctggtgccctagctagaatgctttttgctgcctatgaaggaaatggagattgttcttcgcttacatcttcagtgcttgactttaccactcaggttcttcggaaaggagcagatgctgatgatataatatcacctttaattgttttctcaattaaatacatcatgattaatcatgtgaactggaaacacaaggaatgtagtcgttggaagacaaccctacgggtgtttgaattggtgaaaagctgtcttcaagtaaaaccattctcatcaaagcttggtggcatcatttgggaaattctactatatgattcatctgtccacggtgtactctggagcatattatctgtactaacacgattactgcatgactcatataggagcaattatcatggtcttaaggatattgaagatatccagcttgtcctttgcaatggacttgatattatatatcacatcctgtccaatttaccagagggtatgcaagtagctgccgctagagcattctcagcattgtgtttcattgcatataaggcccaacctcagttgatggaaaatgccagctttacaagtgatgtttctgagatacggagattggaatcaaatatatcctgcattctagatgaggatgataaaaataatgattgtttggttgtggctgtattcaaccttttgacatctgctgctcgttatcagcctgcttttcttatttccttgatagagcagagtacgaagtcaactgatcataatgcttccaccaatgatcgtgacaatagagttttggttacttcaaaaagtaatgctagacttgttgaccaaatcttggactatattgataggtccattgagctcatgaatagatctcccttggtgttactcagtattctggacttgttgaaggcactatgggaaagtggtatacgatttttgtttattttagagaagctaagaagctctgtaacattctgggataacttatcacggtgtattcgtgctacacttgatatctcccctattgacaatattgatgccattgacgagaaattttcgttaaggtaccattgtcagggtaaaatatttgagatcatgtcacacgagttatttttgcaaggaaaattgcttacagagacttctaatactgtccaagatgatccaaaggggcaaaaagagcataaaagtgggccttgtcgtatcagtgtagtcttgaaatggttcgataatgctattttggccgatctggtcagtaatttgtcaagtaatgcatacaaaaaggaacttcatcatgcaaaggtagctgcctgcctatgtatcatccatttaataacaaagttgtcaaccggtgatactgggagcttgtctttctcattcatgaagaaaattcagatcatatcaacaaaattgttgcagcaccatgcatttttagctctcctgtcacagtattccctgcatggatacagcggtgaacaagaacttaataatttggttctcaatgatctttattaccttatacgtggagaactcgaaggacgtcagattagctctggcccttttcaggagttgctcagttttcttcttgggtttagaatttttgaacacaatcccttggagcaactacaaaacacatacctgatggcaaatgacaaatttttatttgatgtggagcacatacatgacgagcttggagttgatctctggactgattcagacaagaggtctaaagaagtagctaaaaaaatgctggatattatgagtaaagcaaatttaatgaagtattatgctgatgcaaaactttctgcattgatgtccttcttgaaatttttatctgtctacaaaggagcgatttctaacaaaaacttggacttacctgatggaggcatatcagtagcggccacacaatcagcaattaaatgtgcatgtaaatcatttgagtcaactgttgattcactgctgcctcaagctcatacagatgaggttttgtttcccctcttgtccgggcaagtggaattattgcttactttggcccgaatattgtttcatcaagcaaagaacaagaaatcaagccatctctgtccagatattgtacttctaatgaaaacttcaggtgccagcacttgtttgtttgttgatctcatgccatctgctcatgctcttaagcaaccagtgaagacacttcttgttctgcttttgtcgtcatatgagttcatgtacagcaaggttgacataaaagacctaccaaatgatattaacatttttggcgaattagcccttttaagtgtgagcttgctacctatactgtgcaaattggcagagaatagggaatgctctgatcttgctgttgcatcaatggacctaatattgaagggatctgtaccttctaatttatggatgcctattctgcaaaagcattttcatctccagactatactgcataaatgccagaatggtgatttattatctactcaagttatacttaatttcctcttgaccttggggcgaacaaaggatggtgctaaagttcttcagtctgccaatatttttgcattcttaaagttacttttgagtcagttgtctctggatgactcctgtttgagaaattccttgagcgcccaagtgaaggatgtgaacctatggggcttgggtctcggtattgttgcgtccctgaaccattgtttggatgatgacatttctcataacaatgtcgtgagcaacactatcagcttcctttcaggacatgtgcctttggtgtcatcatatctgtctacacagagtgctactactcatcagagcaagaaacgggcattgtcgcagaagtcacagacatcgctttcagcccttagtcttactgagaatattctcatacttctatgcatcttggcaaaataccattttccacgggacactggaaagaaggaagtagattcagaactaagagagattattatccacctgctagcatttataagcaaaggaagtgtaaagactggcaatgcctctaaatggaactcatcgtttttctgccctgctgttatcaaagaggaagtagcgcttaatgagaaaccaccactcatttgtagcaagtatgggtggttcagatttgcagcaagttgtactttgtcaactgcaggtgtttcagtttctcccagtgcagctttatcagtggtgagacgggacaagacttcaggagattctgattctataaggcagactcgttttactgagatattagctgttcagatatacaggattgcttttcttatcatgaagtttctctgtagtcaagcaaaagaagcagtaaaaagggcagaagaactggagtttcttgacctcgcccattttcctgagcttcccatgccagatattcttcatggtttacaggatcaagtggtttgtattgtcactgaaatattcgaggcaaatgggtcaagcactctaaatcccgagacagagaaggtatgccagctcctattggtgacacttgaaacgtcactttacatggaactatgtgtatcccaatcatgtggcatcaggccagtacttggtcggcttgaagatttctgcaaaggaattaaggctatgcttcaagctatagagaagcactccagttttgaaccttttgtcaggtcgctaactgaaattacttctcttttgtatcccgggcttttgcataataaccttctcatgtgactcttgtaaattgtcactgttaaagagatgtgttgttggctaactttgaattgagccacatatggacttgcatactcagttgacgtcacccgaggaagcttcgttttcgcacgttactgtcaccaaagtaaagtgggttccagcggctacgaagcaaattcgcagagccagggcaccaaatcaaactgaaggcgacgacgcccgaggaagcttcgttttcgcatcacctttgttcggtttcacagccgaggctcccaaagtggccagagaatcttggtggacttgcctttccgggactccacactgccgaccacgcttattcacccgtgtaaattatgctgggattctcctttgctggctcgtctggccgatgtgcgtcccatcatcacagagaactagaaacaaatgatacatatgtagatgctatgcgttcttgatcaatcagacacgcatttttttttctgtagaggaatacatgttcggcgcgttgcatctttacactaccatttgtttgccttctccatcctgtttaagccctgtttcaaaacgctaccatgcaaattaaccctaagggataatttgggagccgtaaaaccggaggggattggag

SEQ ID NO: 8362 - DNA, 6508 bp, Zea Mays
gttaaaccctccgccctccctccattgtgtctcctttcccagaaaaaccctcgttcagctgctacactcaccgcggtctctctctgtccatttcccgcctcctcgccgcaactagggtttcttaagccctcaccgcccatggcgagcggcagggcggctacatccagttccatcctcgtcaacgccgccggcaccagcaagaccctgtccgcatcgctatggtgggactccttcgtcgtcctctccgacgacctcgaccgagccactgctggcccctctgtcccggatgccctcgctaagcggatcaaaagccaccacgcgtggctccgagggtcggtctctatgttcgggaagccgaacgacgcgtccaggagcgcactggaagttggcgaggttgccgtcggggagcgtcgcctcactgtcaagccagagctcaaggaggccgcgcttcgtgcaagcaaatgcctgaacctggatgaagtgcaatcatacattctggtcaagagatcttcagaagtctctccaacaatccgtgatgctgatgctgaggagtttcttcatctggtatctgtacgatattaccttgagcgtcagtgcttactgaagtgcatcagaagaatctttgtgcatgcaagtgacgtgtctgattcaactgatcccattcgagatgaggcttcattattgattagtgaagagatagacagaaaactgatatctatcattgaagattctttttcaactgcatcttctgtaaaagcggaagcggaatttacaatttctagtctggaagaaactttgattgaagttaacttgattcttgacatattgtttcttactttttatgataacttctcaagatgtaatggtagacagtggataactttgtgttcaatttttaaggacattctatgtggttcttatggtgtcgggaaatttgttgcatctgttgaggcaaagaattcatttcattatgctaaagctcagctacttctcatccttattgaaactttggactttgagaatctcctccggatgattcatgatgaagttcctctgagtggagggtgttctgcattttctgtcggtgatattctggagatggatgttgaaatatcaaaattgcctgaattttcattggtagaatcaggaccacttatactggcttgggcagttttcctttgcctagttctgtctcttccagaaagtaacaccaacttggaaattgatcatacatcctatgcccgacgggcctttgagtttgcgccattcaattatttactaggagttctttgttcaagcatcttcagggagtcagatggtcctgtttctggttatcggggtatattgcggacattcatttcagcattcatcgcttcatatgaggtatcttatcagaaagaacacagttcctttgacatgatttcgagtattttatgtgaagtttatgatggagaggaatctctctgtatgcaattttgggataaagatagctttgttgatggtcctatcagatctgttcttcatatgctggaggaggagtatccttttcagatatctgaactgatacgtttcttatcagcagtttgccatgggacctggcctgctaattgtgtatataattatcttgagaggatgaatggagttacaacaatctataccatcccttgtgttgctgatggtgttggttatggccatcaaattgaaagtcatcatccagtcagcattcctagtattgaaggcattacaattccacaaggaacccatggctacattttgaaagttcttcaagaggataccacattagttcgctgggagttcccgcattctggggtatcctttttgctcataactctggcgcaagagctccattcatgcaattacaagaaggcatgtgatatcataggtctactttatcggatggtgtcgtcaaataaggacctgtgcttcgctttgatgcatgttgacaagtcactggctgttcaaacatcaaataacttaggacaaattgaaaagcatgtcaggattgatattgctaaggtattttgcaattccattttcaaatatgtgcgagatgttaataatgctgacatattgtccaaaacctttggtctactagcagaaatgatgaaatgcgctccatatcacgtgtttgatgcggcgttcgagtgcaacatcttcacttcacaattaagtagtccatcaagtgattggttactttctggtgccctagctagaatgctttttgctgcctatgaaggaaatggagattgttcttcgcttacatcttcagtgcttgactttaccactcaggttcttcggaaaggagcagatgctgatgatataatatcacctttaattgttttctcaattaaatacatcatgattaatcatgtgaactggaaacacaaggaatgtagtcgttggaagacaaccctacgggtgtttgaattggtgaaaagctgtcttcaagtaaaaccattctcatcaaagcttggtggcatcatttgggaaattctactatatgattcatctgtccacggtgtactctggagcatattatctgtactaacacgattactgcatgactcatataggagcaattatcatggtcttaaggatattgaagatatccagcttgtcctttgcaatggacttgatattatatatcacatcctgtccaatttaccagagggtatgcaagtagctgccgctagagcattctcagcattgtgtttcattgcatataaggcccaacctcagttgatggaaaatgccagctttacaagtgatgtttctgagatacggagattggaatcaaatatatcctgcattctagatgaggatgataaaaataatgattgtttggttgtggctgtattcaaccttttgacatctgctgctcgttatcagcctgcttttcttatttccttgatagagcagagtacgaagtcaactgatcataatgcttccaccaatgatcgtgacaatagagttttggttacttcaaaaagtaatgctagacttgttgaccaaatcttggactatattgataggtccattgagctcatgaatagatctcccttggtgttactcagtattctggacttgttgaaggcactatgggaaagtggtatacgatttttgtttattttagagaagctaagaagctctgtaacattctgggataacttatcacggtgtattcgtgctacacttgatatctcccctattgacaatattgatgccattgacgagaaattttcgttaaggtaccattgtcagggtaaaatatttgagatcatgtcacacgagttatttttgcaaggaaaattgcttacagagacttctaatactgtccaagatgatccaaaggggcaaaaagagcataaaagtgggccttgtcgtatcagtgtagtcttgaaatggttcgataatgctattttggccgatctggtcagtaatttgtcaagtaatgcatacaaaaaggaacttcatcatgcaaaggtagctgcctgcctatgtatcatccatttaataacaaagttgtcaaccggtgatactgggagcttgtctttctcattcatgaagaaaattcagatcatatcaacaaaattgttgcagcaccatgcatttttagctctcctgtcacagtattccctgcatggatacagcggtgaacaagaacttaataatttggttctcaatgatctttattaccttatacgtggagaactcgaaggacgtcagattagctctggcccttttcaggagttgctcagttttcttcttgggtttagaatttttgaacacaatcccttggagcaactacaaaacacatacctgatggcaaatgacaaatttttatttgatgtggagcacatacatgacgagcttggagttgatctctggactgattcagacaagaggtctaaagaagtagctaaaaaaatgctggatattatgagtaaagcaaatttaatgaagtattatgctgatgcaaaactttctgcattgatgtccttcttgaaatttttatctgtctacaaaggagcgatttctaacaaaaacttggacttacctgatggaggcatatcagtagcggccacacaatcagcaattaaatgtgcatgtaaatcatttgagtcaactgttgattcactgctgcctcaagctcatacagatgaggttttgtttcccctcttgtccgggcaagtggaattattgcttactttggcccgaatattgtttcatcaagcaaagaacaagaaatcaagccatctctgtccagatattgtacttctaatgaaaacttcaggtgccagcacttgtttgtttgttgatctcatgccatctgctcatgctcttaagcaaccagtgaagacacttcttgttctgcttttgtcgtcatatgagttcatgtacagcaaggttgacataaaagacctaccaaatgatattaacatttttggcgaattagcccttttaagtgtgagcttgctacctatactgtgcaaattggcagagaatagggaatgctctgatcttgctgttgcatcaatggacctaatattgaagggatctgtaccttctaatttatggatgcctattctgcaaaagcattttcatctccagactatactgcataaatgccagaatggtgatttattatctactcaagttatacttaatttcctcttgaccttggggcgaacaaaggatggtgctaaagttcttcagtctgccaatatttttgcattcttaaagttacttttgagtcagttgtctctggatgactcctgtttgagaaattccttgagcgcccaagtgaaggatgtgaacctatggggcttgggtctcggtattgttgcgtccctgaaccattgtttggatgatgacatttctcataacaatgtcgtgagcaacactatcagcttcctttcaggacatgtgcctttggtgtcatcatatctgtctacacagagtgctactactcatcagagcaagaaacgggcattgtcgcagaagtcacagacatcgctttcagcccttagtcttactgagaatattctcatacttctatgcatcttggcaaaataccattttccacgggacactggaaagaaggaagtagattcagaactaagagagattattatccacctgctagcatttataagcaaaggaagtgtaaagactggcaatgcctctaaatggaactcatcgtttttctgccctgctgttatcaaagaggaagtagcgcttaatgagaaaccaccactcatttgtagcaagtatgggtggttcagatttgcagcaagttgtactttgtcaactgcaggtgtttcagtttctcccagtgcagctttatcagtggtgagacgggacaagacttcaggagattctgattctataaggcagactcgttttactgagatattagctgttcagatatacaggattgcttttcttatcatgaagtttctctgtagtcaagcaaaagaagcagtaaaaagggcagaagaactggagtttcttgacctcgcccattttcctgagcttcccatgccagatattcttcatggtttacaggatcaagtggtttgtattgtcactgaaatattcgaggcaaatgggtcaagcactctaaatcccgagacagagaaggtatgccagctcctattggtgacacttgaaacgtcactttacatggaactatgtgtatcccaatcatgtggcatcaggccagtacttggtcggcttgaagatttctgcaaaggaattaaggctatgcttcaagctatagagaagcactccagttttgaaccttttgtcaggtcgctaactgaaattacttctcttttgtatcccgggcttttgcataataaccttctcatgtgactcttgtaaattgtcactgttaaagagatgtgttgttggctaactttgaattgagccacatatggacttgcatactcagttgacgtcacccgaggaagcttcgttttcgcacgttactgtcaccaaagtaaagtgggttccagcggctacgaagcaaattcgcagagccagggcaccaaatcaaactgaaggcgacgacgcccgaggaagcttcgttttcgcatcacctttgttcggtttcacagccgaggctcccaaagtggccagagaatcttggtggacttgcctttccgggactccacactgccgaccacgcttattcacccgtgtaaattatgctgggattctcctttgctggctcgtctggccgatgtgcgtcccatcatcacagagaactagaaacaaatgatacatatgtagatgctatgcgttcttgatcaatcagacacgcatttttttttctgtagaggaatacatgttcggcgcgttgcatctttacactaccatttgtttgccttctccatcctgtttaagccctgtttcaaaacgctaccatgcaaattaaccctaagggataatttgggagccgtaaaaccggaggggattggag

SEQ ID NO: 8363 - DNA, 759 bp, Zea Mays
atatatatagccatcgtcagctagctggctcaagtcaagctgagcacaagtgatcgaacaactacagtacatacactctatcgatctctgtgaattaatttagttattaactcgatcatggcgcgcccccaaaacaaccagaaccccagggtgttcctggtcctcaacatcggcggcgtgacggttggccgcgtcgtcatcgagctgttcgccgacaaggtgcccaagacggcggagaacttccggctgctgtgcaccggagagcgcagcgtggggaagtggtccggcaagcgcctgcactacaagggcgcggcgttccaccgcgtggtgcccgggttcatgtgccagggcggcgacatcacggcgggcaacggcacgggcggcgagtctgcgatcggtgacgcccggtacttcgccgacgaggcgttcggagccgtccggcacgatggcgccggcgtggtgtccatggccaacgccgggcccaacaccaacggatctcagttcttcatcaccttcgccgacgcgccgtggctggacggccgccacgtcgcgttcggccgcgtcgtggatggcatggacgctctgcgtgccatcgaaaaggccgggtccatcagtggcaggactatgaggcatgtcgtcatcgccgactgcggcgagctcaagcactaagccgccatgtcctaattattcaggatcatacttactctctaccaaatctgacactatctaaaactgtcattacacccaactgggcatgga

SEQ ID NO: 8364 - DNA, 2268 bp, Zea Mays
ccctccctccattgtgtctcctttcccagaaaaaccctcgttcagctgctacactcaccgcggtctctctctgtccatttcccgcctcctcgccgcaactagggtttcttaagccctcaccgcccatggcgagcggcagggcggctacatccagttccatcctcgtcaacgccgccggcaccagcaagaccctgtccgcatcgctatggtgggactccttcgtcgtcctctccgacgacctcgaccgagccactgctggcccctctgtcccggatgccctcgctaagcggatcaaaagccaccacgcgtggctccgagggtcggtctctatgttcgggaagccgaacgacgcgtccaggagcgcactggaagttggcgaggttgccgtcggggagcgtcgcctcactgtcaagccagagctcaaggaggccgcgcttcgtgcaagcaaatgcctgaacctggatgaagtgcaatcatacattctggtcaagagatcttcagaagtctctccaacaatccgtgatgctgatgctgaggagtttcttcatctggtatctgtacgatattaccttgagcgtcagtgcttactgaagtgcatcagaagaatctttgtgcatgcaagtgacgtgtctgattcaactgatcccattcgagatgaggcttcattattgattagtgaagagatagacagaaaactgatatctatcattgaagattctttttcaactgcatcttctgtaaaagcggaagcggaatttacaatttctagtctggaagaaactttgattgaagttaacttgattcttgacatattgtttcttactttttatgataacttctcaagatgtaatggtagacagtggataactttgtgttcaatttttaaggacattctatgtggttcttatggtgtcgggaaatttgttgcatctgttgaggcaaagaattcatttcattatgctaaagctcagctacttctcatccttattgaaactttggactttgagaatctcctccggatgattcatgatgaagttcctctgagtggagggtgttctgcattttctgtcggtgatattctggagatggatgttgaaatatcaaaattgcctgaattttcattggtagaatcaggaccacttatactggcttgggcagttttcctttgcctagttctgtctcttccagaaagtaacaccaacttgggtcctgtttctggttatcggggtatattgcggacattcatttcagcattcatcgcttcatatgaggtatcttatcagaaagaacacagttcctttgacatgatttcgagtattttatgtgaagtttatgatggagaggaatctctctgtatgcaattttgggataaagatagctttgttgatggtcctatcagatctgttcttcatatgctggaggaggagtatccttttcagatatctgaactgatacgtttcttatcagcagtttgccatgggacctggcctgctaattgtgtatataattatcttgagaggatgaatggagttacaacaatctataccatcccttgtgttgctgatggtgttggttatggccatcaaattgaaagtcatcatccagtcagcattcctagtattgaaggcattacaattccacaaggaacccatggctacattttgaaagttcttcaagaggataccacattagttcgctgggagttcccgcattctggggtatcctttttgctcataactctggcgcaagagctccattcatgcaattacaagaaggcatgtgatatcataggtctactttatcggatggtgtcgtcaaataaggacctgtgcttcgctttgatgcatgttgacaagtcactggctgttcaaacatcaaataacttaggacaaattgaaaagcatgtcaggattgatattgctaaggtattttgcaattccattttcaaatatgtgcgagatgttaataatgctgacatattgtccaaaacctttggtctactagcagaaatgatgaaatgcgctccatatcacgtgtttgatgcggcgttcgagtgcaacatcttcacttcacaattaagtagtccatcaagtgattggttactttctggtgccctagctagaatgctttttgctgcctatgaaggaaatggagattgttcttcgcttacatcttcagtttctgacccctggatggctcgatatatatgttttgaaacatagcggagctcttagagaggatgttgtacactcaaggcttaaataaaat

SEQ ID NO: 8365 - DNA, 1017 bp, Zea Mays
gtgacgtgtctgattcaactgatcccattcgagatgaggcttcattattgattagtgaagagatagacagaaaactgatatctatcattgaagattctttttcaactgcatcttctgtaaaagcggaagcggaatttacaatttctagtctggaagaaactttgattgaagttaacttgattcttgacatattgtttcttactttttatgataacttctcaagatgtaatggtagacagtggataactttgtgttcaatttttaaggacattctatgtggttcttatggtgtcgggaaatttgttgcatctgttgaggcaaagaattcatttcattatgctaaagctcagctacttctcatccttattgaaactttggactttgagaatctcctccggatgattcatgatgaagttcctctgagtggagggtgttctgcattttctgtcggtgatattctggagatggatgttgaaatatcaaaattgcctgaattttcattggtagaatcaggaccacttatactggcttgggcagttttcctttgcctagttctgtctcttccagaaagtaacaccaacttgggtcctgtttctggttatcggggtatattgcggacattcatttcagcattcatcgcttcatatgaggtatcttatcagaaagaacacagttcctttgacatgatttcgagtattttatgtgaagtttatgatggagaggaatctctctgtatgcaattttgggataaagatagctttgttgatggtcctatcagatataattatcttgagaggatgaatggagttacaacaatctataccatcccttgtgttgctgatggtgttggttatggccatcaaattgaaagtcatcatccagtcagcattcctagtattgaaggcattacaattccacaaggaacccatggctacattttgaaagttcttcaagaggataccacattagttcgctgggaggatggtctctcttttgaatcttggtggaggagcagca

SEQ ID NO: 8366 - DNA, 1737 bp, Zea Mays
ccctccctccattgtgtctcctttcccagaaaaaccctcgttcagctgctacactcaccgcggtctctctctgtccatttcccgcctcctcgccgcaactagggtttcttaagccctcaccgcccatggcgagcggcagggcggctacatccagttccatcctcgtcaacgccgccggcaccagcaagaccctgtccgcatcgctatggtgggactccttcgtcgtcctctccgacgacctcgaccgagccactgctggcccctctgtcccggatgccctcgctaagcggatcaaaagccaccacgcgtggctccgagggtcggtctctatgttcgggaagccgaacgacgcgtccaggagcgcactggaagttggcgaggttgccgtcggggagcgtcgcctcactgtcaagccagagctcaaggaggccgcgcttcgtgcaagcaaatgcctgaacctggatgaagtgcaatcatacattctggtcaagagatcttcagaagtctctccaacaatccgtgatgctgatgctgaggagtttcttcatctggtatctgtacgatattaccttgagcgtcagtgcttactgaagtgcatcagaagaatctttgtgcatgcaagtgacgtgtctgattcaactgatcccattcgagatgaggcttcattattgattagtgaagagatagacagaaaactgatatctatcattgaagattctttttcaactgcatcttctgtaaaagcggaagcggaatttacaatttctagtctggaagaaactttgattgaagttaacttgattcttgacatattgtttcttactttttatgataacttctcaagatgtaatggtagacagtggataactttgtgttcaatttttaaggacattctatgtggttcttatggtgtcgggaaatttgttgcatctgttgaggcaaagaattcatttcattatgctaaagctcagctacttctcatccttattgaaactttggactttgagaatctcctccggatgattcatgatgaagttcctctgagtggagggtgttctgcattttctgtcggtgatattctggagatggatgttgaaatatcaaaattgcctgaattttcattggtagaatcaggaccacttatactggcttgggcagttttcctttgcctagttctgtctcttccagaaagtaacaccaacttggaaattgatcatacatcctatgcccgacgggcctttgagtttgcgccattcaattatttactaggagttctttgttcaagcatcttcagggagtcagatggtcctgtttctggttatcggggtatattgcggacattcatttcagcattcatcgcttcatatgaggtatcttatcagaaagaacacagttcctttgacatgatttcgagtattttatgtgaagtttatgatggagaggaatctctctgtatgcaattttgggataaagatagctttgttgatggtcctatcagatataattatcttgagaggatgaatggagttacaacaatctataccatcccttgtgttgctgatggtgttggttatggccatcaaattgaaagtcatcatccagtcagcattcctagtattgaaggcattacaattccacaaggaacccatggctacattttgaaagttcttcaagaggataccacattagttcgctgggaggatggtctctcttttgaatcttggtggaggagcagca

SEQ ID NO: 8367 - DNA, 1742 bp, Zea Mays
tgcaggtatacgaacgtcggatctaccgctacctaacaaatccaattgagggacttcatatcataaaagatgaagatatacttgttgcatacaggctccctgttggtcatgaaaaacttttgaggttggagattctgcattcgagggcagacagatttcttgtggagcctcagtttaatatcaataggaagctcattgggtgccccattgtgacttgtattccaaatgactctactgcaaaatctgatatttatgcggctgtatcttctgtcttggttccatttgtaagagcaaaagcacatagccctgatgtgtctgctgtcaagttaaatggcaatgggccaagtttggacggtattgtcctgaccgataatggcaccaccagtgaggagggtctctctacatcaagatcaagggaggacgataatgcagctgacaatgagcttttaccgtttcagctttcattgactgatgaaaaaggtagtacaagaaatgctatagacatggattctaatcgtgttctaggactagttattagggttttgatggattggggtgagaaagagcatgggatgtacaatattgatcacatggatgtacttcctgaagtcttcaagcctggttttatgtcaaagaagacccgtcaagaagcagtcaatttattttcatgcttggatgcttttctgaaggaggagcctctagggccagatgatatgtggtactgtcctgggtgcaaggaacacaggcaagctagcaagaaactggacttgtggaggttgcctgagatattggtagttcatttgaaaaggttctcgtacagccggtatatgaagaataagcttgatacatttgtgaactttccgatccatgacctcaatatgagcaagtatgtgaagcctacatcaagaggtgaccagcaccccgtgtatgaactctatgcagtgataaatcattatggcggtctcggtggtggacactactctgcatatgcgaagctagttgaagaggacaattggtatcattttgatgacagtcatgtttcctctgttaatgaggatgagatcaggcgatctgcagcatatgttcttttctaccgacgagttggaggttcaagtacagcggcaaacggtggtccagttgacattgaaatggttgattcgctagagacatagttccccagatcaaagcctgagtataacatgtggatcgagatatggagatcagaagagttatggaatttgcatgtctgctccggaatggaatatttgtgtatgaagcctttgacattttgaggcatggcagacaactgaggtcgaaatagcgtggtagcttggatctgcacatctatatgattgagggcctggtgtttaggattataatctgcccagattatataacctatcttattttgaactaagtgttagttcaaaataagttagattatataatatggacaaattatattcccaatcaaacaggctatgattggacttactgatacccatttgagtagaactgatcttgacaggtatccgagaaaacgatgaccttaattgaaaattttgctgatacgctgatgcagcacttagggtctactattgttattggtgtagccaagggattgcaactgggaaaaatggtgtaaaaacgctgcatatttttttttgcctaagctacagctgtgctacagcaaattttgattacggttgtttttttaaaatgcccaatcatcagcacttagc

SEQ ID NO: 8368 - DNA, 2249 bp, Zea Mays
cttagttctagagctctccaaatctcctgtttatgtcctatcacattgcattttaacatttccttcatttcttttataataggagctacttgcgtttctgttggatggtctgcatgaagatctgaaccgtgtaaaagagaaaccatatattgaggcaaaagatgcagatggccgcccagatgatgaatttgctgaagaatgctggaattaccataaagctcgaaatgactccataattgttgataagtttcaaggtcaatacaagtccacattggtgtgcccagtttgtaacaaaatctctgttacctttgatccatttatgtatttgtcgctaccattgccatcaacagtttactcggatgattactgtaactgtattcagtggtacgggagatgttcttccaatgccttacactgtgactgtacagaaaaatggaaactgccgtgatcttactaaagcccttgctgatgtctgctgcttaaaaaattctgagacattgttgcttgcagaggtatacgaacgtcggatctaccgctacctaacaaatccaattgagggacttcatatcataaaagatgaagatatacttgttgcatacaggctccctgttggtcatgaaaaacttttgaggttggagattctgcattcgagggcagacagatttcttgtggagcctcagtttaatatcaataggaagctcattgggtgccccattgtgacttgtattccaaatgactctactgcaaaatctgatatttatgcggctgtatcttctgtcttggttccatttgtaagagcaaaagcacatagccctgatgtgtctgctgtcaagttaaatggcaatgggccaagtttggacggtattgtcctgaccgataatggcaccaccagtgaggagggtctctctacatcaagatcaagggaggacgataatgcagctgacaatgagcttttaccgtttcagctttcattgactgatgaaaaaggtagtacaagaaatgctatagacatggattctaatcgtgttctaggactagttattagggttttgatggattggggtgagaaagagcatgggatgtacaatattgatcacatggatgtacttcctgaagtcttcaagcctggttttatgtcaaagaagacccgtcaagaagcagtcaatttattttcatgcttggatgcttttctgaaggaggagcctctagggccagatgatatgtggtactgtcctgggtgcaaggaacacaggcaagctagcaagaaactggacttgtggaggttgcctgagatattggtagttcatttgaaaaggttctcgtacagccggtatatgaagaataagcttgatacatttgtgaactttccgatccatgacctcaatatgagcaagtatgtgaagcctacatcaagaggtgaccagcaccccgtgtatgaactctatgcagtgataaatcattatggcggtctcggtggtggacactactctgcatatgcgaagctagttgaagaggacaattggtatcattttgatgacagtcatgtttcctctgttaatgaggatgagatcaggcgatctgcagcatatgttcttttctaccgacgagttggaggttcaagtacagcggcaaacggtggtccagttgacattgaaatggttgattcgctagagacatagttccccagatcaaagcctgagtataacatgtggatcgagatatggagatcagaagagttatggaatttgcatgtctgctccggaatggaatatttgtgtatgaagcctttgacattttgaggcatggcagacaactgaggtcgaaatagcgtggtagcttggatctgcacatctatatgattgagggcctggtgtttaggattataatctgcccagattatataacctatcttattttgaactaagtgttagttcaaaataagttagattatataatatggacaaattatattcccaatcaaacaggctatgattggacttactgatacccatttgagtagaactgatcttgacaggtatccgagaaaacgatgaccttaattgaaaattttgctgatacgctgatgcagcacttagggtctactattgttattggtgtagccaagggattgcaactgggaaaaatggtgtaaaaacgctgcatatttttttttgcctaagctacagctgtgctacagcaaattttgattacggttgtttttttaaaatgcccaatcatcagcacttagc

SEQ ID NO: 8369 - DNA, 3439 bp, Zea Mays
aaataaattaccgtatttttttcgtctcatcccctctccatttctttcttggtttcctcctctatctctcgtctccctccgaccgaattaaaacgctcgacctgccaagccggactgaaccctaggccccgatccggcgtctcgccgtgctgcttggatttgatcgggcggggttggggtcgtatcggcggcgggatgaccatcccgagcgcggaggggttcctccaggcgtcgagctgcctcccgtgcacggcgacggaggagcgggaggtcgttgacgcgcttaccaaggaggccgagaagaatgtcaagcacggcgatctccgctatctcgtctcgcagagctggtggatggagtggcaaggatatgtgggtctagtcaattatggagaaagtggcaccgagcagtttcctcaggccacaaatagacctggagagattgataactcgaagcttgttttggcagaaaggatcaatggtagtgaggagccagagcttcaaaggaccttgagagaaggggagcactatactttggtgccgcaagaagtttggcaaaggctatatgaatggtataaaggtggaccagaaatccctagaaaagttatttttgacaatccaactgacaagacttacgtagtggatgtctaccctctctgtctaaaactaattgatgcaagggacgactctgagaaagtttttaggataagtagaaaggccaaagttcatgagctttactcaatggtttgctcgctcatgtcagtagagcagtctgagattgtcatctgggattattatcggaggacaaagggcaaggagttgactaatcaaaatgatacactagaagaagctcaacttagtatggaccaggagatcctcttggagatgaagctaggcgggggcagttcaggtttcagtgcaagatccacaaatgatgaattggcattaattccattagaaccctcaacatcatcattttctattgctggagggcctacattttcaaatggtttttcatctgggattggttctagtttttcgcaagataatagctttagtcctttattaagggatggagaagatggttacaatagtctcagcaatggaactaaagatgacactcacggattgagtggattacataacttgggtaatacatgcttcatgaatagtgccatacaatccttggttcatacacctccattggtacagtactttttggaggactatacttgtgaaataaacaaggaaaatccactaggcctccagggggaacttgcaatagcatttggagagctacttagaaaactttggtcgtctggtcgaacttctattgctccacgggcatttaaatcgaaactttctcgatttgccccccagttcagtggatataatcagcatgattctcaggagctacttgcgtttctgttggatggtctgcatgaagatctgaaccgtgtaaaagagaaaccatatattgaggcaaaagatgcagatggccgcccagatgatgaatttgctgaagaatgctggaattaccataaagctcgaaatgactccataattgttgataagtttcaaggtcaatacaagtccacattggtgtgcccagtttgtaacaaaatctctgttacctttgatccatttatgtatttgtcgctaccattgccatcaacagtttactcggatgattactgtaactgtattcagtggtacgggagatgttcttccaatgccttacactgtgactgtacagaaaaatggaaactgccgtgatcttactaaagcccttgctgatgtctgctgcttaaaaaattctgagacattgttgcttgcagaggtatacgaacgtcggatctaccgctacctaacaaatccaattgagggacttcatatcataaaagatgaagatatacttgttgcatacaggctccctgttggtcatgaaaaacttttgaggttggagattctgcattcgagggcagacagagcaaaagcacatagccctgatgtgtctgctgtcaagttaaatggcaatgggccaagtttggacggtattgtcctgaccgataatggcaccaccagtgaggagggtctctctacatcaagatcaagggaggacgataatgcagctgacaatgagcttttaccgtttcagctttcattgactgatgaaaaaggtagtacaagaaatgctatagacatggattctaatcgtgttctaggactagttattagggttttgatggattggggtgagaaagagcatgggatgtacaatattgatcacatggatgtacttcctgaagtcttcaagcctggttttatgtcaaagaagacccgtcaagaagcagtcaatttattttcatgcttggatgcttttctgaaggaggagcctctagggccagatgatatgtggtactgtcctgggtgcaaggaacacaggcaagctagcaagaaactggacttgtggaggttgcctgagatattggtagttcatttgaaaaggttctcgtacagccggtatatgaagaataagcttgatacatttgtgaactttccgatccatgacctcaatatgagcaagtatgtgaagcctacatcaagaggtgaccagcaccccgtgtatgaactctatgcagtgataaatcattatggcggtctcggtggtggacactactctgcatatgcgaagctagttgaagaggacaattggtatcattttgatgacagtcatgtttcctctgttaatgaggatgagatcaggcgatctgcagcatatgttcttttctaccgacgagttggaggttcaagtacagcggcaaacggtggtccagttgacattgaaatggttgattcgctagagacatagttccccagatcaaagcctgagtataacatgtggatcgagatatggagatcagaagagttatggaatttgcatgtctgctccggaatggaatatttgtgtatgaagcctttgacattttgaggcatggcagacaactgaggtcgaaatagcgtggtagcttggatctgcacatctatatgattgagggcctggtgtttaggattataatctgcccagattatataacctatcttattttgaactaagtgttagttcaaaataagttagattatataatatggacaaattatattcccaatcaaacaggctatgattggacttactgatacccatttgagtagaactgatcttgacaggtatccgagaaaacgatgaccttaattgaaaattttgctgatacgctgatgcagcacttagggtctactattgttattggtgtagccaagggattgcaactgggaaaaatggtgtaaaaacgctgcatatttttttttgcctaagctacagctgtgctacagcaaattttgattacggttgtttttttaaaatgcccaatcatcagcacttagc

SEQ ID NO: 8370 - DNA, 1288 bp, Zea Mays
cactcgatgaggtcatcgccaaggaggagatttgggccaacatcaaatccttgccgcctgataaggcgccgggccccgatggatataccgacacttttataaagtggcttggtctgtgattaagatggatttcatggcagcagggggatgtctctcgtctctaccttctcaactctgcttatgtcatcttgctggccatagggatgaaagtgtctaagaggagttgtcgtcatggtgcattctttcgccattttggagaggtccctcaggactgcaacggaatgtgcgacaattgtgcttccactattgagcagaaggatattgatgtcacctaccatacaaaaattatagtttcacttcttcacgatatgcaactttaatgatcaaagagctacactactacagctggtggataagttcaagtcaaagtggaaaggtttaggtagtttcaatgaagctgttgatcttagaaaagaagaagttgagcagttgatagttaaccttatactcgacaatgttttgaaagaagaatttcagcacacagcatattcaaccaacgcttatgttaccttaggagcattgtggaagccagcactacaaggaaacagagtagtcaagcttgagattgctattgcttctaaagatagagatgttagatccaagggcgcaaaacgaggtcgcatgagtgatttggaagccaaactagatgaactgcgtagggatctgtcatccacgggtagcgatgccatatttccccatgcagttcttactgcgcaacaaatttcactactgagcagccagaagccaaccactccagctgagctagaaaaggttatagggaaggtgaagacaaggaagtacggcagcaagatcattgagctgatgaggtcacatgacaattcaggaagtggccgaggcaaggaggctggcgatgaacacagagctaagaagatcaaaacgaaggatgaggatgttgtttgtgttgagagtagcgaggaagaatagaatatgcccttcacatacttggctttttagtctatcatctcatggttaattattttgccaatcatttcctccgacgtcatctttctgtaatttagactttcacggattaatgcacagtcatatttcttacagagaaagcctcgagcatccttttgaccggttcatagtcttttgcttcggtagctttgtatcttgttgatgatcggattaatgtgcgaatacttgggattaatgtgcgaaaactttgtgccaagtgtttgaatgtactatacacatgctgagg

SEQ ID NO: 8371 - DNA, 1395 bp, Zea Mays
gttcgatttgttattcatcacagccttagcaagtctatggagacatactaccaggagagtggtcgggccggacgggatggattaccttcagaatgtattttgtattatcggcctggtgatgttccacggcagagttcaatggtgttctatgaaaactgtggcctgcaaaatctttatgacatcgtgcggtattgtcagtctaagaggagttgtcgtcatggtgcattctttcgccattttggagaggtccctcaggactgcaacggaatgtgcgacaattgtgcttccactattgagcagaaggatattgatgtcacctgtatgatttattttgcgtcagtttaaaaattacaacaaatgaccaacatttattcactttatttcagggggaaaatgttttttatttcatgatattctcacagtaattttttctacttcctgtttagaccatacaaaaattatagtttcacttcttcacgatatgcaactttaatgatcaaagagctacactactacagctggtggataagttcaagtcaaagtggaaaggtagtttcaatgaagctgttgatcttagaaaagaagaagttgagcagttgatagttaaccttatactcgacaatgttttgaaagaagaatttcagcacacagcatattcaaccaacgcttatgttaccttaggagcattgtggaagccagcactacaaggaaacagagtagtcaagcttgagattgctattgcttctaaagatagagatgttagatccaagggcgcaaaacgaggtcgcatgagtgatttggaagccaaactagatgaactgcgtagggatctgtcatccacgggtagcgatgccatatttccccatgcagttcttactgcgcaacaaatttcactactgagcagccagaagccaaccactccagctgagctagaaaaggttatagggaaggtgaagacaaggaagtacggcagcaagatcattgagctgatgaggtcacatgacaattcaggaagtggccgaggcaaggaggctggcgatgaacacagagctaagaagatcaaaacgaaggatgaggatgttgtttgtgttgagagtagcgaggaagaatagaatatgcccttcacatacttggctttttagtctatcatctcatggttaattattttgccaatcatttcctccgacgtcatctttctgtaatttagactttcacggattaatgcacagtcatatttcttacagagaaagcctcgagcatccttttgaccggttcatagtcttttgcttcggtagctttgtatcttgttgatgatcggattaatgtgcgaatacttgggattaatgtgcgaaaactttgtgccaagtgtttgaatgtactatacacatgctgagg

SEQ ID NO: 8372 - DNA, 1483 bp, Zea Mays
gttcgatttgttattcatcacagccttagcaagtctatggagacatactaccaggagagtggtcgggccggacgggatggattaccttcagaatgtattttgtattatcggcctggtgatgttccacggcagagttcaatggtgttctatgaaaactgtggcctgcaaaatctttatgacatcgtgcggtattgtcagtctaagaggagttgtcgtcatggtgcattctttcgccattttggagaggtccctcaggactgcaacggaatgtgcgacaattgtgcttccactattgagcagaaggatattgatgtcacctaccatacaaaaattatagtttcacttcttcacgatatgcaactttaatgatcaaagagctacactactacagctggtggataagttcaagtcaaagtggaaaggtttaggtagtttcaatgaagctgttgatcttagaaaagaagaagttgagcagttgatagttaaccttatactcgacaatgttttgaaagaagaatttcagcacacagcatattcaaccaacgcttatgttaccttaggagcattgtggaagccagcactacaaggtaagtgtttcttctctcaatctttccacgtatatgttgtgttggggattactagataatatgcagtgacttagtagttcctattgctgacagttcaataagcagaatttatgcacctatctcaaccattttctgtaccatgctaatgctttagtttgcaattaattggattatggaatgtggtgatgagtatgttgcctactacacaggaaacagagtagtcaagcttgagattgctattgcttctaaagatagagatgttagatccaagggcgcaaaacgaggtcgcatgagtgatttggaagccaaactagatgaactgcgtagggatctgtcatccacgggtagcgatgccatatttccccatgcagttcttactgcgcaacaaatttcactactgagcagccagaagccaaccactccagctgagctagaaaaggttatagggaaggtgaagacaaggaagtacggcagcaagatcattgagctgatgaggtcacatgacaattcaggaagtggccgaggcaaggaggctggcgatgaacacagagctaagaagatcaaaacgaaggatgaggatgttgtttgtgttgagagtagcgaggaagaatagaatatgcccttcacatacttggctttttagtctatcatctcatggttaattattttgccaatcatttcctccgacgtcatctttctgtaatttagactttcacggattaatgcacagtcatatttcttacagagaaagcctcgagcatccttttgaccggttcatagtcttttgcttcggtagctttgtatcttgttgatgatcggattaatgtgcgaatacttgggattaatgtgcgaaaactttgtgccaagtgtttgaatgtactatacacatgctgagg

SEQ ID NO: 8373 - DNA, 1270 bp, Zea Mays
gttcgatttgttattcatcacagccttagcaagtctatggagacatactaccaggagagtggtcgggccggacgggatggattaccttcagaatgtattttgtattatcggcctggtgatgttccacggcagagttcaatggtgttctatgaaaactgtggcctgcaaaatctttatgacatcgtgcggtattgtcagtctaagaggagttgtcgtcatggtgcattctttcgccattttggagaggtccctcaggactgcaacggaatgtgcgacaattgtgcttccactattgagcagaaggatattgatgtcacctaccatacaaaaattatagtttcacttcttcacgatatgcaactttaatgatcaaagagctacactactacagctggtggataagttcaagtcaaagtggaaaggtttaggtagtttcaatgaagctgttgatcttagaaaagaagaagttgagcagttgatagttaaccttatactcgacaatgttttgaagaatttcagcacacagcatattcaaccaacgcttatgttaccttaggagcattgtggaagccagcactacaaggaaacagagtagtcaagcttgagattgctattgcttctaaagatagagatgttagatccaagggcgcaaaacgaggtcgcatgagtgatttggaagccaaactagatgaactgcgtagggatctgtcatccacgggtagcgatgccatatttccccatgcagttcttactgcgcaacaaatttcactactgagcagccagaagccaaccactccagctgagctagaaaaggttatagggaaggtgaagacaaggaagtacggcagcaagatcattgagctgatgaggtcacatgacaattcaggaagtggccgaggcaaggaggctggcgatgaacacagagctaagaagatcaaaacgaaggatgaggatgttgtttgtgttgagagtagcgaggaagaatagaatatgcccttcacatacttggctttttagtctatcatctcatggttaattattttgccaatcatttcctccgacgtcatctttctgtaatttagactttcacggattaatgcacagtcatatttcttacagagaaagcctcgagcatccttttgaccggttcatagtcttttgcttcggtagctttgtatcttgttgatgatcggattaatgtgcgaatacttgggattaatgtgcgaaaactttgtgccaagtgtttgaatgtactatacacatgctgagg

SEQ ID NO: 8374 - DNA, 1335 bp, Zea Mays
gttcgatttgttattcatcacagccttagcaagtctatggagacatactaccaggagagtggtcgggccggacgggatggattaccttcagaatgtattttgtattatcggcctggtgatgttccacggcagtctaagaggagttgtcgtcatggtgcattctttcgccattttggagaggtccctcaggactgcaacggaatgtgcgacaattgtgcttccactattgagcagaaggatattgatgtcacctgtatgatttattttgcgtcagtttaaaaattacaacaaatgaccaacatttattcactttatttcagggggaaaatgttttttatttcatgatattctcacagtaattttttctacttcctgtttagaccatacaaaaattatagtttcacttcttcacgatatgcaactttaatgatcaaagagctacactactacagctggtggataagttcaagtcaaagtggaaaggtttaggtagtttcaatgaagctgttgatcttagaaaagaagaagttgagcagttgatagttaaccttatactcgacaatgttttgaaagaagaatttcagcacacagcatattcaaccaacgcttatgttaccttaggagcattgtggaagccagcactacaaggaaacagagtagtcaagcttgagattgctattgcttctaaagatagagatgttagatccaagggcgcaaaacgaggtcgcatgagtgatttggaagccaaactagatgaactgcgtagggatctgtcatccacgggtagcgatgccatatttccccatgcagttcttactgcgcaacaaatttcactactgagcagccagaagccaaccactccagctgagctagaaaaggttatagggaaggtgaagacaaggaagtacggcagcaagatcattgagctgatgaggtcacatgacaattcaggaagtggccgaggcaaggaggctggcgatgaacacagagctaagaagatcaaaacgaaggatgaggatgttgtttgtgttgagagtagcgaggaagaatagaatatgcccttcacatacttggctttttagtctatcatctcatggttaattattttgccaatcatttcctccgacgtcatctttctgtaatttagactttcacggattaatgcacagtcatatttcttacagagaaagcctcgagcatccttttgaccggttcatagtcttttgcttcggtagctttgtatcttgttgatgatcggattaatgtgcgaatacttgggattaatgtgcgaaaactttgtgccaagtgtttgaatgtactatacacatgctgagg

SEQ ID NO: 8375 - DNA, 2973 bp, Zea Mays
tggcttgctggcattgggaagggccctattactcgaaccgaggcatggaggacgaagaaaacatcgagggagaactgttgctcgtggagtcacaactccacgacatccaaggacaaattaaaacattactcgatcgccaagaggagttgtatgaacgccaggcacagttgaaggctttgctcgaagcatctaaattgaccagaaatacaacaattaacacatcttcagttgctccggaagattggtctgggagcttcccatgggatctggaggctgacgataccaggttcaatatatttggcatttcctcctaccgatcaaatcaacgagaagtaagtttataggagactggtctgacattttaaactctttcactcctcttgagtactgcaggtgaaaactcaaattgcaagtttttattttttaatcagtaccattcggagttgctataaatttcattagcgaacaacaaatggttgcagttattttcttcttaacgctgttttgatcttgtttggatacagggactaaactttagtctctatcatgttggatgtttaaatgctagttagaagtattaaatatattctaattataaaactaattacataggttaggactaaacgaaatctattaaacctaattagtacatgattcgctcatatgacactatagtaaacatttgctagtcatggattaattaggtttaataaatttttctcgtcgtttagtcttcatctctgtaatttgttttataattaggatatatttaatatccgtaattgacattcaaacgttcgatgtgacacatactaaactttagtcaggggaaccaaacacccccttcgtattgtacagtttcctcttgtacagtttcctctcattttgcacccattaaacatattctgcttatagataattaatgcagtcatgagtggaagagatgttctggtcataatggcagctggtggagggaagagtctatgttaccagctcccagctgtacttcgtgatggaattgcactggttgtcagtcctttactttcccttattcaggaccaggtcatgggactgtcagctttaggtataccagcatacatgctaacttcaactaccaacaaggaagttgagaagttcatctataagacacttgataaaggagaaggagaactaaagatattatatgtgacacctgaaaagatctcaaaaagtaaaaggttcatgtctaagctcgagaaatgccatcatgccggtcgtctttctctgattgcaatagatgaggctcactgctgtagccaatggggtcatgattttcgtcctgactacaagaatcttggcattttgaaaattcaatttcccagtgttccaatgatagctttaactgcaactgcaacaagtaaggtccaaatggatttaatggagatgctccacatcccgagatgcatcaagtttgtcagcacagttaacaggcccaaccttttttataaggtgtctgagaaatcgccagttggaaaggttgtcattgatgagatcacaaagtttataagtgaatcatacccaaataatgagtctggaattatatactgcttttcaaggaaggaatgtgaacaggttgcaaaagaactgcgcgaaaggggtatttcagcagattattatcatgcagacatggatatcgttaatcgtgagaaaattcatatgcgttcgatttgttattcatcacagccttagcaagtctatggagacatactaccaggagagtggtcgggccggacgggatggattaccttcagaatgtattttgtattatcggcctggtgatgttccacggcagagttcaatggtgttctatgaaaactgtggcctgcaaaatctttatgacatcgtgcggtattgtcagtctaagaggagttgtcgtcatggtgcattctttcgccattttggagaggtccctcaggactgcaacggaatgtgcgacaattgtgcttccactattgagcagaaggatattgatgtcacctaccatacaaaaattatagtttcacttcttcacgatatgcaactttaatgatcaaagagctacactactacagctggtggataagttcaagtcaaagtggaaaggtttaggtagtttcaatgaagctgttgatcttagaaaagaagaagttgagcagttgatagttaaccttatactcgacaatgttttgaaagaagaatttcagcacacagcatattcaaccaacgcttatgttaccttaggagcattgtggaagccagcactacaaggaaacagagtagtcaagcttgagattgctattgcttctaaagatagagatgttagatccaagggcgcaaaacgaggtcgcatgagtgatttggaagccaaactagatgaactgcgtagggatctgtcatccacgggtagcgatgccatatttccccatgcagttcttactgcgcaacaaatttcactactgagcagccagaagccaaccactccagctgagctagaaaaggttatagggaaggtgaagacaaggaagtacggcagcaagatcattgagctgatgaggtcacatgacaattcaggaagtggccgaggcaaggaggctggcgatgaacacagagctaagaagatcaaaacgaaggatgaggatgttgtttgtgttgagagtagcgaggaagaatagaatatgcccttcacatacttggctttttagtctatcatctcatggttaattattttgccaatcatttcctccgacgtcatctttctgtaatttagactttcacggattaatgcacagtcatatttcttacagagaaagcctcgagcatccttttgaccggttcatagtcttttgcttcggtagctttgtatcttgttgatgatcggattaatgtgcgaatacttgggattaatgtgcgaaaactttgtgccaagtgtttgaatgtactatacacatgctgagg

SEQ ID NO: 8376 - DNA, 2667 bp, Zea Mays
gacattttatgattataatgagacatagaagaagaatttagagtaaccatgcgagaaagaaaattttagggtttagggtaccaagttggaactcgcactcgtgtagcccaaaactaatggaattagccgacgcaaggcaagctttccgcttcctatttcggattgggatcatcagcggctgtagcgtggacccgacgggggtgtccggaccacatccctatttcatcttggtaccccgtccgtctccgatttcagaagcacggcgggctccccggcagcctctaccgagcagaaagctgagttctaccccagaaccgaggcatggaggacgaagaaaacatcgagggagaactgttgctcgtggagtcacaactccacgacatccaaggacaaattaaaacattactcgatcgccaagaggagttgtatgaacgccaggcacagttgaaggctttgctcgaagcatctaaattgaccagaaatacaacaattaacacatcttcagttgctccggaagattggtctgggagcttcccatgggatctggaggctgacgataccaggttcaatatatttggcatttcctcctaccgatcaaatcaacgagaaataattaatgcagtcatgagtggaagagatgttctggtcataatggcagctggtggagggaagagtctatgttaccagctcccagctgtacttcgtgatggaattgcactggttgtcagtcctttactttcccttattcaggaccaggtcatgggactgtcagctttaggtataccagcatacatgctaacttcaactaccaacaaggaagttgagaagttcatctataagacacttgataaaggagaaggagaactaaagatattatatgtgacacctgaaaagatctcaaaaagtaaaaggttcatgtctaagctcgagaaatgccatcatgccggtcgtctttctctgattgcaatagatgaggctcactgctgtagccaatggggtcatgattttcgtcctgactacaagaatcttggcattttgaaaattcaatttcccagtgttccaatgatagctttaactgcaactgcaacaagtaaggtccaaatggatttaatggagatgctccacatcccgagatgcatcaagtttgtcagcacagttaacaggcccaaccttttttataaggtgtctgagaaatcgccagttggaaaggttgtcattgatgagatcacaaagtttataagtgaatcatacccaaataatgagtctggaattatatactgcttttcaaggaaggaatgtgaacaggttgcaaaagaactgcgcgaaaggggtatttcagcagattattatcatgcagacatggatatcgttaatcgtgagaaaattcatatgcgttcgatttgttattcatcacagccttagcaagtctatggagacatactaccaggagagtggtcgggccggacgggatggattaccttcagaatgtattttgtattatcggcctggtgatgttccacggcagagttcaatggtgttctatgaaaactgtggcctgcaaaatctttatgacatcgtgcggtattgtcagtctaagaggagttgtcgtcatggtgcattctttcgccattttggagaggtccctcaggactgcaacggaatgtgcgacaattgtgcttccactattgagcagaaggatattgatgtcacctaccatacaaaaattatagtttcacttcttcacgatatgcaactttaatgatcaaagagctacactactacagctggtggataagttcaagtcaaagtggaaaggtttaggtagtttcaatgaagctgttgatcttagaaaagaagaagttgagcagttgatagttaaccttatactcgacaatgttttgaaagaagaatttcagcacacagcatattcaaccaacgcttatgttaccttaggagcattgtggaagccagcactacaaggaaacagagtagtcaagcttgagattgctattgcttctaaagatagagatgttagatccaagggcgcaaaacgaggtcgcatgagtgatttggaagccaaactagatgaactgcgtagggatctgtcatccacgggtagcgatgccatatttccccatgcagttcttactgcgcaacaaatttcactactgagcagccagaagccaaccactccagctgagctagaaaaggttatagggaaggtgaagacaaggaagtacggcagcaagatcattgagctgatgaggtcacatgacaattcaggaagtggccgaggcaaggaggctggcgatgaacacagagctaagaagatcaaaacgaaggatgaggatgttgtttgtgttgagagtagcgaggaagaatagaatatgcccttcacatacttggctttttagtctatcatctcatggttaattattttgccaatcatttcctccgacgtcatctttctgtaatttagactttcacggattaatgcacagtcatatttcttacagagaaagcctcgagcatccttttgaccggttcatagtcttttgcttcggtagctttgtatcttgttgatgatcggattaatgtgcgaatacttgggattaatgtgcgaaaactttgtgccaagtgtttgaatgtactatacacatgctgagg

SEQ ID NO: 8377 - DNA, 1052 bp, Zea Mays
cactcctcttgagtactgcagataattaatgcagtcatgagtggaagagatgttctggtcataatggcagctggtggagggaagagtctatgttaccagctcccagctgtacttcgtgatggaattgcactggttgtcagtcctttactttcccttattcaggaccaggtcatgggactgtcagctttaggtataccagcatacatgctaacttcaactaccaacaaggaagttgagaagttcatctataagacacttgataaaggagaaggagaactaaagatattatatgtgacacctgaaaagatctcaaaaagtaaaaggttcatgtctaagctcgagaaatgccatcatgccggtcgtctttctctgattgcaatagatgaggctcactgctgtagccaatggggtcatgattttcgtcctgactacaagaatcttggcattttgaaaattcaatttcccagtgttccaatgatagctttaactgcaactgcaacaagtaaggtccaaatggatttaatggagatgctccacatcccgagatgcatcaagtttgtcagcacagttaacaggcccaaccttttttataaggtgtctgagaaatcgccagttggaaaggttgtcattgatgagatcacaaagtttataagtgaatcatacccaaataatgagtctggaattatatactgcttttcaaggaaggaatgtgaacaggttgcaaaagaactgcgcgaaaggggtatttcagcagattattatcatgcagacatggatatcgttaatcgtgagaaaattcatatgcgacagtggtataatgactcaacatgttgatttatccgacaaatttctatgctgaatgcaatccatgaagcacatggaaaggaaaaccgtcagggtcaccgaataaaatgagaatcacagcatgactggttaggttcacttaaaaagccttacccggtattcgttctagccaaaaagggtatctaggagtgagttcagtagttaacctcataagggaagggtgttggttggttaagtttagattgtgg

SEQ ID NO: 8378 - DNA, 1473 bp, Zea Mays
caattctcctccttgctttcgcagttgacatttaggctgggtccttgcgccgggcgggtatgggaataaatttcggcggatggggaggaaatttgtgcctctccgctggctggcttgctggcattgggaagggccctattactcgaaccgaggcatggaggacgaagaaaacatcgagggagaactgttgctcgtggagtcacaactccacgacatccaaggacaaattaaaacattactcgatcgccaagaggagttgtatgaacgccaggcacagttgaaggctttgctcgaagcatctaaattgaccagaaatacaacaattaacacatcttcagttgctccggaagattggtctgggagcttcccatgggatctggaggctgacgataccaggttcaatatatttggcatttcctcctaccgatcaaatcaacgagaaataattaatgcagtcatgagtggaagagatgttctggtcataatggcagctggtggagggaagagtctatgttaccagctcccagctgtacttcgtgatggaattgcactggttgtcagtcctttactttcccttattcaggaccaggtcatgggactgtcagctttaggtataccagcatacatgctaacttcaactaccaacaaggaagttgagaagttcatctataagacacttgataaaggagaaggagaactaaagatattatatgtgacacctgaaaagatctcaaaaagtaaaaggttcatgtctaagctcgagaaatgccatcatgccggtcgtctttctctgattgcaatagatgaggctcactgctgtagccaatggggtcatgattttcgtcctgactacaagaatcttggcattttgaaaattcaatttcccagtgttccaatgatagctttaactgcaactgcaacaagtaaggtccaaatggatttaatggagatgctccacatcccgagatgcatcaagtttgtcagcacagttaacaggcccaaccttttttataaggtgtctgagaaatcgccagttggaaaggttgtcattgatgagatcacaaagtttataagtgaatcatacccaaataatgagtctggaattatatactgcttttcaaggaaggaatgtgaacaggttgcaaaagaactgcgcgaaaggggtatttcagcagattattatcatgcagacatggatatcgttaatcgtgagaaaattcatatgcgacagtggtataatgactcaacatgttgatttatccgacaaatttctatgctgaatgcaatccatgaagcacatggaaaggaaaaccgtcagggtcaccgaataaaatgagaatcacagcatgactggttaggttcacttaaaaagccttacccggtattcgttctagccaaaaagggtatctaggagtgagttcagtagttaacctcataagggaagggtgttggttggttaagtttagattgtgg

SEQ ID NO: 8379 - DNA, 2185 bp, Zea Mays
tagagtaaccatgcgagaaagaaaattttagggtttagggtaccaagttggaactcgcactcgtgtagcccaaaactaatggaattagccgacgcaaggcaagctttccgcttcctatttcggattgggatcatcagcggctgtagcgtggacccgacgggggtgtccggaccacatccctatttcatcttggtaccccgtccgtctccgatttcagaagcacggcgggctccccggcagcctctaccgagcagaaagctgagttctaccccagaaccgaggcatggaggacgaagaaaacatcgagggagaactgttgctcgtggagtcacaactccacgacatccaaggacaaattaaaacattactcgatcgccaagaggagttgtatgaacgccaggcacagttgaaggctttgctcgaagcatctaaattgaccagaaatacaacaattaacacatcttcagttgctccggaagattggtctgggagcttcccatgggatctggaggctgacgataccaggttcaatatatttggcatttcctcctaccgatcaaatcaacgagaagtaagtttataggagactggtctgacattttaaactctttcactcctcttgagtactgcaggtgaaaactcaaattgcaagtttttattttttaatcagtaccattcggagttgctataaatttcattagcgaacaacaaatggttgcagttattttcttcttaacgctgttttgatcttgtttggatacagggactaaactttagtctctatcatgttggatgtttaaatgctagttagaagtattaaatatattctaattataaaactaattacataggttaggactaaacgaaatctattaaacctaattagtacatgattcgctcatatgacactatagtaaacatttgctagtcatggattaattaggtttaataaatttttctcgtcgtttagtcttcatctctgtaatttgttttataattaggatatatttaatatccgtaattgacattcaaacgttcgatgtgacacatactaaactttagtcaggggaaccaaacacccccttcgtattgtacagtttcctcttgtacagtttcctctcattttgcacccattaaacatattctgcttatagataattaatgcagtcatgagtggaagagatgttctggtcataatggcagctggtggagggaagagtctatgttaccagctcccagctgtacttcgtgatggaattgcactggttgtcagtcctttactttcccttattcaggaccaggtcatgggactgtcagctttaggtataccagcatacatgctaacttcaactaccaacaaggaagttgagaagttcatctataagacacttgataaaggagaaggagaactaaagatattatatgtgacacctgaaaagatctcaaaaagtaaaaggttcatgtctaagctcgagaaatgccatcatgccggtcgtctttctctgattgcaatagatgaggctcactgctgtagccaatggggtcatgattttcgtcctgactacaagaatcttggcattttgaaaattcaatttcccagtgttccaatgatagctttaactgcaactgcaacaagtaaggtccaaatggatttaatggagatgctccacatcccgagatgcatcaagtttgtcagcacagttaacaggcccaaccttttttataaggtgtctgagaaatcgccagttggaaaggttgtcattgatgagatcacaaagtttataagtgaatcatacccaaataatgagtctggaattatatactgcttttcaaggaaggaatgtgaacaggttgcaaaagaactgcgcgaaaggggtatttcagcagattattatcatgcagacatggatatcgttaatcgtgagaaaattcatatgcgacagtggtataatgactcaacatgttgatttatccgacaaatttctatgctgaatgcaatccatgaagcacatggaaaggaaaaccgtcagggtcaccgaataaaatgagaatcacagcatgactggttaggttcacttaaaaagccttacccggtattcgttctagccaaaaagggtatctaggagtgagttcagtagttaacctcataagggaagggtgttggttggttaagtttagattgtgg

SEQ ID NO: 8380 - DNA, 1519 bp, Zea Mays
tgaatgatgttactgaacttggttggtctctggtcgacgtgttttgctcagatggaacctttgcaagggcagctgttcccagtggagcatcaactggtgtatatgaagctctggagttgagggatggtggctctgactatttggggaagggtgtctccaaggctgtgaacaatgtgaattctgttattggacctgctctgattggcaaggaccctacagcacagactgagattgataacttcatggttcaacaacttgatgggaccaaaaatgagtggggatggtgcaagcaaaagcttggtgctaatgcgattctggctgtgtcattagctgtttgcaaagctggggctagcatcaagaggattcctttataccagcacattgccaacctagctgggaacaagcagttagtgttgcctgtccctgcattcaatgtcatcaacggtggttcccatgctggaaacaagcttgctatgcaggagtttatgatccttcctactggagctgcctcatttaaggaggctatgaagatgggtgttgaagtttatcaccacctgaagtccgttatcaaaaagaagtatgggcaagatgccacgaatgttggtgacgaaggtggttttgctccgaacatccaggagaacaaggaaggacttgagctcttgaaaactgcaattgagaaggctggatacactggcaaggttgtcatcggaatggatgttgctgcttcggagttttacagtgacaaggaccaaacctatgacctcaactttaaggaggagaataatgatggttcacagaagatatctggcgatagcttaaagaatgtatacaaatcttttgtgagcgaataccccattgtttcgattgaagatccttttgaccaggatgactgggttcactatgctaagatgactgaagaaattggagagcaagtgcagattgttggtgatgaccttctcgtcaccaaccccactagggttgctaaggctatcaaggagaaatcatgcaatgcccttctgctcaaggttaaccaaatcggatctgtgactgagagtattgaggctgtgaagatgtcaaagcgtgcgggctggggtgtgatgactagtcataggagtggtgagactgaggacactttcattgctgatctggcagttggtttgtccacgggtcagattaagactggagcaccctgcagatcagagcgtcttgccaaatacaaccagcttcttaggattgaagaagagcttggcgctattgctgtctacgcaggtgccaaattccgtgcacctgtggagccctactaaacgggcgggatgcaagtgcttttatgtctgcacaagtcctgtgaaactgtttactgcgacctgcagattttactcttggagtgccctgagtagattttagcaataatatccaacatgtaacatgttacggacatgtacccaaacgtgatccagttttagttaatgtgctccatgcttgacgtttttaaaaaataagaatcccttagaaaaataaa

SEQ ID NO: 8381 - DNA, 1708 bp, Zea Mays
ataagtagtacatatgttggactaaaggccccaagagtaacagagcgttaggtcccactttagggcgccagtctataaaaaacggcggtctgccctaaagccctctctcccaaagccatcttccttccgcggactagttttttctgaagattcggcgatggcggcgacgatccaatccgtgaaggcgcgccagatctttgacagccgcggcaaccctacagtcgaggtcgacgtgttttgctcagatggaacctttgcaagggcagctgttcccagtggagcatcaactggtgtatatgaagctctggagttgagggatggtggctctgactatttggggaagggtgtctccaaggctgtgaacaatgtgaattctgttattggacctgctctgattggcaaggaccctacagcacagactgagattgataacttcatggttcaacaacttgatgggaccaaaaatgagtggggatggtgcaagcaaaagcttggtgctaatgcgattctggctgtgtcattagctgtttgcaaagctggggctagcatcaagaggattcctttataccagcacattgccaacctagctgggaacaagcagttagtgttgcctgtccctgcattcaatgtcatcaacggtggttcccatgctggaaacaagcttgctatgcaggagtttatgatccttcctactggagctgcctcatttaaggaggctatgaagatgggtgttgaagtttatcaccacctgaagtccgttatcaaaaagaagtatgggcaagatgccacgaatgttggtgacgaaggtggttttgctccgaacatccaggagaacaaggaaggacttgagctcttgaaaactgcaattgagaaggctggatacactggttgtcatcggaatggatgttgctgcttcggagttttacagtgacaaggaccaaacctatgacctcaactttaaggaggagaataatgatggttcacagaagatatctggcgatagcttaaagaatgtatacaaatcttttgtgagcgaataccccattgtttcgattgaagatccttttgaccaggatgactgggttcactatgctaagatgactgaagaaattggagagcaagtgcagattgttggtgatgaccttctcgtcaccaaccccactagggttgctaaggctatcaaggagaaatcatgcaatgcccttctgctcaaggttaaccaaatcggatctgtgactgagagtattgaggctgtgaagatgtcaaagcgtgcgggctggggtgtgatgactagtcataggagtggtgagactgaggacactttcattgctgatctggcagttggtttgtccacgggtcagattaagactggagcaccctgcagatcagagcgtcttgccaaatacaaccagcttcttaggattgaagaagagcttggcgctattgctgtctacgcaggtgccaaattccgtgcacctgtggagccctactaaacgggcgggatgcaagtgcttttatgtctgcacaagtcctgtgaaactgtttactgcgacctgcagattttactcttggagtgccctgagtagattttagcaataatatccaacatgtaacatgttacggacatgtacccaaacgtgatccagttttagttaatgtgctccatgcttgacgtttttaaaaaataagaatcccttagaaaaataaa

SEQ ID NO: 8382 - DNA, 1756 bp, Zea Mays
ccaccaacccgggctcctccattgaaccgccgtctcctccattcctggcttcccctccattgaaccgccaccagtctcttccattgaaccgcggtcgtaagacgcctcacccaacaccgcgcccaccaccccaaacgacgcctacattcctgacttcccctcctacgcgcagacgccgtcccaccgccgggatgccgccggcgatcccaagcctggtccacccgtcccgtgtgcggattctccacccgggcggaagccatattcacgggccggtggtgtactggatgctgcgggaccaacgtctcgcggacaactgggccctcctccacgcggccgaactcgccgctgcgtccacccccgcggcgccgctcgccatcgctttcacgctattcccacggcctttcctcctaggcgcgcacctccgccagctaggtttcctcctccgcgggctccgccgccttgccgccgatgcgcacgcccgcggcctcccgttctttctactcgagggcggacctgcggagctgccgtcgttggtgcggcggctcggggcttcggcgctcgtcgccgacttctctccgctgcggccggtgcgggaggcattggatgctgtcgtccaggagcttctgcgtgacgccgccaacatggccgtgcaccaggtggacgcacacaatgtagtgcctgtctggacggcgtcagggaagctcgagtactcggccaaaacctttagaagtaaggtgaacaaggtgataaacgagtatctggtggagtaccctgaggttccgcagtgggcgccttggtgcatggagcagccgaagagtgttgactgggatgcactgatcaatagcatcttcagtgaggctgagaatgtgccggagattaactggtgcgagcctggggagtcctcagcgatggaggtccttcttgggagtaaggatgggttcttgacgaagaggattaagaactatgacactggccggaatgatcctacaaagccacatgcattgtcgtgcctttcaccgtacttacattttgggcacatttctgcacaaaggtgtgctcttgaagcaaaaaaacgccgtcatcttagtccaaagtcagtggacacgttcttggaggagctgataataaggagggaactagctgacaatttctgctattaccagcctcaatatgattcactggctggtgcatgggagtgggctagaaagacgttaacggatcacactggtgataaaagagagcatatctatacgagggagcagctcgaaaatgccaaaacatctgatccactttggaatgcatctcaattggagatggtgcaccatgggaaaatgcatggatttatgcgaatgtattgggccaaaaagattctagaatggaccagtcaacctgaagaagcactttccatagcaatatatttgaacgacaagtatcatatcgatggcagggatcccaatggctatgttggttgcatgtggtctatttgtggcctccatgaccagggttggaaggaacgtccggtatttggaaagatacgttatatgaattatgctggttgcaagagaaaatttgacgttgatgcttatatttcgtacgttaaaagattggttcctagggccaagaagaggaaaactgaggaaggtgaatccacggtcaaagaatccaatgtctgagttggctcagcagttcaacattgtctaaaacattgtttcaggatgaatatcttttctcatgacaaagacatacacgatgtgaa

SEQ ID NO: 8383 - DNA, 1478 bp, Zea Mays
ccaccaacccgggctcctccattgaaccgccgtctcctccattcctggcttcccctccattgaaccgccaccagtctcttccattgaaccgcggtcgtaagacgcctcacccaacaccgcgcccaccaccccaaacgacgcctacattcctgacttcccctcctacgcgcagacgccgtcccaccgccgggatgccgccggcgatcccaagcctggtccacccgtcccgtgtgcggattctccacccgggcggaagccatattcacgggccggtggtgtactggatgctgcgggaccaacgtctcgcggacaactgggccctcctccacgcggccgaactcgccgctgcgtccacccccgcggcgccgctcgccatcgctttcacgctattcccacggcctttcctcctaggcgcgcacctccgccagctaggtttcctcctccgcgggctccgccgccttgccgccgatgcgcacgcccgcggcctcccgttctttctactcgagggcggacctgcggagctgccgtcgttggtgcggcggctcggggcttcggcgctcgtcgccgacttctctccgctgcggccggtgcgggaggcattggatgctgtcgtccaggagcttctgcgtgacgccgccaacatggccgtgcaccaggtggacgcacacaatgtagtgcctgtctggacggcgtcagggaagctcgagtactcggccaaaacctttagaagtaaggtgaacaaggtgataaacgagtatctggtggagtaccctgaggttccgcagtgggcgccttggtgcatggagcagccgaagagtgttgactgggatgcactgatcaatagcatcttcagtgaggctgagaatgtgccggagattaactggtgcgagcctggggagtcctcagcgatggaggtccttcttgggagtaaggatgggttcttgacgaagaggattaagaactatgacactggccggaatgatcctacaaagccacatgcattgtcgtgcctttcaccgtacttacattttgggcacatttctgcacaaaggtgtgctcttgaagcaaaaaaacgccgtcatcttagtccaaagtcagtggacacgttcttggaggagctgataataaggagggaactagctgacaatttctgctattaccagcctcaatatgattcactggctggtgcatgggagtgggctagaaagacgttaacggatcacactggtgataaaagagagcatatctatacgagggagcagctcgaaaatgccaaaacatctgatccactttggaatgcatctcaattggagatggtgcaccatgggaaaatgcatggatttatgcgaatgtattgggccaaaaagattctagaatggaccagtcaacctgaagaagcactttccatagcaatatatttgaacgacaagtttcaggatgaatatcttttctcatgacaaagacatacacgatgtgaa

SEQ ID NO: 8384 - DNA, 2446 bp, Zea Mays
ccaccaacccgggctcctccattgaaccgccgtctcctccattcctggcttcccctccattgaaccgccaccagtctcttccattgaaccgcggtcgtaagacgcctcacccaacaccgcgcccaccaccccaaacgacgcctacattcctgacttcccctcctacgcgcagacgccgtcccaccgccgggatgccgccggcgatcccaagcctggtccacccgtcccgtgtgcggattctccacccgggcggaagccatattcacgggccggtggtgtactggatgctgcgggaccaacgtctcgcggacaactgggccctcctccacgcggccgaactcgccgctgcgtccacccccgcggcgccgctcgccatcgctttcacgctattcccacggcctttcctcctaggcgcgcacctccgccagctaggtttcctcctccgcgggctccgccgccttgccgccgatgcgcacgcccgcggcctcccgttctttctactcgagggcggacctgcggagctgccgtcgttggtgcggcggctcggggcttcggcgctcgtcgccgacttctctccgctgcggccggtgcgggaggcattggatgctgtcgtccaggagcttctgcgtgacgccgccaacatggccgtgcaccaggtggacgcacacaatgtagtgcctgtctggacggcgtcagggaagctcgagtactcggccaaaacctttagaagtaaggtgaacaaggtgataaacgagtatctggtggagtaccctgaggttccgcagtgggcgccttggtgcatggagcagccgaagagtgttgactgggatgcactgatcaatagcatcttcagtgaggctgagaatgtgccggagattaactggtgcgagcctggggagtcctcagcgatggaggtccttcttgggagtaaggatgggttcttgacgaagaggattaagaactatgacactggccggaatgatcctacaaagccacatgcattgtcgtgcctttcaccgtacttacattttgggcacatttctgcacaaaggtgtgctcttgaagcaaaaaaacgccgtcatcttagtccaaagtcagtggacacgttcttggaggagctgataataaggagggaactagctgacaatttctgctattaccagcctcaatatgattcactggctggtgcatgggagtgggctagaaagacgttaacggatcacactggtgataaaagagagcatatctatacgagggagcagctcgaaaatgccaaaacatctgatccactttggaatgcatctcaattggagatggtgcaccatgggaaaatgcatggatttatgcggtaacataattcatacctgtattaatatgtcatggttttagcccatttatgtgttgtttgttacttttgtgatgataggtagtgttggaattgcctgattgtcattccacattgctggttgaagaattaagcattgtttggtctttgtttatctacttggtaacacaattagtgcataatgcagtcaaatattcatgcattggcctccatctgcccataggctttacatgttgaattggtggcaattttttatgtgaagtcttctcgtatacagcacagacaatgtagttatgcatttctgttcctattggaacagtgtagcctttcaattaaatttgacggaagtgtgagttagattacaacaatctttggaatattttgtttatacgaagtatttttccaagatcccgccgaatatggatggagcttactacgaagcaaaaaaaaaccaagcattgtattctgatctttatttctgcatgcatatcctctttataagagactactttgtgttcatactgtagttttctgcagaatgtattgggccaaaaagattctagaatggaccagtcaacctgaagaagcactttccatagcaatatatttgaacgacaagtatcatatcgatggcagggatcccaatggctatgttggttgcatgtggtctatttgtggcctccatgaccagggttggaaggaacgtccggtatttggaaagatacgttatatgaattatgctggttgcaagagaaaatttgacgttgatgcttatatttcgtacgttaaaagattggttcctagggccaagaagaggaaaactgaggaaggtgaatccacggtcaaagaatccaatgtctgagttggctcagcagttcaacattgtctaaaacattggtataatttaaatttggcgcagtcaagtgacatacttttcttttgctggtagatgtttatacggctaactgaagagttgctaagtagagatagacattatacaaggttgtgctgagatcagtttgcctcgctgatattataggaaaaacatattaacatatatgttttataatagttttaaaaatactaatgttattctgtcga

SEQ ID NO: 8385 - DNA, 1469 bp, Zea Mays
ccaccaacccgggctcctccattgaaccgccgtctcctccattcctggcttcccctccattgaaccgccaccagtctcttccattgaaccgcggtcgtaagacgcctcacccaacaccgcgcccaccaccccaaacgacgcctacattcctgacttcccctcctacgcgcagacgccgtcccaccgccgggatgccgccggcgatcccaagcctggtccacccgtcccgtgtgcggattctccacccgggcggaagccatattcacgggccggtggtgtactggatgctgcgggaccaacgtctcgcggacaactgggccctcctccacgcggccgaactcgccgctgcgtccacccccgcggcgccgctcgccatcgctttcacgctattcccacggcctttcctcctaggcgcgcacctccgccagctaggtttcctcctccgcgggctccgccgccttgccgccgatgcgcacgcccgcggcctcccgttctttctactcgagggcggacctgcggagctgccgtcgttggtgcggcggctcggggcttcggcgctcgtcgccgacttctctccgctgcggccggtgcgggaggcattggatgctgtcgtccaggagcttctgcgtgacgccgccaacatggccgtgcaccaggtggacgcacacaatgtagtgcctgtctggacggcgtcagggaagctcgagtactcggccaaaacctttagaagtaaggtgaacaaggtgataaacgagtatctggtggagtaccctgaggttccgcagtgggcgccttggtgcatggagcagccgaagagtgttgactgggatgcactgatcaatagcatcttcagtgaggctgagaatgtgccggagattaactggtgcgagcctggggagtcctcagcgatggaggtccttcttgggagtaaggatgggttcttgacgaagaggattaagaactatgacactggccggaatgatcctacaaagccacatgcattgtcgtgcctttcaccgtacttacattttgggcacatttctgcacaaaggtgtgctcttgaagcaaaaaaacgccgtcatcttagtccaaagtcagtggacacgttcttggaggagctgataataaggagggaactagctgacaatttctgctattaccagcctcaatatgattcactggctggtgcatgggagtgggctagaaagacgttaacggatcacactggtgataaaagagagcatatctatacgagggagcagctcgaaaatgccaaaacatctgatccactttggaatgcatctcaattggagatggtgcaccatgggaaaatgcatggatttatgcgaatgtattgggccaaaaagattctagaatggaccagtcaacctgaagaagcactttccatagcaatatatttgaacgacaagttctccatagaggaaacccatagatggcttcacatcccc

SEQ ID NO: 8386 - DNA, 1487 bp, Zea Mays
ccaccaacccgggctcctccattgaaccgccgtctcctccattcctggcttcccctccattgaaccgccaccagtctcttccattgaaccgcggtcgtaagacgcctcacccaacaccgcgcccaccaccccaaacgacgcctacattcctgacttcccctcctacgcgcagacgccgtcccaccgccgggatgccgccggcgatcccaagcctggtccacccgtcccgtgtgcggattctccacccgggcggaagccatattcacgggccggtggtgtactggatgctgcgggaccaacgtctcgcggacaactgggccctcctccacgcggccgaactcgccgctgcgtccacccccgcggcgccgctcgccatcgctttcacgctattcccacggcctttcctcctaggcgcgcacctccgccagctaggtttcctcctccgcgggctccgccgccttgccgccgatgcgcacgcccgcggcctcccgttctttctactcgagggcggacctgcggagctgccgtcgttggtgcggcggctcggggcttcggcgctcgtcgccgacttctctccgctgcggccggtgcgggaggcattggatgctgtcgtccaggagcttctgcgtgacgccgccaacatggccgtgcaccaggtggacgcacacaatgtagtgcctgtctggacggcgtcagggaagctcgagtactcggccaaaacctttagaagtaaggtgaacaaggtgataaacgagtatctggtggagtaccctgaggttccgcagtgggcgccttggtgcatggagcagccgaagagtgttgactgggatgcactgatcaatagcatcttcagtgaggctgagaatgtgccggagattaactggtgcgagcctggggagtcctcagcgatggaggtccttcttgggagtaaggatgggttcttgacgaagaggattaagaactatgacactggccggaatgatcctacaaagccacatgcattgtcgtgcctttcaccgtacttacattttgggcacatttctgcacaaaggtgtgctcttgaagcaaaaaaacgccgtcatcttagtccaaagtcagtggacacgttcttggaggagctgataataaggagggaactagctgacaatttctgctattaccagcctcaatatgattcactggctggtgcatgggagtgggctagaaagacgttaacggatcacactggtgataaaagagagcatatctatacgagggagcagctcgaaaatgccaaaacatctgatccactttggaatgcatctcaattggagatggtgcaccatgggaaaatgcatggatttatgcgaatgtattgggccaaaaagattctagaatggaccagtcaacctgaagaagcactttccatagcaatatatttgaacgacaagattcccaatcttcttcgtccacctctctagccactctgcgctcctgcgaggttgaaa

SEQ ID NO: 8387 - DNA, 827 bp, Zea Mays
cttgattcagcaatttttccagtattagcattgaatgagaagaagaatgggaggaggatactgatgagtatatgcaaaagaatcttccttctgaacttgatgacatttctggatggactgaggatttgttcactgccagaaaaagtgcaatcaatttacttggtgttatagcgctatcaaagggtccaccagttgcatctgcagcatcaaagcgtaagaaaggtgataaaaataaagggaaatctgaaatgagctcaattggggagttattggtcatcccattcctgtcaaagtttcctataccttctcatggtgaggatgcatcatcagtagcagtgcagaattatttcggtgttttgatggcatatggaggcctccaagatgacatgagttctagtatttatcagtccttaatgaagtcgttgaccatggagtatgtggaggacataacttgttatccggtttgtgcctctgcttctgttgctattgcagaactcatcgagaatagttatgttccacctaactggctcattcttctgcaagtggttctgaaaagaataagtactggagatgaaaatgagtctgctcttctgttcaagcttctgggcacaatagttgagggtggacaggaaaaagttctgtctcatattcctgaaattgtatccaacattgccagtactgtaatggagctccggctccctgtcccagatccttggcctcaggaaaacatagaatggaattcaaatttggtggcggcaaaatgtggagacttgaattcatataaagttaggcttaacattagtgcaaacagttgtattttagtttag

SEQ ID NO: 8388 - DNA, 377 bp, Zea Mays
agaagaatgggaggaggatactgatgagtatatgcaaaagaatcttccttctgaacttgatgacatttctggatggactgaggatttgttcactgccagaaaaagtgcaatcaatttacttggtgttatagcgctatcaaagggtccaccagttgcatctgcagcatcaaagcgtaagaaaggtgataaaaataaagggaaatctgaaatgagctcaattggggagttattggtcatcccattcctgtcaaagtttcctataccttctcatggtgaggatgcatcatcagtagcagtgcagaattatttcggtgttttgatggcatatggaggcctccaagattttctgtctgaaaagaaagatttgacaattacat

SEQ ID NO: 8389 - DNA, 739 bp, Zea Mays
atttagtttagtttgaggcttcaaatgagattgggtcaaaactgtggaggtactatgactttggacccaaggttgtgccacctcttgtttgtatcccaggaattgcaggaacggctgatgtatactataaacagattatgtccctttgtatgaagggttatcgagtaatatctattgacgttcctcaagtttggaatcaccatgaatggattcattcatttgaaaaatttttggactccatgaatatccatcatgttcacatttatggtacatctcttggtggattcctggcacaaatatttgctgaacaccgtccaaggagagtaaagtcattggtcctatcaaatacttttcttgagacgcacaagtttgctgctgccatgccttggtctccagttgttaattggaccccttcttttttgctgaagcggtacctcttgacaggaatccgagatggtccccatgaaccattcatcgcagactcagtagattttgttgtgggtcaggtggagacattgtcaagagatgatctttcatcaaggttgatgttaaatgttaatgttgcatccgttgggtcgttaatgttgcctgattcactcatcactataatggatgtaagttacctactctagcagtccccaggctgcacccctcaatgctggcgcacagggccaccttctctgctcctctgcgtcgccgcacccccagccgcgtgtgcagttctctccccctgctcgtc

SEQ ID NO: 8390 - DNA, 826 bp, Zea Mays
tgatgtcctagttacggacatggagcttcatgacaaggagcttcatgcagccaacactttgctccaaatggcctatacaactcttaaagggacaccaagcagatacttatttcaaaactccacgacgaagtgtaggaggatcagcttttgctaacaagtcaagattgggtcaaaactgtggaggtactatgactttggacccaaggttgtgccacctcttgtttgtatcccaggaattgcaggaacggctgatgtatactataaacagattatgtccctttgtatgaagggttatcgagtaatatctattgacgttcctcaagtttggaatcaccatgaatggattcattcatttgaaaaatttttggactccatgaatatccatcatgttcacatttatggtacatctcttggtggattcctggcacaaatatttgctgaacaccgtccaaggagagtaaagtcattggtcctatcaaatacttttcttgagacgcacaagtttgctgctgccatgccttggtctccagtgaatccgagatggtccccatgaaccattcatcgcagactcagtagattttgttgtgggtcaggtggagacattgtcaagagatgatctttcatcaaggttgatgttaaatgttaatgttgcatccgttgggtcgttaatgttgcctgattcactcatcactataatggatgtaagttacctactctagcagtccccaggctgcacccctcaatgctggcgcacagggccaccttctctgctcctctgcgtcgccgcacccccagccgcgtgtgcagttctctccccctgctcgtc

SEQ ID NO: 8391 - DNA, 226 bp, Zea Mays
tttttgcactctcactacagatttttggaagcgaatggaggaggttgttcatgctttggctaccggccaagcttcaatcgacgccataatgaaacagcctgtgaaggtgtataaatgggacatggatgagacacttattttgctcatgtcacttctggttggctcatatgctagggattttgaaggcctcaaggatcatgagaaaagtactcaaacaaggaagtga

SEQ ID NO: 8392 - DNA, 3270 bp, Zea Mays
gtactttcatgtcctcgtgttcgaatcgacgtcgctcaatgtgctgcagcaagctcgtcgtcggtctaggcgctcgcctcctcgccatcgctttacggattcggcgtcgtgagtttcacctcgccgttacaacgtcttggtcttttggaacttcgacaaatcgttgtcctgctgcgttgctatgtggtgctccctacttcctacctagtgagctcccaaaataaagagtgaagatttaagatgaagtggttgatgaagaggagtctactccagtgcttgttcatcaagtggatggagccatctaactaatcatcgtgttagaagtatctagaacctcttatctgcaacaaaggagaagttttattcccttatctttgggttagttacttcatgtggaggccttgaagcttagaaggtttttatatatctcttatggaaaggcttcacccttccaattattgtaataagttatgcactttgggtactatcaggactattaataacttcagttttatttagccaaaattagtcaaaccaattttgctaggttctaaataatatgaactacttgggaaaaatacaaaacaccctatgtattacagaagattttaaagttttgaattaaatagtattctaaccaaaagctaaataaaatagggaaaaatagctacactgttaggctagggttaagaaaaatcagagaagtacttaaccactccctaatctgtttaaaaatagtacacccctcactacaccaatttaaggaagggtttaccatttaaacttattttggaccaaagttaagaaaaatagaaaaagtggatttaagataaaaaccagggggcaaccacctttttgctagctcacttaatgaacatagttcactggaaaattttaatagaccctctgttagtacaaaagaaatgcagtaccttttatttcatgaaaacaaggaaaacttataaaaatcctagaaaaataaccctgaagagaaaacaccccaaaccttgggataactaatattttgttattatgaatataggaaaaatatgagttttgttgtttgatatttttcaaataacaagttagttataagtacctttttggcattaaactttagaaaatcaaaactaaatatccaataggtctttttctgtggtatttaacatataggcatatattcacctatgaatcttgacaaaaataaaatttggtacagagacctcacttaaatcgtagctatagtgtaaaatgcccttttacacttgttttgttaattttgcacaagtagtatctaaattaaattcagcctcaaacttctagaataacccacaatggtgaataatacccactgtaatttttataacatttttgcaaaatgttaactgaccatgatagttcaaaatgcttaaatagaagcatagtggaaagaaaagggaaatgttgggaaaattagataatatacaatcaaaacctttaagtacctcatggggcctaaaaatatgattaaaaagtgtaactccattcaaaatctcgaagatgaaagtgcaaaacccttaagtatacccaaaagaaaccctagagtcccaccgaacttagtactaatttactatgcatagcctttataatttatcatgtcattaataagcatatatcttattcattgcattcgatagactgtaatctcgctgatggggagtacatcctcgtgccgaagcaaggagttgctcaggaggtagcccaggatctagcaccagagcctaccctcgaggatctgcctgccccagctttggaaggcaagccccggttttatgcataacctacttattatgctattttactacacttattgtttgtaggttcgaatgtgcacttaagtctaggagttgtttgaaactgtagttgcatgactcaggattccctttgagatggatactagtatgctaggtcgagtagctgctttaataattagggatctcggtagaagtcgagtgatttttctagcactcgcgcgaggtcaggaattggttgtatccatttatatatcgtaatgatgatggtctgtggataacggtccatggggatgtgttgtctacgagatggaaattggaataaggcttaaggtgtggtaccgtgtgtcaagcgtttgaacgtactaagcacatgccgagaaatatggtaaatcagtaagcctagtatctgagtgaacctggcagtagattgccctcctcacgcgacctgagacgtggtctcccattccggttatggtgggtacatgtgcggtcactgcacaacgatagtcggggtcagtgagccattgtacgccaaggcggtgagcccctgctgacagggaatcgatggggacggttgatgtgtgtggggacggagtgcctcgccacgtcatgtgtttaggtttaccttgcaaggtttaaaaacttgattcgaatcgtctgcttctcgcagctaatgagactacttgatccatgctgctacattgtgtaacaagtggaaatgtgatgaattggcagaagttgttgattgctaaatgtttgataccatgtatgattagataggtacacatttagtcttaagagagtcacactaaaacttgaaaaagctaaaacttgattttagactcagctagtgcttttggcaaaccaaacccctcagtcaaacagctacatgtctagaggtagaggagtagactcctcacaccgggtaagtctagctgagtattagtatacccagccttgcttgtggcataattttacaggttctctagaggacatggttgctggagtgacttggccgtccatcttgccaccgggttggacagtcgagtgggaccctacctcggcagaggaggagcatgaggagtgatgggataggcttccccatccctccgtttatttatcgttagttttattccgctgcattccgaacaatgatcactacttttgctaaaactccgatgatgttgtaataaatttaatactccttaatgtatggttttatgctttattgtatttgctctgtgcctcaccatcgagtgagtacatggtacttgatcctgttagtggcctcgtcggactggatccgagggactgacgttttattcctatttaagtgtggtctagcatttaaggtggggcttagacacttaagttggaataattcgggcggttccgccacatcggctttcatcaagtgactcctccccctcccgatgactttgcggatatatgtctcaattctagtggtggagctaag

SEQ ID NO: 8393 - DNA, 1615 bp, Zea Mays
cctcccacgttcagtcctccttatctaccatacgctgcaatctcttagcatcttctatccttgcgtgcacgcgtcagtctctagtgatcttcgacgccacctcctacttcctagccaaagcacgatcactcctttggaaacctccagtcctcacgctagctctctggaagtccaaaacgctcggctctcaatactccttcctccgcgtcatctccctctcctcctccccaacgctagagcagcacctgccaaacacccggtaaagtctagacatcgatcgagcccttctcttgctatgcgcttggtctcctcagtgcttgccttgccactcgcacgcctagctccttccatcaggcaagctcggtggctagttcctccatcagctcagcactgccctctggtgctcgcgatcaactccttcacgccgtggcggctccctgggcgtcgttccccagccacctcgccggtgttctcaccttggctgccctcgtcgagtcctttgccgatgttttcaatcagccacgccgacctccactccagcttagaccggtggcggacgcgtactttcctgtcctcgtgttcgaatcgacgtcactcagtgtcccatgccgtcgtgccatctcagtcgtccccagttcttcctcgcccgtaccgtgtgttgcaacaagctcttcgtcgatccaggtgctcgcctcctcgccatcgctttacggattcggcgtcgtgagtttcacctcgccgttacaatgtcttgatcttttgtaacttcggcaaatcgttgtctgcgttgtcatatggtgctccctactccctacctagtggtgagctgtcgtcgatcctgatctttattttactgtttcaaatcaatttagcacgtttgccatagtcatgtatgtcgatatggtgctcgccgtgtttgtggctggctagggattaggatggtgtggcagaaccgcctgaattattccagcttaagtgcacaagtctcgccttagaggtaacaacacacttaaatcggaataatccgtcagtcactcggatctagtccgaaaaagccacttatccaggatcgaataccactagctcacttaaagatgaggcacagagaaatacaataaagcataataccacaaatttaagaagtattaatagtaattacattattggagtttcaaaagcagtaacaatagtttttattgcagcggaaataactaacgaagaaaaccgagtatcatggcgaagtcttgccacgctactccttctggtcctctcctgcggaagcagtaacccattcgaccgtctatcccggtggcagggatggaggccaagtcacatcatcaaccaaatcatccaaagaggtacctacaaaaattatgcctaaagcatggctgagtatactaatactcagctagacttatccggtgtgaggagtctactcctctacctctagacatgcagctatttggctgaggggtttgctttgccaaaagcactagctgagtctaaaatcaggttttcgcttttcaagttttagtatgatcctttttaaactagatgtgtacctagctattcatacatggtatcaaacatttttaacaatcaacatcttttgcca

SEQ ID NO: 8394 - DNA, 1234 bp, Zea Mays
cctcccacgttcagtcctccttatctaccatacgctgcaatctcttagcatcttctatccttgcgtgcacgcgtcagtctctagtgatcttcgacgccacctcctacttcctagccaaagcacgatcactcctttggaaacctccagtcctcacgctagctctctggaagtccaaaacgctcggctctcaatactccttcctccgcgtcatctccctctcctcctccccaacgctagagcagcacctgccaaacacccggtaaagtctagacatcgatcgagcccttctcttgctatgcgcttggtctcctcagtgcttgccttgccactcgcacgcctagctccttccatcaggcaagctcggtggctagttcctccatcagctcagcactgccctctggtgctcgcgatcaactccttcacgccgtggcggctccctgggcgtcgttccccagccacctcgccggtgttctcaccttggctgccctcgtcgagtcctttgccgatgttttcaatcagccacgccgacctccactccagcttagaccggtggcggacgcgtactttcctgtcctcgtgttcgaatcgacgtcactcagtgtcccatgccgtcgtgccatctcagtcgtccccagttcttcctcgcccgtaccgtgtgttgcaacaagctcttcgtcgatccaggtgctcgcctcctcgccatcgctttacggattcggcgtcgtgagtttcacctcgccgttacaatgtcttgatcttttgtaacttcggcaaatcgttgtctgcgttgtcatatggtgctccctactccctacctagtgcggaaataactaacgaagaaaaccgagtatcatggcgaagtcttgccacgctactccttctggtcctctcctgcggaagcagtaacccattcgaccgtctatcccggtggcagggatggaggccaagtcacatcatcaaccaaatcatccaaagaggtacctacaaaaattatgcctaaagcatggctgagtatactaatactcagctagacttatccggtgtgaggagtctactcctctacctctagacatgcagctatttggctgaggggtttgctttgccaaaagcactagctgagtctaaaatcaggttttcgcttttcaagttttagtatgatcctttttaaactagatgtgtacctagctattcatacatggtatcaaacatttttaacaatcaacatcttttgcca

SEQ ID NO: 8395 - DNA, 2218 bp, Zea Mays
atatgaggaagatttattgggaaccccaagataagtaccttcaatatgcttttgtcggtgtgtgctagttcactagattttgacggagcgctccaagttatggagctcctaaaggaagctgggctaaaacctgattgtaaactttacacaacgctgatatcaacttgtgcaaagtgtggaaaagttgatgccatgtttgaggtattttatgagatggtcagtgctggtatagagccaaatgttaacacatacagtgcattaattgatggctgtgctagagctgggcaagtggctaaagcatttggtgtttatgggattatgagttcaaagaaggtgaagccagatcgagttgtcttcaattctttgatcagtgcatgcggtgaatctggagctctggctcgggcatttgatgttttatcagaaatgacagcagaatcctctgaatctaaaggatggaaaccaatcgttcctgatcatgttactgttggagcactgatgaaaacatgtattttggcgggccaggctgatagagctcgtgaggtgtacaaaatgcttcaggagtataatataaagggtaccccagaagtttacacaatcgcattaagaagctgtagcttgactggtgatttagggtttgcactgaagatatatgaagatatgaacaggattggagtaaaacctgatgagatgtttttgagtgctctagttgatgtagctggccatgctaggagggcagatgctgcctttgaaataatgaaagatgcaagagcaaaaggtttactcgttggaacaattgcatacagttcgttaatgggggcttgctgtaatgcggacgactggaagaaggcactgcagctatacgaggagatcaagtctatcaaattgaccccatcggtttcaatgatgaatgctttgatcacctctctgtgtgatggtgatcaggtcttaaaggctgttgatatccttaatgagatgaacatattaggggtccatccaaatgagataacatactcagtcttatttgttgcttgcgaaagaaatggtgaagcacaactaggtttggatttgtttgaacaattaaaaatggatggcattgacatcaatccgaccataattggttctcttactggtttgtgccttcaaatgttcaacattgatttttcgcttgggaatattattgtcaacttcagctcagggaaaccacagattgacaacaaatggacttcctcagcagttatggtgtatcgtgaggcagtttcagctgggctactaccctcaagtgatgttttatctcaagtgttgggatgtctgaggcttcctcatggcagttctctgaagagtactttcattgaaaacatgggagtaagttgtgacattccacaatacccaaatataaattcacttttcgaaggattcggtgaatatgacattcgagctttttctatattggaggaggctgcttcattaggagcagttgcaagcatttccataaaagaaacccggattgttattgatgctagaaagttaaagatcttcacagccgaggtatctcttcttagaaccttaagatctttgaagcatcgattggctgcaggttcaaggttaccaaacgtgacaatcttgttacctacagaaaagaaacaagttgacattgatgaaaaggagaaaacacttaaacttgctggaagaattggtcaagcagttggctctctcctgaggcgattaggaatttcataccagggggaggaatctcatgggaggatgaggatcaatggcctcacgataaggaggtggttcaatccaaaactgaatagcaaatcctctgctgccggcccagctgacttgcttccactaccttcgcggttagccaaagggattgctggtcagcaacgcgatattagaaacctttcactcgagtagtagactagtactacacggctatcctggaagcgatctcagtaacccgtgtgataagaagcgtagtatagtaagatgtgcaaacgtgtgaagagtttgttcggtagaaggaaatacataatccatcaatctgtaatgacagtagtcgaaggaaagatatgcacgatgcatcaaacttttgtaatcatgtcaggtaaagggattttcccctgaacataatatacatatagagttacatatttggacgcctgctcatccttgtatgcatctttgataagctatgctagatcttaagattgac

SEQ ID NO: 8396 - DNA, 2375 bp, Zea Mays
ttagagtacttgaggatatacaacagtttcttaattgatggaaggttgaaggactgcgtggatttgttagaaagcatggaacaaaatggactgcttgatatgaggaagatacaccatgccagctttttcagtatgtgtaagaagcaaagagctgtcttggaagctcttcgcttttgcagatttattgggaaccccaagataagtaccttcaatatgcttttgtcggtgtgtgctagttcactagattttgacggagcgctccaagttatggagctcctaaaggaagctgggctaaaacctgattgtaaactttacacaacgctgatatcaacttgtgcaaagtgtggaaaagttgatgccatgtttgaggtattttatgagatggtcagtgctggtatagagccaaatgttaacacatacagtgcattaattgatggctgtgctagagctgggcaagtggctaaagcatttggtgtttatgggattatgagttcaaagaaggtgaagccagatcgagttgtcttcaattctttgatcagtgcatgcggtgaatctggagctctggctcgggcatttgatgttttatcagaaatgacagcagaatcctctgaatctaaaggatggaaaccaatcgttcctgatcatgttactgttggagcactgatgaaaacatgtattttggcgggccaggctgatagagctcgtgaggtgtacaaaatgcttcaggagtataatataaagggtaccccagaagtttacacaatcgcattaagaagctgtagcttgactggtgatttagggtttgcactgaagatatatgaagatatgaacaggattggagtaaaacctgatgagatgtttttgagtgctctagttgatgtagctggccatgctaggagggcagatgctgcctttgaaataatgaaagatgcaagagcaaaaggtttactcgttggaacaattgcatacagttcgttaatgggggcttgctgtaatgcggacgactggaagaaggcactgcagctatacgaggagatcaagtctatcaaattgaccccatcggtttcaatgatgaatgctttgatcacctctctgtgtgatggtgatcaggtcttaaaggctgttgatatccttaatgagatgaacatattaggggtccatccaaatgagataacatactcagtcttatttgttgcttgcgaaagcacaactaggtttggatttgtttgaacaattaaaaatggatggcattgacatcaatccgaccataattggttctcttactggtttgtgccttcaaatgttcaacattgatttttcgcttgggaatattattgtcaacttcagctcagggaaaccacagattgacaacaaatggacttcctcagcagttatggtgtatcgtgaggcagtttcagctgggctactaccctcaagtgatgttttatctcaagtgttgggatgtctgaggcttcctcatggcagttctctgaagagtactttcattgaaaacatgggagtaagttgtgacattccacaatacccaaatataaattcacttttcgaaggattcggtgaatatgacattcgagctttttctatattggaggaggctgcttcattaggagcagttgcaagcatttccataaaagaaacccggattgttattgatgctagaaagttaaagatcttcacagccgaggtatctcttcttagaaccttaagatctttgaagcatcgattggctgcaggttcaaggttaccaaacgtgacaatcttgttacctacagaaaagaaacaagttgacattgatgaaaaggagaaaacacttaaacttgctggaagaattggtcaagcagttggctctctcctgaggcgattaggaatttcataccagggggaggaatctcatgggaggatgaggatcaatggcctcacgataaggaggtggttcaatccaaaactgaatagcaaatcctctgctgccggcccagctgacttgcttccactaccttcgcggttagccaaagggattgctggtcagcaacgcgatattagaaacctttcactcgagtagtagactagtactacacggctatcctggaagcgatctcagtaacccgtgtgataagaagcgtagtatagtaagatgtgcaaacgtgtgaagagtttgttcggtagaaggaaatacataatccatcaatctgtaatgacagtagtcgaaggaaagatatgcacgatgcatcaaacttttgtaatcatgtcaggtaaagggattttcccctgaacataatatacatatagagttacatatttggacgcctgctcatccttgtatgcatctttgataagctatgctagatcttaagattgac

SEQ ID NO: 8397 - DNA, 2410 bp, Zea Mays
cttcgctccagtaaagagagggggatcgaagggcacgaaggatacattagagtacttgaggatatacaacagtttcttaattgatggaaggttgaaggactgcgtggatttgttagaaagcatggaacaaaatggactgcttgatatgaggaagatacaccatgccagctttttcagtatgtgtaagaagcaaagagctgtcttggaagctcttcgcttttgcagatttattgggaaccccaagataagtaccttcaatatgcttttgtcggtgtgtgctagttcactagattttgacggagcgctccaagttatggagctcctaaaggaagctgggctaaaacctgattgtaaactttacacaacgctgatatcaacttgtgcaaagtgtggaaaagttgatgccatgtttgaggtattttatgagatggtcagtgctggtatagagccaaatgttaacacatacagtgcattaattgatggctgtgctagagctgggcaagtggctaaagcatttggtgtttatgggattatgagttcaaagtagaaggtgaagccagatcgagttgtcttcaattctttgatcagtgcatgcggtgaatctggagctctggctcgggcatttgatgttttatcagaaatgacagcagaatcctctgaatctaaaggatggaaaccaatcgttcctgatcatgttactgttggagcactgatgaaaacatgtattttggcgggccaggctgatagagctcgtgaggtgtacaaaatgcttcaggagtataatataaagggtaccccagaagtttacacaatcgcattaagaagctgtagcttgactggtgatttagggtttgcactgaagatatatgaagatatgaacaggattggagtaaaacctgatgagatgtttttgagtgctctagttgatgtagctggccatgctaggagggcagatgctgcctttgaaataatgaaagatgcaagagcaaaaggtttactcgttggaacaattgcatacagttcgttaatgggggcttgctgtaatgcggacgactggaagaaggcactgcagctatacgaggagatcaagtctatcaaattgaccccatcggtttcaatgatgaatgctttgatcacctctctgtgtgatggtgatcaggtcttaaaggctgttgatatccttaatgagatgaacatattaggggtccatccaaatgagataacatactcagtcttatttgttgcttgcgaaagcacaactaggtttggatttgtttgaacaattaaaaatggatggcattgacatcaatccgaccataattggttctcttactggtttgtgccttcaaatgttcaacattgatttttcgcttgggaatattattgtcaacttcagctcagggaaaccacagattgacaacaaatggacttcctcagcagttatggtgtatcgtgaggcagtttcagctgggctactaccctcaagtgatgttttatctcaagtgttgggatgtctgaggcttcctcatggcagttctctgaagagtactttcattgaaaacatgggagtaagttgtgacattccacaatacccaaatataaattcacttttcgaaggattcggtgaatatgacattcgagctttttctatattggaggaggctgcttcattaggagcagttgcaagcatttccataaaagaaacccggattgttattgatgctagaaagttaaagatcttcacagccgaggtatctcttcttagaaccttaagatctttgaagcatcgattggctgcaggttcaaggttaccaaacgtgacaatcttgttacctacagaaaagaaacaagttgacattgatgaaaaggagaaaacacttaaacttgctggaagttggctctctcctgaggcgattaggaatttcataccagggggaggaatctcatgggaggatgaggatcaatggcctcacgataaggaggtggttcaatccaaaactgaatagcaaatcctctgctgccggcccagctgacttgcttccactaccttcgcggttagccaaagggattgctggtcagcaacgcgatattagaaacctttcactcgagtagtagactagtactacacggctatcctggaagcgatctcagtaacccgtgtgataagaagcgtagtatagtaagatgtgcaaacgtgtgaagagtttgttcggtagaaggaaatacataatccatcaatctgtaatgacagtagtcgaaggaaagatatgcacgatgcatcaaacttttgtaatcatgtcaggtaaagggattttcccctgaacataatatacatatagagttacatatttggacgcctgctcatccttgtatgcatctttgataagctatgctagatcttaagattgac

SEQ ID NO: 8398 - DNA, 2432 bp, Zea Mays
cttcgctccagtaaagagagggggatcgaagggcacgaaggatacattagagtacttgaggatatacaacagtttcttaattgatggaaggttgaaggactgcgtggatttgttagaaagcatggaacaaaatggactgcttgatatgaggaagatacaccatgccagctttttcagtatgtgtaagaagcaaagagctgtcttggaagctcttcgcttttgcagatttattgggaaccccaagataagtaccttcaatatgcttttgtcggtgtgtgctagttcactagattttgacggagcgctccaagttatggagctcctaaaggaagctgggctaaaacctgattgtaaactttacacaacgctgatatcaacttgtgcaaagtgtggaaaagttgatgccatgtttgaggtattttatgagatggtcagtgctggtatagagccaaatgttaacacatacagtgcattaattgatggctgtgctagagctgggcaagtggctaaagcatttggtgtttatgggattatgagttcaaagaaggtgaagccagatcgagttgtcttcaattctttgatcagtgcatgcggtgaatctggagctctggctcgggcatttgatgttttatcagaaatgacagcagaatcctctgaatctaaaggatggaaaccaatcgttcctgatcatgttactgttggagcactgatgaaaacatgtattttggcgggccaggctgatagagctcgtgaggtgtacaaaatgcttcaggagtataatataaagggtaccccagaagtttacacaatcgcattaagaagctgtagcttgactggtgatttagggtttgcactgaagatatatgaagatatgaacaggattggagtaaaacctgatgagatgtttttgagtgctctagttgatgtagctggccatgctaggagggcagatgctgcctttgaaataatgaaagatgcaagagcaaaaggtttactcgttggaacaattgcatacagttcgttaatgggggcttgctgtaatgcggacgactggaagaaggcactgcagctatacgaggagatcaagtctatcaaattgaccccatcggtttcaatgatgaatgctttgatcacctctctgtgtgatggtgatcaggtcttaaaggctgttgatatccttaatgagatgaacatattaggggtccatccaaatgagataacatactcagtcttatttgttgcttgcgaaagaaatggtgaagcacaactaggtttggatttgtttgaacaattaaaaatggatggcattgacatcaatccgaccataattggttctcttactggtttgtgccttcaaatgttcaacattgatttttcgcttgggaatattattgtcaacttcagctcagggaaaccacagattgacaacaaatggacttcctcagcagttatggtgtatcgtgaggcagtttcagctgggctactaccctcaagtgatgttttatctcaagtgttgggatgtctgaggcttcctcatggcagttctctgaagagtactttcattgaaaacatgggagtaagttgtgacattccacaatacccaaatataaattcacttttcgaaggattcggtgaatatgacattcgagctttttctatattggaggaggctgcttcattaggagcagttgcaagcatttccataaaagaaacccggattgttattgatgctagaaagttaaagatcttcacagccgaggtatctcttcttagaaccttaagatctttgaagcatcgattggctgcaggttcaaggttaccaaacgtgacaatcttgttacctacagaaaagaaacaagttgacattgatgaaaaggagaaaacacttaaacttgctggaagaattggtcaagcagttggctctctcctgaggcgattaggaatttcataccagggggaggaatctcatgggaggatgaggatcaatggcctcacgataaggaggtggttcaatccaaaactgaatagcaaatcctctgctgccggcccagctgacttgcttccactaccttcgcggttagccaaagggattgctggtcagcaacgcgatattagaaacctttcactcgagtagtagactagtactacacggctatcctggaagcgatctcagtaacccgtgtgataagaagcgtagtatagtaagatgtgcaaacgtgtgaagagtttgttcggtagaaggaaatacataatccatcaatctgtaatgacagtagtcgaaggaaagatatgcacgatgcatcaaacttttgtaatcatgtcaggtaaagggattttcccctgaacataatatacatatagagttacatatttggacgcctgctcatccttgtatgcatctttgataagctatgctagatcttaagattgac

SEQ ID NO: 8399 - DNA, 2435 bp, Zea Mays
cttcgctccagtaaagagagggggatcgaagggcacgaaggatacattagagtacttgaggatatacaacagtttcttaattgatggaaggttgaaggactgcgtggatttgttagaaagcatggaacaaaatggactgcttgatatgaggaagatacaccatgccagctttttcagtatgtgtaagaagcaaagagctgtcttggaagctcttcgcttttgcagatttattgggaaccccaagataagtaccttcaatatgcttttgtcggtgtgtgctagttcactagattttgacggagcgctccaagttatggagctcctaaaggaagctgggctaaaacctgattgtaaactttacacaacgctgatatcaacttgtgcaaagtgtggaaaagttgatgccatgtttgaggtattttatgagatggtcagtgctggtatagagccaaatgttaacacatacagtgcattaattgatggctgtgctagagctgggcaagtggctaaagcatttggtgtttatgggattatgagttcaaagtagaaggtgaagccagatcgagttgtcttcaattctttgatcagtgcatgcggtgaatctggagctctggctcgggcatttgatgttttatcagaaatgacagcagaatcctctgaatctaaaggatggaaaccaatcgttcctgatcatgttactgttggagcactgatgaaaacatgtattttggcgggccaggctgatagagctcgtgaggtgtacaaaatgcttcaggagtataatataaagggtaccccagaagtttacacaatcgcattaagaagctgtagcttgactggtgatttagggtttgcactgaagatatatgaagatatgaacaggattggagtaaaacctgatgagatgtttttgagtgctctagttgatgtagctggccatgctaggagggcagatgctgcctttgaaataatgaaagatgcaagagcaaaaggtttactcgttggaacaattgcatacagttcgttaatgggggcttgctgtaatgcggacgactggaagaaggcactgcagctatacgaggagatcaagtctatcaaattgaccccatcggtttcaatgatgaatgctttgatcacctctctgtgtgatggtgatcaggtcttaaaggctgttgatatccttaatgagatgaacatattaggggtccatccaaatgagataacatactcagtcttatttgttgcttgcgaaagaaatggtgaagcacaactaggtttggatttgtttgaacaattaaaaatggatggcattgacatcaatccgaccataattggttctcttactggtttgtgccttcaaatgttcaacattgatttttcgcttgggaatattattgtcaacttcagctcagggaaaccacagattgacaacaaatggacttcctcagcagttatggtgtatcgtgaggcagtttcagctgggctactaccctcaagtgatgttttatctcaagtgttgggatgtctgaggcttcctcatggcagttctctgaagagtactttcattgaaaacatgggagtaagttgtgacattccacaatacccaaatataaattcacttttcgaaggattcggtgaatatgacattcgagctttttctatattggaggaggctgcttcattaggagcagttgcaagcatttccataaaagaaacccggattgttattgatgctagaaagttaaagatcttcacagccgaggtatctcttcttagaaccttaagatctttgaagcatcgattggctgcaggttcaaggttaccaaacgtgacaatcttgttacctacagaaaagaaacaagttgacattgatgaaaaggagaaaacacttaaacttgctggaagaattggtcaagcagttggctctctcctgaggcgattaggaatttcataccagggggaggaatctcatgggaggatgaggatcaatggcctcacgataaggaggtggttcaatccaaaactgaatagcaaatcctctgctgccggcccagctgacttgcttccactaccttcgcggttagccaaagggattgctggtcagcaacgcgatattagaaacctttcactcgagtagtagactagtactacacggctatcctggaagcgatctcagtaacccgtgtgataagaagcgtagtatagtaagatgtgcaaacgtgtgaagagtttgttcggtagaaggaaatacataatccatcaatctgtaatgacagtagtcgaaggaaagatatgcacgatgcatcaaacttttgtaatcatgtcaggtaaagggattttcccctgaacataatatacatatagagttacatatttggacgcctgctcatccttgtatgcatctttgataagctatgctagatcttaagattgac

SEQ ID NO: 8400 - DNA, 1954 bp, Zea Mays
cttcgctccagtaaagagagggggatcgaagggcacgaaggatacattagagtacttgaggatatacaacagtttcttaattgatggaaggttgaaggactgcgtggatttgttagaaagcatggaacaaaatggactgcttgatatgaggaagatacaccatgccagctttttcagtatgtgtaagaagcaaagagctgtcttggaagctcttcgcttttgcagatttattgggaaccccaagataagtaccttcaatatgcttttgtcggtgtgtgctagttcactagattttgacggagcgctccaagttatggagctcctaaaggaagctgggctaaaacctgattgtaaactttacacaacgctgatatcaacttgtgcaaagtgtggaaaagttgatgccatgtttgaggtattttatgagatggtcagtgctggtatagagccaaatgttaacacatacagtgcattaattgatggctgtgctagagctgggcaagtggctaaagcatttggtgtttatgggattatgagttcaaagtagaaggtgaagccagatcgagttgtcttcaattctttgatcagtgcatgcggtgaatctggagctctggctcgggcatttgatgttttatcagaaatgacagcagaatcctctgaatctaaaggatggaaaccaatcgttcctgatcatgttactgttggagcactgatgaaaacatgtattttggcgggccaggctgatagagctcgtgaggtgtacaaaatgcttcaggagtataatataaagggtaccccagaagtttacacaatcgcattaagaagctgtagcttgactggtgatttagggtttgcactgaagatatatgaagatatgaacaggattggagtaaaacctgatgagatgtttttgagtgctctagttgatgtagctggccatgctaggagggcagatgctgcctttgaaataatgaaagatgcaagagcaaaaggtttactcgttggaacaattgcatacagttcgttaatgggggcttgctgtaatgcggacgactggaagaaggcactgcagctatacgaggagatcaagtctatcaaattgaccccatcggtttcaatgatgaatgctttgatcacctctctgtgtgatggtgatcaggtcttaaaggctgttgatatccttaatgagatgaacatattaggggtccatccaaatgagataacatactcagtcttatttgttgcttgcgaaagaaatggtgaagcacaactaggtttggatttgtttgaacaattaaaaatggatggcattgacatcaatccgaccataattggttctcttactggtttgtgccttcaaatgttcaacattgatttttcgcttgggaatattattgtcaacttcagctcagggaaaccacagattgacaacaaatggacttcctcagcagttatggtgtatcgtgaggcagtttcagctgggctactaccctcaagtgatgttttatctcaagtgttgggatgtctgaggcttcctcatggcagttctctgaagagtactttcattgaaaacatgggagtaagttgtgacattccacaatacccaaatataaattcacttttcgaaggattcggtgaatatgacattcgagctttttctatattggaggaggctgcttcattaggagcagttgcaagcatttccataaaagaaacccggattgttattgatgctagaaagttaaagatcttcacagccgaggtatctcttcttagaaccttaagatctttgaagcatcgattggctgcagtaccgacacaggacaaatggacatggtgtgagaaacaataaatatggagggtcaatggattatttgtgcttctgtacattttgtttagattgtaaactatataaatacagaatattggccatttgctgataaggcgagctgac

SEQ ID NO: 8401 - DNA, 1610 bp, Zea Mays
agataacttcgctccagtaaagagagggggatcgaagggcacgaaggatacattagagtacttgaggatatacaacagtttcttaattgatggaaggttgaaggactgcgtggatttgttagaaagcatggaacaaaatggactgcttgatatgaggaagatacaccatgccagctttttcagtatgtgtaagaagcaaagagctgtcttggaagctcttcgcttttgcagatttattgggaaccccaagataagtaccttcaatatgcttttgtcggtgtgtgctagttcactagattttgacggagcgctccaagttatggagctcctaaaggaagctgggctaaaacctgattgtaaactttacacaacgctgatatcaacttgtgcaaagtgtggaaaagttgatgccatgtttgaggtattttatgagatggtcagtgctggtatagagccaaatgttaacacatacagtgcattaattgatggctgtgctagagctgggcaagtggctaaagcatttggtgtttatgggattatgagttcaaagaaggtgaagccagatcgagttgtcttcaattctttgatcagtgcatgcggtgaatctggagctctggctcgggcatttgatgttttatcagaaatgacagcagaatcctctgaatctaaaggatggaaaccaatcgttcctgatcatgttactgttggagcactgatgaaaacatgtattttggcgggccaggctgatagagctcgtgaggtgtacaaaatgcttcaggagtataatataaagggtaccccagaagtttacacaatcgcattaagaagctgtagcttgactggtgatttagggtttgcactgaagatatatgaagatatgaacaggattggagtaaaacctgatgagatgtttttgagtgctctagttgatgtagctggccatgctaggagggcagatgctgcctttgaaataatgaaagatgcaagagcaaaaggtttactcgttggaacaattgcatacagttcgttaatgggggcttgctgtaatgcggacgactggaagaaggcactgcagctatacgaggagatcaagtctatcaaattgaccccatcggtttcaatgatgaatgctttgatcacctctctgtgtgatggtgatcaggtcttaaaggctgttgatatccttaatgagatgaacatattaggggtccatccaaatgagataacatactcagtcttatttgttgcttgcgaaagaaatggtgaagcacaactaggtttggatttgtttgaacaattaaaaatggatggcattgacatcaatccgaccataattggttctcttactggtttgtgccttcaaatgttcaacattgatttttcgcttgggaatattattgtcaacttcagctcagggaaaccacagattgacaacaaatggacttcctcagcagttatggtgtatcgtgaggcagtttcagctgggctactaccctcaagtgatgttttatctcaagtgttgggatgtctgaggcttcctcatggcagttctctgaagagtactttcattgaaaacatgggagtattaatcaaagttgcatggcttcttg

SEQ ID NO: 8402 - DNA, 793 bp, Zea Mays
tcgtcatcatcctaaacctcactcgctcggccactcctccccaggcaatggaggcctccgcttcctcctacgcttccgctcctgcagcgctcctcccgctgctggctgccccgctgcgcttcctccacctccccctccgccgtccctctgctcgccgccacggcttcgcgattgggggtggaggtggccttctgctccagccgccgctgctgggctccggctcccgtgcccgctgtaggacgacctgctgcgtgtcaagccccgagcaggcggaagtgctgctgggcggggcctcgttcgttagcttggcggcggtcgctctcctcaccgctctgcagctgatatggttgcggtggcgcagtgcgaggttttacatgaacatggcataatcattgtaaagacccttcgtacatcaaaagcaatgtatgacagtaatttggcaccacatctaactcagggtagtcactggctttcagagccttgtgtttctggaagaatgactgttgatgaaatgaatcacaaggctggtaactttccctgtgcacacactgtacatacagaaaaacaggcttattctgtaattactccttggatatctccagatataccgttatatgtttctagacctgaagaagttagttgcgcaactccaactgcaaatagttccataaaaaaggatacaagtcttcctgtgatgccacattctgtgtcacaagggcaagataactccaagtatttgtctaacagaacaggcagggtagctgggctaccatatcagtttttatccctttca

SEQ ID NO: 8403 - DNA, 963 bp, Zea Mays
cagcgcctggagcgaacccctgccgcgcctgagatccaggcagccatggagggcagccgaaccccttctccatggcttgagccagcgccctctccctgctggttccttggtcgtcccttccctggtgggtactcagtcaccctcccctatctctattctagcagctagcacacgaaatcctcctcggtgcctagtgcccatgccgacaccacgccttctcccatggctgagcgtgggcgctcttttccccatgccatggatgcacctccacctgctcctgttgcatggacgcaagccccagctcgtcgtggtcaacacgtccaatgtgcccctcctagagacgctcgacctccttgttgtgctgcctcaccctcacttccatcttcctcgctgttctctacaacgcccattgactgttcgacgaaacgtctgagaggagcatcgtatcataaacaacatcccatggcgctgctgcccccatggtctacctgctgcaagttttgcctcgtcccactcgtcgtcaggctcgaaccgggtgtgcgcagcccgtccgcgacagcgtcgaccccgcggcggccttgtacttgtgttgcttcccgagctgagaccttgcacgcaacagcaagtcctggatcccctctgcatcgcgtgcttcgctgggtctgcgcagcgctgcgcgtcgtcgtcgaaaccctcgcctctcggtgtcgcgcctcacgcaccccgcgtccaacgagacgcctaaaccatggacgcatgcgcaactccacttgggtttcagccaggttgttcgctttagaaaaattgtggtttttgttttatttacgattcagtcaatggcgtaaatatgtgtgtgaaaatataattgtatgaataaacgcgtgtagagaagaaactgaagtagaaaagaactcgggcatttttatattttgataggaaaattatgcgatgcgttgtttgatg

SEQ ID NO: 8404 - DNA, 1422 bp, Zea Mays
ttccaattttgtcttctcggcacccgcgggagctgcggcagcggcatgaaggcgcggccccgtgcgtgctagtgcctccgtcaagtgacaaggcgtggccgcaagtcgcgcacgagtcgtggcgacggcatccaagcaaggaaaagaaataaagcggaaaactttaaacgggtacgcaggagatccagcgaaatggcggcgccgccgccgtcatatccagcggccttgaagccggagatcggccctgacggcctcgctcgagattctcccgtaatcgcctacaccgagaaggtcattttggaggagcagctgcagctgaagaaatacattcaggagaactattccaaaattcgtgatgtagaaaaggagttagagagtcttactttagaaatgaaactgacagctggaccaaagaaagcagcactagagcatctgaggaagaagattgaaatatcaacagagaaaatacgtttagctaaggtgaaagaggaacatgcaaaaaagacttgggaagttgctgcacaagttgttaaagacgaagaggatgctaagcagaaattatgtgatgacctaaaccatctagtccaggagagtgctgcttcccaatatgcaagattggaggagctgaagaaacgtttagaatctctaaatcccataagggattctgttaatgtgtcaatgtaactggccgtcagaatattgccacaaagcctgcttctatgcaacagcagcctatacctgcggaggcagaaaagaagagaagaccctcgaattcggcaagagggaggggtggtgtcatgatccttccgaagggaagagagggttctgggtcaggatggacaggtgctgggtttgatgtagatagccgtacatgacgcccggtatttcaagttattcgtaccattgaaaccatgctctccaaaattcacaagaattagattggtcaccaaaaaaaaaaattcagagccattccagaattctaatgtgaggaaggtgtacgtttgatcatttgttcatccattgtatatgaatcatgcactaaattaatcaaagttttaacatatatattcaaaggctagaaatctgaacctaagtatgagcacccgatagggcatgttgtcgtagggtgtgtttgactatggtacatctggatgaacggatgtatgctaagttgaattgtattttaataaaaggtgtttgatgcggatgtatgagtggatgtaaaaaaatacagagattatttggttgtatgagtcaatgcaatttgttgggcttgtgagaccgagtgtgatcctataccacaacactgcatcaccagaactggctagcaattaaagctgaaatcgagtgcatgatcggatacagtgggcgtgcaaatatatggctgggtgcttgctgctagtggctaaaaaaaatcgaaac

SEQ ID NO: 8405 - DNA, 1705 bp, Zea Mays
ttccaattttgtcttctcggcacccgcgggagctgcggcagcggcatgaaggcgcggccccgtgcgtgctagtgcctccgtcaagtgacaaggcgtggccgcaagtcgcgcacgagtcgtggcgacggcatccaagcaaggaaaagaaataaagcggaaaactttaaacgggtacgcaggagatccagcgaaatggcggcgccgccgccgtcatatccagcggccttgaagccggagatcggccctgacggcctcgctcgagattctcccgtaatcgcctacaccgagaaggtcattttggaggagcagctgcagctgaagaaatacattcaggagaactattccaaaattcgtgatgtagaaaaggagttagagagtcttactttagaaatgaaactgacagctggaccaaagaaagcagcactagagcatctgaggaagaagattgaaatatcaacagagaaaatacgtttagctaaggtgaaagaggaacatgcaaaaaagacttgggaagttgctgcacaagttgttaaagacgaagaggatgctaagcagaaattatgtccaggagagtgctgcttcccaatatgcaagattggaggagctgaagaaacgtttagaatctctaaatcccataagggattctgttaatgtgtcagtaagtgaataaccccaaggccatagatctgatgtttcatctttgaaattatttatttctcactgtcagtatttctgctttagtattaacaggaacgagtcttattgattatatgtttcctgtttgctagtagacattagttcttttgttgttttctgagcagataatgttggttttggtctcaactagtatgtgtatgttccgtattattgtctcaccttttcttgtatcagggtgtttatactgcacagcatgctactctgaattcagtacctcagcaaccaactgcacaaaatcctgcagatgtaactggccgtcagaatattgccacaaagcctgcttctatgcaacagcagcctatacctgcggaggcagaaaagaagagaagaccctcgaattcggcaagagggaggggtggtgtcatgatccttccgaagggaagagagggttctgggtcaggatggacaggtgctgggtttgatgtagatagccgtacatgacgcccggtatttcaagttattcgtaccattgaaaccatgctctccaaaattcacaagaattagattggtcaccaaaaaaaaaaattcagagccattccagaattctaatgtgaggaaggtgtacgtttgatcatttgttcatccattgtatatgaatcatgcactaaattaatcaaagttttaacatatatattcaaaggctagaaatctgaacctaagtatgagcacccgatagggcatgttgtcgtagggtgtgtttgactatggtacatctggatgaacggatgtatgctaagttgaattgtattttaataaaaggtgtttgatgcggatgtatgagtggatgtaaaaaaatacagagattatttggttgtatgagtcaatgcaatttgttgggcttgtgagaccgagtgtgatcctataccacaacactgcatcaccagaactggctagcaattaaagctgaaatcgagtgcatgatcggatacagtgggcgtgcaaatatatggctgggtgcttgctgctagtggctaaaaaaaatcgaaac

SEQ ID NO: 8406 - DNA, 1374 bp, Zea Mays
ccgaccgttttcattgctcacactgctgtctccgttccatcccctacgagatctgccccctcgccctcgccctgctccaatccccatctccttgcggcccgatccaccctgctccaatcccccggcgatggtcgtgtgcaaatgccgaaaggcgacgagggtttactgcttcgtccatcaggtccccgtctgtggcgtgtgcatatgcttcccggaacatcagctatgtgtggtgaagaactatgctgaatgggttgttaattctgagtatgactggccacaacactgttcgtcttgcaattctgttctcgaaggtggaactgaagaaacaacacgattgggttgcttgcatgtggtacacaccaaatgcttgatatcacatatccaaagttttcctacccaaacagcaccagatggatacgtctgcccctcctgttctgcacccatatggccaccttctagcattaaagatacaggttcgcgccttcacactgaactgaaagaagcgatagtccagactggaatggagaaaaatgtatttggaaatcattatgtgacaatagctaaagctgatactcagacacctcctgcttttgcatcagatcctctcaaaactttatccaatcgtgatgatagagaatttaatagtgcaaatgcagctaaagatgctgctttgccatcaacattacattctgggatgtactcttctgctgtaggatctgagacaactattcatgttgatccagaaattgttgaaatagagggttctagtcctgtatcgacccaattttcagtgcaggactccaacttcatcaggagtccaagcccacatggggtacatttcgtcacaaatttctaaggatgctgctgccgttctggtccagtgcactgccaacgctaccagtcacagcaccatcaaaaaaagagagtgatgctctagaggggagtcgatcacgccatcagagatcatcaagaatggatcccactaagatcttacttgcaatggctatcatggcatgtatagcaactatgggaatactctattaccggttgtcacagcgaggtctttctgaaaccttcttagaggacgagactcagtaatcttgccttcctgtattgcgttgttgctgattcaaaggattttaccctctgtattttttttcgtttaccctttgtgggcctttttggtggtttgaaggtggggtagtggttagtagactctttctatattccgattcatgctcatgtttatgtgactactataatggtatatacaatattgtattatctacagctgagatcatagaaaatttaacccatggacagtttaaacctggttagctcatctaatgtagtatttcctagtttctgttt

SEQ ID NO: 8407 - DNA, 1200 bp, Zea Mays
gagtgtgtatatatgtggagcacgtacgccaagcagcggcgtgaggcagcctgctagctgagaggatcggatcgcatggaacttgccgggacatggaggaaggtgatgccttacatggccatggtgtttcttcagttcggcttcgccggaatgttcctcatctccgtcgcgtccctgcggcagggaatgagccactatgtccttgttgtctaccggaacgtagtggcagccattgtcatggctccattcgcgctatggtttgagaggaaaacaaggcctaaaatgagcctaccggtgttcatcaagatccttgctttgggattactcgaacccgtgcttgaccaaaacttcatctacatgggagtgaatagcacatcagcaagcttctcctctgcgttaaccaacatattgccagctctaacttttgtaaatgccatcatactcagggccccatcatcaacttcccatggagcaagcacgccagccacgccgtatctgacagcggcgtccacaacagcggacactggctcatgggcacgttcatgatcctgttaagctgcttctgctggtctgccttcttcatactccagtcatatacgttgaggagttacccatctgagctctctttaaccactctgatatgcgcaatgggcgccacggagagtggcgcggtcgccctagtcatggagcgtgacaccaaggcttggtccatcgggtttgacatgagactcttcacggccatatactcgggaataatgtgctctggagtagcttactacgtgcaagggatagtgattaaggacaggggcccagtgttcgtgactgcgtttagcccgctctgcatgattttagtgactgtgctaggctccttcattctttctgaggtcgtcactttaggaaggctcattggtgcgacagtcattgttgttggactctatgcgctcatctggggcaagaacaaggaccatgtgaagtcgcaaaacagttttgacaagcacgacacatttgagctgccgttctctacttctgccgttaacaatacaaccggtcccgtcctggcaacatctatttaaggctcgtgtccatgtgacttcctgtatcccgcacccatcgatttaaggctagctagcggcctagcatgtaatcgccaaatttccattaaaaaagaattctaggatttgcataacacagtttttctct

SEQ ID NO: 8408 - DNA, 663 bp, Zea Mays
gtcatctccgagccgttcgacacgtctgtgggcatctaccagagattccctactagggatacggagccgcccccattccatcctcatctgctcgctccgtctcccggttcatgccatccccatacggccactaactcctacattccacagatgcgtttccgtagcaattccttgcctggtgggaaactcagggcggatttgaagactgtcggcaaagatccagcgaggaggtggcgtatccatcccaaaatcgcaacatctggactaagggaaggagctgaataagcacgtatcaccctcgtcgtcctcgccgccaatgcctccgcggccgaggcgccactcgtcgtcgcgcacaagaatgcttcgctctactgccagatccgcgcgatttagttgatagttttgccgagatagtggacgaagaaaaatgccagtccatgaaccctatccatccgtcgtcctcaacgagcaggtccaccagatgcttcacaactcgcgtgccgagctcgacgtcccatcagcagcttcctctctgcagggtgtagccatttgcctcttaatgaggtttcagcttcagaattggtggtgccattttctcatggacaacccaaagcagccaggcgcctatggtgggcctcagagaatctttctatgtgttggcag

SEQ ID NO: 8409 - DNA, 506 bp, Zea Mays
gtcatctccgagccgttcgacacgtctgtgggcatctaccagagattccctactagggatacggagccgcccccattccatcctcatctgctcgctccgtctcccggttcatgccatccccatacggccactaactcctacattccacagatgcgtttccgtagcaattccttgcctggtgggaaactcagggcggatttgaagactgtcggcaaagatccagcgaggaggtggcgtatccatcccaaaatcgcaacatctggactaagggaaggagctgaataagcacgtatcaccctcgtcgtcctcgccgccaatgcctccgcggccgaggcgccactcgtcgtcgcgcacaagaatgcttcgctctactgccagatccgcgcgaatttgaacgcaccttcagtttagttgatagttttgccgagatagtggacgaagaaaaatgccagtccatgaaccctatccatccgtcgtcctcaacgagcaggtccaccagatgcttc

SEQ ID NO: 8410 - DNA, 4526 bp, Zea Mays
cattactttccttcaactcggctagcgacggcaaacgcgacaggcgatgcaagcggggaggctacgacactctacccgacgatgcgttcagggccagggttcaggaaccaagatttacaatgatatacattttagtatgctcagccgaggctattgaataaaaggaaatgctaatgttcttaagtatgccaagtagaaaactaaaaacattagatttttctaccaatttgacttacttttgcagtcttagctccattgattgagagggaaccaataaagtcaaacagtggttcttggcactcgctaagattacaaggaagcgcaggccaataattcatttgtagatttatatttggatggggtgctgcactgggaaatgaatcatacataatgttaattcaatcatgggatgatgagggtggtggaaaatagtgaaacatgaaagaacaagatactcacaaaaataagaattttttgaaaaacttattaatcagtagttactagtaaaaaaaaggaaacgaaacaattttaatgtaatgcaggagaactagcattagaaagatgtgcatgtttgaatttatacatgattattcaacactaatttctgtttttttctttgcataagtagtctagatttatgtaaatctttttggaattataaaaattatcttcatccacaactaaatcaggatagtgtctctaaggcaaatcatcattgatatgacccaattaaaatatttaatagcaaggccagtttaaaattgtgaacaagattaaagctattgtggaaaagcgggtaagaaaatttaaagcttctttagcaaacaaactaaagttaaaaaagttcaattatatggtgtcattattttcttcttaatataatgataagcggcgtattcaagaaaaaagaacatgttgtcattcttctcatgtggccacttttttttctcggaagcacagaggaactgcgctttagaatatattaagcagaagtagatggtctaaagaagacctggggtacaaaaagacctccttatggatgccaaacacacgcataaataaaaaagaccactaatttgtttgtgtttagaatattatagtgtctccaatagcagcttgacttagaaaaaagggctcaaccaaacagcaaaacatataaaagaagaccaaaaaagattatcacaataccaaagactaaaagatgtagaacctagtatttaaaggattgacttagggtgaattcaactttggctatattgtctctacatagcaggtcagaagccctggtaaaggagggttgtgataggcttggcgagccaatgttaaacctagccactagccattttaatggagatggaacacgaatgcaactgttgggacgtaacccttttggcgacacgccatatcaaaacccgagtatggtgttaatgggcaagggtcaggtcagcacccccttggtgatgcatcatatcgtgatctgggcactgtgtcaagtgagcaaaaattgggtcgctactttcttagtggtgtgctacattaatgtccaggcgtagtgaaaaatgtgcaagggtctttataccatcaatgggtgcgaagggtaaggacgataatctgaccaactaggatccatttaggtggttgaaatgtagggtcgcttagaggtaagttaagggagttaattgagaccatgactaggagacatgtatttatataaacaaaaccaatcaatagagttctttgcctaatacagatggatttatctatcaacggagatccttgcataatagagatcgacctatctcctagccatataggcaggattctaacaccaatcaacggatatccttgtctaatagagatcgatttatctatcaacagagatccttgcctaatagagattgatttatctattctagccatataggcagaattctagcagaaattatgatatacgtgataggctagaagtagcatcaattgaagaaaagattgtccaacatcgattgagatgatttggacgtccaacggagaccttcagaagcaccggttcgtagtgagatcctaaggcacgataacaatgggaagagagtgttagactatgtgtgtgtgagtgtgtgtgggccggcaccactgttgggctgccggcccattagggttagggttgagtctatatattgtacccattctctatgcaatatcattcactttcatattcttacatggtatcagaggattagggtttttcttcctcccactccacagccgccacctcctcccagccaccaccggcttccgcgtcgccgccccgggaggctcatccaaccctcccggggcggcccttctcccagcagcagccgccgccagccatgccccaccgcgtcgctgccctcctcctcctcccgctcgctgccgcgtcggaggcgccgggaccggcggctgaggccgcgctgctggagcggcacgaggtgcagctcgccaagctagaggaggtggcggagtcgcttgcgaggtccgtccacgcgctcgagtccgcgcttgccagatccgcggacccggatccctcgcagcctgttgccctggcggcggccgtcggggaccgtcccacggccgcgtcttcgtcttctccgcccgcgctgctcgagctcgaggcgagtgccgcgtcaccgcgctcctcgtctacctttcgccgcggagccgccaacatttgtcgtctcttgcgctgctcgccactgcggccgcctctccagccgccgctccccagcagctcccgcctcctcccctctctctccagccgccgatgccctgcagccgccgctgctccctccccggcgcccgcgcccatcgccccgcgacgctccgcgtcctcccaccgcggctgagcgcatccggcattccagccgccgccgccgcgtacctgcaggctgccgccgccgccatagccgctggcaacgccgcaaagcacaggccctgccgctgcggacgaccttctccgggccggcgcgaccacccgcctcctcactgctgccgcaacacctctactatggcctgcgccatctcgcagcacccccactctggtctggcaccatctggcagccgccgtccttgtagccctccctctgtccgccgcggccggccccgatgctcctcggcgctagcgcgcttccccagccacggcgcgacagcccctcaccgcaggcacccccggcagcggcttgctctcctcatacgctgtcgactccctatccatgtacgagcaggcgcctgcgctgctcacccctccctcctgaggctctacagcgtcgcccggatccgcgccgccgccgcgtcctctgactgcgccgtcaccgagcagtgcctcctcacgcttctcttgtcaccagcgtcacccatcccctgccaagtccgacgcaggcccctgcctggctggaaccgccctgtcgccctccccttcctcgccttcgttggatccgtcgctgccgcggccttctcggccggatccacgttgttgcgtccttctcggctcgatcagccgtccctttggctggatcgtgtctccccgtccggatccgtcgctgccgtggccttcccggccggatccgacattccccttcttttctgccgcgggcgcggacaccttgaccagcgcagccgcgtgcgctgctgtcggcctccctggcggggctccttgacgtctggtcgatcgaagaagcaggaaggtcggcctgccggtgcccttttgttgtgtcgccctgccgatcgttgacgctcgaacgtcgacccctcccgaagatcaggcttttgttgcgcgtcttccgaccgcgaccacctcgacttcggctacctcggcatctaggggctatcgtcttcttagagcacacaacagtctctactccagccgcaacattcgcaccatcacgacgctgcgactgcggggggatttcaacccgtcggctcctaccttcggcctctattccagtctcatcgtgtgtggtgcccccgttgcgactgcagggggatgttagactatgtgtgtgtgagtgtgtgtgggccggcaccactgttgggctgtcggcccattagggttagggttgagtctatatattgtacccattctctatgcaatatcattcactttcatattcttacagagaggaagagaaaggacaaagttaacatgaaaaaaaggcagtagaaagagacttgaaagggtcaaatatacccacaaaaattagcttgaatagaagtgcatgaaaaacagctattcatatgcctgaaccttaacttgtgggttctattaggtttttaactctaggctacttgtgggttctgttggttttaactctagcctaccccaacttgcttgggactaaaatgctttgttgttgttgtgacttagagtgaaatcaatattctgctccatctatttaccttcgaaagttataaacaacattaataattcaaagaatacataatttaataaggcaaagaaataaagaaaaacaaaatatgcaattgtaaaatcatac

SEQ ID NO: 8411 - DNA, 413 bp, Zea Mays
ccagggacgcacttgcatggaaccagggagagggagagctcggtgagctgagcgcaggggaaagagaaacaaggcgcggtggccatggcgagcaggatgagctggaggaagagagggcgagccgcagagaggagcgagcggggaagaagcgcgcgccgcgatggagagctcttggacgagcggccaggcgagcaggaagccgcgcgaggaaatagagcgcgcgccatgggagcttcaaggccgagcgaacgcagggagatcgacgccgtggggaagagccgctcggctgggcgtgctcctgcggaagaaatagaggccgaacgcctgggagagagaaaggagataacgacgctgggcggggtctgaaacaaaaatcccaaagggcggcgtaggatttttcctcctgtcttgag

SEQ ID NO: 8412 - DNA, 547 bp, Zea Mays
ctctctcattcatgtcacctcttttcctcactgtccctctctgttccctcgacggtcaggcctctccttaaccgcggatgccgatctctgccaccagcgcacggtacgctagttgatcacgtgatatggaggactagaaccgagtcgaccacaagatgttgttaagcgcgggtttcttcgtaaggtgatgctgatggataaagttaaggatggatggcctgatcaactgccaggacaaggaagatcatcaagagatcgtcgtctaaccaacactgacttagtgttattccaggcaagccccgatgcatttgccacctccttgttgttataaaacttttatcacttatatgttgcattaggtgataggagttgagtgatgaaaaacaattgatgcattgccattccttggaatttgattactattccttgattcctgtttataaaagagaactaaagatgcttagccctgcttagataattaaaagttgtttcttttaaaaagatgatgtgttacacgggatatgggaaattgttgtgaaaaagaaat

SEQ ID NO: 8413 - DNA, 466 bp, Zea Mays
cgatctctgccaccagcgcacggtacgctagttgatcacgtgatatggaggactagaaccgagtcgaccacaagatgttgttaagcgcgggtttcttcgtaaggtgatgctgatggataaagttaaggatggatggcctgatcaactgccaggacaaggaagatcatcaagagatcgtcgtctaaccaacactgacttagtgttattccaggcaagccccgatgcatttgccacctccttgttgttataaaacttttatcacttatatgttgcattaggtgataggagttgagtgatgaaaaacaattgatgcattgccattccttggaatttgattactattccttgattcctgtttataaaagagaactaaagatgcttagccctgcttagataattaaaagttgtttcttttaaaaagatgatgtgttacacgggatatgggaaattgttgtgaaaaagaaat

SEQ ID NO: 8414 - DNA, 1244 bp, Zea Mays
ctggtctgtgtggtcagtgagtccttatctgccttcttcttatttgtataactgaacaagggatatttgtcggctgtggttgtgaactagcccagatccagtgctttggttgtgttggagtgttggcgtgggtcaaaggagcaacactacatgtatagctcatgatgtgttggcaccctaggagtcttccaccactatgttgtgtgcaagttcagggagtgtctgcctatatttcaactgccttagggctgaaatcagtgaagccttctcccctgccttgagttctgaccatagtgcgcagcaagcgtgtggtgattcttttgttcggggtgctgctgtgcgcgccattccccttgtctgtggtgaccaagctggccggttgtccacctcgccgtggtcagatcggagccgtgggcagattcaccgcagactaagcaacctgtgtcttctccgagcagctttgcgcaagcaccaggatctagagctcccaacagaaggagtgaagattcaagatgaagtggtagttgaagaggagtttgctccagtgcatgttcatcaagtggatggaggcatctaactggttattgggtagaaaggtcttgagcctcttctctgcaacaaagatcttgtggataggggttgtccttgcagtaatgcttaccttgaggcaggatgtcttctacctacaagactaatttcgctaggatgatggtgggatcatgctacaaggttccctaaaatgttctattcatctaagtgttgggggccttcgtctcccgaaggtcctcaaaaacacgactaacatgctttccaagtataatatactgttacaggaaccttcggctttgagatgaaggtgcgcatggtatgaaaggcacggtctggaagaaggatgaatcagttccgaagctatggatggagaagcttcgacttagcgcaaagacggtgatggagaatgaaaccgacctaaaaggggaaaagactgcttagtcctcgacagattactccttagtcaatagttaatgtcaaggacatggatgtaattttatccaggctgcgtcctgtgcctataaatagatgaacagtaacaccgtactatttacgttggcttgtaatcacttgcacgtcactcttggattcttaccttctgtcaagccgaaggtacaaatgtaaatcgatattattaatgtttgttcatgatcatataatgataagataaataatctaataatttgatatcatca

SEQ ID NO: 8415 - DNA, 831 bp, Zea Mays
gtgcaagtcaaccgccaggtcttagttttattatttaaacccaaagtttggtacctggcagagctacatcttttccgatgttgaacccatcacggccgtgatggatccaccatcaagttttatttttgaaaacattcccatccactgtgaagcatcaccttttgtttttaaaacaaaacattttgtttttctaaagcaaggctaagcatcataaaagtccttttcaaaaagggtatcaaggaagggtaatcaatttttcaaggaaagaaatgcatcaattgtttagcacacaactcctatcacctaatgcatcaaacaaagtgataaagattttaaaacagcaaggaggtggcaaatgcatcggggcaaatgcacacaactcctatcagcctttattccgatacttgcttcgtccatccatcttcaggttaatccatcaacattatcttgtggagaagctcacgctttccaacatcttgtggtcgactcagttttggtcctccgtatcacgtgattaattaacatacctgaatgaaatgtattatgcacatggatgcatatagacaggaatatcacaaacctaaatagtgctacgcgatagcgaattaagcatctagaggtgaggcgttgtacaatttcatacggaaacactagttatcgacatacgactacgcacaataatcacaaaataataaactatacatactaatacaacacaatactaatacaacacacgcatttctccagttcaatcatatctaattttattttcaagcaagaataaattataaacatacactatcatccttagtaaaatatatttcagaggtc

SEQ ID NO: 8416 - DNA, 1404 bp, Zea Mays
tctgcatccaaagggcgctcgattctctagctagctaggatctagcaacacaaacccgtctgtccatatattatgggttggtaacaattaattagactgaagaagatcatctaacgaggatggacgcaaagaaaccatacatgctggctattactacagtagcaatctacaccggcatgtacgtggtctcaaaggctgccttcaaccagggaatgaacagcttcgtcttcgtcttctaccgccaggctgctgcatcgcttctcctcctgcccatcgcacttgttctagaaagtgcttattatatattaccgaattcgttcctcccaatcatccggcgcggccaggaaaaatgtgcgatccatgtcctctgggttgatcctgaagttgttcttgcttgccctaatctggaacacgttaggcatgaatctgtgcaatgcaagtgtgacgctcacgtcagcaaccgtggcgtcggcaacaggaaactctactcccgttatcaccttctgcctggcactgctactgaggatggaggtggtgaagttaaggagcgtctctggcatagccaaggtcaccggcgtagcactgtgcctggccggagcgttggtcatcgccctgtacacggggccgtcgctcagcccagtcaaccgccatcaccgtgcctctggcggcgcccatggcttcaaagctccaacccgtggggggacatgggttacaggcacgttcctgatgcttctgtccaacgtcacatggtccctgtggacggttctgcagggcgcgctgctaaaggaataccccaacaagctcctcgtcacgacctcccagtgcttgttcagcaccgcgcagtcgttcgtcgtcgcagcggtggccgagagggacttctcgaaatgggcgctcaagcttgacgtcagcttgatcgctgttgcttacaccataaaaggacctgtcttccttgctgtctggaacccactctgctttgtgctaaccatattctgttcctccttcttcctcggcgagaatgttcacctcggcagcattgtgggtggaatcctcttggtctgtggcctttatagcgtgttatggggtaaaaccttggaggttcatcagactgtggaatctggtgataatacggtcggtgaagtgcaaaatggacaagaagagaagaatcatcaacagaaggtgctggagaagggacgccaagaggaagcatcaatgacagcacccggtgtagtgtgatcgattgcttgattccataaagctagcaatctatggttcatttatgtcatgtctgtggttcttgtacaaattgcctgtgagtcacaataattgtttcaagatctttaaattgttacatgttttaaaggccaaaataaataaaatttaggtgataggcaaaagtaggatgat

SEQ ID NO: 8417 - DNA, 1429 bp, Zea Mays
cttcttcagttacatatacacctcgtcagcctgccggtcgttgctacttagagggtgtaccaacttccgggcaggcatctgcatccaaagggcgctcgattctctagctagctaggatctagcaacacaaacccgtctgtccatatattatgggttggtaacaattaattagactgaagaagatcatctaacgaggatggacgcaaagaaaccatacatgctggctattactacagtagcaatctacaccggcatgtacgtggtctcaaaggctgccttcaaccagggaatgaacagcttcgtcttcgtcttctaccgccaggctgctgcatcgcttctcctcctgcccatcgcacttgttctagaaaggaaaaatgtgcgatccatgtcctctgggttgatcctgaagttgttcttgcttgccctaatctggaacacgttaggcatgaatctgtgcaatgcaagtgtgacgctcacgtcagcaaccgtggcgtcggcaacaggaaactctactcccgttatcaccttctgcctggcactgctactgaggatggaggtggtgaagttaaggagcgtctctggcatagccaaggtcaccggcgtagcactgtgcctggccggagcgttggtcatcgccctgtacacggggccgtcgctcagcccagtcaaccgccatcaccgtgcctctggcggcgcccatggcttcaaagctccaacccgtggggggacatgggttacaggcacgttcctgatgcttctgtccaacgtcacatggtccctgtggacggttctgcagggcgcgctgctaaaggaataccccaacaagctcctcgtcacgacctcccagtgcttgttcagcaccgcgcagtcgttcgtcgtcgcagcggtggccgagagggacttctcgaaatgggcgctcaagcttgacgtcagcttgatcgctgttgcttacaccataaaaggacctgtcttccttgctgtctggaacccactctgctttgtgctaaccatattctgttcctccttcttcctcggcgagaatgttcacctcggcagcattgtgggtggaatcctcttggtctgtggcctttatagcgtgttatggggtaaaaccttggaggttcatcagactgtggaatctggtgataatacggtcggtgaagtgcaaaatggacaagaagagaagaatcatcaacagaaggtgctggagaagggacgccaagaggaagcatcaatgacagcacccggtgtagtgtgatcgattgcttgattccataaagctagcaatctatggttcatttatgtcatgtctgtggttcttgtacaaattgcctgtgagtcacaataattgtttcaagatctttaaattgttacatgttttaaaggccaaaataaataaaatttaggtgataggcaaaagtaggatgat

SEQ ID NO: 8418 - DNA, 3553 bp, Zea Mays
taagtctgttgcatatagtggcactatacaaactgttcaacacttataaccagggtggcaagtcatctcgtgctagaggaaataacattattcaagaagctgctgtgggtagtccttcacagattatggaggtagaaagctcacttagtggacaggcctcagaatacgaagaggcagaatcagatatttattcaggaggagctggatacgactctttcacttggatgcaacagcatgaaaatggaactggacccgtgatagattcttctctcttcagctcttacacacctgcttcgtccataggtaattaccaggggcagcatgccacacaaaataaaagcttctatcctgttaaccaacataatggtcctctcattcttaatggatcaagtgacatgcttggaacaaatggccgtgcaaatcaaactgatcttccatcatggaattctgtgatagaactggacgagcctggtcaaatgccccatctccagtttcctgtcccttctgatcaaggtgctaccacggaaggcctgggagttgattacttaacatttgatgaagtatattctgatggcctcagtctcaacgatattggtgcagcaggaactcatgggaagtcatatctgcagttctctagtgctactggtgatttgtctgcaacagagaacagcctccctcaacaaaatgatggttctctggaggaggcagccattggctatccatttttgaagactcagtcatctaatctatctgatatcctaaaagacagctttaagaaaactgacagttttacaagatggatgagcaaagagcttcctgaagtggaagattctcaaattcattctagttctggggggttctggagcactggagaagcaaatgatatcatcgaagcatcaagccatgagccgctggatcagtttactgtttccccgatgctctcgcaggagcagctctttagtatagtagattttgctccaaactggacatatgtgggttcaaagactaagattttagttgctggtaacatcctgaatgacagtcaaatcaccgagagatgcaagtggtcatgtatgtttggagaagttgaagttccagcaaagattttagcagatggtactctcatctgttattcgccccagcataaactcggtcgagttcctttttacattacctgctccaacaggttggcctgcagtgaagtgcgggagtttgaatttcgaccaactgtttcccaatacatggatgctcctagtccacatggtgaaacaaacaaagtttatttccagatacgccttgacaagttgttgtcccttgaaccagatgagtaccaggcaactgtatctaaccccagcctggagatgattgacttaagtaagaagataagttcactgatggcgagtaatgatgagtggtccaacttgctaaagttggctgttgataatgagccttctactgctgatcaccatgatcagtttgttgaaaaattgattaaggaaaaattgcatgtctggcttctaaataaagttggtatgggtggcaagggacccagtgtgttagatgatgaagggcagggcgtgcttcacttagcagctgcccttggatatgattgggctataaggccgacacttgctgctggcgtgaatattaatttcagagatgttcatgggtggactgcactccattgggctgcgatttgtggccgagagcggactgtagttgcgcttattgctctaggagcagctcctggagctttgacagacccgactcctgatttccctggaagtacaccagcagatatcgcatcagctaatggccaaaagggaatatctggtttcttggcagagtcttctctgaccagtcatcttcaggccctcaatctgaaggaagctaatatggctcaaatatctggtctacctggtattggagatgttactgagagagattcactgcatcctccaagcggagattcattaggtcctgttcgaaatgctgctcaagctgctgcgcggatatatcaagttttcagggtgcaatccttccagagaaagcaagcggctcaatctgaggatgataaaggtggaatgtctgatgagcgtgccctctcactcctttctgtcaagccacccaagtcagggcagcttgatcctctgcattctgctgcaactcgcatacagaataagttcagaggatggaaggggagaaaggagtttcttcttattaggcagcgaattgtgaagatccaggctcatgtgcgaggtcaacaagtgaggaagcattatcggaaaatagtttggtctgttggcatcgtggagaaagttatattgcgttggaggcgtagaggggctggcttacgtgggtttcggtctacagaaggttcagtggagagcagcaatggcggaacgagtagcagttcaatccaagataagccttctggggatgattatgattttctgcaagaaggacgaaaacagactgaagaacggctccagaaagctcttgcgagagtgaagtccatggctcaatacccagaagcaagagatcagtaccataggattttgactgttgtgtcaaaaatgcaggagtctcaggctatggaagaaaagatgctggaggagtcagcagggatggacttcatgagtgaattcaaggaattgtgggatgacgacacacctatacctggttatatttagttttcaaacctactttgttggatttctctgtagattgcctcctttgtcttgagtgctactgaattgatggcgcacatagctgataacccgaagtagcgttgctggagcagtggagcatgacctgacatgcttgaatttggacttagatgtagtatttcatttgccttatgtacagtagaatgttctctacatttgaggaagccttgtatttactgtgtgaaatcggtgtaaagagtttgacattagagatcttaccagatgacttaacggttgcatgtgtggcgtgcagtccagaagttaggaatttgacccgtcgtggctttctgaaccgatcaaaggctgtggccgtgctcatcatctactaccaccatcgcctcggccagaaccacgccgctcgcctagctagctggggtttgaatgactttcgacgccatggactcccttcggctctaggagccatcctcttgctcttctctgcgtctgcatgttaacagcactagcctcttgaactcaactaataacagcaaggtactagaatggaagagaatctgggtacaagagagataaagctggggaagatgaacagactagagaatggaggaagatgaacagactagagaacagaggaagatgaacagtaaagaggttctctgttgattccttgatatccatcgcctgtgcagcttctccattttatagcacagaatacccccacttgcctcctttcaagggcccacatgacagtgtactgacattccccaacgcttaaaatgcggcttgcccccaagccgctgacccttatcgtcaagttgccggaggccctgcacaaatccaatcgctcaactccataggtggaggcc

SEQ ID NO: 8419 - DNA, 3599 bp, Zea Mays
tggttttcaaaatatgataagtctgttgcatatagtggcactatacaaactgttcaacacttataaccagggtggcaagtcatctcgtgctagaggaaataacattattcaagaagctgctgtgggtagtccttcacagattatggaggtagaaagctcacttagtggacaggcctcagaatacgaagaggcagaatcagaatatctaaagcaaaattcggtgcagcagatatttattcaggaggagctggatacgactctttcacttggatgcaacagcatgaaaatggaactggacccgtgatagattcttctctcttcagctcttacacacctgcttcgtccataggtaattaccaggggcagcatgccacacaaaataaaagcttctatcctgttaaccaacataatggtcctctcattcttaatggatcaagtgacatgcttggaacaaatggccgtgcaaatcaaactgatcttccatcatggaattctgtgatagaactggacgagcctggtcaaatgccccatctccagtttcctgtcccttctgatcaaggtgctaccacggaaggcctgggagttgattacttaacatttgatgaagtatattctgatggcctcagtctcaacgatattggtgcagcaggaactcatgggaagtcatatctgcagttctctagtgctactggtgatttgtctgcaacagagaacagcctccctcaacaaaatgatggttctctggaggaggcagccattggctatccatttttgaagactcagtcatctaatctatctgatatcctaaaagacagctttaagaaaactgacagttttacaagatggatgagcaaagagcttcctgaagtggaagattctcaaattcattctagttctggggggttctggagcactggagaagcaaatgatatcatcgaagcatcaagccatgagccgctggatcagtttactgtttccccgatgctctcgcaggagcagctctttagtatagtagattttgctccaaactggacatatgtgggttcaaagactaagattttagttgctggtaacatcctgaatgacagtcaaatcaccgagagatgcaagtggtcatgtatgtttggagaagttgaagttccagcaaagattttagcagatggtactctcatctgttattcgccccagcataaactcggtcgagttcctttttacattacctgctccaacaggttggcctgcagtgaagtgcgggagtttgaatttcgaccaactgtttcccaatacatggatgctcctagtccacatggtgaaacaaacaaagtttatttccagatacgccttgacaagttgttgtcccttgaaccagatgagtaccaggcaactgtatctaaccccagcctggagatgattgacttaagtaagaagataagttcactgatggcgagtaatgatgagtggtccaacttgctaaagttggctgttgataatgagccttctactgctgatcaccatgatcagtttgttgaaaaattgattaaggaaaaattgcatgtctggcttctaaataaagttggtatgggtggcaagggacccagtgtgttagatgatgaagggcagggcgtgcttcacttagcagctgcccttggatatgattgggctataaggccgacacttgctgctggcgtgaatattaatttcagagatgttcatgggtggactgcactccattgggctgcgatttgtggccgagagcggactgtagttgcgcttattgctctaggagcagctcctggagctttgacagacccgactcctgatttccctggaagtacaccagcagatatcgcatcagctaatggccaaaagggaatatctggtttcttggcagagtcttctctgaccagtcatcttcaggccctcaatctgaaggaagctaatatggctcaaatatctggtctacctggtattggagatgttactgagagagattcactgcatcctccaagcggagattcattaggtcctgttcgaaatgctgctcaagctgctgcgcggatatatcaagttttcagggtgcaatccttccagagaaagcaagcggctcaatctgaggatgataaaggtggaatgtctgatgagcgtgccctctcactcctttctgtcaagccacccaagtcagggcagcttgatcctctgcattctgctgcaactcgcatacagaataagttcagaggatggaaggggagaaaggagtttcttcttattaggcagcgaattgtgaagatccaggctcatgtgcgaggtcaacaagtgaggaagcattatcggaaaatagtttggtctgttggcatcgtggagaaagttatattgcgttggaggcgtagaggggctggcttacgtgggtttcggtctacagaaggttcagtggagagcagcaatggcggaacgagtagcagttcaatccaagataagccttctggggatgattatgattttctgcaagaaggacgaaaacagactgaagaacggctccagaaagctcttgcgagagtgaagtccatggctcaatacccagaagcaagagatcagtaccataggattttgactgttgtgtcaaaaatgcaggagtctcaggctatggaagaaaagatgctggaggagtcagcagggatggacttcatgagtgaattcaaggaattgtgggatgacgacacacctatacctggttatatttagttttcaaacctactttgttggatttctctgtagattgcctcctttgtcttgagtgctactgaattgatggcgcacatagctgataacccgaagtagcgttgctggagcagtggagcatgacctgacatgcttgaatttggacttagatgtagtatttcatttgccttatgtacagtagaatgttctctacatttgaggaagccttgtatttactgtgtgaaatcggtgtaaagagtttgacattagagatcttaccagatgacttaacggttgcatgtgtggcgtgcagtccagaagttaggaatttgacccgtcgtggctttctgaaccgatcaaaggctgtggccgtgctcatcatctactaccaccatcgcctcggccagaaccacgccgctcgcctagctagctggggtttgaatgactttcgacgccatggactcccttcggctctaggagccatcctcttgctcttctctgcgtctgcatgttaacagcactagcctcttgaactcaactaataacagcaaggtactagaatggaagagaatctgggtacaagagagataaagctggggaagatgaacagactagagaatggaggaagatgaacagactagagaacagaggaagatgaacagtaaagaggttctctgttgattccttgatatccatcgcctgtgcagcttctccattttatagcacagaatacccccacttgcctcctttcaagggcccacatgacagtgtactgacattccccaacgcttaaaatgcggcttgcccccaagccgctgacccttatcgtcaagttgccggaggccctgcacaaatccaatcgctcaactccataggtggaggcc

SEQ ID NO: 8420 - DNA, 4058 bp, Zea Mays
ctccaaactggatatccatttctgtcaaagtttctgttcctgccttgtgttgagcgtgtctgaagccagcagaaaatgggtgctcattcaagttgtagtcaaaaggttcaacaaaactctagttagttcgtggtacttaactccgtgttttgttgccaaagatatcgagcagatactgaaggaagctcaacaccgatggttacgccctgctgaaatatgtgaaatactgaaaaactacaggaatttccgtattgctccagaaccaccaaacagaccaccaagtggctcactttttttatttgatcggaaagtattgagatacttcaggaaggatggtcataattggaggaagaaaaatgatcagaagactgtcaaggaagcccatgaaaggttgaagtctggaagtattgatgtgcttcactgttactatgctcatggggaagagaatataaacttccaaaggaggacttactggatgttggaagaggactatatgcacattgtacttgtgcattatcttgagacaaagggtggcaagtcatctcgtgctagaggaaataacattattcaagaagctgctgtgggtagtccttcacagattatggaggtagaaagctcacttagtggacaggcctcagaatacgaagaggcagaatcagaatatctaaagcaaaattcggtgcagcagatatttattcaggaggagctggatacgactctttcacttggatgcaacagcatgaaaatggaactggacccgtgatagattcttctctcttcagctcttacacacctgcttcgtccataggtaattaccaggggcagcatgccacacaaaataaaagcttctatcctgttaaccaacataatggtcctctcattcttaatggatcaagtgacatgcttggaacaaatggccgtgcaaatcaaactgatcttccatcatggaattctgtgatagaactggacgagcctggtcaaatgccccatctccagtttcctgtcccttctgatcaaggtgctaccacggaaggcctgggagttgattacttaacatttgatgaagtatattctgatggcctcagtctcaacgatattggtgcagcaggaactcatgggaagtcatatctgcagttctctagtgctactggtgatttgtctgcaacagagaacagcctccctcaacaaaatgatggttctctggaggaggcagccattggctatccatttttgaagactcagtcatctaatctatctgatatcctaaaagacagctttaagaaaactgacagttttacaagatggatgagcaaagagcttcctgaagtggaagattctcaaattcattctagttctggggggttctggagcactggagaagcaaatgatatcatcgaagcatcaagccatgagccgctggatcagtttactgtttccccgatgctctcgcaggagcagctctttagtatagtagattttgctccaaactggacatatgtgggttcaaagactaagattttagttgctggtaacatcctgaatgacagtcaaatcaccgagagatgcaagtggtcatgtatgtttggagaagttgaagttccagcaaagattttagcagatggtactctcatctgttattcgccccagcataaactcggtcgagttcctttttacattacctgctccaacaggttggcctgcagtgaagtgcgggagtttgaatttcgaccaactgtttcccaatacatggatgctcctagtccacatggtgaaacaaacaaagtttatttccagatacgccttgacaagttgttgtcccttgaaccagatgagtaccaggcaactgtatctaaccccagcctggagatgattgacttaagtaagaagataagttcactgatggcgagtaatgatgagtggtccaacttgctaaagttggctgttgataatgagccttctactgctgatcaccatgatcagtttgttgaaaaattgattaaggaaaaattgcatgtctggcttctaaataaagttggtatgggtggcaagggacccagtgtgttagatgatgaagggcagggcgtgcttcacttagcagctgcccttggatatgattgggctataaggccgacacttgctgctggcgtgaatattaatttcagagatgttcatgggtggactgcactccattgggctgcgatttgtggccgagagcggactgtagttgcgcttattgctctaggagcagctcctggagctttgacagacccgactcctgatttccctggaagtacaccagcagatatcgcatcagctaatggccaaaagggaatatctggtttcttggcagagtcttctctgaccagtcatcttcaggccctcaatctgaaggaagctaatatggctcaaatatctggtctacctggtattggagatgttactgagagagattcactgcatcctccaagcggagattcattaggtcctgttcgaaatgctgctcaagctgctgcgcggatatatcaagttttcagggtgcaatccttccagagaaagcaagcggctcaatctgaggatgataaaggtggaatgtctgatgagcgtgccctctcactcctttctgtcaagccacccaagtcagggcagcttgatcctctgcattctgctgcaactcgcatacagaataagttcagaggatggaaggggagaaaggagtttcttcttattaggcagcgaattgtgaagatccaggctcatgtgcgaggtcaacaagtgaggaagcattatcggaaaatagtttggtctgttggcatcgtggagaaagttatattgcgttggaggcgtagaggggctggcttacgtgggtttcggtctacagaaggttcagtggagagcagcaatggcggaacgagtagcagttcaatccaagataagccttctggggatgattatgattttctgcaagaaggacgaaaacagactgaagaacggctccagaaagctcttgcgagagtgaagtccatggctcaatacccagaagcaagagatcagtaccataggattttgactgttgtgtcaaaaatgcaggagtctcaggctatggaagaaaagatgctggaggagtcagcagggatggacttcatgagtgaattcaaggaattgtgggatgacgacacacctatacctggttatatttagttttcaaacctactttgttggatttctctgtagattgcctcctttgtcttgagtgctactgaattgatggcgcacatagctgataacccgaagtagcgttgctggagcagtggagcatgacctgacatgcttgaatttggacttagatgtagtatttcatttgccttatgtacagtagaatgttctctacatttgaggaagccttgtatttactgtgtgaaatcggtgtaaagagtttgacattagagatcttaccagatgacttaacggttgcatgtgtggcgtgcagtccagaagttaggaatttgacccgtcgtggctttctgaaccgatcaaaggctgtggccgtgctcatcatctactaccaccatcgcctcggccagaaccacgccgctcgcctagctagctggggtttgaatgactttcgacgccatggactcccttcggctctaggagccatcctcttgctcttctctgcgtctgcatgttaacagcactagcctcttgaactcaactaataacagcaaggtactagaatggaagagaatctgggtacaagagagataaagctggggaagatgaacagactagagaatggaggaagatgaacagactagagaacagaggaagatgaacagtaaagaggttctctgttgattccttgatatccatcgcctgtgcagcttctccattttatagcacagaatacccccacttgcctcctttcaagggcccacatgacagtgtactgacattccccaacgcttaaaatgcggcttgcccccaagccgctgacccttatcgtcaagttgccggaggccctgcacaaatccaatcgctcaactccataggtggaggcc

SEQ ID NO: 8421 - DNA, 4194 bp, Zea Mays
ccgcctctttcagtttcaggcgttcaatcactagcgcggttatgctctgagctaaacccttgtagcagagcgaacgaggaaaagttctccgtttccactttcctcctttctccacgccccgaacctgcagaaatcaccctttccaccccaccccccgccgctcggatccccaggccagcacggcctcccctcctccccggcccggtccagcgggttgcatggtccgcggccgccgcttgtgagcccgatcgatggccacgacggaggcgcgccgcctcgcggtcgtgccgcagctagatatcgagcagatactgaaggaagctcaacaccgatggttacgccctgctgaaatatgtgaaatactgaaaaactacaggaatttccgtattgctccagaaccaccaaacagaccaccaagtggctcactttttttatttgatcggaaagtattgagatacttcaggaaggatggtcataattggaggaagaaaaatgatcagaagactgtcaaggaagcccatgaaaggttgaagtctggaagtattgatgtgcttcactgttactatgctcatggggaagagaatataaacttccaaaggaggacttactggatgttggaagaggactatatgcacattgtacttgtgcattatcttgagacaaagggtggcaagtcatctcgtgctagaggaaataacattattcaagaagctgctgtgggtagtccttcacagattatggaggtagaaagctcacttagtggacaggcctcagaatacgaagaggcagaatcagaatatctaaagcaaaattcggtgcagcagatatttattcaggaggagctggatacgactctttcacttggatgcaacagcatgaaaatggaactggacccgtgatagattcttctctcttcagctcttacacacctgcttcgtccataggtaattaccaggggcagcatgccacacaaaataaaagcttctatcctgttaaccaacataatggtcctctcattcttaatggatcaagtgacatgcttggaacaaatggccgtgcaaatcaaactgatcttccatcatggaattctgtgatagaactggacgagcctggtcaaatgccccatctccagtttcctgtcccttctgatcaaggtgctaccacggaaggcctgggagttgattacttaacatttgatgaagtatattctgatggcctcagtctcaacgatattggtgcagcaggaactcatgggaagtcatatctgcagttctctagtgctactggtgatttgtctgcaacagagaacagcctccctcaacaaaatgatggttctctggaggaggcagccattggctatccatttttgaagactcagtcatctaatctatctgatatcctaaaagacagctttaagaaaactgacagttttacaagatggatgagcaaagagcttcctgaagtggaagattctcaaattcattctagttctggggggttctggagcactggagaagcaaatgatatcatcgaagcatcaagccatgagccgctggatcagtttactgtttccccgatgctctcgcaggagcagctctttagtatagtagattttgctccaaactggacatatgtgggttcaaagactaagattttagttgctggtaacatcctgaatgacagtcaaatcaccgagagatgcaagtggtcatgtatgtttggagaagttgaagttccagcaaagattttagcagatggtactctcatctgttattcgccccagcataaactcggtcgagttcctttttacattacctgctccaacaggttggcctgcagtgaagtgcgggagtttgaatttcgaccaactgtttcccaatacatggatgctcctagtccacatggtgaaacaaacaaagtttatttccagatacgccttgacaagttgttgtcccttgaaccagatgagtaccaggcaactgtatctaaccccagcctggagatgattgacttaagtaagaagataagttcactgatggcgagtaatgatgagtggtccaacttgctaaagttggctgttgataatgagccttctactgctgatcaccatgatcagtttgttgaaaaattgattaaggaaaaattgcatgtctggcttctaaataaagttggtatgggtggcaagggacccagtgtgttagatgatgaagggcagggcgtgcttcacttagcagctgcccttggatatgattgggctataaggccgacacttgctgctggcgtgaatattaatttcagagatgttcatgggtggactgcactccattgggctgcgatttgtggccgagagcggactgtagttgcgcttattgctctaggagcagctcctggagctttgacagacccgactcctgatttccctggaagtacaccagcagatatcgcatcagctaatggccaaaagggaatatctggtttcttggcagagtcttctctgaccagtcatcttcaggccctcaatctgaaggaagctaatatggctcaaatatctggtctacctggtattggagatgttactgagagagattcactgcatcctccaagcggagattcattaggtcctgttcgaaatgctgctcaagctgctgcgcggatatatcaagttttcagggtgcaatccttccagagaaagcaagcggctcaatctgaggatgataaaggtggaatgtctgatgagcgtgccctctcactcctttctgtcaagccacccaagtcagggcagcttgatcctctgcattctgctgcaactcgcatacagaataagttcagaggatggaaggggagaaaggagtttcttcttattaggcagcgaattgtgaagatccaggctcatgtgcgaggtcaacaagtgaggaagcattatcggaaaatagtttggtctgttggcatcgtggagaaagttatattgcgttggaggcgtagaggggctggcttacgtgggtttcggtctacagaaggttcagtggagagcagcaatggcggaacgagtagcagttcaatccaagataagccttctggggatgattatgattttctgcaagaaggacgaaaacagactgaagaacggctccagaaagctcttgcgagagtgaagtccatggctcaatacccagaagcaagagatcagtaccataggattttgactgttgtgtcaaaaatgcaggagtctcaggctatggaagaaaagatgctggaggagtcagcagggatggacttcatgagtgaattcaaggaattgtgggatgacgacacacctatacctggttatatttagttttcaaacctactttgttggatttctctgtagattgcctcctttgtcttgagtgctactgaattgatggcgcacatagctgataacccgaagtagcgttgctggagcagtggagcatgacctgacatgcttgaatttggacttagatgtagtatttcatttgccttatgtacagtagaatgttctctacatttgaggaagccttgtatttactgtgtgaaatcggtgtaaagagtttgacattagagatcttaccagatgacttaacggttgcatgtgtggcgtgcagtccagaagttaggaatttgacccgtcgtggctttctgaaccgatcaaaggctgtggccgtgctcatcatctactaccaccatcgcctcggccagaaccacgccgctcgcctagctagctggggtttgaatgactttcgacgccatggactcccttcggctctaggagccatcctcttgctcttctctgcgtctgcatgttaacagcactagcctcttgaactcaactaataacagcaaggtactagaatggaagagaatctgggtacaagagagataaagctggggaagatgaacagactagagaatggaggaagatgaacagactagagaacagaggaagatgaacagtaaagaggttctctgttgattccttgatatccatcgcctgtgcagcttctccattttatagcacagaatacccccacttgcctcctttcaagggcccacatgacagtgtactgacattccccaacgcttaaaatgcggcttgcccccaagccgctgacccttatcgtcaagttgccggaggccctgcacaaatccaatcgctcaactccataggtggaggcc

SEQ ID NO: 8422 - DNA, 4135 bp, Zea Mays
ccgcctctttcagtttcaggcgttcaatcactagcgcggttatgctctgagctaaacccttgtagcagagcgaacgaggaaaagttctccgtttccactttcctcctttctccacgccccgaacctgcagaaatcaccctttccaccccaccccccgccgctcggatccccaggccagcacggcctcccctcctccccggcccggtccagcgggttgcatggtccgcggccgccgcttgtgagcccgatcgatggccacgacggaggcgcgccgcctcgcggtcgtgccgcagctagatatcgagcagatactgaaggaagctcaacaccgatggttacgccctgctgaaatatgtgaaatactgaaaaactacaggaatttccgtattgctccagaaccaccaaacagaccaccaatattgagatacttcaggaaggatggtcataattggaggaagaaaaatgatcagaagactgtcaaggaagcccatgaaaggttgaagtctggaagtattgatgtgcttcactgttactatgctcatggggaagagaatataaacttccaaaggaggacttactggatgttggaagaggactatatgcacattgtacttgtgcattatcttgagacaaagggtggcaagtcatctcgtgctagaggaaataacattattcaagaagctgctgtgggtagtccttcacagattatggaggtagaaagctcacttagtggacaggcctcagaatacgaagaggcagaatcagatatttattcaggaggagctggatacgactctttcacttggatgcaacagcatgaaaatggaactggacccgtgatagattcttctctcttcagctcttacacacctgcttcgtccataggtaattaccaggggcagcatgccacacaaaataaaagcttctatcctgttaaccaacataatggtcctctcattcttaatggatcaagtgacatgcttggaacaaatggccgtgcaaatcaaactgatcttccatcatggaattctgtgatagaactggacgagcctggtcaaatgccccatctccagtttcctgtcccttctgatcaaggtgctaccacggaaggcctgggagttgattacttaacatttgatgaagtatattctgatggcctcagtctcaacgatattggtgcagcaggaactcatgggaagtcatatctgcagttctctagtgctactggtgatttgtctgcaacagagaacagcctccctcaacaaaatgatggttctctggaggaggcagccattggctatccatttttgaagactcagtcatctaatctatctgatatcctaaaagacagctttaagaaaactgacagttttacaagatggatgagcaaagagcttcctgaagtggaagattctcaaattcattctagttctggggggttctggagcactggagaagcaaatgatatcatcgaagcatcaagccatgagccgctggatcagtttactgtttccccgatgctctcgcaggagcagctctttagtatagtagattttgctccaaactggacatatgtgggttcaaagactaagattttagttgctggtaacatcctgaatgacagtcaaatcaccgagagatgcaagtggtcatgtatgtttggagaagttgaagttccagcaaagattttagcagatggtactctcatctgttattcgccccagcataaactcggtcgagttcctttttacattacctgctccaacaggttggcctgcagtgaagtgcgggagtttgaatttcgaccaactgtttcccaatacatggatgctcctagtccacatggtgaaacaaacaaagtttatttccagatacgccttgacaagttgttgtcccttgaaccagatgagtaccaggcaactgtatctaaccccagcctggagatgattgacttaagtaagaagataagttcactgatggcgagtaatgatgagtggtccaacttgctaaagttggctgttgataatgagccttctactgctgatcaccatgatcagtttgttgaaaaattgattaaggaaaaattgcatgtctggcttctaaataaagttggtatgggtggcaagggacccagtgtgttagatgatgaagggcagggcgtgcttcacttagcagctgcccttggatatgattgggctataaggccgacacttgctgctggcgtgaatattaatttcagagatgttcatgggtggactgcactccattgggctgcgatttgtggccgagagcggactgtagttgcgcttattgctctaggagcagctcctggagctttgacagacccgactcctgatttccctggaagtacaccagcagatatcgcatcagctaatggccaaaagggaatatctggtttcttggcagagtcttctctgaccagtcatcttcaggccctcaatctgaaggaagctaatatggctcaaatatctggtctacctggtattggagatgttactgagagagattcactgcatcctccaagcggagattcattaggtcctgttcgaaatgctgctcaagctgctgcgcggatatatcaagttttcagggtgcaatccttccagagaaagcaagcggctcaatctgaggatgataaaggtggaatgtctgatgagcgtgccctctcactcctttctgtcaagccacccaagtcagggcagcttgatcctctgcattctgctgcaactcgcatacagaataagttcagaggatggaaggggagaaaggagtttcttcttattaggcagcgaattgtgaagatccaggctcatgtgcgaggtcaacaagtgaggaagcattatcggaaaatagtttggtctgttggcatcgtggagaaagttatattgcgttggaggcgtagaggggctggcttacgtgggtttcggtctacagaaggttcagtggagagcagcaatggcggaacgagtagcagttcaatccaagataagccttctggggatgattatgattttctgcaagaaggacgaaaacagactgaagaacggctccagaaagctcttgcgagagtgaagtccatggctcaatacccagaagcaagagatcagtaccataggattttgactgttgtgtcaaaaatgcaggagtctcaggctatggaagaaaagatgctggaggagtcagcagggatggacttcatgagtgaattcaaggaattgtgggatgacgacacacctatacctggttatatttagttttcaaacctactttgttggatttctctgtagattgcctcctttgtcttgagtgctactgaattgatggcgcacatagctgataacccgaagtagcgttgctggagcagtggagcatgacctgacatgcttgaatttggacttagatgtagtatttcatttgccttatgtacagtagaatgttctctacatttgaggaagccttgtatttactgtgtgaaatcggtgtaaagagtttgacattagagatcttaccagatgacttaacggttgcatgtgtggcgtgcagtccagaagttaggaatttgacccgtcgtggctttctgaaccgatcaaaggctgtggccgtgctcatcatctactaccaccatcgcctcggccagaaccacgccgctcgcctagctagctggggtttgaatgactttcgacgccatggactcccttcggctctaggagccatcctcttgctcttctctgcgtctgcatgttaacagcactagcctcttgaactcaactaataacagcaaggtactagaatggaagagaatctgggtacaagagagataaagctggggaagatgaacagactagagaatggaggaagatgaacagactagagaacagaggaagatgaacagtaaagaggttctctgttgattccttgatatccatcgcctgtgcagcttctccattttatagcacagaatacccccacttgcctcctttcaagggcccacatgacagtgtactgacattccccaacgcttaaaatgcggcttgcccccaagccgctgacccttatcgtcaagttgccggaggccctgcacaaatccaatcgctcaactccataggtggaggcc

SEQ ID NO: 8423 - DNA, 4105 bp, Zea Mays
ccgcctctttcagtttcaggcgttcaatcactagcgcggttatgctctgagctaaacccttgtagcagagcgaacgaggaaaagttctccgtttccactttcctcctttctccacgccccgaacctgcagaaatcaccctttccaccccaccccccgccgctcggatccccaggccagcacggcctcccctcctccccggcccggtccagcgggttgcatggtccgcggccgccgcttgtgagcccgatcgatggccacgacggaggcgcgccgcctcgcggtcgtgccgcagctagatatcgagcagatactgaaggaagctcaacaccgatggttacgccctgctgaaatatgtgaaatactgaaaaactacaggaatttccgtattgctccagaaccaccaaacagaccaccaagtggctcactttttttatttgatcggaaagtattgagatacttcaggaaggatggtcataattggaggaagaaaaatgatcagaagactgtcaaggaagcccatgaaaggttgaagggactatatgcacattgtacttgtgcattatcttgagacaaagggtggcaagtcatctcgtgctagaggaaataacattattcaagaagctgctgtgggtagtccttcacagattatggaggtagaaagctcacttagtggacaggcctcagaatacgaagaggcagaatcagaatatctaaagcaaaattcggtgcagcagatatttattcaggaggagctggatacgactctttcacttggatgcaacagcatgaaaatggaactggacccgtgatagattcttctctcttcagctcttacacacctgcttcgtccataggtaattaccaggggcagcatgccacacaaaataaaagcttctatcctgttaaccaacataatggtcctctcattcttaatggatcaagtgacatgcttggaacaaatggccgtgcaaatcaaactgatcttccatcatggaattctgtgatagaactggacgagcctggtcaaatgccccatctccagtttcctgtcccttctgatcaaggtgctaccacggaaggcctgggagttgattacttaacatttgatgaagtatattctgatggcctcagtctcaacgatattggtgcagcaggaactcatgggaagtcatatctgcagttctctagtgctactggtgatttgtctgcaacagagaacagcctccctcaacaaaatgatggttctctggaggaggcagccattggctatccatttttgaagactcagtcatctaatctatctgatatcctaaaagacagctttaagaaaactgacagttttacaagatggatgagcaaagagcttcctgaagtggaagattctcaaattcattctagttctggggggttctggagcactggagaagcaaatgatatcatcgaagcatcaagccatgagccgctggatcagtttactgtttccccgatgctctcgcaggagcagctctttagtatagtagattttgctccaaactggacatatgtgggttcaaagactaagattttagttgctggtaacatcctgaatgacagtcaaatcaccgagagatgcaagtggtcatgtatgtttggagaagttgaagttccagcaaagattttagcagatggtactctcatctgttattcgccccagcataaactcggtcgagttcctttttacattacctgctccaacaggttggcctgcagtgaagtgcgggagtttgaatttcgaccaactgtttcccaatacatggatgctcctagtccacatggtgaaacaaacaaagtttatttccagatacgccttgacaagttgttgtcccttgaaccagatgagtaccaggcaactgtatctaaccccagcctggagatgattgacttaagtaagaagataagttcactgatggcgagtaatgatgagtggtccaacttgctaaagttggctgttgataatgagccttctactgctgatcaccatgatcagtttgttgaaaaattgattaaggaaaaattgcatgtctggcttctaaataaagttggtatgggtggcaagggacccagtgtgttagatgatgaagggcagggcgtgcttcacttagcagctgcccttggatatgattgggctataaggccgacacttgctgctggcgtgaatattaatttcagagatgttcatgggtggactgcactccattgggctgcgatttgtggccgagagcggactgtagttgcgcttattgctctaggagcagctcctggagctttgacagacccgactcctgatttccctggaagtacaccagcagatatcgcatcagctaatggccaaaagggaatatctggtttcttggcagagtcttctctgaccagtcatcttcaggccctcaatctgaaggaagctaatatggctcaaatatctggtctacctggtattggagatgttactgagagagattcactgcatcctccaagcggagattcattaggtcctgttcgaaatgctgctcaagctgctgcgcggatatatcaagttttcagggtgcaatccttccagagaaagcaagcggctcaatctgaggatgataaaggtggaatgtctgatgagcgtgccctctcactcctttctgtcaagccacccaagtcagggcagcttgatcctctgcattctgctgcaactcgcatacagaataagttcagaggatggaaggggagaaaggagtttcttcttattaggcagcgaattgtgaagatccaggctcatgtgcgaggtcaacaagtgaggaagcattatcggaaaatagtttggtctgttggcatcgtggagaaagttatattgcgttggaggcgtagaggggctggcttacgtgggtttcggtctacagaaggttcagtggagagcagcaatggcggaacgagtagcagttcaatccaagataagccttctggggatgattatgattttctgcaagaaggacgaaaacagactgaagaacggctccagaaagctcttgcgagagtgaagtccatggctcaatacccagaagcaagagatcagtaccataggattttgactgttgtgtcaaaaatgcaggagtctcaggctatggaagaaaagatgctggaggagtcagcagggatggacttcatgagtgaattcaaggaattgtgggatgacgacacacctatacctggttatatttagttttcaaacctactttgttggatttctctgtagattgcctcctttgtcttgagtgctactgaattgatggcgcacatagctgataacccgaagtagcgttgctggagcagtggagcatgacctgacatgcttgaatttggacttagatgtagtatttcatttgccttatgtacagtagaatgttctctacatttgaggaagccttgtatttactgtgtgaaatcggtgtaaagagtttgacattagagatcttaccagatgacttaacggttgcatgtgtggcgtgcagtccagaagttaggaatttgacccgtcgtggctttctgaaccgatcaaaggctgtggccgtgctcatcatctactaccaccatcgcctcggccagaaccacgccgctcgcctagctagctggggtttgaatgactttcgacgccatggactcccttcggctctaggagccatcctcttgctcttctctgcgtctgcatgttaacagcactagcctcttgaactcaactaataacagcaaggtactagaatggaagagaatctgggtacaagagagataaagctggggaagatgaacagactagagaatggaggaagatgaacagactagagaacagaggaagatgaacagtaaagaggttctctgttgattccttgatatccatcgcctgtgcagcttctccattttatagcacagaatacccccacttgcctcctttcaagggcccacatgacagtgtactgacattccccaacgcttaaaatgcggcttgcccccaagccgctgacccttatcgtcaagttgccggaggccctgcacaaatccaatcgctcaactccataggtggaggcc

SEQ ID NO: 8424 - DNA, 4165 bp, Zea Mays
ccgcctctttcagtttcaggcgttcaatcactagcgcggttatgctctgagctaaacccttgtagcagagcgaacgaggaaaagttctccgtttccactttcctcctttctccacgccccgaacctgcagaaatcaccctttccaccccaccccccgccgctcggatccccaggccagcacggcctcccctcctccccggcccggtccagcgggttgcatggtccgcggccgccgcttgtgagcccgatcgatggccacgacggaggcgcgccgcctcgcggtcgtgccgcagctagatatcgagcagatactgaaggaagctcaacaccgatggttacgccctgctgaaatatgtgaaatactgaaaaactacaggaatttccgtattgctccagaaccaccaaacagaccaccaagtggctcactttttttatttgatcggaaagtattgagatacttcaggaaggatggtcataattggaggaagaaaaatgatcagaagactgtcaaggaagcccatgaaaggttgaagtctggaagtattgatgtgcttcactgttactatgctcatggggaagagaatataaacttccaaaggaggacttactggatgttggaagaggactatatgcacattgtacttgtgcattatcttgagacaaagggtggcaagtcatctcgtgctagaggaaataacattattcaagaagctgctgtgggtagtccttcacagattatggaggtagaaagctcacttagtggacaggcctcagaatacgaagaggcagaatcagatatttattcaggaggagctggatacgactctttcacttggatgcaacagcatgaaaatggaactggacccgtgatagattcttctctcttcagctcttacacacctgcttcgtccataggtaattaccaggggcagcatgccacacaaaataaaagcttctatcctgttaaccaacataatggtcctctcattcttaatggatcaagtgacatgcttggaacaaatggccgtgcaaatcaaactgatcttccatcatggaattctgtgatagaactggacgagcctggtcaaatgccccatctccagtttcctgtcccttctgatcaaggtgctaccacggaaggcctgggagttgattacttaacatttgatgaagtatattctgatggcctcagtctcaacgatattggtgcagcaggaactcatgggaagtcatatctgcagttctctagtgctactggtgatttgtctgcaacagagaacagcctccctcaacaaaatgatggttctctggaggaggcagccattggctatccatttttgaagactcagtcatctaatctatctgatatcctaaaagacagctttaagaaaactgacagttttacaagatggatgagcaaagagcttcctgaagtggaagattctcaaattcattctagttctggggggttctggagcactggagaagcaaatgatatcatcgaagcatcaagccatgagccgctggatcagtttactgtttccccgatgctctcgcaggagcagctctttagtatagtagattttgctccaaactggacatatgtgggttcaaagactaagattttagttgctggtaacatcctgaatgacagtcaaatcaccgagagatgcaagtggtcatgtatgtttggagaagttgaagttccagcaaagattttagcagatggtactctcatctgttattcgccccagcataaactcggtcgagttcctttttacattacctgctccaacaggttggcctgcagtgaagtgcgggagtttgaatttcgaccaactgtttcccaatacatggatgctcctagtccacatggtgaaacaaacaaagtttatttccagatacgccttgacaagttgttgtcccttgaaccagatgagtaccaggcaactgtatctaaccccagcctggagatgattgacttaagtaagaagataagttcactgatggcgagtaatgatgagtggtccaacttgctaaagttggctgttgataatgagccttctactgctgatcaccatgatcagtttgttgaaaaattgattaaggaaaaattgcatgtctggcttctaaataaagttggtatgggtggcaagggacccagtgtgttagatgatgaagggcagggcgtgcttcacttagcagctgcccttggatatgattgggctataaggccgacacttgctgctggcgtgaatattaatttcagagatgttcatgggtggactgcactccattgggctgcgatttgtggccgagagcggactgtagttgcgcttattgctctaggagcagctcctggagctttgacagacccgactcctgatttccctggaagtacaccagcagatatcgcatcagctaatggccaaaagggaatatctggtttcttggcagagtcttctctgaccagtcatcttcaggccctcaatctgaaggaagctaatatggctcaaatatctggtctacctggtattggagatgttactgagagagattcactgcatcctccaagcggagattcattaggtcctgttcgaaatgctgctcaagctgctgcgcggatatatcaagttttcagggtgcaatccttccagagaaagcaagcggctcaatctgaggatgataaaggtggaatgtctgatgagcgtgccctctcactcctttctgtcaagccacccaagtcagggcagcttgatcctctgcattctgctgcaactcgcatacagaataagttcagaggatggaaggggagaaaggagtttcttcttattaggcagcgaattgtgaagatccaggctcatgtgcgaggtcaacaagtgaggaagcattatcggaaaatagtttggtctgttggcatcgtggagaaagttatattgcgttggaggcgtagaggggctggcttacgtgggtttcggtctacagaaggttcagtggagagcagcaatggcggaacgagtagcagttcaatccaagataagccttctggggatgattatgattttctgcaagaaggacgaaaacagactgaagaacggctccagaaagctcttgcgagagtgaagtccatggctcaatacccagaagcaagagatcagtaccataggattttgactgttgtgtcaaaaatgcaggagtctcaggctatggaagaaaagatgctggaggagtcagcagggatggacttcatgagtgaattcaaggaattgtgggatgacgacacacctatacctggttatatttagttttcaaacctactttgttggatttctctgtagattgcctcctttgtcttgagtgctactgaattgatggcgcacatagctgataacccgaagtagcgttgctggagcagtggagcatgacctgacatgcttgaatttggacttagatgtagtatttcatttgccttatgtacagtagaatgttctctacatttgaggaagccttgtatttactgtgtgaaatcggtgtaaagagtttgacattagagatcttaccagatgacttaacggttgcatgtgtggcgtgcagtccagaagttaggaatttgacccgtcgtggctttctgaaccgatcaaaggctgtggccgtgctcatcatctactaccaccatcgcctcggccagaaccacgccgctcgcctagctagctggggtttgaatgactttcgacgccatggactcccttcggctctaggagccatcctcttgctcttctctgcgtctgcatgttaacagcactagcctcttgaactcaactaataacagcaaggtactagaatggaagagaatctgggtacaagagagataaagctggggaagatgaacagactagagaatggaggaagatgaacagactagagaacagaggaagatgaacagtaaagaggttctctgttgattccttgatatccatcgcctgtgcagcttctccattttatagcacagaatacccccacttgcctcctttcaagggcccacatgacagtgtactgacattccccaacgcttaaaatgcggcttgcccccaagccgctgacccttatcgtcaagttgccggaggccctgcacaaatccaatcgctcaactccataggtggaggcc

SEQ ID NO: 8425 - DNA, 1435 bp, Zea Mays
ccagtttctactgaacttttggtaaaatcattttgaggaacacccagaccaccctttgatcatcttatccaaatgcttgtttcattgagtgatattcaaaatccagataagcgcccagcaattgtttctattgatatcccttctggatggcatgttgaagagggagatgtcgatggaggcattaaacctgatatgctggtgtcattgactgcacctaagctctgtgcaaaaaagttcactggcccacaccattttcttgggggaaggtttgtccccccacctattttaaacaaatacggacttcagcttcctccttaccctggcacatcaatgtgtgtgagaattggaaaagctccatctgttgaaatttcatctctcagggagaactatatttcccctgaacttcttgagagtcaagtgatgtctgatccatttgatcagttccttaaatggtttgatgaagcagtaacagccggtctgcgtgagcccaatgcaatggctttgacaactgccaacaaggaaggaaaaccttcttcgaggatggttcttttaaagggagttgataaacagggatttgtttggtatacaaattatggtagccggaaggcgcatgacttgtgtgaaaaccctaacgcagcactccttttctactggaatgagatgaaccgtcaggtaagagttgaagggtcagttgagaaggttccagaagctgaatcagataaatatttccacagccgcccacgtggaagtcagcttggtgccatagtcagcaagcagagtactgtaattgctggaagagaagttcttcaacaggattacaagaaattggaacaaaaatattctgatgggagcttgattccaaaacctgaatattggggtggctacaaattgacaccgacactttttgagttctggcaaggacaacagtctcgactgcatgaccggttacaatactcgcagagagaagtagatgggagcacagtgtggcacatcgagaggttgtccccttgactgttagcctgtcaacacttcggtaatagcgttgaggttatcaccagcaaccaaatcttctccagctgcaagatgtgcgaactgccccaagatgttaccgtggtgattagatcccgtgtttgagtaccgcagcccagaagctcagttctgtgcggacacccttttcagtttccacttgggccttccattgtagcggtgggtgaggagagagtgaagtgctttgcaaagtcatcagatctcttttaggcccttgcgtttctcttccgtaaatggtatccatcgaaccaggtttctaaatcctgccgattgtgaacttgtgccgtgatacactagtactgcgggaataatgatcttgggatggcattgtcagcaccgtgctagtaaataaagatgcaatttgatttattcctttggcccagcgtca

SEQ ID NO: 8426 - DNA, 1317 bp, Zea Mays
agcaaagtgatagataatctttcagttgaaacgataatgtttctcagaatgagaatgtggttactatccagtttctactgaacttttggtaaaatcattttgaggaacacccagaccaccctttgatcatcttatccaaatgcttgtttcattgagtgatattcaaaatccagataagcgcccagcaattgtttctattgatatcccttctggatggcatgttgaagagggagatgtcgatggaggcattaaacctgatatgctggtgtcattgactgcacctaagctctgtgcaaaaaagttcactggcccacaccattttcttgggggaagggagaactatatttcccctgaacttcttgagagtcaagtgatgtctgatccatttgatcagttccttaaatggtttgatgaagcagtaacagccggtctgcgtgagcccaatgcaatggctttgacaactgccaacaaggaaggaaaaccttcttcgaggatggttcttttaaagggagttgataaacagggatttgtttggtatacaaattatggtagccggaaggcgcatgacttgtgtgaaaaccctaacgcagcactccttttctactggaatgagatgaaccgtcaggtaagagttgaagggtcagttgagaaggttccagaagctgaatcagataaatatttccacagccgcccacgtggaagtcagcttggtgccatagtcagcaagcaggagcttgattccaaaacctgaatattggggtggctacaaattgacaccgacactttttgagttctggcaaggacaacagtctcgactgcatgaccggttacaatactcgcagagagaagtagatgggagcacagtgtggcacatcgagaggttgtccccttgactgttagcctgtcaacacttcggtaatagcgttgaggttatcaccagcaaccaaatcttctccagctgcaagatgtgcgaactgccccaagatgttaccgtggtgattagatcccgtgtttgagtaccgcagcccagaagctcagttctgtgcggacacccttttcagtttccacttgggccttccattgtagcggtgggtgaggagagagtgaagtgctttgcaaagtcatcagatctcttttaggcccttgcgtttctcttccgtaaatggtatccatcgaaccaggtttctaaatcctgccgattgtgaacttgtgccgtgatacactagtactgcgggaataatgatcttgggatggcattgtcagcaccgtgctagtaaataaagatgcaatttgatttattcctttggcccagcgtca

SEQ ID NO: 8427 - DNA, 2623 bp, Zea Mays
atggtggtcattcagggtggaattggtcctgctggcttatccgctgaggaccttcatgttcttgatcttaaacaacaacgaccgcgatggcatagagtggtggttcaaggtcctggtccatggaaaacgacccctggcagatgtatggcccttgatactacggccaagccatatgaatggagaaaacttgaaccggaaggtgaagggccaccaccatgcatggagatggagacggaggtgagtgcgcgggacgttatggccatgaaggatcacatagatctcgaggcctcgcagtcgcagcagcccaggaagctaccgcccaaggacctcaaggagatcgccgggagcttttggcttgtcgcctcgatgttcagcaagaagtggcagaattggaggggcaagcaatacaactttggagaatgcaagttgtgtttctgcctctcagccagtgtagctatatctgatttaaatcatactctgttacagggttccacaaatgttggaaaatctgcatttatcagtgcaatgctaagaacaatggcgtacaaggacccggtggcagcgacagctcaaaaatacaagccaatacaatctgttgttcctggaacaacccttggccctattcaaattgaatcatttttaggcggagggtggcatctggcatgtgaaccagttgagccagtccgccgaggcagcgccgcagcggtcccggaccagaggatgctggccgccgtcgcgtccagaacccgcaacaaatcggccaccaccgtcctctcccttgctatgccattcctcctctccgccgccagcgccagcaccaccaccaaccctcatcctctctccccgttccctcgcagccagaacaatagccgcgtccaccgcctgcaacttccggcacgccgcctccccagcttccccgcggttgctccgggcgcttcctttgctcccctcccgcagaggctaggcatggcgtcgctggcggcgtcagcggccgccgcggcggaggtgacgcacctcacgcagcgcgacgcggcggagatcgacgagcagctcatgggcccgctcgggttcagcgtcgaccagctcatggaacttgctggattgagcgttgcggcagcccttgcggaggtttacaagttgaatgaacatgcaagggtacttgttatctgtggcccaggaaataatggtggtgatggtctggtagctgctcgtcatctttatcactttggatataggccatctatttgctacccaaaacgcacacccaaacctctatattctggtctcgttactcaggaacacccagaccaccctttgatcatcttatccaaatgcttgtttcattgagtgatattcaaaatccagataagcgcccagcaattgtttctattgatatcccttctggatggcatgttgaagagggagatgtcgatggaggcattaaacctgatatgctggtgtcattgactgcacctaagctctgtgcaaaaaagttcactggcccacaccattttcttgggggaaggtttgtccccccacctattttaaacaaatacggacttcagcttcctccttaccctggcacatcaatgtgtgtgagaattggaaaagctccatctgttgaaatttcatctctcagggagaactatatttcccctgaacttcttgagagtcaagtgatgtctgatccatttgatcagttccttaaatggtttgatgaagcagtaacagccggtctgcgtgagcccaatgcaatggctttgacaactgccaacaaggaaggaaaaccttcttcgaggatggttcttttaaagggagttgataaacagggatttgtttggtatacaaattatggtagccggaaggcgcatgacttgtgtgaaaaccctaacgcagcactccttttctactggaatgagatgaaccgtcaggtaagagttgaagggtcagttgagaaggttccagaagctgaatcagataaatatttccacagccgcccacgtggaagtcagcttggtgccatagtcagcaagcaggagcttgattccaaaacctgaatattggggtggctacaaattgacaccgacactttttgagttctggcaaggacaacagtctcgactgcatgaccggttacaatactcgcagagagaagtagatgggagcacagtgtggcacatcgagaggttgtccccttgactgttagcctgtcaacacttcggtaatagcgttgaggttatcaccagcaaccaaatcttctccagctgcaagatgtgcgaactgccccaagatgttaccgtggtgattagatcccgtgtttgagtaccgcagcccagaagctcagttctgtgcggacacccttttcagtttccacttgggccttccattgtagcggtgggtgaggagagagtgaagtgctttgcaaagtcatcagatctcttttaggcccttgcgtttctcttccgtaaatggtatccatcgaaccaggtttctaaatcctgccgattgtgaacttgtgccgtgatacactagtactgcgggaataatgatcttgggatggcattgtcagcaccgtgctagtaaataaagatgcaatttgatttattcctttggcccagcgtca

SEQ ID NO: 8428 - DNA, 2694 bp, Zea Mays
atggtggtcattcagggtggaattggtcctgctggcttatccgctgaggaccttcatgttcttgatcttaaacaacaacgaccgcgatggcatagagtggtggttcaaggtcctggtccatggaaaacgacccctggcagatgtatggcccttgatactacggccaagccatatgaatggagaaaacttgaaccggaaggtgaagggccaccaccatgcatggagatggagacggaggtgagtgcgcgggacgttatggccatgaaggatcacatagatctcgaggcctcgcagtcgcagcagcccaggaagctaccgcccaaggacctcaaggagatcgccgggagcttttggcttgtcgcctcgatgttcagcaagaagtggcagaattggaggggcaagcaatacaactttggagaatgcaagttgtgtttctgcctctcagccagtgtagctatatctgatttaaatcatactctgttacagggttccacaaatgttggaaaatctgcatttatcagtgcaatgctaagaacaatggcgtacaaggacccggtggcagcgacagctcaaaaatacaagccaatacaatctgttgttcctggaacaacccttggccctattcaaattgaatcatttttaggcggagggtggcatctggcatgtgaaccagttgagccagtccgccgaggcagcgccgcagcggtcccggaccagaggatgctggccgccgtcgcgtccagaacccgcaacaaatcggccaccaccgtcctctcccttgctatgccattcctcctctccgccgccagcgccagcaccaccaccaaccctcatcctctctccccgttccctcgcagccagaacaatagccgcgtccaccgcctgcaacttccggcacgccgcctccccagcttccccgcggttgctccgggcgcttcctttgctcccctcccgcagaggctaggcatggcgtcgctggcggcgtcagcggccgccgcggcggaggtgacgcacctcacgcagcgcgacgcggcggagatcgacgagcagctcatgggcccgctcgggttcagcgtcgaccagctcatggaacttgctggattgagcgttgcggcagcccttgcggaggtttacaagttgaatgaacatgcaagggtacttgttatctgtggcccaggaaataatggtggtgatggtctggtagctgctcgtcatctttatcactttggatataggccatctatttgctacccaaaacgcacacccaaacctctatattctggtctcgttactcaggaacacccagaccaccctttgatcatcttatccaaatgcttgtttcattgagtgatattcaaaatccagataagcgcccagcaattgtttctattgatatcccttctggatggcatgttgaagagggagatgtcgatggaggcattaaacctgatatgctggtgtcattgactgcacctaagctctgtgcaaaaaagttcactggcccacaccattttcttgggggaaggtttgtccccccacctattttaaacaaatacggacttcagcttcctccttaccctggcacatcaatgtgtgtgagaattggaaaagctccatctgttgaaatttcatctctcagggagaactatatttcccctgaacttcttgagagtcaagtgatgtctgatccatttgatcagttccttaaatggtttgatgaagcagtaacagccggtctgcgtgagcccaatgcaatggctttgacaactgccaacaaggaaggaaaaccttcttcgaggatggttcttttaaagggagttgataaacagggatttgtttggtatacaaattatggtagccggaaggcgcatgacttgtgtgaaaaccctaacgcagcactccttttctactggaatgagatgaaccgtcaggtaagagttgaagggtcagttgagaaggttccagaagctgaatcagataaatatttccacagccgcccacgtggaagtcagcttggtgccatagtcagcaagcagagtactgtaattgctggaagagaagttcttcaacaggattacaagaaattggaacaaaaatattctgatgggagcttgattccaaaacctgaatattggggtggctacaaattgacaccgacactttttgagttctggcaaggacaacagtctcgactgcatgaccggttacaatactcgcagagagaagtagatgggagcacagtgtggcacatcgagaggttgtccccttgactgttagcctgtcaacacttcggtaatagcgttgaggttatcaccagcaaccaaatcttctccagctgcaagatgtgcgaactgccccaagatgttaccgtggtgattagatcccgtgtttgagtaccgcagcccagaagctcagttctgtgcggacacccttttcagtttccacttgggccttccattgtagcggtgggtgaggagagagtgaagtgctttgcaaagtcatcagatctcttttaggcccttgcgtttctcttccgtaaatggtatccatcgaaccaggtttctaaatcctgccgattgtgaacttgtgccgtgatacactagtactgcgggaataatgatcttgggatggcattgtcagcaccgtgctagtaaataaagatgcaatttgatttattcctttggcccagcgtca

SEQ ID NO: 8429 - DNA, 2729 bp, Zea Mays
atggtggtcattcagggtggaattggtcctgctggcttatccgctgaggaccttcatgttcttgatcttaaacaacaacgaccgcgatggcatagagtggtggttcaaggtcctggtccatggaaaacgacccctggcagatgtatggcccttgatactacggccaagccatatgaatggagaaaacttgaaccggaaggtgaagggccaccaccatgcatggagatggagacggaggtgagtgcgcgggacgttatggccatgaaggatcacatagatctcgaggcctcgcagtcgcagcagcccaggaagctaccgcccaaggacctcaaggagatcgccgggagcttttggcttgtcgcctcgatgttcagcaagaagtggcagaattggaggggcaagcaatacaactttggagaatgcaagttgtgtttctgcctctcagccagtgtagctatatctgatttaaatcatactctgttacagggttccacaaatgttggaaaatctgcatttatcagtgcaatgctaagaacaatggcgtacaaggacccggtggcagcgacagctcaaaaatacaagccaatacaatctgttgttcctggaacaacccttggccctattcaaattgaatcatttttaggcggagggtggcatctggcatgtgaaccagttgagccagtccgccgaggcagcgccgcagcggtcccggaccagaggatgctggccgccgtcgcgtccagaacccgcaacaaatcggccaccaccgtcctctcccttgctatgccattcctcctctccgccgccagcgccagcaccaccaccaaccctcatcctctctccccgttccctcgcagccagaacaatagccgcgtccaccgcctgcaacttccggcacgccgcctccccagcttccccgcggttgctccgggcgcttcctttgctcccctcccgcagaggctaggcatggcgtcgctggcggcgtcagcggccgccgcggcggaggtgacgcacctcacgcagcgcgacgcggcggagatcgacgagcagctcatgggcccgctcgggttcagcgtcgaccagctcatggaacttgctggattgagcgttgcggcagcccttgcggaggtttacaagttgaatgaacatgcaagggtacttgttatctgtggcccaggaaataatggtggtgatggtctggtagctgctcgtcatctttatcactttggatataggccatctatttgctacccaaaacgcacacccaaacctctatattctggtctcgttactcagcttgaatcactgtcgatcccattcatacctgtcgaagacctacctaacgaattaccacgggagtttgatgttattgttgatgcaatgtttggtttctcatttcatggaacacccagaccaccctttgatcatcttatccaaatgcttgtttcattgagtgatattcaaaatccagataagcgcccagcaattgtttctattgatatcccttctggatggcatgttgaagagggagatgtcgatggaggcattaaacctgatatgctggtgtcattgactgcacctaagctctgtgcaaaaaagttcactggcccacaccattttcttgggggaaggtttgtccccccacctattttaaacaaatacggacttcagcttcctccttaccctggcacatcaatgtgtgtgagaattggaaaagctccatctgttgaaatttcatctctcagggagaactatatttcccctgaacttcttgagagtcaagtgatgtctgatccatttgatcagttccttaaatggtttgatgaagcagtaacagccggtctgcgtgagcccaatgcaatggctttgacaactgccaacaaggaaggaaaaccttcttcgaggatggttcttttaaagggagttgataaacagggatttgtttggtatacaaattatggtagccggaaggcgcatgacttgtgtgaaaaccctaacgcagcactccttttctactggaatgagatgaaccgtcaggtaagagttgaagggtcagttgagaaggttccagaagctgaatcagataaatatttccacagccgcccacgtggaagtcagcttggtgccatagtcagcaagcaggagcttgattccaaaacctgaatattggggtggctacaaattgacaccgacactttttgagttctggcaaggacaacagtctcgactgcatgaccggttacaatactcgcagagagaagtagatgggagcacagtgtggcacatcgagaggttgtccccttgactgttagcctgtcaacacttcggtaatagcgttgaggttatcaccagcaaccaaatcttctccagctgcaagatgtgcgaactgccccaagatgttaccgtggtgattagatcccgtgtttgagtaccgcagcccagaagctcagttctgtgcggacacccttttcagtttccacttgggccttccattgtagcggtgggtgaggagagagtgaagtgctttgcaaagtcatcagatctcttttaggcccttgcgtttctcttccgtaaatggtatccatcgaaccaggtttctaaatcctgccgattgtgaacttgtgccgtgatacactagtactgcgggaataatgatcttgggatggcattgtcagcaccgtgctagtaaataaagatgcaatttgatttattcctttggcccagcgtca

SEQ ID NO: 8430 - DNA, 2486 bp, Zea Mays
atggtggtcattcagggtggaattggtcctgctggcttatccgctgaggaccttcatgttcttgatcttaaacaacaacgaccgcgatggcatagagtggtggttcaaggtcctggtccatggaaaacgacccctggcagatgtatggcccttgatactacggccaagccatatgaatggagaaaacttgaaccggaaggtgaagggccaccaccatgcatggagatggagacggaggtgagtgcgcgggacgttatggccatgaaggatcacatagatctcgaggcctcgcagtcgcagcagcccaggaagctaccgcccaaggacctcaaggagatcgccgggagcttttggcttgtcgcctcgatgttcagcaagaagtggcagaattggaggggcaagcaatacaactttggagaatgcaagttgtgtttctgcctctcagccagtgtagctatatctgatttaaatcatactctgttacagggttccacaaatgttggaaaatctgcatttatcagtgcaatgctaagaacaatggcgtacaaggacccggtggcagcgacagctcaaaaatacaagccaatacaatctgttgttcctggaacaacccttggccctattcaaattgaatcatttttaggcggagggtggcatctggcatgtgaaccagttgagccagtccgccgaggcagcgccgcagcggtcccggaccagaggatgctggccgccgtcgcgtccagaacccgcaacaaatcggccaccaccgtcctctcccttgctatgccattcctcctctccgccgccagcgccagcaccaccaccaaccctcatcctctctccccgttccctcgcagccagaacaatagccgcgtccaccgcctgcaacttccggcacgccgcctccccagcttccccgcggttgctccgggcgcttcctttgctcccctcccgcagaggctaggcatggcgtcgctggcggcgtcagcggccgccgcggcggaggtgacgcacctcacgcagcgcgacgcggcggagatcgacgagcagctcatgggcccgctcgggttcagcgtcgaccagctcatggaacttgctggattgagcgttgcggcagcccttgcggaggtttacaagttgaatgaacatgcaagggtacttgttatctgtggcccaggaaataatggtggtgatggtctggtagctgctcgtcatctttatcactttggatataggccatctatttgctacccaaaacgcacacccaaacctctatattctggtctcgttactcagcttgaatcactgtcgatcccattcatacctgtcgaagacctacctaacgaattaccacgggagtttgatgttattgttgatgcaatgtttggtttctcatttcatggaacacccagaccaccctttgatcatcttatccaaatgcttgtttcattgagtgatattcaaaatccagataagcgcccagcaattgtttctattgatatcccttctggatggcatgttgaagagggagatgtcgatggaggcattaaacctgatatgctgttccttaaatggtttgatgaagcagtaacagccggtctgcgtgagcccaatgcaatggctttgacaactgccaacaaggaaggaaaaccttcttcgaggatggttcttttaaagggagttgataaacagggatttgtttggtatacaaattatggtagccggaaggcgcatgacttgtgtgaaaaccctaacgcagcactccttttctactggaatgagatgaaccgtcaggtaagagttgaagggtcagttgagaaggttccagaagctgaatcagataaatatttccacagccgcccacgtggaagtcagcttggtgccatagtcagcaagcaggagcttgattccaaaacctgaatattggggtggctacaaattgacaccgacactttttgagttctggcaaggacaacagtctcgactgcatgaccggttacaatactcgcagagagaagtagatgggagcacagtgtggcacatcgagaggttgtccccttgactgttagcctgtcaacacttcggtaatagcgttgaggttatcaccagcaaccaaatcttctccagctgcaagatgtgcgaactgccccaagatgttaccgtggtgattagatcccgtgtttgagtaccgcagcccagaagctcagttctgtgcggacacccttttcagtttccacttgggccttccattgtagcggtgggtgaggagagagtgaagtgctttgcaaagtcatcagatctcttttaggcccttgcgtttctcttccgtaaatggtatccatcgaaccaggtttctaaatcctgccgattgtgaacttgtgccgtgatacactagtactgcgggaataatgatcttgggatggcattgtcagcaccgtgctagtaaataaagatgcaatttgatttattcctttggcccagcgtca

SEQ ID NO: 8431 - DNA, 917 bp, Zea Mays
actaaaattggtacagtagcatccttccggcgggcgcttcctttcgtttcgtctctcgattttgggggttttggcaacaccccccgaaacggcagcaaacccgcacgcaccctgtggagaatggagatggcccaccccggcgcctccgcgtccgccggcgttgccgacatcaccggcgaggcccgcccgtaaccgccgagagttgggtgcccttcactacattccaccccttcaatcctccgccgtcaccctcccccgccccaaaccccgtcgccacatccgccgacacgccatccatcgcaggccctacttccaggaggaagatgggcgtatgtttcaagggtagggcacgggctgaggcggaggaggaagaggttgcagccgccatcgatctcgaagtcgaggccgaggcgggtgtgctcggggagcaatgggacagcggcatcgccatcaacgagacggtggacctcagcgagttgggcttccgcgtcgacgagatgggagtgctccacgatttgccctgaccgatcaagggttgatgaagggaaggttgtgccttttgatcgcaatcttgctcttgttaattctgcctacatagtaacagctcaactgggtcgatggttggttgggaaactgagaactgcgctatcaaacaggtgtgcttttgtgtatgcttagtttagtatcagatgcaaatgtagagcttttggtgcttcaaagtcgttgaattttgtgatcaaacgtcatggggatggttatggagaatgtggctcctttttgtgtggaattggacgtgcacagtgggtccatgttcataccttgctatgaacttatgaaagagtttgtttaatgctgccttaatctatgttaaatactatttttattctgtgcctggtttcgttgacggtattgttatc

SEQ ID NO: 8432 - DNA, 1255 bp, Zea Mays
cagctttcgtgtggttgcataccaaaagataagggcatactactatactgctctgtgcgtaatacggttatgggatctccagtatgactcggaatcggcacatcatgcattccaccatttttccttggtatatagtactcaaatacacacatcaccccatatatggcatctgtattgaataccaaaaaatggcttgtgtttcagttcagtatggtttggtgcacttgctgaccgcctacttctcgccaattggataattgttgtccactgatccattcaagattgatttcatgctgcagtcctcgcttcactgtgaagtcccgaacggtgccattgacatcacctcaattctcattttcctgaacgcctcgacggacgcaccacatttcctactggagctcatacaaggcagctcaacttcaatggtggtgattctggacctgcttccacggaaagacctcgcgtttcacccggactacctgcagaagtactacgaggaaactggaatggatgagcagcgcagaaagatcgaggagctaccgcaggctcgtccatacagatctccgtcactcttcgtgcgcagcgcatgctcgcctacagcaataatggtgagcattgactgtggacaagggggtgagaaagccttggaagagataatacatggacagttagcaaaggtcattcaggaggctcttcagacttggcttgacaactgtgttgattccaccatagagatggatgaggcggagagggactgcctgctcaagagggaccggattgtaaggtcgaaatcgatagaggttgacctgactgcaaaccttcccaggatgtttggtccggatgtgtctagtcgggtcataactgaaatccgcaaggcctttggtgtacaagagccgtgaagatgatcagttgttaggaccaggtttccaggaacagtctctcatcacagagttcctaagccgttcctgtcttcctgatgctaacatacccaataagcataagaattagctctgcctaaaaaggaggtactgaatggcggtgtgttttgctgcatcttgttttatgtatataaaactttggtgtatatggtgtacatattaaaaaaatatccatccatgttagatctactatcctttgccgctgtatgtattttgcaaagaacactctccatcaccatttttcgcaatgttcggatatggcatcataatagtattatgtgtacctgatatgttcaaatgacaactacaaccaggtt

SEQ ID NO: 8433 - DNA, 1081 bp, Zea Mays
ttttttcttaaagcttgcattaacatgcttcctgtttgctactgctgtaagatgtagtaaaaagaaacgatgacaggacctgatgtgcgtttcctccttgtctacagattgatttcatgctgcagtcctcgcttcactgtgaagtcccgaacggtgccattgacatcacctcaattctcattttcctgaacgcctcgacggacgcaccacatttcctactggagctcatacaaggcagctcaacttcaatggtggtgattctggacctgcttccacggaaagacctcgcgtttcacccggactacctgcagaagtactacgaggaaactggaatggatgagcagcgcagaaagatcgaggagctaccgcaggctcgtccatacagatctccgtcactcttcgtgcgcagcgcatgctcgcctacagcaataatggtgagcattgactgtggacaagggggtgagaaagccttggaagagataatacatggacagttagcaaaggtcattcaggaggctcttcagacttggcttgacaactgtgttgattccaccatagagatggatgaggcggagagggactgcctgctcaagagggaccggattgtaaggtcgaaatcgatagaggttgacctgactgcaaaccttcccaggatgtttggtccggatgtgtctagtcgggtcataactgaaatccgcaaggcctttggtgtacaagagccgtgaagatgatcagttgttaggaccaggtttccaggaacagtctctcatcacagagttcctaagccgttcctgtcttcctgatgctaacatacccaataagcataagaattagctctgcctaaaaaggaggtactgaatggcggtgtgttttgctgcatcttgttttatgtatataaaactttggtgtatatggtgtacatattaaaaaaatatccatccatgttagatctactatcctttgccgctgtatgtattttgcaaagaacactctccatcaccatttttcgcaatgttcggatatggcatcataatagtattatgtgtacctgatatgttcaaatgacaactacaaccaggtt

SEQ ID NO: 8434 - DNA, 1128 bp, Zea Mays
ctgcacacaaacaccccccacggaccagcggagatgtatcagctctccctgttcgctttggcctccgcttgccccctccctctcgcgtctctatacatcgccgctgctgtgttgcagttcagtttgcatcctgagctctctcctggaccagccgagatttctcgctctgcgcatctctgattcatcttcgtcgagaggagctgttcctcttctttgccgcctcgaatctgggactggtcggttttctggatccctgctgcctgtcgggttctcgagaggtgtaaaatccaatggagggtgtgtcatcgttgaaccagccgttgatcaacgacgaccggcagcccgtgcccagcagtatcgccaagggtgatcaaatccaaggcctgttgtcgggtgaatggacaaatgagcggcacagctcgtacataagctccatggaggcatctttcgtggagcaactccgtagtggttccaaggccatccaggagggcttgtgccagagcatgaggattccgagggatgatgctcgcagccatgacgtccctgagagtccgtgggtggtggtgaggcgtttcaggccacgcggtgtccaccatggcgatggaatggaagtggaacctttggtcgatggttatggatcagaagtcacggaccagaattttcctgaggaggggattcaatccagtaacggtgcatgcaagagacagaaatctactcctggcaatgcatcaaatggccagggtacttaacaagatagtggaagccaagccatgccctctctgaagccttcaggaggccatgggggaaacgagacttgtctgcagtactacgtgatgacaggtcgtgctgcagctgcaagtagtttggcttaccaaaatatgatatcgtcgtcctttctgcggtgtggagagtagaatatgcatatccacatctgcagagagcaccggttctcttcttcttgttgctgttactattttgtgccatggagcaaatttatttggtaaatttgagctgccactgtctgcagagtgattttttttagaaaacaatgctggttcctagggcttgttcggttattcacaatacacatggattggatgggattggaaaaaattgagaagagatttg

SEQ ID NO: 8435 - DNA, 2566 bp, Zea Mays
aaaagcccccctaaaactgcagaaaaccagggaaacccgagaaaatcgagtatactgaagccatcgagagcagctttcttgcaactcccatggccctataaggcagagagagatagagcaagcgagcggggagaagagattgagcattgctggtggccctgtgctttgagagaggagagaggacttgaggaataggcaggaggctttgtggtggagcaatggcgacagcggcctgggccgcatggctgctcatcctcacgtgcttcggcgcttggaccccgcggcaaatcttggttgctgcagccaccgacgcgaatgatgttactgccctcaacacgctgtttaccagcatgaattcgccgggacagctgcagggctggaaggtgagtggtggcgacccatgcggcgaatcgtggcagggcatcacttgctctgggtcctctgttactgcaattaaattgccgaacttgggcctctcgggaaatctggcctacaacatgaacaccatggattcattaagacatgagccacaacaatctcggtggtggccaacagattccatacaatcttccaaataagaagcttgaaagactcaatctggcagaaaaccagttctctggatctgtgccatactcaatttcaacgatgcctaatattaagtacctaaaccttaatcataaccagctatcaggagatatcacggacatattttccaacctcccaagtttaaccacagtagacctttcctccaattctcttactggcaatctaccacaaagtttcacttctttgtcaagcctgaaaacactgtatttgcagaacaatcaacttactggttcaatcaatgtacttgcaaatcttccccttgatgatctgaatgttgcaaacaaccgcttcactggttggattcctgaggagttaaagaagataaatagtctgcaaactgacggcaactcttggagcacaggctcagcaccaccaccaccaccatttacagctcctccacgttcgcgcaaccgtcgaaagagcccaggccagcactccaatggaagtaacaactcgagttcaggtggaagctctagcataggtgctggagccatagcaggcattatcatatctgttcttgttgttggagcacttgttgcattcttcctgataaagagaaataaaagaaaaagtgcaatgccagaacactatgaacaacgccagcctttcaattcgttcccttcaaatgaagttaaaaatatgaagccaattgaagaggctaccactgtagaggtggagtctttgccttctcctgctgcagttaacctgaaaccacctcccaagattgagcggaatcaatcatttgatgatgatgattttgcaaacaagcctgttgccatgaaaagtaatgcagcagcagcaccagttaaggcaactgtttattcagttgctgacctacagatggcaacagatagcttcaacatggacaaccttattggagagggtactttaggacgtgtgtacaaggcacaatttagtgatggaaaggttctagctgtgaagaaattaaacagtacaacactgccaaggcaatcatcagatgatttctatgagctggtgtcgaacatttcgaaattgcaccatcccaatctcagtgagcttgtgggctactgcatggagcacggacagcacttgcttgtttatgatttccacaggaatggttcactgcatgatatgctccatctctcagatgattataacaaaccacttagttggaattctcgtgttaagattgcgttgggctctgcacgtgcactagagcatcttcatgaaatttgttctccatctataattcacaagaactttaagtcgtccaatattttactggacaccgagctcaatcctcacatttctgatgctggacattcaagttttgttccagatgctgaattccaggcttcagatcaggggtctgggtatagtgcccctgaggtcgagatgtccggtcagtataccctcaagagtgatgtctacagctttggggtcgtcatgctggaactcttgacaggccgtaaaccatttgacagttctaggccccggtcagagcaatcacttgtccggtgagcaactccccagctgcatgacattgacgccttggaccagatggttgatccggcgctcaagggtctttaccccgccaaatccctttcccgttttgcggatgttattgctctgtgtgtccagcctgagccagagttcagacctccaatgtctgaggtggtgcaagcgctggtgcggctcgttcagagggccaacatgaccaggagaatgctagatggcgaggaggcttctcggcggccggatgaccaggaacaggaattcgtctaacaagctactgaaacaatatacacatcatgtgctgtacctgcaccatcttaatgttgtgactgttgataaaacagggaaaacagctttgtcgacttccattcagtatatattacaggttttatttcatataacgaaatatatatgttattttttagataatgggaattgaaagtttctggcctttgtttcaaag

SEQ ID NO: 8436 - DNA, 1636 bp, Zea Mays
ctgactctcaggatctgtggttgattggacaagaacgacaactgagtcgaataaagaaacgataaattgcagtaaaagactgcactgaagctatcgtctggtgatgataatgaattgcatcatataatatcaatacttcttggttatgatgaatataaaactgtacagacgagagattacagtgaaaaaatggacgagattgttactttacttgaagaaagtgcttatagtcatctcttggaggtgattgtggaggttgccccagacgaattgcgcaatggtatgcttgcacgtagtctgaagggtgcattatttgcaatctcatctcaccactgtggtaactatgtggtgcaagctttcatatcatctactaaaacctcagatcagatgaatcaaatatgggaggaacttggtccaaacatgaaggaattgcttgaactagcaatatattcgcccatatgtcgcaagcttgctggccatgggggatgatcagatcctccaaatttccaaggattcaggaggttgccgtgttcttgagtcttttctaggttcaagtgccactgcaaagcgtaaatttaatgtttttggaaagttgcaaggtcattatggagatattgctatgaatccttctggctcattcttagtagagaagtgctttactgccagtaacttttctcataaagaggctatagtggcagagctgttggctgtgcaatctgatctatctaaaacaagacacgggttccacttgctaaagaagctggatgtcgatagatatgctaggcgacctgagcagtggagggctagtcgaacttcaaaagaaacaacccaaaaaaagtttgaggcagaatttggctcaaacagtcaatctactgggcagattgttaaagaaaagttctctcaaagtcgcacgaagaagcgtaagcagaaagagaaggttgacaaaattactgaggatgccaggagcaacaaaccagacttctctcagaaaggaaacagtaagaggccaaaatctggcaacgcaacttctgagaaccccctgagtgaaggtgctagtgctagcatggtgttcttgaagggctctgtcaagaggaagtccccaggtttcctttcagataaaccgagcttcaagaaacaaaaacctcacaaacccgattctggtagaccagacggcaaacgttttgttcgagatagtgatactagcgcaccgttcgtcaagaatgccggcaaacagaaacagtccattgctgagctcgcggacctggctggtaaggagaagctgactgcgtctgaagttcgcaaattgctgaagcctgaaatgtcaggcaagagctaatgagtttagggtgagcagaggcagcaattttgttggtcgtttttcctcgtatgttgcggaaagaaactgtggcacgtgatatgggtttgtttcagtagaaacgtattcgtgatacctgtcctgataccggtttctcttgctagcgaatctctttggctttgcatatgtttgtttgatccgctgcttgctgatatagtgcaaaacatgtagaaagatgcagccccgcccagggcaacattttccctgctaagaccaaatactcgtaataacatgttaatgcaggaaatgccaagagactat

SEQ ID NO: 8437 - DNA, 3886 bp, Zea Mays
aacccaattgtcgtcggccactgctcttccacttgcagtcttccgtcgccctcgcccctcgcccaggcacagccgcacagcaagcatagccgccaccgccagtcgccactgctcagctcggcgctccatggcgtgcccccaaattccgtgacggcgtgactcgtcttcctcctttcctctctgccgggctgcacgtgcagaccacggacgaacacactgcccccaaggccccaatccaatgatcctggtgggcgtggctctaagaagagcagcaccgcgacgtaaggccgccagaatttgttgctgacacttgaatggactgtctctctctgaggttaccagaccccaaaccagactcctccgaagacaggggcttcttgctgattatccggtagatctcggctagaacggtgtggaaggccttctccacaattcagaatctgcttttagtgcgggtggtcatgtacttgtgtttttgtgatatttataaactttgttgtattgtgatattttcatattgatatggttaccgattgtattttagattccgaccgataccgatgtattttttgtaccgaacttctgtttccgatgattccgaaataccgatgtcgtttccgtttccggaattaccgtttccgatttcatttccgataaaaatatgaaaacggtaacggttttagtgttttccgatcgtttccgaccgttttcatccccgctgtccctggccttgggccgaataaccccgcactcggctacggccgtcgttctcatccgttccttcaccctgcgtgtgctctctttcctcccatctctctccgactagccgatcactgggtgggctaccgccgccgccaccctgcgccaggtgccgaggccttcgtcggtctcttctccggcgacgagcacccaccagagtaagcagctgctgtcgaagtgtacatgagcaatggtttgtgttgggtccaaggcaattagacccaaggggagcacaataaatggcttgggagatggagctttagacgatagctcacacaagaagaggacaaggaaggatacgagcgagaaacacgggaaagggggtcacagctcaagtaaaggaccttctgtagggaaacctcggcatgtgaaggataggaagcagaggaaagatgatgggaagaaagggaagggtcgacgaaaggaccatcattcaggaagctccgtgatggtgaatcccaggacgaagaacctcaacaatcaggatgcggtaccatcctccgatacatcaaaaccagtacaaaatgttcttaggaaaagagttgatcctgaaactgcaaagtactttatggagatctcaaacctctttgataacaaggagattgattttgaagagcgctcaactatatgcgctaatgccttagaagaaactagagggaaagagcatgaacttgccactgatgctgttataagccacaccttgcaggttcttatagaaggctgtgagttagagcagttatgcacattcctacgcaattgtatcgactatttttcggtcattgccgtggacaaaaatgggtcgcatgtggctgaagcagctctcaagtcactcgcaacacatcttgaagatgaagcctccagggccatgatagaagggatactgaacaaaatatgcaaggttattgctgtggatgctgttactgtgatgtccagctgctatggttcacatgttctccgcactctactttgtctttgtaagggtgttccatcagattcactacaagacttccatactactaagagatcttctgttctagctgagcggctcagttgtgggacaaatcagtctagtcgacatgttccaaagaattttgaaaatggtttctcaggcatgtttaggtcttttgtcagagaaatgctacataatgcaaaagctgacattgcaactttacgagttgacaagaacagtagccttgttttacaggttagtatcattgcacaaaatattgtttttggattttgattactgactctcaggatctgtggttgattggacaagaacgacaactgagtcgaataaagaaacgataaattgcagtaaaagactgcactgaagctatcgtctggtgatgataatgaattgcatcatataatatcaatacttcttggttatgatgaatataaaactgtacagacgagagattacagtgaaaaaatggacgagattgttactttacttgaagaaagtgcttatagtcatctcttggaggtgattgtggaggttgccccagacgaattgcgcaatggtatgcttgcacgtagtctgaagggtgcattatttgcaatctcatctcaccactgtggtaactatgtggtgcaagctttcatatcatctactaaaacctcagatcagatgaatcaaatatgggaggaacttggtccaaacatgaaggaattgcttgaactaggtaaaacaggggttgtagcttccatgttagcggcatgtcagcggcttgaaacttatcgccttgagagttctcaagctcttgctgcagcgttaagttcagattctgagtctactaagagcattgttgcacgtatactttttcttgagaactacctacatgagagatctaattggaaatggattcttggtgcaaaaatgagcattctgggttgcttgatgctgcaatctattttccagtacccgcatcaatatattcgcccatatgtcgcaagcttgctggccatgggggatgatcagatcctccaaatttccaaggattcaggaggttgccgtgttcttgagtcttttctaggttcaagtgccactgcaaagcgtaaatttaatgtttttggaaagttgcaaggtcattatggagatattgctatgaatccttctggctcattcttagtagagaagtgctttactgccagtaacttttctcataaagaggctatagtggcagagctgttggctgtgcaatctgatctatctaaaacaagacacgggttccacttgctaaagaagctggatgtcgatagatatgctaggcgacctgagcagtggagggctagtcgaacttcaaaagaaacaacccaaaaaaagtttgaggcagaatttggctcaaacagtcaatctactgggcagattgttaaagaaaagttctctcaaagtcgcacgaagaagcgtaagcagaaagagaaggttgacaaaattactgaggatgccaggagcaacaaaccagacttctctcagaaaggaaacagtaagaggccaaaatctggcaacgcaacttctgagaaccccctgagtgaaggtgctagtgctagcatggtgttcttgaagggctctgtcaagaggaagtccccaggtttcctttcagataaaccgagcttcaagaaacaaaaacctcacaaacccgattctggtagaccagacggcaaacgttttgttcgagatagtgatactagcgcaccgttcgtcaagaatgccggcaaacagaaacagtccattgctgagctcgcggacctggctggtaaggagaagctgactgcgtctgaagttcgcaaattgctgaagcctgaaatgtcaggcaagagctaatgagtttagggtgagcagaggcagcaattttgttggtcgtttttcctcgtatgttgcggaaagaaactgtggcacgtgatatgggtttgtttcagtagaaacgtattcgtgatacctgtcctgataccggtttctcttgctagcgaatctctttggctttgcatatgtttgtttgatccgctgcttgctgatatagtgcaaaacatgtagaaagatgcagccccgcccagggcaacattttccctgctaagaccaaatactcgtaataacatgttaatgcaggaaatgccaagagactat

SEQ ID NO: 8438 - DNA, 852 bp, Zea Mays
catgcaccggttttttttgtagggggtgccatccagtgtaccgtggatactccacgtgtgaggagttgtggccacttcctccggctagaccttgggtgttgaaaaggttgttcacctatgaagtcacagcgtcgtcttggccagatgcatctccaggtgctacaaccgaacaaggaggtgtctggaaggcatgtaataaatatttggacattaaccaatatattctttattttgtaacacacatttatgtacatactcttacttgggacgcaggagacctacgagggcgaaggtgactaggtgagcacgagtggcgtgacggcgtgggcgtcatgtgcggcctagggcgttgcgaggcagcgacacgcgagcaaacctatggagcgtgggcgtggcgatagccaaggagggcacgcgaggtccgtcgatgtcgtcgtgcgggcgcggatgagggcaggcgcagcgtgcacgcgcggccactggcaaggtggtgctgcgtcaggcgagggcggccgagcggtggcgccgcaggcagtggtgggtgcgtgggagcggaagcggcgagtgggcacagaagctgaggcggtgacggaggctgaattgcgcgtgctcgtgagagagagagggagaagagaaggagagccagaattgaaacggcggccggtacggcgttacctaaaaattgtctatatctgacggcttttctggcagctggcaaagataaatccaatgtctgacgactgcatcagacattaaacaacatctgaggatctgattaggctgtcggacattaattaaacttcgacgcctgatcttcaaaccgtcagaaataattatgccatcggaaatgtc

SEQ ID NO: 8439 - DNA, 1753 bp, Zea Mays
catgcaccggttttttttgtagggggtgccatccagtgtaccgtggatactccacgtgtgagggtgaggctagctctctttagtctgcacagagaaaatatgaaaggaattgctacacgccacatattcctaataatttcgattctgaaagcgatgattttcgacgatgccttcttgaaaaacatggcaaaatccagccaagcctcaagctatgagttccactagagcagccatagatattctttggatcaccacattaaagtttagcctatcgattgtagactaaaatctagaaacattgttttgccactaaaacataaaatttttgatggcctaagtagtcagacataagctctataccgtcaaacataaattattttcaacagcttatgtccgacacgatgtgtccgttgatcctaaaaggtcggaaatgatcttatgtcagccgttgaatatagccaatgtccgactaactcacagacatcatcgacagtatgcttggttaacggctgtgacggcgtacaatgggtcccacacatgttatgtccgatggtctacatgcaagtcagatataataagcttatcttcgatggcttgcatgtagaccatcatatattaatttgtcttatgtccgacggcttgtctgtagccgtcggatataatgaatttcacataggtcaatattctcccggtttttgttcattcgcacaatatacattatcacatcctaaaatatctagatttcacaaccaatacatattcacaaatacatacatccacaaatacatacatccacaaccacaaacaaatacggatattttttaacatgcataacacacattttatcgacaatacacattcacaaccacacacacatatcacacatcctcattcacatatcacaaaggtacacacatagaacttagttgatccacattcatatagttccaaattcattaaaatgtcataataaaactactaagttccaaaattgcataggaatcgaatcctaactaactatgcctaccattcgtcaccttgttggttagagttgtggccacttcctccggctagaccttgggtgttgaaaaggttgttcacctatgaagtcacagcgtcgtcttggccagatgcatctccaggtgctacaaccgaacaaggaggtgtctggaaggagacctacgagggcgaaggtgactaggtgagcacgagtggcgtgacggcgtgggcgtcatgtgcggcctagggcgttgcgaggcagcgacacgcgagcaaacctatggagcgtgggcgtggcgatagccaaggagggcacgcgaggtccgtcgatgtcgtcgtgcgggcgcggatgagggcaggcgcagcgtgcacgcgcggccactggcaaggtggtgctgcgtcaggcgagggcggccgagcggtggcgccgcaggcagtggtgggtgcgtgggagcggaagcggcgagtgggcacagaagctgaggcggtgacggaggctgaattgcgcgtgctcgtgagagagagagggagaagagaaggagagccagaattgaaacggcggccggtacggcgttacctaaaaattgtctatatctgacggcttttctggcagctggcaaagataaatccaatgtctgacgactgcatcagacattaaacaacatctgaggatctgattaggctgtcggacattaattaaacttcgacgcctgatcttcaaaccgtcagaaataattatgccatcggaaatgtc

SEQ ID NO: 8440 - DNA, 1545 bp, Zea Mays
cttgcttggtctcttggtttctgctcgttttgtttggggactgtgcgctgaggggggtatgggacatgattcttgcacctgcacctgtccttccgttgattccttcctggatggctggataactgtcatcatgaggatggtgtgaggcgatctttgggatgtgttctcctgggcgttcagtgcaatcgaatgctcaattgatggcgatggagggacctgttttctgccgtcctgcaatgcaagcgaaactgcctgctgctgcgctgatcaacaactccctgaccaaatccgggcagcttgggactgcattgtttggtgccatttcaaaatacagaaacatttcaagattcatttctcccatctctcaaacatctacgaagaacataggtccatgctgtagcttcagctcgtcttctgatggtaatggatacatggctggaaactctagcgagagtgatgaagactatgttaattctactgtgctagaagcagttgaggtgagaagtggatcagaaggatatgtgataaagatgcgagatggaaagaacttgcgttgtgtccatagtaattttcaagggagaaatattccagagaatacaccacaacctgctattgttttgaggattgaagatggaagcggaactttactcccgatcattgttttggagatgccaagcgttcttctgatggcagctattcgtaatgtccacattgcacgaccgaccatatatcaagttgtcaaggaaatgattgataaaatgggttatgaggtaaaacttgttagggtaaacaaaagaattcaagaagcctactgtgctgaactttatttaacaaaggtcaatgatcctacagacaacatcaccttcgatcttcggccttcagatgccataaacattgctgttcgttgcaaggttcctgtacaagtccatagaagtcttgcatacagtgatgggattagaccagtcgagccagcaagaatggcagtaacagctggcctatcagatgggttgttatttacagagcttgacagacctgatggacagccatgtgtggaggctcaagagtttggactggtgaggaacatgctcattgcagctatcgaagagagatacaaggatgctgcatcatggaaggacaaactgattcggctcaggtctaagcgggagaactgggcctgagagcgtcgcatgtctggatggtgtaaataaagatgacgctcagctgaattccagtatgcactccagacaattgatactgtttatggctctatgtaactagctgtacatattgtaactagctgtacatattgtacgtactatgctcaggtctcagctaaattcagactaagatttgaagtgaaaaactaatccttttgtaatcttggccgtattaatttgtatgttagtctgttaggttgaatgtttggcatgaatttttagctcatcgacctgcggtgagatatgcagaatttcggttgtacacggaactaagcagcgctaatattttcacaggctgctgttaagaagagagattgctgctttgttt

SEQ ID NO: 8441 - DNA, 1424 bp, Zea Mays
ctcgttttctccccccgttaattggagcagcgacggcttgctcctcttcgtgtaacgagatttagtttccttcggattgatggcgatggagggacctgttttctgccgtcctgcaatgcaagcgaaactgcctgctgctgcgctgatcaacaactccctgaccaaatccgggcagcttgggactgcattgtttggtgccatttcaaaatacagaaacatttcaagattcatttctcccatctctcaaacatctacgaagaacataggtccatgctgtagcttcagctcgtcttctgatggtaatggatacatggctggaaactctagcgagagtgatgaagactatgttaattctactgtgctagaagcagttgaggtgagaagtggatcagaaggatatgtgataaagatgcgagatggaaagaacttgcgttgtgtccatagtaattttcaagggagaaatattccagagaatacaccacaacctgctattgttttgaggattgaagatggaagcggaactttactcccgatcattgttttggagatgccaagcgttcttctgatggcagctattcgtaatgtccacattgcacgaccgaccatatatcaagttgtcaaggaaatgattgataaaatgggttatgaggtaaaacttgttagggtaaacaaaagaattcaagaagcctactgtgctgaactttatttaacaaaggtcaatgatcctacagacaacatcaccttcgatcttcggccttcagatgccataaacattgctgttcgttgcaaggttcctgtacaagtccatagaagtcttgcatacagtgatgggattagaccagtcgagccagcaagaatggcagtaacagctggcctatcagatgggttgttatttacagagcttgacagacctgatggacagccatgtgtggaggctcaagagtttggactggtgaggaacatgctcattgcagctatcgaagagagatacaaggatgctgcatcatggaaggacaaactgattcggctcaggtctaagcgggagaactgggcctgagagcgtcgcatgtctggatggtgtaaataaagatgacgctcagctgaattccagtatgcactccagacaattgatactgtttatggctctatgtaactagctgtacatattgtaactagctgtacatattgtacgtactatgctcaggtctcagctaaattcagactaagatttgaagtgaaaaactaatccttttgtaatcttggccgtattaatttgtatgttagtctgttaggttgaatgtttggcatgaatttttagctcatcgacctgcggtgagatatgcagaatttcggttgtacacggaactaagcagcgctaatattttcacaggctgctgttaagaagagagattgctgctttgttt

SEQ ID NO: 8442 - DNA, 1339 bp, Zea Mays
actgggagaccgatgctcgccgtcgttcgcccaccgctttgcgattcttctctcttccggataaagcgaaagattgatggcgatggagggacctgttttctgccgtcctgcaatgcaagcgaaactgcctgctgctgcgctgatcaacaactccctgaccaaatccgggcagcttgggactgcattgtttggtgccatttcaaaatacagaaacatttcaagattcatttctcccatctctcaaacatctacgaagaacataggtccatgctgtagcttcagctcgtcttctgatggtaatggatacatggctggaaactctagcgagagtgatgaagactatgttaattctactgtgctagaagcagttgaggtgagaagtggatcagaaggatatgtgataaagatgcgagatggaaagaacttgcgttgtgtccatagtaattttcaagggagaaatattccagagaatacaccacaacctgctattgttttgaggattgaagatggaagcggaactttactcccgatcattgttttggagatgccaagcgttcttctgatggcagctattcgtaatgtccacattgcacgaccgaccatatatcaagttgtcaaggaaatgattgataaaatgggttatgagacaacatcaccttcgatcttcggccttcagatgccataaacattgctgttcgttgcaaggttcctgtacaagtccatagaagtcttgcatacagtgatgggattagaccagtcgagccagcaagaatggcagtaacagctggcctatcagatgggttgttatttacagagcttgacagacctgatggacagccatgtgtggaggctcaagagtttggactggtgaggaacatgctcattgcagctatcgaagagagatacaaggatgctgcatcatggaaggacaaactgattcggctcaggtctaagcgggagaactgggcctgagagcgtcgcatgtctggatggtgtaaataaagatgacgctcagctgaattccagtatgcactccagacaattgatactgtttatggctctatgtaactagctgtacatattgtaactagctgtacatattgtacgtactatgctcaggtctcagctaaattcagactaagatttgaagtgaaaaactaatccttttgtaatcttggccgtattaatttgtatgttagtctgttaggttgaatgtttggcatgaatttttagctcatcgacctgcggtgagatatgcagaatttcggttgtacacggaactaagcagcgctaatattttcacaggctgctgttaagaagagagattgctgctttgttt

SEQ ID NO: 8443 - DNA, 1479 bp, Zea Mays
actgggagaccgatgctcgccgtcgttcgcccaccgctttgcgattcttctctcttccggataaagcgaaaggtaagcagccccacctccttttctatttctttctccaacaaatcaacaattaatactccactacggtcgctcttctcccctcctctcaatttgcgctcgtgctctgcttcttcggctccaaggagcggcgaccattgctcattgatggcgatggagggacctgttttctgccgtcctgcaatgcaagcgaaactgcctgctgctgcgctgatcaacaactccctgaccaaatccgggcagcttgggactgcattgtttggtgccatttcaaaatacagaaacatttcaagattcatttctcccatctctcaaacatctacgaagaacataggtccatgctgtagcttcagctcgtcttctgatggtaatggatacatggctggaaactctagcgagagtgatgaagactatgttaattctactgtgctagaagcagttgaggtgagaagtggatcagaaggatatgtgataaagatgcgagatggaaagaacttgcgttgtgtccatagtaattttcaagggagaaatattccagagaatacaccacaacctgctattgttttgaggattgaagatggaagcggaactttactcccgatcattgttttggagatgccaagcgttcttctgatggcagctattcgtaatgtccacattgcacgaccgaccatatatcaagttgtcaaggaaatgattgataaaatgggttatgagacaacatcaccttcgatcttcggccttcagatgccataaacattgctgttcgttgcaaggttcctgtacaagtccatagaagtcttgcatacagtgatgggattagaccagtcgagccagcaagaatggcagtaacagctggcctatcagatgggttgttatttacagagcttgacagacctgatggacagccatgtgtggaggctcaagagtttggactggtgaggaacatgctcattgcagctatcgaagagagatacaaggatgctgcatcatggaaggacaaactgattcggctcaggtctaagcgggagaactgggcctgagagcgtcgcatgtctggatggtgtaaataaagatgacgctcagctgaattccagtatgcactccagacaattgatactgtttatggctctatgtaactagctgtacatattgtaactagctgtacatattgtacgtactatgctcaggtctcagctaaattcagactaagatttgaagtgaaaaactaatccttttgtaatcttggccgtattaatttgtatgttagtctgttaggttgaatgtttggcatgaatttttagctcatcgacctgcggtgagatatgcagaatttcggttgtacacggaactaagcagcgctaatattttcacaggctgctgttaagaagagagattgctgctttgttt

SEQ ID NO: 8444 - DNA, 1136 bp, Zea Mays
agacgttcgagtagtcaataaattaggaggacaaaagtgtaatttttactgggagaccgatgctcgccgtcgttcgcccaccgctttgcgattcttctctcttccggataaagcgaaagattgatggcgatggagggacctgttttctgccgtcctgcaatgcaagcgaaactgcctgctgctgcgctgatcaacaactccctgaccaaatccgggcagcttgggactgcattgtttggtgccatttcaaaatacagaaacatttcaagattcatttctcccatctctcaaacatctacgaagaacataggtccatgctgtagcttcagctcgtcttctgatggtaatggatacatggctggaaactctagcgagagtgatgaagactatgttaattctactgtgctagaagcagttgaggtgagaagtggatcagaaggatatgtgataaagatgcgagatggaaagaacttgcgttgtgtccatagtaattttcaagggagaaatattccagagaatacaccacaacctgctattgttttgaggattgaagatggaagcggaactttactcccgatcattgttttggagatgccaagcgttcttctgatggcagctattcgtaatgtccacattgcacgaccgaccatatatcaagttgtcaaggaaatgattgataaaatgggttatgaggtaaaacttgttagggtaaacaaaagaattcaagaagcctactgtgctgaactttatttaacaaaggtcaatgatcctacagacaacatcaccttcgatcttcggccttcagatgccataaacattgctgttcgttgcaaggttcctgtacaagtccatagaagtcttgcatacagtgatgggattagaccagtcgagccagcaagaatggcagtaacagctggcctatcagatgggttgttatttacagagcttgacagacctgatggacagccatgtgtggaggctcaagagtttggactggtgaggaacatgctcattgcagctatcgaagagagatacaaggatgctggactccaggttgagcatctggtaatgattctacccagtgcagtattatcatatctgtctgaatgctgaacaagcatcacatctgtctaaat

SEQ ID NO: 8445 - DNA, 2173 bp, Zea Mays
ctcccttctctgattgtgtgtttgtgttgtctgttcagattttaatggtggctgtggacgtgctaataacgttgaggtcttattccctgggtcaaatatggtcggcagtgaaagtcaaagtgcttctgttcctcaagtggcctcaaatgcaggtagcactggtcctgcgtctgctttatcagctgctgcagattgtaaaacccttgctgaaaaggcaattgcagcactccctcctgaccttagtgcacaagcaaatgaccccaagagaaaggcaaggtcacaggacccaggatggcagtttgggtggtggccagacacaacaaagaaggattttgttcagtgtgtcttctgtaagaagattgtgccatctggaatcaagaggtttaagcagcatctagccggtgggtttggtgacaccatgaagtgtgctagagtaccagaagtggtttcaaaggagatgcacacctatctgagaaggaacatgagggttgtgattacttcggatggtgatgaaggtgaagaggaaggggagcagattgatgtaggccccctaccaagttctgggacaaaaaccaagcaaacaaaaaagcaaattgctcaagcttccatgtcttcatttgttgtagcagctcctataaaaccaaatacacagaaggcaagcaaatcagtgagtgccatgctttgcaagactccagaggaagttgtagcagagagacataaaaatagaacttctcagaccactcttgagcattgcacaaagaaaggaacagaagcaaagcaaattgttgacgaccatgtagctgattttctatatgagaacaagattccattgaatgtcgtcaattcaagaagctggcagattatgatggagtccattggtcagtatggtcctggatatcgtggcccatcatactatgaggcaagggtaccttggcttgaaagggcagtgaagagaacatcaacattgagagctaagcatgaagaggcttggaaggaatatggttgctcaattatgtcagatgggcggactgacatacgacaacggcatttgataaacttccttgccaacagtccagcggggacctacttcttaggttctgtcgatgcatcaagtgagatagcaaatgccaatatgttggcagatccattggagaagcaaataattaaggtggggaaagaacatgtggtccaggtgatcactgacaatggagccaatttcaaagcagcagggaggatccttatggacagaattccccatctgttttggactccttgtgctgcgcattgcttggatttgttgttggaggatattggcaagatcaaggagttcaacacttgcatcaacatggccaagaaggtttcgaggttcctgtacaagcatgggcgacttccgacttcacagcctaatgagagaaaagctagtgatgaatggaatgggtctaaatttgccctagttaaagaaggtgaacaagctgaaaatattgtcctttcagtatcattttggcaaactcttgaaaattgtcttcgggcttcacaaccactactcattgctctaaggattgctgacggtgatgagacgccagcagctccagagataatggcagctatggacaaagcaaaagctaccatacaggagtctttgaaagagaagccacgattacttgctgaagtaatctcatgctttgagaagaggtgggatactcagatggagcaaaaattatatggggcagccctttatttgaatccagtgatgaggatgagcaaacaaaaataagtaaacaagcagatgactatgaaagatcagaaggggaatgcttttcaaaggctggagcaataagagaaagagagaaaaaaagtcctatcctatggtggggtgcatatggaggactggcatatgaactacaaagcttagcaaaaagggttataagcctatgttgtgcagcttcaggttgtgagagaaattggtcagattttgcagcaatccatacaaaaaagaggaaccgactagaacaccagaggcttaataaattggtctatgtcagttacaataggaagatggaaaataggtttcaaacactaagagagctgggatccaaaggaaaaagaagcaacccactcgtgcttgaagagttcatgtgggaaaatgaatgggttgaagaaaatgaagatgatg

SEQ ID NO: 8446 - DNA, 432 bp, Zea Mays
gtataccaatatatcaacaactgtctcaggatcttgttcttggttgttaagaatatgactgagagtttgggagtctacaaacatgggaaagagcaaatattggtgcttttgcaattggtgaccctgctgcagctgattcttctaggaattcacaagggcagtatggtacaccaatgccatacattggagagacaaaggttgaagttgatctgttgagtgatggtgtgaaagaaggtgctgaatcaggtaaaactgattctgaactgaaagttttacctccatggatgatcaaggatggcatgaatcttactaaggaacaaagaggagagataattgcgccacaaaaacttgagaaatctgatgccggagatgacaagaagcatgacttgaaagatgatgattgttttcgctcagctcaggaatgaacacata

SEQ ID NO: 8447 - DNA, 485 bp, Zea Mays
gaatcgtgtttatgcaacattttggaggtgattgcatgtataccaatatatcaacaactgtctcaggatcttgttcttggttgttaagaatatgactgagaatattcctgcaccagagtttgggagtctacaaacatgggaaagagcaaatattggtgcttttgcaattggtgaccctgctgcagctgattcttctaggaattcacaagggcagtatggtacaccaatgccatacattggagagacaaaggttgaagttgatctgttgagtgatggtgtgaaagaaggtgctgaatcaggtaaaactgattctgaactgaaagttttacctccatggatgatcaaggatggcatgaatcttactaaggaacaaagaggagagataattgcgccacaaaaacttgagaaatctgatgccggagatgacaagaagcatgacttgaaagatgatgattgttttcgctcagctcaggaatgaacacata

SEQ ID NO: 8448 - DNA, 457 bp, Zea Mays
aaatattatggaaggaaacaaaaatgtcaggagcaattgaagccattggttgcacaacttgatagagtgaagaatattcctgcaccagagtttgggagtctacaaacatgggaaagagcaaatattggtgcttttgcaattggtgaccctgctgcagctgattcttctaggaattcacaagggcagtatggtacaccaatgccatacattggagagacaaaggttgaagttgatctgttgagtgatggtgtgaaagaaggtgctgaatcaggtaaaactgattctgaactgaaagttttacctccatggatgatcaaggatggcatgaatcttactaaggaacaaagaggagagataattgcgccacaaaaacttgagaaatctgatgccggagatgacaagaagcatgacttgaaagatgatgattgttttcgctcagctcaggaatgaacacata

SEQ ID NO: 8449 - DNA, 743 bp, Zea Mays
tggatttttatccatgctctgtatctgtgatgttgtaaggtaccggattcaccgcatgaagaaaaaattgaaggatgaattggacagcagaaatacaattcaacactatatatgtcctagctgcaataaaagatactcagccttcgatgcactacaactggtaagctacacggatgagtacttccattgtgaaacttgcaatggtgaactggttgcagagagtgacaagcttgcttctgaggaaatgggagatggcgatgacaatgttagaaagcgcaggcgtgagaaattaaaggacatgcagcaaagaatagaagagcaattgaagccattggttgcacaacttgatagagtgaagaatattcctgcaccagagtttgggagtctacaaacatgggaaagagcaaatattggtgcttttgcaattggtgaccctgctgcagctgattcttctaggaattcacaagggcagtatggtacaccaatgccatacattggagagacaaaggttgaagttgatctgttgagtgatggtgtgaaagaaggtgctgaatcaggtaaaactgattctgaactgaaagttttacctccatggatgatcaaggatggcatgaatcttactaaggaacaaagaggagagataattgcgccacaaaaacttgagaaatctgatgccggagatgacaagaagcatgacttgaaagatgatgattgttttcgctcagctcaggaatgaacacata

SEQ ID NO: 8450 - DNA, 745 bp, Zea Mays
ctcatctatcaccagtgcaaaaagatctgtgatgttgtaaggtaccggattcaccgcatgaagaaaaaattgaaggatgaattggacagcagaaatacaattcaacactatatatgtcctagctgcaataaaagatactcagccttcgatgcactacaactggtaagctacacggatgagtacttccattgtgaaacttgcaatggtgaactggttgcagagagtgacaagcttgcttctgaggaaatgggagatggcgatgacaatgttagaaagcgcaggcgtgagaaattaaaggacatgcagcaaagaatagaagagcaattgaagccattggttgcacaacttgatagagtgaagaatattcctgcaccagagtttgggagtctacaaacatgggaaagagcaaatattggtgcttttgcaattggtgaccctgctgcagctgattcttctaggaattcacaagggcagtatggtacaccaatgccatacattggagagacaaaggttgaagttgatctgttgagtgatggtgtgaaagaaggtgctgaatcaggtaaaactgattctgaactgaaagttttacctccatggatgatcaaggatggcatgaatcttactaaggaacaaagaggagagataattgcgccacaaaaacttgagaaatctgatgccggagatgacaagaagcatgacttgaaagatgatgattgttttcgctcagctcaggaatgaacacata

SEQ ID NO: 8451 - DNA, 913 bp, Zea Mays
aagctgtatggaagataattcaacattttcaagccatggaaatgtgtgtgacactcaacaagtaactagtcagcaaaaaacgcaaaagcacataatgctgcagctgctaatgatggtcaaccaattgctaaggagggagaagagaaagtaaagctgcacacacattcatactgttgcttggattatgctcagatctgtgatgttgtaaggtaccggattcaccgcatgaagaaaaaattgaaggatgaattggacagcagaaatacaattcaacactatatatgtcctagctgcaataaaagatactcagccttcgatgcactacaactggtaagctacacggatgagtacttccattgtgaaacttgcaatggtgaactggttgcagagagtgacaagcttgcttctgaggaaatgggagatggcgatgacaatgttagaaagcgcaggcgtgagaaattaaaggacatgcagcaaagaatagaagagcaattgaagccattggttgcacaacttgatagagtgaagaatattcctgcaccagagtttgggagtctacaaacatgggaaagagcaaatattggtgcttttgcaattggtgaccctgctgcagctgattcttctaggaattcacaagggcagtatggtacaccaatgccatacattggagagacaaaggttgaagttgatctgttgagtgatggtgtgaaagaaggtgctgaatcaggtaaaactgattctgaactgaaagttttacctccatggatgatcaaggatggcatgaatcttactaaggaacaaagaggagagataattgcgccacaaaaacttgagaaatctgatgccggagatgacaagaagcatgacttgaaagatgatgattgttttcgctcagctcaggaatgaacacata

SEQ ID NO: 8452 - DNA, 1022 bp, Zea Mays
ggcgggagagggggagcaggactcaccaagtcactaggttcctgcagattgatgagggcggcgtgcagactgcagaggaggggcggcgtgagaggaggggcggccggcggcgtgaggactgagggacgaccgtgggttcgggaggaagatttggctaaagcattgaagctccactcgaaacagctgcgtcgcattctccgtttctttgaagaggagaaactagtcacgagggatcatcgaaaggagtcagcaaaaaacgcaaaagcacataatgctgcagctgctaatgatggtcaaccaattgctaaggagggagaagagaaagtaaagctgcacacacattcatactgttgcttggattatgctcagatctgtgatgttgtaaggtaccggattcaccgcatgaagaaaaaattgaaggatgaattggacagcagaaatacaattcaacactatatatgtcctagctgcaataaaagatactcagccttcgatgcactacaactggtaagctacacggatgagtacttccattgtgaaacttgcaatggtgaactggttgcagagagtgacaagcttgcttctgaggaaatgggagatggcgatgacaatgttagaaagcgcaggcgtgagaaattaaaggacatgcagcaaagaatagaagagcaattgaagccattggttgcacaacttgatagagtgaagaatattcctgcaccagagtttgggagtctacaaacatgggaaagagcaaatattggtgcttttgcaattggtgaccctgctgcagctgattcttctaggaattcacaagggcagtatggtacaccaatgccatacattggagagacaaaggttgaagttgatctgttgagtgatggtgtgaaagaaggtgctgaatcaggaacaaagaggagagataattgcgccacaaaaacttgagaaatctgatgccggagatgacaagaagcatgacttgaaagatgatgattgttttcgctcagctcaggaatgaacacata

SEQ ID NO: 8453 - DNA, 973 bp, Zea Mays
tgcgagggcgggagagggggagcaggactcaccaagtcactaggttcctgcagattgatgagggcggcgtgcagactgcagaggaggggcggcgtgagaggaggggcggccggcggcgtgaggactgagggacgaccgtgggttcgggaggaagatttggctaaagcattgaagctccactcgaaacagctgcgtcgcattctccgtttctttgaagaggagaaactagtcacgagggatcatcgaaaggagatctgtgatgttgtaaggtaccggattcaccgcatgaagaaaaaattgaaggatgaattggacagcagaaatacaattcaacactatatatgtcctagctgcaataaaagatactcagccttcgatgcactacaactggtaagctacacggatgagtacttccattgtgaaacttgcaatggtgaactggttgcagagagtgacaagcttgcttctgaggaaatgggagatggcgatgacaatgttagaaagcgcaggcgtgagaaattaaaggacatgcagcaaagaatagaagagcaattgaagccattggttgcacaacttgatagagtgaagaatattcctgcaccagagtttgggagtctacaaacatgggaaagagcaaatattggtgcttttgcaattggtgaccctgctgcagctgattcttctaggaattcacaagggcagtatggtacaccaatgccatacattggagagacaaaggttgaagttgatctgttgagtgatggtgtgaaagaaggtgctgaatcaggtaaaactgattctgaactgaaagttttacctccatggatgatcaaggatggcatgaatcttactaaggaacaaagaggagagataattgcgccacaaaaacttgagaaatctgatgccggagatgacaagaagcatgacttgaaagatgatgattgttttcgctcagctcaggaatgaacacata

SEQ ID NO: 8454 - DNA, 858 bp, Zea Mays
atatctctcgctcgccctttccccttcgatgcaactggtgtggcggcggcggctgcgggcggcgtgatacggcaccccctcctcccgcccccttatgcaagcgggcaatcagaactccgatcacccgcacgccggcacgccagtgtcgtcttcgcaaccatgaactccatcgagcctttcaaccggctggtgaggctggcggcccgcgccttctacgacgacgtctccatgaagggcgacaaccagcccaagacttcccgcggggacaaccgcggcatggccgtcgtcgtcctggacgcgctcaccagtcagcaaaaaacgcaaaagcacataatgctgcagctgctaatgatggtcaaccaattgctaaggagggagaagagaaagtaaagctgcacacacattcatactgttgcttggattatgctcaggagcaattgaagccattggttgcacaacttgatagagtgaagaatattcctgcaccagagtttgggagtctacaaacatgggaaagagcaaatattggtgcttttgcaattggtgaccctgctgcagctgattcttctaggaattcacaagggcagtatggtacaccaatgccatacattggagagacaaaggttgaagttgatctgttgagtgatggtgtgaaagaaggtgctgaatcaggtaaaactgattctgaactgaaagttttacctccatggatgatcaaggatggcatgaatcttactaaggaacaaagaggagagataattgcgccacaaaaacttgagaaatctgatgccggagatgacaagaagcatgacttgaaagatgatgattgttttcgctcagctcaggaatgaacacata

SEQ ID NO: 8455 - DNA, 1542 bp, Zea Mays
atatctctcgctcgccctttccccttcgatgcaactggtgtggcggcggcggctgcgggcggcgtgatacggcaccccctcctcccgcccccttatgcaagcgggcaatcagaactccgatcacccgcacgccggcacgccagtgtcgtcttcgcaaccatgaactccatcgagcctttcaaccggctggtgaggctggcggcccgcgccttctacgacgacgtctccatgaagggcgacaaccagcccaagacttcccgcggggacaaccgcggcatggccgtcgtcgtcctggacgcgctcaccagacgaccgtgggttcgggaggaagatttggctaaagcattgaagctccactcgaaacagctgcgtcgcattctccgtttctttgaagaggagaaactagtcacgagggatcatcgaaaggagtcagcaaaaaacgcaaaagcacataatgctgcagctgctaatgatggtcaaccaattgctaaggagggagaagagaaagtaaagctgcacacacattcatactgttgcttggattatgctcagatctgtgatgttgtaaggtaccggattcaccgcatgaagaaaaaattgaaggatgaattggacagcagaaatacaattcaacactatatatgtcctagctgcaataaaagatactcagccttcgatgcactacaactggtaagctacacggatgagtacttccattgtgaaacttgcaatggtgaactggttgcagagagtgacaagcttgcttctgaggaaatgggagatggcgatgacaatgttagaaagcgcaggcgtgagaaattaaaggacatgcagcaaagaatagaagttagtattcggtatctttggtactcttctaagttttagtgacaaaatttacgagctcaatccaaatattatggaaggaaacaaaaatgtcaggtattttcaggattccagcacaactgcttctgagaatagctggttgacgaagggaatacttttgtgcttgattgaggaagtcagtcaaacagtttggaagaaaacaagaacacatatatagctgcactgatgtaatattgtaaagctgacaggaacatccacctgtgacaagaatggagcaattgaagccattggttgcacaacttgatagagtgaagaatattcctgcaccagagtttgggagtctacaaacatgggaaagagcaaatattggtgcttttgcaattggtgaccctgctgcagctgattcttctaggaattcacaagggcagtatggtacaccaatgccatacattggagagacaaaggttgaagttgatctgttgagtgatggtgtgaaagaaggtgctgaatcaggtaaaactgattctgaactgaaagttttacctccatggatgatcaaggatggcatgaatcttactaaggaacaaagaggagagataattgcgccacaaaaacttgagaaatctgatgccggagatgacaagaagcatgacttgaaagatgatgattgttttcgctcagctcaggaatgaacacata

SEQ ID NO: 8456 - DNA, 979 bp, Zea Mays
atatctctcgctcgccctttccccttcgatgcaactggtgtggcggcggcggctgcgggcggcgtgatacggcaccccctcctcccgcccccttatgcaagcgggcaatcagaactccgatcacccgcacgccggcacgccagtgtcgtcttcgcaaccatgaactccatcgagcctttcaaccggctggtgaggctggcggcccgcgccttctacgacgacgtctccatgaagggcgacaaccagcccaagacttcccgcggggacaaccgcggcatggccgtcgtcgtcctggacgcgctcaccagacgaccgtgggttcgggaggaagatttggctaaagcattgaagctccactcgaaacagctgcgtcgcattctccgtttctttgaagaggagaaactagtcacgagggatcatcgaaaggagtcagcaaaaaacgcaaaagcacataatgctgcagctgctaatgatggtcaaccaattgctaaggagggagaagagaaagtaaagctgcacacacattcatactgttgcttggattatgctcaggagcaattgaagccattggttgcacaacttgatagagtgaagaatattcctgcaccagagtttgggagtctacaaacatgggaaagagcaaatattggtgcttttgcaattggtgaccctgctgcagctgattcttctaggaattcacaagggcagtatggtacaccaatgccatacattggagagacaaaggttgaagttgatctgttgagtgatggtgtgaaagaaggtgctgaatcaggtaaaactgattctgaactgaaagttttacctccatggatgatcaaggatggcatgaatcttactaaggaacaaagaggagagataattgcgccacaaaaacttgagaaatctgatgccggagatgacaagaagcatgacttgaaagatgatgattgttttcgctcagctcaggaatgaacacata

SEQ ID NO: 8457 - DNA, 1328 bp, Zea Mays
gagaaacccacaattaagagtgacaaaataggaaatttcccctccaaacagggtcatatctctcgctcgccctttccccttcgatgcaactggtgtggcggcggcggctgcgggcggcgtgatacggcaccccctcctcccgcccccttatgcaagcgggcaatcagaactccgatcacccgcacgccggcacgccagtgtcgtcttcgcaaccatgaactccatcgagcctttcaaccggctggtgaggctggcggcccgcgccttctacgacgacgtctccatgaagggcgacaaccagcccaagacttcccgcggggacaaccgcggcatggccgtcgtcgtcctggacgcgctcaccagacgaccgtgggttcgggaggaagatttggctaaagcattgaagctccactcgaaacagctgcgtcgcattctccgtttctttgaagaggagaaactagtcacgagggatcatcgaaaggagtcagcaaaaaacgcaaaagcacataatgctgcagctgctaatgatggtcaaccaattgctaaggagggagaagagaaagtaaagctgcacacacattcatactgttgcttggattatgctcagatctgtgatgttgtaaggtaccggattcaccgcatgaagaaaaaattgaaggatgaattggacagcagaaatacaattcaacactatatatgtcctagctgcaataaaagatactcagccttcgatgcactacaactggtaagctacacggatgagtacttccattgtgaaacttgcaatggtgaactggttgcagagagtgacaagcttgcttctgaggaaatgggagatggcgatgacaatgttagaaagcgcaggcgtgagaaattaaaggacatgcagcaaagaatagaagagcaattgaagccattggttgcacaacttgatagagtgaagaatattcctgcaccagagtttgggagtctacaaacatgggaaagagcaaatattggtgcttttgcaattggtgaccctgctgcagctgattcttctaggaattcacaagggcagtatggtacaccaatgccatacattggagagacaaaggttgaagttgatctgttgagtgatggtgtgaaagaaggtgctgaatcaggtaaaactgattctgaactgaaagttttacctccatggatgatcaaggatggcatgaatcttactaaggaacaaagaggagagataattgcgccacaaaaacttgagaaatctgatgccggagatgacaagaagcatgacttgaaagatgatgattgttttcgctcagctcaggaatgaacacata

SEQ ID NO: 8458 - DNA, 915 bp, Zea Mays
atatctctcgctcgccctttccccttcgatgcaactggtgtggcggcggcggctgcgggcggcgtgatacggcaccccctcctcccgcccccttatgcaagcgggcaatcagaactccgatcacccgcacgccggcacgccagtgtcgtcttcgcaaccatgaactccatcgagcctttcaaccggctggtgaggctggcggcccgcgccttctacgacgacgtctccatgaagggcgacaaccagcccaagacttcccgcggggacaaccgcggcatggccgtcgtcgtcctggacgcgctcaccagacgaccgtgggttcgggaggaagatttggctaaagcattgaagctccactcgaaacagctgcgtcgcattctccgtttctttgaagaggagaaactagtcacgagggatcatcgaaaggagtcagcaaaaaacgcaaaagcacataatgctgcagctgctaatgatggtcaaccaattgctaaggagggagaagagaaagtaaagctgcacacacattcatactgttgcttggattatgctcagatctgtgatgttgtaaggtaccggattcaccgcatgaagaaaaaattgaaggatgaattggacagcagaaatacaattcaacactatatatgtcctagctgcaataaaagatactcagccttcgatgcactacaactggtaagctacacggatgagtacttccattgtgaaacttgcaatggtgaactggttgcagagagtgacaagcttgcttctgaggaaatgggagatggcgatgacaatgttagaaagcgcaggcgtgagaaattaaaggacatgcagcaaagaatagaaattatacatagtctgtttgcccagagtcaagaaaaaaattgactgataccagtacaagtctttggtgag

SEQ ID NO: 8459 - DNA, 586 bp, Zea Mays
atatctctcgctcgccctttccccttcgatgcaactggtgtggcggcggcggctgcgggcggcgtgatacggcaccccctcctcccgcccccttatgcaagcgggcaatcagaactccgatcacccgcacgccggcacgccagtgtcgtcttcgcaaccatgaactccatcgagcctttcaaccggctggtgaggctggcggcccgcgccttctacgacgacgtctccatgaagggcgacaaccagcccaagacttcccgcggggacaaccgcggcatggccgtcgtcgtcctggacgcgctcaccagacgaccgtgggttcgggaggaagatttggctaaagcattgaagctccactcgaaacagctgcgtcgcattctccgtttctttgaagaggagaaactagtcacgagggatcatcgaaaggagtcagcaaaaaacgcaaaagcacataatgctgcagctgctaatgatggtcaaccaattgctaaggagggagaagagaaagtaaagctgcacacacattcatactgttgcttggattatgctcaggaagtattttttaaattttccctgtgcactgccg

SEQ ID NO: 8460 - DNA, 1900 bp, Zea Mays
gtctaagtttatcgttcgaattgaagaactaacgttagacaaaaaagttaggcaaagtatgataagttaggcagcgaaccaaacaggcttactattctctatagtttaaatgcctttcgaaacaaaaaaataaataaatactaaatatgtttaaaataacttgatatagagttatactttaatcttatgtattatctctttttattaaaaaaaatatggcgtatcctcgccatggatggcttcacgggcgcgcacgcttcttccttctcgtgtcatctccgcttgcgccgcccctagccccaccatcgtcctccccatgaagccgccggttgagccgccccctcttgtgtcgcctccatgtccgcgcagatatgcctcgctcgccaccccgccgtgttcctccccgagacaccgtggccagcctctagcccgcgctcttcctcgtcacggcgatgtcggcttcccggaccccttccggcttgcttccatgccttcgcttcggtttgttcgggcgcaggagaggctacacttcctctatgagtcgaggttggccgtcggcaagagctccgaagggttccaggcgctgcagcaatctacaccagggccagcttcgcgtctacttctgcacagatgagtgcggctaattgttccaagtttaagcttcacctctagtcatgggtaaagagaagtcacatttcaacattgtggttattggccatgtcgactctggcaagtcgaccaccactggccacctgatctacaagcttggaggcattgacaagtgtgtgatcgagaggttcgaaaagtaggctgctgaaattatcactactgttgaggccatttttcttgagctcatgatatgtgtataaacccaactaaaaactccatagagaaaagattgatgttaatattcaacatatagccgagaaaataatacattgcccactaatagctaaatgcacaatatataaatggatgcaatccatagattaataagatgatatccacataaacagattgtccatgcacaaacatagaaattacatatctaggtaccacaaccagatcatattgcattctagacacaactagcagcacaaaagatatgtaaataaaagattacttggtttatgtctaattttctgagtttatgttcatactaatgaagtatcaatactaatttgaatactgtagcagcatgcaacattttttctataaaagcataagtcatttgttcccaaattaaccatatatgtagaccatttgatgctttatgtctgattatgtatttgtatacatatttttaactatgtttttgttcttgtttggctgtgtgtgcatggttacatatgaagtaaataagttatgcttatttataggttcaggatcttcaggttgagcttgagaatgagaagcaagaaaaaacaaaactttgacaagtgttggataacttgaagacggaatcagaaacttcaagggtaaaacattatgaggaaatagaagttgtaaagatgacatcacaagaaatgcacgtcctcctttgttaaatgctaaaattcaaccagggccagcacaatctaaggccataaagtttctaagcccccaacagtgaattattctagtatgtttcttctttgaaaattggttgttggttgaactatgtcgggttgttctatcaatagttggttgctagtttttcacaagtaggacttagtggctccaagtttgttgatttttgttactagtagccttaagttttgttgaacaatgttgcttcttgctagatgtattgtgacctatgaattggaatttgtctgccacaattttggtcattggatatgtaaattttgtgaaatatgtcatgtgaacatttgtacggttgaatgaagccaaaaattgg

SEQ ID NO: 8461 - DNA, 1326 bp, Zea Mays
gtctaagtttatcgttcgaattgaagaactaacgttagacaaaaaagttaggcaaagtatgataagttaggcagcgaaccaaacaggcttactattctctatagtttaaatgcctttcgaaacaaaaaaataaataaatactaaatatgtttaaaataacttgatatagagttatactttaatcttatgtattatctctttttattaaaaaaaatatggcgtatcctcgccatggatggcttcacgggcgcgcacgcttcttccttctcgtgtcatctccgcttgcgccgcccctagccccaccatcgtcctccccatgaagccgccggttgagccgccccctcttgtgtcgcctccatgtccgcgcagatatgcctcgctcgccaccccgccgtgttcctccccgagacaccgtggccagcctctagcccgcgctcttcctcgtcacggcgatgtcggcttcccggaccccttccggcttgcttccatgccttcgcttcggtttgttcgggcgcaggagaggctacacttcctctatgagtcgaggttggccgtcggcaagagctccgaagggttccaggcgctgcagcaatctacaccagggccagcttcgcgtctacttctgcacagatgagtgcggctaattgttccaagtttaagcttcacctctagtcatgggtaaagagaagtcacatttcaacattgtggttattggccatgtcgactctggcaagtcgaccaccactggccacctgatctacaagcttggaggcattgacaagtgtgtgatcgagaggttcgaaaagttcaggatcttcaggttgagcttgagaatgagaagcaagaaaaaacaaaactttgacaagtgttggataacttgaagacggaatcagaaacttcaagggtaaaacattatgaggaaatagaagttgtaaagatgacatcacaagaaatgcacgtcctcctttgttaaatgctaaaattcaaccagggccagcacaatctaaggccataaagtttctaagcccccaacagtgaattattctagtatgtttcttctttgaaaattggttgttggttgaactatgtcgggttgttctatcaatagttggttgctagtttttcacaagtaggacttagtggctccaagtttgttgatttttgttactagtagccttaagttttgttgaacaatgttgcttcttgctagatgtattgtgacctatgaattggaatttgtctgccacaattttggtcattggatatgtaaattttgtgaaatatgtcatgtgaacatttgtacggttgaatgaagccaaaaattgg

SEQ ID NO: 8462 - DNA, 320 bp, Zea Mays
ttgaggtccatgccctgcatacacgttcagtggtacttgtccatatccagtgctcttcggttgggttcaataaagcttccccttgccctcaggttttagcttgagaccactgcgtaaatgctggaattcctgtgttcacgctagtactcacctctccccagtcaccaaacttggtctctcacagaaacttgcacgccatcttcctgtctgaggtgaccacgcccacccgttcttcacctcaccatggtcagggatcctcgacgggtttttggccgcgttgtgctggttccataatctccagagggtcggacgagggccag

SEQ ID NO: 8463 - DNA, 1386 bp, Zea Mays
gatttttatagtaaacctgaagagccatggttggggaacaaatttgttcaggaatgcttgagctatccttgtttggaatagagagaaaaaggtgttcgaactatgtctatcaggcatggaaatgcaaacctgaatcagtcactgtggatttggttcagtatttttctcctgactttggagctgtttagtgtttgatctaaggattataaggcttaaatctgtatggaagattgatagtgggttagttggtgaacaaggttccttaaggatcttcggtctatcaggcatggaaatgcaaacctgaatcagtcactgtggatttggttcagtatttttctcctgactttggagctgtttagtgtctgatctaaggattataaggcttaaatctgtatggaagattgatagtgggttagttggtgaacaaggttccttaaggtcggttcccctgttgttgcttggagctgggaaaaataaaggggtgaagttgtgagttcagtcaagcagtggcagttcaatagggatcaaaaatatctgcagtaaagatctacatccactaacgaatccagctgcttctatggcagttatggataggaataagctttgctgtgggagggtaagtaacatgggatatcccttgctgccgtggagtttttttatctgtatttacctctgtccatatccagtgaactagctagatatatttgggggtgggctgtgtgctgaattttggtagtctcaccccttcaaaaatatcaagttttggaccatagtgcatacccaagtgggggacgtatctactccctttcctatctgtttactgaacgaagggatggatattttggctctgtaaaatagactaaatgcagtgtatttgggctgtggttatgagcctgtgtggtatgggtgcatggaagccacgtaaaataggtcatacagtgatggcattcccatggttctcctacatcaggtctgagttgaggtccatgccctacctacacgttcagtggtacttgtccatatctagtgctcttcggttgggttcaataaagcttccccttgccctcaggttttagctcgagaccactgcgtaattgctggaattcctgtgttcacgctagtactcacctctccccagtcaccaaacttggtctctcacagaaacttgtacgccatcttcctgcctgaggtgaccacgcccacccgttcttcacctcaccatggccagggatcctcgacgggtttttcggctgcgttgtgctggttccataatctccagaggtcagtgatgctcactagagtccttttatttaatgctgtcgttgtttgttggccggaacaaggttgcgccactgtgtagtggtgccgaggacagccttcgcattg

SEQ ID NO: 8464 - DNA, 645 bp, Zea Mays
ttgaggtccatgccctgcatacacgttcagtggtacttgtccatatccagtgctcttcggttgggttcaataaagcttccccttgccctcaggttttagcttgagaccactgcgtaaatgctggaattcctgtgttcacgctagtactcacctctccccagtcaccaaacttggtctctcacagaaacttgcacgccatcttcctgtctgaggtgaccacgcccacccgttcttcacctcaccatggtcagggatcctcgacgggtttttggccgcgttgtgctggttccataatctccagaggtcagtgatgctcactagagtccttttttaatgctatcgttgtttgttggccggaacaaggttgcgccactgtgtagtggtgccgggtgttggggacttgttctcaaatgctatgaattaagaacaaggcaacataaaatgttaaatgttaatgcccttcgtccgctgaagcattatctccacaaggatttaatgagcttcggacaaaggccatgagcaaaatatcgcgaaggtcacaccttcgtgatcagatttgtaaaacaatataaagtaaaaaacataaaacatgaaacattatagaaagatatactaaaaataagtaacattattcacatattttat

SEQ ID NO: 8465 - DNA, 3273 bp, Zea Mays
gtctcaaccacccacgcctcatctagagttgacacgcgccatgtactggacgattggccgctggagacgacgcacgctcggccatggcgctcgctctcctatccccctccacgccatcccatcgtatactgcttcgtcctattccatttccatctctgccagtcgcgcgcgccactagtgccggtagcttcggcctcgcgttcttctgccccctctctcgcggttcctcctcgctgcagaggaccggcgcggcaggcggcgttattgatagtgccggagagggctcatcggaagaaccggtcgctggatggctcagcgcagacctgctcaggcggatatcaggcgcggcggacgcggaccgggtcctggacattgttgccgagtcagttgaaggcgcgggtgccgctctgggcgcgcccgagtgcaacgcgatcgtctccgccgcttttgaccgtggcaacatcgcgctcgctctctcggtcttcgaagccatgcggtccggtttcgcgggagttggaggctggaggtgggcaaggcctgatgtgaggacttatgcgttgcttgtacagcggttggcggccgccccgcgtgttgctgatgcaatcatgataattgattatgtgtctcgcgcaggtgcttcttctatggatgaggttcctttcggaatcattgttcgctgtccaacctgcatgatagcagttgctgttgtgcagcctcaggatggaactcaggttgtttcctgttcaaagtgtcgatatcaatatgaattattttctggagacattacgagtattgaatccgaagaagttagcatggatatttcagccctggagaaagccttgagatttattaatatgaggaaagatggtattccagctgctgtccactctattgtgatccgctcaccttcaggaacagcacgtacttacagatttgctacccagaatgtaactcttcctgctcaagaaggagaaagggttaccatttccttggcggccccagttaacgtttaccgtgacatgggacccctcaaggttgctgcgcgctcacaaggatttaaacctggagaacctatgtgtctcactaatcacatcaatgggcaagtctcgaagttgctaagagctccatcaaagaacaagggaacatttttccttagcccatatttattgcaactgccattgcatcagctgccataggaacaacactaaatggagtggtcctgccaaaaattcaaaagcttccagaaaaagcagtggatatagttgctgtacagcaaaagcttttgtctcagtatgatattcttcagagtcgtcttaaggaactgaaacagtttgctcaaaaagaggtgtggatgcttgcgcggatgtgtcagttggataacaagatagtagcagttggtgaaccatcttatcgtactagacgagatagagtaaagagggttcgggaaagcttggaaagcacactcctggcaaggattgagctaatggaaagttatgcaaaactgtgctcaatgatcgaaattgaagttgagatggactctgatgttatagctgctgaagcggcaagcagtgcagagagaatatctgagcagatacaacaattaatggagatcgatagtcttgaagagcaatggcgtatacaagctgaggctaatgatgaagcagaaaggcttcttagttcagattcctcagaaacatatcctgctggacgtgtaatgtaatataactctgttagtgcgcaggcattattctttattttctatttagttgtttatctctcttcaatttaaatgttctccctaccaaagtacaaacaaaacctctagttagacttgtcaaggaaaataatgccagaaaattagaaaaatagtggaacaacatgataatagatagatcatatcattactacacaaaatagagtgtcacattcgttaataatggcaggctaccactagagacaagtgcccgccgagataagtggttgtccgcgttaatggttaacagaggaggtcaagttaattaagaaaattgtcttatttttctgcacataaagaaataaggtcccgtttgtttcttttcattttgaggaattagaatcttactaatagaatatgctattttttaagaatgtgacatttcaccactttctaaagttatcatataagcttatctcaaattcatgagtgagagatgaaaattgattctatagatttgcatgctatttttccgatgtacaacttataacacattcttatacttgcttcgctataacataaatgtagtatataactacctctctcatataatttagaataatatacaaatatattacatatataaatatatgaatttaattagttttgtctaaataataattattaaaatggaatttaattccaacgaaataaacaggtcctaagtgaaattgttggaaatactaaggtcatgtttgtttacccttaattcgaagttgaattgagaggcatcccagttcatccctggtacatggcgactctggaaactctccttgtcgaatggtgtgttcaaggaagttgcctggtgctccagcccaaaatccattccaaagaggcttgatctcaagattttggaaccattgatgatattgctgcggagggtctgcgtctgcgctgttcattatccaatccaataatagtaacgtcagtaaatatcttcgatcggccaggagatcaaccgttccccccttcaacactccgtagaaggacgacggtgaccgaagtaaacagcgaagatgtcggcgatccagaagaacgacccttgctggcgtcccatttgaaggctgtgcggctgggcccgtgtcagcggaccacctcggttgcagcgggcgggtcgaccgggttgccggttcatgcgcagttaactaacagaggggcggattacttgtggggcatggacatcccgggtcatcaaggcatatgcttgcttaatgggtcgtctagaaggccccctgatcatttgattggtgagccaactggaatggagcggttccattccagtttctaagaattaagtcatttcattctgtgtttggtaagcagaatggaactgttccattttttgtttggttgaagaatagaatagagcagagccgctccgtttattgtttggttggagagccatatgactgttaagtagaggagaggaatgagagcgctcgtgtccgcgagagcgctcgcgtccgatcgttttggtggagtgagagcatcccaaatatttactatttatagactgcagg

SEQ ID NO: 8466 - DNA, 3284 bp, Zea Mays
gtctcaaccacccacgcctcatctagagttgacacgcgccatgtactggacgattggccgctggagacgacgcacgctcggccatggcgctcgctctcctatccccctccacgccatcccatcgtatactgcttcgtcctattccatttccatctctgccagtcgcgcgcgccactagtgccggtagcttcggcctcgcgttcttctgccccctctctcgcggttcctcctcgctgcagaggaccggcgcggcaggcggcgttattgatagtgccggagagggctcatcggaagaaccggtcgctggatggctcagcgcagacctgctcaggcggatatcaggcgcggcggacgcggaccgggtcctggacattgttgccgagtcagttgaaggcgcgggtgccgctctgggcgcgcccgagtgcaacgcgatcgtctccgccgcttttgaccgtggcaacatcgcgctcgctctctcggtcttcgaagccatgcggtccggtttcgcgggagttggaggctggaggtgggcaaggcctgatgtgaggacttatgcgttgcttgtacagcggttggcggccgccccgcgtgttgctgatgcaatcatgataattgattatgtgtctcgcgcaggtgcttcttctatggatgaggttcctttcggaatcattgttcgctgtccaacctgcatgatagcagttgctgttgtgcagcctcaggatggaactcaggttgtttcctgttcaaagtgtcgatatcaatatgaattattttctggagacattacgagtattgaatccgaagaagttagcatggatatttcagccctggagaaagccttgagatttattaatatgaggaaagatggtattccagctgctgtccactctattgtgatccgctcaccttcaggaacagcacgtacttacagatttgctacccagaatgtaactcttcctgctcaagaaggagaaagggttaccatttccttggcggccccagttaacgtttaccgtgacatgggacccctcaaggttgctgcgcgctcacaaggatttaaacctggagaacctatgtgtctcactaatcacatcaatgggcaagtctcgaagttgctaagagctccatcaaagaacaagggaacatttttccttagcccatatttattgacttgttacagcaactgccattgcatcagctgccataggaacaacactaaatggagtggtcctgccaaaaattcaaaagcttccagaaaaagcagtggatatagttgctgtacagcaaaagcttttgtctcagtatgatattcttcagagtcgtcttaaggaactgaaacagtttgctcaaaaagaggtgtggatgcttgcgcggatgtgtcagttggataacaagatagtagcagttggtgaaccatcttatcgtactagacgagatagagtaaagagggttcgggaaagcttggaaagcacactcctggcaaggattgagctaatggaaagttatgcaaaactgtgctcaatgatcgaaattgaagttgagatggactctgatgttatagctgctgaagcggcaagcagtgcagagagaatatctgagcagatacaacaattaatggagatcgatagtcttgaagagcaatggcgtatacaagctgaggctaatgatgaagcagaaaggcttcttagttcagattcctcagaaacatatcctgctggacgtgtaatgtaatataactctgttagtgcgcaggcattattctttattttctatttagttgtttatctctcttcaatttaaatgttctccctaccaaagtacaaacaaaacctctagttagacttgtcaaggaaaataatgccagaaaattagaaaaatagtggaacaacatgataatagatagatcatatcattactacacaaaatagagtgtcacattcgttaataatggcaggctaccactagagacaagtgcccgccgagataagtggttgtccgcgttaatggttaacagaggaggtcaagttaattaagaaaattgtcttatttttctgcacataaagaaataaggtcccgtttgtttcttttcattttgaggaattagaatcttactaatagaatatgctattttttaagaatgtgacatttcaccactttctaaagttatcatataagcttatctcaaattcatgagtgagagatgaaaattgattctatagatttgcatgctatttttccgatgtacaacttataacacattcttatacttgcttcgctataacataaatgtagtatataactacctctctcatataatttagaataatatacaaatatattacatatataaatatatgaatttaattagttttgtctaaataataattattaaaatggaatttaattccaacgaaataaacaggtcctaagtgaaattgttggaaatactaaggtcatgtttgtttacccttaattcgaagttgaattgagaggcatcccagttcatccctggtacatggcgactctggaaactctccttgtcgaatggtgtgttcaaggaagttgcctggtgctccagcccaaaatccattccaaagaggcttgatctcaagattttggaaccattgatgatattgctgcggagggtctgcgtctgcgctgttcattatccaatccaataatagtaacgtcagtaaatatcttcgatcggccaggagatcaaccgttccccccttcaacactccgtagaaggacgacggtgaccgaagtaaacagcgaagatgtcggcgatccagaagaacgacccttgctggcgtcccatttgaaggctgtgcggctgggcccgtgtcagcggaccacctcggttgcagcgggcgggtcgaccgggttgccggttcatgcgcagttaactaacagaggggcggattacttgtggggcatggacatcccgggtcatcaaggcatatgcttgcttaatgggtcgtctagaaggccccctgatcatttgattggtgagccaactggaatggagcggttccattccagtttctaagaattaagtcatttcattctgtgtttggtaagcagaatggaactgttccattttttgtttggttgaagaatagaatagagcagagccgctccgtttattgtttggttggagagccatatgactgttaagtagaggagaggaatgagagcgctcgtgtccgcgagagcgctcgcgtccgatcgttttggtggagtgagagcatcccaaatatttactatttatagactgcagg

SEQ ID NO: 8467 - DNA, 3264 bp, Zea Mays
gtctcaaccacccacgcctcatctagagttgacacgcgccatgtactggacgattggccgctggagacgacgcacgctcggccatggcgctcgctctcctatccccctccacgccatcccatcgtatactgcttcgtcctattccatttccatctctgccagtcgcgcgcgccactagtgccggtagcttcggcctcgcgttcttctgccccctctctcgcggttcctcctcgctgcagaggaccggcgcggcaggcggcgttattgatagtgccggagagggctcatcggaagaaccggtcgctggatggctcagcgcagacctgctcaggcggatatcaggcgcggcggacgcggaccgggtcctggacattgttgccgagtcagttgaaggcgcgggtgccgctctgggcgcgcccgagtgcaacgcgatcgtctccgccgcttttgaccgtggcaacatcgcgctcgctctctcggtcttcgaagccatgcggtccggtttcgcgggagttggaggctggaggtgggcaaggcctgatgtgaggacttatgcgttgcttgtacagcggttggcggccgccccgcgtgttgctgatgcaatcatgataattgattatgtgtctcgcgcaggtgcttcttctatggatgaggttcctttcggaatcattgttcgctgtccaacctgcatgatagcagttgctgttgtgcagcctcaggatggaactcaggttgtttcctgttcaaagtgtcgatatcaatatgaattattttctggagacattacgagtattgaatccgaagaagttagcatggatatttcagccctggagaaagccttgagatttattaatatgaggaaagatggtattccagctgctgtccactctattgtgatccgctcaccttcaggaacagcacgtacttacagatttgctacccagaatgtaactcttcctgctcaagaaggagaaagggttaccatttccttggcggccccagttaacgtttaccgtgacatgggacccctcaaggttgctgcgcgctcacaaggatttaaacctggagaacctatgtgtctcactaatcacatcaatgggcaagtctcgaagttgctaagagctccatcaaagaacaagggaacatttttccttagcccatatttattggtcggtgctcttgccttccttgcatctacagatgctgcttccgcattcattgacccaagtcttcctagacttgttacagcaactgccattgcatcagctgccataggaacaacactaaatggagtggtcctgccaaaaattcaaaagcttccagaaaaagcagtggatatagttgctgtacagcaaaagcttttgtctcagtatgatattcttcagagtcgtcttaaggaactgaaacagtttgctcaaaaagaggtgtggatgcttgcgcggatgtgtcagttggataacaagatagtagcagttggtgaaccatcttatcgctgtgctcaatgatcgaaattgaagttgagatggactctgatgttatagctgctgaagcggcaagcagtgcagagagaatatctgagcagatacaacaattaatggagatcgatagtcttgaagagcaatggcgtatacaagctgaggctaatgatgaagcagaaaggcttcttagttcagattcctcagaaacatatcctgctggacgtgtaatgtaatataactctgttagtgcgcaggcattattctttattttctatttagttgtttatctctcttcaatttaaatgttctccctaccaaagtacaaacaaaacctctagttagacttgtcaaggaaaataatgccagaaaattagaaaaatagtggaacaacatgataatagatagatcatatcattactacacaaaatagagtgtcacattcgttaataatggcaggctaccactagagacaagtgcccgccgagataagtggttgtccgcgttaatggttaacagaggaggtcaagttaattaagaaaattgtcttatttttctgcacataaagaaataaggtcccgtttgtttcttttcattttgaggaattagaatcttactaatagaatatgctattttttaagaatgtgacatttcaccactttctaaagttatcatataagcttatctcaaattcatgagtgagagatgaaaattgattctatagatttgcatgctatttttccgatgtacaacttataacacattcttatacttgcttcgctataacataaatgtagtatataactacctctctcatataatttagaataatatacaaatatattacatatataaatatatgaatttaattagttttgtctaaataataattattaaaatggaatttaattccaacgaaataaacaggtcctaagtgaaattgttggaaatactaaggtcatgtttgtttacccttaattcgaagttgaattgagaggcatcccagttcatccctggtacatggcgactctggaaactctccttgtcgaatggtgtgttcaaggaagttgcctggtgctccagcccaaaatccattccaaagaggcttgatctcaagattttggaaccattgatgatattgctgcggagggtctgcgtctgcgctgttcattatccaatccaataatagtaacgtcagtaaatatcttcgatcggccaggagatcaaccgttccccccttcaacactccgtagaaggacgacggtgaccgaagtaaacagcgaagatgtcggcgatccagaagaacgacccttgctggcgtcccatttgaaggctgtgcggctgggcccgtgtcagcggaccacctcggttgcagcgggcgggtcgaccgggttgccggttcatgcgcagttaactaacagaggggcggattacttgtggggcatggacatcccgggtcatcaaggcatatgcttgcttaatgggtcgtctagaaggccccctgatcatttgattggtgagccaactggaatggagcggttccattccagtttctaagaattaagtcatttcattctgtgtttggtaagcagaatggaactgttccattttttgtttggttgaagaatagaatagagcagagccgctccgtttattgtttggttggagagccatatgactgttaagtagaggagaggaatgagagcgctcgtgtccgcgagagcgctcgcgtccgatcgttttggtggagtgagagcatcccaaatatttactatttatagactgcagg

SEQ ID NO: 8468 - DNA, 3345 bp, Zea Mays
gtctcaaccacccacgcctcatctagagttgacacgcgccatgtactggacgattggccgctggagacgacgcacgctcggccatggcgctcgctctcctatccccctccacgccatcccatcgtatactgcttcgtcctattccatttccatctctgccagtcgcgcgcgccactagtgccggtagcttcggcctcgcgttcttctgccccctctctcgcggttcctcctcgctgcagaggaccggcgcggcaggcggcgttattgatagtgccggagagggctcatcggaagaaccggtcgctggatggctcagcgcagacctgctcaggcggatatcaggcgcggcggacgcggaccgggtcctggacattgttgccgagtcagttgaaggcgcgggtgccgctctgggcgcgcccgagtgcaacgcgatcgtctccgccgcttttgaccgtggcaacatcgcgctcgctctctcggtcttcgaagccatgcggtccggtttcgcgggagttggaggctggaggtgggcaaggcctgatgtgaggacttatgcgttgcttgtacagcggttggcggccgccccgcgtgttgctgatgcaatcatgataattgattatgtgtctcgcgcaggtgcttcttctatggatgaggttcctttcggaatcattgttcgctgtccaacctgcatgatagcagttgctgttgtgcagcctcaggatggaactcaggttgtttcctgttcaaagtgtcgatatcaatatgaattattttctggagacattacgagtattgaatccgaagaagttagcatggatatttcagccctggagaaagccttgagatttattaatatgaggaaagatggtattccagctgctgtccactctattgtgatccgctcaccttcaggaacagcacgtacttacagatttgctacccagaatgtaactcttcctgctcaagaaggagaaagggttaccatttccttggcggccccagttaacgtttaccgtgacatgggacccctcaaggttgctgcgcgctcacaaggatttaaacctggagaacctatgtgtctcactaatcacatcaatgggcaagtctcgaagttgctaagagctccatcaaagaacaagggaacatttttccttagcccatatttattggtcggtgctcttgccttccttgcatctacagatgctgcttccgcattcattgacccaagtcttcctagacttgttacagcaactgccattgcatcagctgccataggaacaacactaaatggagtggtcctgccaaaaattcaaaagaaaaagcagtggatatagttgctgtacagcaaaagcttttgtctcagtatgatattcttcagagtcgtcttaaggaactgaaacagtttgctcaaaaagaggtgtggatgcttgcgcggatgtgtcagttggataacaagatagtagcagttggtgaaccatcttatcgtactagacgagatagagtaaagagggttcgggaaagcttggaaagcacactcctggcaaggattgagctaatggaaagttatgcaaaactgtgctcaatgatcgaaattgaagttgagatggactctgatgttatagctgctgaagcggcaagcagtgcagagagaatatctgagcagatacaacaattaatggagatcgatagtcttgaagagcaatggcgtatacaagctgaggctaatgatgaagcagaaaggcttcttagttcagattcctcagaaacatatcctgctggacgtgtaatgtaatataactctgttagtgcgcaggcattattctttattttctatttagttgtttatctctcttcaatttaaatgttctccctaccaaagtacaaacaaaacctctagttagacttgtcaaggaaaataatgccagaaaattagaaaaatagtggaacaacatgataatagatagatcatatcattactacacaaaatagagtgtcacattcgttaataatggcaggctaccactagagacaagtgcccgccgagataagtggttgtccgcgttaatggttaacagaggaggtcaagttaattaagaaaattgtcttatttttctgcacataaagaaataaggtcccgtttgtttcttttcattttgaggaattagaatcttactaatagaatatgctattttttaagaatgtgacatttcaccactttctaaagttatcatataagcttatctcaaattcatgagtgagagatgaaaattgattctatagatttgcatgctatttttccgatgtacaacttataacacattcttatacttgcttcgctataacataaatgtagtatataactacctctctcatataatttagaataatatacaaatatattacatatataaatatatgaatttaattagttttgtctaaataataattattaaaatggaatttaattccaacgaaataaacaggtcctaagtgaaattgttggaaatactaaggtcatgtttgtttacccttaattcgaagttgaattgagaggcatcccagttcatccctggtacatggcgactctggaaactctccttgtcgaatggtgtgttcaaggaagttgcctggtgctccagcccaaaatccattccaaagaggcttgatctcaagattttggaaccattgatgatattgctgcggagggtctgcgtctgcgctgttcattatccaatccaataatagtaacgtcagtaaatatcttcgatcggccaggagatcaaccgttccccccttcaacactccgtagaaggacgacggtgaccgaagtaaacagcgaagatgtcggcgatccagaagaacgacccttgctggcgtcccatttgaaggctgtgcggctgggcccgtgtcagcggaccacctcggttgcagcgggcgggtcgaccgggttgccggttcatgcgcagttaactaacagaggggcggattacttgtggggcatggacatcccgggtcatcaaggcatatgcttgcttaatgggtcgtctagaaggccccctgatcatttgattggtgagccaactggaatggagcggttccattccagtttctaagaattaagtcatttcattctgtgtttggtaagcagaatggaactgttccattttttgtttggttgaagaatagaatagagcagagccgctccgtttattgtttggttggagagccatatgactgttaagtagaggagaggaatgagagcgctcgtgtccgcgagagcgctcgcgtccgatcgttttggtggagtgagagcatcccaaatatttactatttatagactgcagg

SEQ ID NO: 8469 - DNA, 3205 bp, Zea Mays
gtctcaaccacccacgcctcatctagagttgacacgcgccatgtactggacgattggccgctggagacgacgcacgctcggccatggcgctcgctctcctatccccctccacgccatcccatcgtatactgcttcgtcctattccatttccatctctgccagtcgcgcgcgccactagtgccggtagcttcggcctcgcgttcttctgccccctctctcgcggttcctcctcgctgcagaggaccggcgcggcaggcggcgttattgatagtgccggagagggctcatcggaagaaccggtcgctggatggctcagcgcagacctgctcaggcggatatcaggcgcggcggacgcggaccgggtcctggacattgttgccgagtcagttgaaggcgcgggtgccgctctgggcgcgcccgagtgcaacgcgatcgtctccgccgcttttgaccgtggcaacatcgcgctcgctctctcggtcttcgaagccatgcggtccggtttcgcgggagttggaggctggaggtgggcaaggcctgatgtgaggacttatgcgttgcttgtacagcggttggcggccgccccgcgtgttgctgatgcaatcatgataattgattatgtgtctcgcgcaggtgcttcttctatggatgaggttcctttcggaatcattgttcgctgtccaacctgcatgatagcagttgctgttgtgcagcctcaggatggaactcaggttgtttcctgttcaaagtgtcgatatcaatatgaattattttctggagacattacgagtattgaatccgaagaagttagcatggatatttcagccctggagaaagccttgagatttattaatatgaggaaagatggtattccagctgctgtccactctattgtgatccgctcaccttcaggaacagcacgtacttacagatttgctacccagaatgtaactcttcctgctcaagaaggagaaagggttaccatttccttggcggccccagttaacgtttaccgtgacatgggacccctcaaggttgctgcgcgctcacaaggatttaaacctggagaacctatgtgtctcactaatcacatcaatgggcaagtctcgaagttgctaagagctccatcaaagaacaagggaacatttttccttagcccatatttattgcttccagaaaaagcagtggatatagttgctgtacagcaaaagcttttgtctcagtatgatattcttcagagtcgtcttaaggaactgaaacagtttgctcaaaaagaggtgtggatgcttgcgcggatgtgtcagttggataacaagatagtagcagttggtgaaccatcttatcgtactagacgagatagagtaaagagggttcgggaaagcttggaaagcacactcctggcaaggattgagctaatggaaagttatgcaaaactgtgctcaatgatcgaaattgaagttgagatggactctgatgttatagctgctgaagcggcaagcagtgcagagagaatatctgagcagatacaacaattaatggagatcgatagtcttgaagagcaatggcgtatacaagctgaggctaatgatgaagcagaaaggcttcttagttcagattcctcagaaacatatcctgctggacgtgtaatgtaatataactctgttagtgcgcaggcattattctttattttctatttagttgtttatctctcttcaatttaaatgttctccctaccaaagtacaaacaaaacctctagttagacttgtcaaggaaaataatgccagaaaattagaaaaatagtggaacaacatgataatagatagatcatatcattactacacaaaatagagtgtcacattcgttaataatggcaggctaccactagagacaagtgcccgccgagataagtggttgtccgcgttaatggttaacagaggaggtcaagttaattaagaaaattgtcttatttttctgcacataaagaaataaggtcccgtttgtttcttttcattttgaggaattagaatcttactaatagaatatgctattttttaagaatgtgacatttcaccactttctaaagttatcatataagcttatctcaaattcatgagtgagagatgaaaattgattctatagatttgcatgctatttttccgatgtacaacttataacacattcttatacttgcttcgctataacataaatgtagtatataactacctctctcatataatttagaataatatacaaatatattacatatataaatatatgaatttaattagttttgtctaaataataattattaaaatggaatttaattccaacgaaataaacaggtcctaagtgaaattgttggaaatactaaggtcatgtttgtttacccttaattcgaagttgaattgagaggcatcccagttcatccctggtacatggcgactctggaaactctccttgtcgaatggtgtgttcaaggaagttgcctggtgctccagcccaaaatccattccaaagaggcttgatctcaagattttggaaccattgatgatattgctgcggagggtctgcgtctgcgctgttcattatccaatccaataatagtaacgtcagtaaatatcttcgatcggccaggagatcaaccgttccccccttcaacactccgtagaaggacgacggtgaccgaagtaaacagcgaagatgtcggcgatccagaagaacgacccttgctggcgtcccatttgaaggctgtgcggctgggcccgtgtcagcggaccacctcggttgcagcgggcgggtcgaccgggttgccggttcatgcgcagttaactaacagaggggcggattacttgtggggcatggacatcccgggtcatcaaggcatatgcttgcttaatgggtcgtctagaaggccccctgatcatttgattggtgagccaactggaatggagcggttccattccagtttctaagaattaagtcatttcattctgtgtttggtaagcagaatggaactgttccattttttgtttggttgaagaatagaatagagcagagccgctccgtttattgtttggttggagagccatatgactgttaagtagaggagaggaatgagagcgctcgtgtccgcgagagcgctcgcgtccgatcgttttggtggagtgagagcatcccaaatatttactatttatagactgcagg

SEQ ID NO: 8470 - DNA, 3253 bp, Zea Mays
gtctcaaccacccacgcctcatctagagttgacacgcgccatgtactggacgattggccgctggagacgacgcacgctcggccatggcgctcgctctcctatccccctccacgccatcccatcgtatactgcttcgtcctattccatttccatctctgccagtcgcgcgcgccactagtgccggtagcttcggcctcgcgttcttctgccccctctctcgcggttcctcctcgctgcagaggaccggcgcggcaggcggcgttattgatagtgccggagagggctcatcggaagaaccggtcgctggatggctcagcgcagacctgctcaggcggatatcaggcgcggcggacgcggaccgggtcctggacattgttgccgagtcagttgaaggcgcgggtgccgctctgggcgcgcccgagtgcaacgcgatcgtctccgccgcttttgaccgtggcaacatcgcgctcgctctctcggtcttcgaagccatgcggtccggtttcgcgggagttggaggctggaggtgggcaaggcctgatgtgaggacttatgcgttgcttgtacagcggttggcggccgccccgcgtgttgctgatgcaatcatgataattgattatgtgtctcgcgcaggttcctttcggaatcattgttcgctgtccaacctgcatgatagcagttgctgttgtgcagcctcaggatggaactcaggttgtttcctgttcaaagtgtcgatatcaatatgaattattttctggagacattacgagtattgaatccgaagaagttagcatggatatttcagccctggagaaagccttgagatttattaatatgaggaaagatggtattccagctgctgtccactctattgtgatccgctcaccttcaggaacagcacgtacttacagatttgctacccagaatgtaactcttcctgctcaagaaggagaaagggttaccatttccttggcggccccagttaacgtttaccgtgacatgggacccctcaaggttgctgcgcgctcacaaggatttaaacctggagaacctatgtgtctcactaatcacatcaatgggcaagtctcgaagttgctaagagctccatcaaagaacaagggaacatttttccttagcccatatttattgcaactgccattgcatcagctgccataggaacaacactaaatggagtggtcctgccaaaaattcaaaagcttccagaaaaagcagtggatatagttgctgtacagcaaaagcttttgtctcagtatgatattcttcagagtcgtcttaaggaactgaaacagtttgctcaaaaagaggtgtggatgcttgcgcggatgtgtcagttggataacaagatagtagcagttggtgaaccatcttatcgtactagacgagatagagtaaagagggttcgggaaagcttggaaagcacactcctggcaaggattgagctaatggaaagttatgcaaaactgtgctcaatgatcgaaattgaagttgagatggactctgatgttatagctgctgaagcggcaagcagtgcagagagaatatctgagcagatacaacaattaatggagatcgatagtcttgaagagcaatggcgtatacaagctgaggctaatgatgaagcagaaaggcttcttagttcagattcctcagaaacatatcctgctggacgtgtaatgtaatataactctgttagtgcgcaggcattattctttattttctatttagttgtttatctctcttcaatttaaatgttctccctaccaaagtacaaacaaaacctctagttagacttgtcaaggaaaataatgccagaaaattagaaaaatagtggaacaacatgataatagatagatcatatcattactacacaaaatagagtgtcacattcgttaataatggcaggctaccactagagacaagtgcccgccgagataagtggttgtccgcgttaatggttaacagaggaggtcaagttaattaagaaaattgtcttatttttctgcacataaagaaataaggtcccgtttgtttcttttcattttgaggaattagaatcttactaatagaatatgctattttttaagaatgtgacatttcaccactttctaaagttatcatataagcttatctcaaattcatgagtgagagatgaaaattgattctatagatttgcatgctatttttccgatgtacaacttataacacattcttatacttgcttcgctataacataaatgtagtatataactacctctctcatataatttagaataatatacaaatatattacatatataaatatatgaatttaattagttttgtctaaataataattattaaaatggaatttaattccaacgaaataaacaggtcctaagtgaaattgttggaaatactaaggtcatgtttgtttacccttaattcgaagttgaattgagaggcatcccagttcatccctggtacatggcgactctggaaactctccttgtcgaatggtgtgttcaaggaagttgcctggtgctccagcccaaaatccattccaaagaggcttgatctcaagattttggaaccattgatgatattgctgcggagggtctgcgtctgcgctgttcattatccaatccaataatagtaacgtcagtaaatatcttcgatcggccaggagatcaaccgttccccccttcaacactccgtagaaggacgacggtgaccgaagtaaacagcgaagatgtcggcgatccagaagaacgacccttgctggcgtcccatttgaaggctgtgcggctgggcccgtgtcagcggaccacctcggttgcagcgggcgggtcgaccgggttgccggttcatgcgcagttaactaacagaggggcggattacttgtggggcatggacatcccgggtcatcaaggcatatgcttgcttaatgggtcgtctagaaggccccctgatcatttgattggtgagccaactggaatggagcggttccattccagtttctaagaattaagtcatttcattctgtgtttggtaagcagaatggaactgttccattttttgtttggttgaagaatagaatagagcagagccgctccgtttattgtttggttggagagccatatgactgttaagtagaggagaggaatgagagcgctcgtgtccgcgagagcgctcgcgtccgatcgttttggtggagtgagagcatcccaaatatttactatttatagactgcagg

SEQ ID NO: 8471 - DNA, 3323 bp, Zea Mays
gtctcaaccacccacgcctcatctagagttgacacgcgccatgtactggacgattggccgctggagacgacgcacgctcggccatggcgctcgctctcctatccccctccacgccatcccatcgtatactgcttcgtcctattccatttccatctctgccagtcgcgcgcgccactagtgccggtagcttcggcctcgcgttcttctgccccctctctcgcggttcctcctcgctgcagaggaccggcgcggcaggcggcgttattgatagtgccggagagggctcatcggaagaaccggtcgctggatggctcagcgcagacctgctcaggcggatatcaggcgcggcggacgcggaccgggtcctggacattgttgccgagtcagttgaaggcgcgggtgccgctctgggcgcgcccgagtgcaacgcgatcgtctccgccgcttttgaccgtggcaacatcgcgctcgctctctcggtcttcgaagccatgcggtccggtttcgcgggagttggaggctggaggtgggcaaggcctgatgtgaggacttatgcgttgcttgtacagcggttggcggccgccccgcgtgttgctgatgcaatcatgataattgattatgtgtctcgcgcaggtgcttcttctatggatgaggttcctttcggaatcattgttcgctgtccaacctgcatgatagcagttgctgttgtgcagcctcaggatggaactcaggttgtttcctgttcaaagtgtcgatatcaatatgaattattttctggagacattacgagtattgaatccgaagaagttagcatggatatttcagccctggagaaagccttgagatttattaatatgaggaaagatgatccgctcaccttcaggaacagcacgtacttacagatttgctacccagaatgtaactcttcctgctcaagaaggagaaagggttaccatttccttggcggccccagttaacgtttaccgtgacatgggacccctcaaggttgctgcgcgctcacaaggatttaaacctggagaacctatgtgtctcactaatcacatcaatgggcaagtctcgaagttgctaagagctccatcaaagaacaagggaacatttttccttagcccatatttattggtcggtgctcttgccttccttgcatctacagatgctgcttccgcattcattgacccaagtcttcctagacttgttacagcaactgccattgcatcagctgccataggaacaacactaaatggagtggtcctgccaaaaattcaaaagcttccagaaaaagcagtggatatagttgctgtacagcaaaagcttttgtctcagtatgatattcttcagagtcgtcttaaggaactgaaacagtttgctcaaaaagaggtgtggatgcttgcgcggatgtgtcagttggataacaagatagtagcagttggtgaaccatcttatcgtactagacgagatagagtaaagagggttcgggaaagcttggaaagcacactcctggcaaggattgagctaatggaaagttatgcaaaactgtgctcaatgatcgaaattgaagttgagatggactctgatgttatagctgctgaagcggcaagcagtgcagagagaatatctgagcagatacaacaattaatggagatcgatagtcttgaagagcaatggcgtatacaagctgaggctaatgatgaagcagaaaggcttcttagttcagattcctcagaaacatatcctgctggacgtgtaatgtaatataactctgttagtgcgcaggcattattctttattttctatttagttgtttatctctcttcaatttaaatgttctccctaccaaagtacaaacaaaacctctagttagacttgtcaaggaaaataatgccagaaaattagaaaaatagtggaacaacatgataatagatagatcatatcattactacacaaaatagagtgtcacattcgttaataatggcaggctaccactagagacaagtgcccgccgagataagtggttgtccgcgttaatggttaacagaggaggtcaagttaattaagaaaattgtcttatttttctgcacataaagaaataaggtcccgtttgtttcttttcattttgaggaattagaatcttactaatagaatatgctattttttaagaatgtgacatttcaccactttctaaagttatcatataagcttatctcaaattcatgagtgagagatgaaaattgattctatagatttgcatgctatttttccgatgtacaacttataacacattcttatacttgcttcgctataacataaatgtagtatataactacctctctcatataatttagaataatatacaaatatattacatatataaatatatgaatttaattagttttgtctaaataataattattaaaatggaatttaattccaacgaaataaacaggtcctaagtgaaattgttggaaatactaaggtcatgtttgtttacccttaattcgaagttgaattgagaggcatcccagttcatccctggtacatggcgactctggaaactctccttgtcgaatggtgtgttcaaggaagttgcctggtgctccagcccaaaatccattccaaagaggcttgatctcaagattttggaaccattgatgatattgctgcggagggtctgcgtctgcgctgttcattatccaatccaataatagtaacgtcagtaaatatcttcgatcggccaggagatcaaccgttccccccttcaacactccgtagaaggacgacggtgaccgaagtaaacagcgaagatgtcggcgatccagaagaacgacccttgctggcgtcccatttgaaggctgtgcggctgggcccgtgtcagcggaccacctcggttgcagcgggcgggtcgaccgggttgccggttcatgcgcagttaactaacagaggggcggattacttgtggggcatggacatcccgggtcatcaaggcatatgcttgcttaatgggtcgtctagaaggccccctgatcatttgattggtgagccaactggaatggagcggttccattccagtttctaagaattaagtcatttcattctgtgtttggtaagcagaatggaactgttccattttttgtttggttgaagaatagaatagagcagagccgctccgtttattgtttggttggagagccatatgactgttaagtagaggagaggaatgagagcgctcgtgtccgcgagagcgctcgcgtccgatcgttttggtggagtgagagcatcccaaatatttactatttatagactgcagg

SEQ ID NO: 8472 - DNA, 3272 bp, Zea Mays
gtctcaaccacccacgcctcatctagagttgacacgcgccatgtactggacgattggccgctggagacgacgcacgctcggccatggcgctcgctctcctatccccctccacgccatcccatcgtatactgcttcgtcctattccatttccatctctgccagtcgcgcgcgccactagtgccggtagcttcggcctcgcgttcttctgccccctctctcgcggttcctcctcgctgcagaggaccggcgcggcaggcggcgttattgatagtgccggagagggctcatcggaagaaccggtcgctggatggctcagcgcagacctgctcaggcggatatcaggcgcggcggacgcggaccgggtcctggacattgttgccgagtcagttgaaggcgcgggtgccgctctgggcgcgcccgagtgcaacgcgatcgtctccgccgcttttgaccgtggcaacatcgcgctcgctctctcggtcttcgaagccatgcggtccggtttcgcgggagttggaggctggaggtgggcaaggcctgatgtgaggacttatgcgttgcttgtacagcggttggcggccgccccgcgtgttgctgatgcaatcatgataattgattatgtgtctcgcgcaggtgcttcttctatggatgaggttcctttcggaatcattgttcgctgtccaacctgcatgatagcagttgctgttgtgcagcctcaggatggaactcagcatggatatttcagccctggagaaagccttgagatttattaatatgaggaaagatggtattccagctgctgtccactctattgtgatccgctcaccttcaggaacagcacgtacttacagatttgctacccagaatgtaactcttcctgctcaagaaggagaaagggttaccatttccttggcggccccagttaacgtttaccgtgacatgggacccctcaaggttgctgcgcgctcacaaggatttaaacctggagaacctatgtgtctcactaatcacatcaatgggcaagtctcgaagttgctaagagctccatcaaagaacaagggaacatttttccttagcccatatttattggtcggtgctcttgccttccttgcatctacagatgctgcttccgcattcattgacccaagtcttcctagacttgttacagcaactgccattgcatcagctgccataggaacaacactaaatggagtggtcctgccaaaaattcaaaagcttccagaaaaagcagtggatatagttgctgtacagcaaaagcttttgtctcagtatgatattcttcagagtcgtcttaaggaactgaaacagtttgctcaaaaagaggtgtggatgcttgcgcggatgtgtcagttggataacaagatagtagcagttggtgaaccatcttatcgtactagacgagatagagtaaagagggttcgggaaagcttggaaagcacactcctggcaaggattgagctaatggaaagttatgcaaaactgtgctcaatgatcgaaattgaagttgagatggactctgatgttatagctgctgaagcggcaagcagtgcagagagaatatctgagcagatacaacaattaatggagatcgatagtcttgaagagcaatggcgtatacaagctgaggctaatgatgaagcagaaaggcttcttagttcagattcctcagaaacatatcctgctggacgtgtaatgtaatataactctgttagtgcgcaggcattattctttattttctatttagttgtttatctctcttcaatttaaatgttctccctaccaaagtacaaacaaaacctctagttagacttgtcaaggaaaataatgccagaaaattagaaaaatagtggaacaacatgataatagatagatcatatcattactacacaaaatagagtgtcacattcgttaataatggcaggctaccactagagacaagtgcccgccgagataagtggttgtccgcgttaatggttaacagaggaggtcaagttaattaagaaaattgtcttatttttctgcacataaagaaataaggtcccgtttgtttcttttcattttgaggaattagaatcttactaatagaatatgctattttttaagaatgtgacatttcaccactttctaaagttatcatataagcttatctcaaattcatgagtgagagatgaaaattgattctatagatttgcatgctatttttccgatgtacaacttataacacattcttatacttgcttcgctataacataaatgtagtatataactacctctctcatataatttagaataatatacaaatatattacatatataaatatatgaatttaattagttttgtctaaataataattattaaaatggaatttaattccaacgaaataaacaggtcctaagtgaaattgttggaaatactaaggtcatgtttgtttacccttaattcgaagttgaattgagaggcatcccagttcatccctggtacatggcgactctggaaactctccttgtcgaatggtgtgttcaaggaagttgcctggtgctccagcccaaaatccattccaaagaggcttgatctcaagattttggaaccattgatgatattgctgcggagggtctgcgtctgcgctgttcattatccaatccaataatagtaacgtcagtaaatatcttcgatcggccaggagatcaaccgttccccccttcaacactccgtagaaggacgacggtgaccgaagtaaacagcgaagatgtcggcgatccagaagaacgacccttgctggcgtcccatttgaaggctgtgcggctgggcccgtgtcagcggaccacctcggttgcagcgggcgggtcgaccgggttgccggttcatgcgcagttaactaacagaggggcggattacttgtggggcatggacatcccgggtcatcaaggcatatgcttgcttaatgggtcgtctagaaggccccctgatcatttgattggtgagccaactggaatggagcggttccattccagtttctaagaattaagtcatttcattctgtgtttggtaagcagaatggaactgttccattttttgtttggttgaagaatagaatagagcagagccgctccgtttattgtttggttggagagccatatgactgttaagtagaggagaggaatgagagcgctcgtgtccgcgagagcgctcgcgtccgatcgttttggtggagtgagagcatcccaaatatttactatttatagactgcagg

SEQ ID NO: 8473 - DNA, 1938 bp, Zea Mays
cgccgtccatctgctatactgccacacacccagtcgccagcgccatccatctgccgtgcacccagccacccaccgttgattatgtccaccagcatcattggccgacggcgcctgacttgatatgccaggacggctctgccctctgctatccttctatggctctatctttctggtctgtggctttgtgcatgcttcagtagtttagtgcttgactgcttcaataggcggacatgacaagtgatgagcagtaaccaataaaaacaactaaaacaggttgtcctcaggcaactgaatatgatcccatggcagatccaaaattaagtggttggaagtatgggtattgggatgtcattgaaaatcgagattgggtgtggtgctctttatgtaagaaaaggatatctggtgggattaagagatacaaggaacatcttgcaggatgatacagtgatgtggtaaagtgtaacagaactactgagctatcatgaagaagatggatgctgctttgaagaaaaataagaggggccagcccattccggtagatgagcatgaagctacaaatgatgtgagatggagggggatcagaggagcaagagcaagcctgtggcaagttcagggacagcagctaaaataaggcaaagtgctttgtctttcaaggttacagatcatagatcaattagtaccaagatgcggatgacaccacatgaggttgtagagcaaagacactcaaatggaccttctcaaacaagcatccaatcttatatgagaaagaaaaaacaaagagttgttaatcttgagatagtcaggttgttttatgagtgtggaattcccttcaatgttgcaaactcatgacaattggagagctgtggaagcaattgcacaatatggttcagggttcaagcctcctagttatcatgagttgcgagagcttttgcttgacaaggttaagaagattgacaatgacaaggccaagcatgacgtagcatggaagaggcatatcaagaaaagaaaccggctgttacaccagaagttgaatgacttggtatatgtgtcctacaataagaagatggccactagatttcaaaagaggcgtgagaaggggaccaaaggccatgatggcattgcatgggatcattttgacgatgctattggtgcatcaacttatcttcaaggttgtaacctccctaagaaagctcatggtcaacaattgtactacacaaggagggtgcaacaagtggaggataaagttgacacagagaagaggaagatgattcaagtatgggagaaggggatgataatgagatagtgaatggtgatgaagatgttgatagtcaagacgaagatcccttcgacaaagaagatggtggtaaagatttccttatcaatacaaacaatgacttgttggataaataaatttgcatagttggaggacttaagggttgagaatttgaaattaatgttgtcatgtgtttgtggacttgttagtttgtgaactatgcattagagtgcactggtgcaaaactctattattttgtgaactatgctatgcattaggaccaatttcctatatcaactatatgatctatctacctataatctacccattatgacctttatcatctatttattatattgtttttctatgcttttattcgtcttatatgtttatgaagtcaccttacgccttaggtgcttaaaggataaaaaggttctagaccgtcatagatcgccttaccgccataacaaccatgattaatgctataatttggattctttgaccttttgttgtgttcccctttttttctcagtgaaatatgtgcaatgcatgttcttgttaattttgagaagagcattgatgtactactacttttatttcaactactcgtcaaagagaaatattttacaggcatcactctgatggagtctgttaggaaggtcttt

SEQ ID NO: 8474 - DNA, 921 bp, Zea Mays
gatcaactatcgaccttggagctcctccgtcaggaaactgcaagtacatttgtgaaactctgtgagaaaagattgttctacacaaagagaacagaaaccttgactgtcaaactacaggagcaacaggaatggtttagtatgaagaataagattactagacaggagccacatgttgccaaatctcagagcaagcaaaacttcattgaaggggagaaacatgtcatatttaactcagaagggagcctggataagtttgaaagtgatgctcagaacaagcccgggaaactctacacacaactggtgtcagctcagctcaagatccaagacatcaaatcacaaagatcagcgcttcttttagaaatcagcagaatcaagcagattctggagcaagagaaaaacataattcctggttttcccgctgcactacagcagatggatatgaagtcattggaggaggaatacaaagctctgcaaggtgataaatcgggggaagttgagtacttccagtctcttgatgaaacaattaatgggatgaaggggattttggatcctgtcaaatgccaatgtggactggagtacaacttaaaacttgatggtgaagccatggatataagctaagcaagaacgaccacatacgcagatgcccatctccaccagatttcgtgcattttagatctgtacagtgtgagagatggattattctttggaaggtacagaatcttctcgcatgtatacgggtggatgctttgggcagagcttgacagcgtcatcgcgaataatatagaattctgatgttagaactatctggagcttgaacggactatacggccatagttttgttcaataattgtttttccttacgctcaaccgcttgtccagattgcagacataaaagatgctcatgttttttctaatcaccaa

SEQ ID NO: 8475 - DNA, 914 bp, Zea Mays
agcaatgaaggcgatagatcaactatcgaccttggagctcctccgtcaggaaactgcaagtacatttgtgaaactctgtgagaaaagattgttctacacaaagagaacagaaaccttgactgtcaaactacaggagcaacaggaatggtttagtatgaagaataagattactagacaggagccacatgttgccaaatctcagagcaagcaaaacttcattgaaggggagaaacatgtcatatttaactcagaagggagcctggataagtttaacaagcccgggaaactctacacacaactggtgtcagctcagctcaagatccaagacatcaaatcacaaagatcagcgcttcttttagaaatcagcagaatcaagcagattctggagcaagagaaaaacataattcctggctgcactacagcagatggatatgaagtcattggaggaggaatacaaagctctgcaaggtgataaatcgggggaagttgagtacttccagtctcttgatgaaacaattaatgggatgaaggggattttggatcctgtcaaatgccaatgtggactggagtacaacttaaaacttgatggtgaagccatggatataagctaagcaagaacgaccacatacgcagatgcccatctccaccagatttcgtgcattttagatctgtacagtgtgagagatggattattctttggaaggtacagaatcttctcgcatgtatacgggtggatgctttgggcagagcttgacagcgtcatcgcgaataatatagaattctgatgttagaactatctggagcttgaacggactatacggccatagttttgttcaataattgtttttccttacgctcaaccgcttgtccagattgcagacataaaagatgctcatgttttttctaatcaccaa

SEQ ID NO: 8476 - DNA, 1073 bp, Zea Mays
cgtaattcaacaactagctgcatcgtcttctccaccgaccttgccgccgtcgccccgccgctccatccggtaagacatggaggagtacctggagagcatgaaatctctccgctcctacatgaacgatctggaggacgacgccgcgaagcggtctgtcgaggagcagcagcagcgtacagccatcgacgctcacgacagcgatgtcgcgctagtgatggcgcaagcaaagcaggcgagcgaggaggccgagcggctggccacagcgagggctaaggtaggcatgcagatggccgagaagcagggaaggattgccacgctggacatcgagtgcgccacactgaagcaggttgccaaatctcagagcaagcaaaacttcattgaaggggagaaacatgtcatatttaactcagaagggagcctggataagtttaacaagcccgggaaactctacacacaactggtgtcagctcagctcaagatccaagacatcaaatcacaaagatcagcgcttcttttagaaatcagcagaatcaagcagattctggagcaagagaaaaacataattcctggctgcactacagcagatggatatgaagtcattggaggaggaatacaaagctctgcaaggtgataaatcgggggaagttgagtacttccagtctcttgatgaaacaattaatgggatgaaggggattttggatcctgtcaaatgccaatgtggactggagtacaacttaaaacttgatggtgaagccatggatataagctaagcaagaacgaccacatacgcagatgcccatctccaccagatttcgtgcattttagatctgtacagtgtgagagatggattattctttggaaggtacagaatcttctcgcatgtatacgggtggatgctttgggcagagcttgacagcgtcatcgcgaataatatagaattctgatgttagaactatctggagcttgaacggactatacggccatagttttgttcaataattgtttttccttacgctcaaccgcttgtccagattgcagacataaaagatgctcatgttttttctaatcaccaa

SEQ ID NO: 8477 - DNA, 1472 bp, Zea Mays
cgtaattcaacaactagctgcatcgtcttctccaccgaccttgccgccgtcgccccgccgctccatccggtaagacatggaggagtacctggagagcatgaaatctctccgctcctacatgaacgatctggaggacgacgccgcgaagcggtctgtcgaggagcagcagcagcgtacagccatcgacgctcacgacagcgatgtcgcgctagtgatggcgcaagcaaagcaggcgagcgaggaggccgagcggctggccacagcgagggctaaggtaggcatgcagatggccgagaagcagggaaggattgccacgctggacatcgagtgcgccacactgaagcaggaatggtttagtatgaagaataagattactagacaggagccacatgttgccaaatctcagagcaagcaaaacttcattgaaggtacaggtttctctgaaaacagaaaaaatacttagcgtctttccatgccatttcatgcctgtgttgtattcatgttgacatgcttccacatatggggagtttattgcacagggtacattagccatttcatgtgtgacatattttattattgtttacattgtgtgtctgttaaactagtgattctgctttctcccctcctaccgaggtctattgaaatctacataatcttgccttttcagatgtatggatacaagattatgcaaaacatagatgagtagctagtcaaatcatcaaaactgaataatttgtaatttcgactggacttggatgtggtgtttacatgcaggggagaaacatgtcatatttaactcagaagggagcctggataagtttaacaagcccgggaaactctacacacaactggtgtcagctcagctcaagatccaagacatcaaatcacaaagatcagcgcttcttttagaaatcagcagaatcaagcagattctggagcaagagaaaaacataattcctggttttcccgctgcactacagcagatggatatgaagtcattggaggaggaatacaaagctctgcaaggtgataaatcgggggaagttgagtacttccagtctcttgatgaaacaattaatgggatgaaggggattttggatcctgtcaaatgccaatgtggactggagtacaacttaaaacttgatggtgaagccatggatataagctaagcaagaacgaccacatacgcagatgcccatctccaccagatttcgtgcattttagatctgtacagtgtgagagatggattattctttggaaggtacagaatcttctcgcatgtatacgggtggatgctttgggcagagcttgacagcgtcatcgcgaataatatagaattctgatgttagaactatctggagcttgaacggactatacggccatagttttgttcaataattgtttttccttacgctcaaccgcttgtccagattgcagacataaaagatgctcatgttttttctaatcaccaa

SEQ ID NO: 8478 - DNA, 1215 bp, Zea Mays
cgtaattcaacaactagctgcatcgtcttctccaccgaccttgccgccgtcgccccgccgctccatccggtaagacatggaggagtacctggagagcatgaaatctctccgctcctacatgaacgatctggaggacgacgccgcgaagcggtctgtcgaggagcagcagcagcgtacagccatcgacgctcacgacagcgatgtcgcgctagtgatggcgcaagcaaagcaggcgagcgaggaggccgagcggctggccacagcgagggctaaggtaggcatgcagatggccgagaagcagggaaggattgccacgctggacatcgagtgcgccacactgaagcagaccttggagctcctccgtcaggaaactgcaagtacatttgtgaaactctgtgagaaaagattgttctacacaaagagaacagaaaccttgactgtcaaactacaggagcaacaggaatggtttagtatgaagaataagattactagacaggagccacatgttgccaaatctcagagcaagcaaaacttcattgaagtttttaatcaaacaggaaagtgatgctcagaacaagcccgggaaactctacacacaactggtgtcagctcagctcaagatccaagacatcaaatcacaaagatcagcgcttcttttagaaatcagcagaatcaagcagattctggagcaagagaaaaacataattcctggctgcactacagcagatggatatgaagtcattggaggaggaatacaaagctctgcaaggtgataaatcgggggaagttgagtacttccagtctcttgatgaaacaattaatgggatgaaggggattttggatcctgtcaaatgccaatgtggactggagtacaacttaaaacttgatggtgaagccatggatataagctaagcaagaacgaccacatacgcagatgcccatctccaccagatttcgtgcattttagatctgtacagtgtgagagatggattattctttggaaggtacagaatcttctcgcatgtatacgggtggatgctttgggcagagcttgacagcgtcatcgcgaataatatagaattctgatgttagaactatctggagcttgaacggactatacggccatagttttgttcaataattgtttttccttacgctcaaccgcttgtccagattgcagacataaaagatgctcatgttttttctaatcaccaa

SEQ ID NO: 8479 - DNA, 1223 bp, Zea Mays
cgtaattcaacaactagctgcatcgtcttctccaccgaccttgccgccgtcgccccgccgctccatccggtaagacatggaggagtacctggagagcatgaaatctctccgctcctacatgaacgatctggaggacgacgccgcgaagcggtctgtcgaggagcagcagcagcgtacagccatcgacgctcacgacagcgatgtcgcgctagtgatggcgcaagcaaagcaggcgagcgaggaggccgagcggctggccacagcgagggctaaggtaggcatgcagatggccgagaagcagggaaggattgccacgctggacatcgagtgcgccacactgaagcagaccttggagctcctccgtcaggaaactgcaagtacatttgtgaaactctgtgagaaaagattgttctacacaaagagaacagaaaccttgactgtcaaactacaggagcaacaggaatggtttagtatgaagaataagattactagacaggagccacatgttgccaaatctcagagcaagcaaaacttcattgaagtttttaatcaaacaggaaagtgatgctcagaacaagcccgggaaactctacacacaactggtgtcagctcagctcaagatccaagacatcaaatcacaaagatcagcgcttcttttagaaatcagcagaatcaagcagattctggagcaagagaaaaacataattcctggttttcccgctgcactacagcagatggatatgaagtcattggaggaggaatacaaagctctgcaaggtgataaatcgggggaagttgagtacttccagtctcttgatgaaacaattaatgggatgaaggggattttggatcctgtcaaatgccaatgtggactggagtacaacttaaaacttgatggtgaagccatggatataagctaagcaagaacgaccacatacgcagatgcccatctccaccagatttcgtgcattttagatctgtacagtgtgagagatggattattctttggaaggtacagaatcttctcgcatgtatacgggtggatgctttgggcagagcttgacagcgtcatcgcgaataatatagaattctgatgttagaactatctggagcttgaacggactatacggccatagttttgttcaataattgtttttccttacgctcaaccgcttgtccagattgcagacataaaagatgctcatgttttttctaatcaccaa

SEQ ID NO: 8480 - DNA, 1200 bp, Zea Mays
cgtaattcaacaactagctgcatcgtcttctccaccgaccttgccgccgtcgccccgccgctccatccggtaagacatggaggagtacctggagagcatgaaatctctccgctcctacatgaacgatctggaggacgacgccgcgaagcggtctgtcgaggagcagcagcagcgtacagccatcgacgctcacgacagcgatgtcgcgctagtgatggcgcaagcaaagcaggcgagcgaggaggccgagcggctggccacagcgagggctaaggtaggcatgcagatggccgagaagcagggaaggattgccacgctggacatcgagtgcgccacactgaagcagaccttggagctcctccgtcaggaaactgcaagtacatttgtgaaactctgtgagaaaagattgttctacacaaagagaacagaaaccttgactgtcaaactacaggagcaacaggaatggtttagtatgaagaataagattactagacaggagccacatgttgccaaatctcagagcaagcaaaacttcattgaaggaaagtgatgctcagaacaagcccgggaaactctacacacaactggtgtcagctcagctcaagatccaagacatcaaatcacaaagatcagcgcttcttttagaaatcagcagaatcaagcagattctggagcaagagaaaaacataattcctggctgcactacagcagatggatatgaagtcattggaggaggaatacaaagctctgcaaggtgataaatcgggggaagttgagtacttccagtctcttgatgaaacaattaatgggatgaaggggattttggatcctgtcaaatgccaatgtggactggagtacaacttaaaacttgatggtgaagccatggatataagctaagcaagaacgaccacatacgcagatgcccatctccaccagatttcgtgcattttagatctgtacagtgtgagagatggattattctttggaaggtacagaatcttctcgcatgtatacgggtggatgctttgggcagagcttgacagcgtcatcgcgaataatatagaattctgatgttagaactatctggagcttgaacggactatacggccatagttttgttcaataattgtttttccttacgctcaaccgcttgtccagattgcagacataaaagatgctcatgttttttctaatcaccaa

SEQ ID NO: 8481 - DNA, 1139 bp, Zea Mays
cgtaattcaacaactagctgcatcgtcttctccaccgaccttgccgccgtcgccccgccgctccatccggtaagacatggaggagtacctggagagcatgaaatctctccgctcctacatgaacgatctggaggacgacgccgcgaagcggtctgtcgaggagcagcagcagcgtacagccatcgacgctcacgacagcgatgtcgcgctagtgatggcgcaagcaaagcaggcgagcgaggaggccgagcggctggccacagcgagggctaaggtaggcatgcagatggccgagaagcagggaaggattgccacgctggacatcgagtgcgccacactgaagcaggttgccaaatctcagagcaagcaaaacttcattgaagtttttaatcaaacaggaaagtgatgctcagaacaagcccgggaaactctacacacaactggtgtcagctcagctcaagatccaagacatcaaatcacaaagatcagcgcttcttttagaaatcagcagaatcaagcagattctggagcaagagaaaaacataattcctggttttcccgtaatttcattgctcatgtttaaacattgatcatgttaaattcttcctatatgcattgtcatctggtccttgcaggctgcactacagcagatggatatgaagtcattggaggaggaatacaaagctctgcaaggtgataaatcgggggaagttgagtacttccagtctcttgatgaaacaattaatgggatgaaggggattttggatcctgtcaaatgccaatgtggactggagtacaacttaaaacttgatggtgaagccatggatataagctaagcaagaacgaccacatacgcagatgcccatctccaccagatttcgtgcattttagatctgtacagtgtgagagatggattattctttggaaggtacagaatcttctcgcatgtatacgggtggatgctttgggcagagcttgacagcgtcatcgcgaataatatagaattctgatgttagaactatctggagcttgaacggactatacggccatagttttgttcaataattgtttttccttacgctcaaccgcttgtccagattgcagacataaaagatgctcatgttttttctaatcaccaa

SEQ ID NO: 8482 - DNA, 1081 bp, Zea Mays
cgtaattcaacaactagctgcatcgtcttctccaccgaccttgccgccgtcgccccgccgctccatccggtaagacatggaggagtacctggagagcatgaaatctctccgctcctacatgaacgatctggaggacgacgccgcgaagcggtctgtcgaggagcagcagcagcgtacagccatcgacgctcacgacagcgatgtcgcgctagtgatggcgcaagcaaagcaggcgagcgaggaggccgagcggctggccacagcgagggctaaggtaggcatgcagatggccgagaagcagggaaggattgccacgctggacatcgagtgcgccacactgaagcaggttgccaaatctcagagcaagcaaaacttcattgaaggggagaaacatgtcatatttaactcagaagggagcctggataagtttaacaagcccgggaaactctacacacaactggtgtcagctcagctcaagatccaagacatcaaatcacaaagatcagcgcttcttttagaaatcagcagaatcaagcagattctggagcaagagaaaaacataattcctggttttcccgctgcactacagcagatggatatgaagtcattggaggaggaatacaaagctctgcaaggtgataaatcgggggaagttgagtacttccagtctcttgatgaaacaattaatgggatgaaggggattttggatcctgtcaaatgccaatgtggactggagtacaacttaaaacttgatggtgaagccatggatataagctaagcaagaacgaccacatacgcagatgcccatctccaccagatttcgtgcattttagatctgtacagtgtgagagatggattattctttggaaggtacagaatcttctcgcatgtatacgggtggatgctttgggcagagcttgacagcgtcatcgcgaataatatagaattctgatgttagaactatctggagcttgaacggactatacggccatagttttgttcaataattgtttttccttacgctcaaccgcttgtccagattgcagacataaaagatgctcatgttttttctaatcaccaa

SEQ ID NO: 8483 - DNA, 1132 bp, Zea Mays
ccgattcgtaattcaacaactagctgcatcgtcttctccaccgaccttgccgccgtcgccccgccgctccatccggtaagacatggaggagtacctggagagcatgaaatctctccgctcctacatgaacgatctggaggacgacgccgcgaagcggtctgtcgaggagcagcagcagcgtacagccatcgacgctcacgacagcgatgtcgcgctagtgatggcgcaagcaaagcaggcgagcgaggaggccgagcggctggccacagcgagggctaaggtaggcatgcagatggccgagaagcagggaaggattgccacgctggacatcgagtgcgccacactgaagcaggaatggtttagtatgaagaataagattactagacaggagccacatgttgccaaatctcagagcaagcaaaacttcattgaaggggagaaacatgtcatatttaactcagaagggagcctggataagtttaacaagcccgggaaactctacacacaactggtgtcagctcagctcaagatccaagacatcaaatcacaaagatcagcgcttcttttagaaatcagcagaatcaagcagattctggagcaagagaaaaacataattcctggttttcccgctgcactacagcagatggatatgaagtcattggaggaggaatacaaagctctgcaaggtgataaatcgggggaagttgagtacttccagtctcttgatgaaacaattaatgggatgaaggggattttggatcctgtcaaatgccaatgtggactggagtacaacttaaaacttgatggtgaagccatggatataagctaagcaagaacgaccacatacgcagatgcccatctccaccagatttcgtgcattttagatctgtacagtgtgagagatggattattctttggaaggtacagaatcttctcgcatgtatacgggtggatgctttgggcagagcttgacagcgtcatcgcgaataatatagaattctgatgttagaactatctggagcttgaacggactatacggccatagttttgttcaataattgtttttccttacgctcaaccgcttgtccagattgcagacataaaagatgctcatgttttttctaatcaccaa

SEQ ID NO: 8484 - DNA, 1670 bp, Zea Mays
gccgattcgtaattcaacaactagctgcatcgtcttctccaccgaccttgccgccgtcgccccgccgctccatccggtaagacatggaggagtacctggagagcatgaaatctctccgctcctacatgaacgatctggaggacgacgccgcgaagcggtctgtcgaggagcagcagcagcgtacagccatcgacgctcacgacagcgatgtcgcgctagtgatggcgcaagcaaagcaggcgagcgaggaggccgagcggctggccacagcgagggctaaggtaggcatgcagatggccgagaagcagggaaggattgccacgctggacatcgagtgcgccacactgaagcagaccttggagctcctccgtcaggaaactgcaagtacatttgtgaaactctgtgagaaaagattgttctacacaaagagaacagaaaccttgactgtcaaactacaggagcaacaggaatggtttagtatgaagaataagattactagacaggagccacatgttgccaaatctcagagcaagcaaaacttcattgaaggtacaggtttctctgaaaacagaaaaaatacttagcgtctttccatgccatttcatgcctgtgttgtattcatgttgacatgcttccacatatggggagtttattgcacagggtacattagccatttcatgtgtgacatattttattattgtttacattgtgtgtctgttaaactagtgattctgctttctcccctcctaccgaggtctattgaaatctacataatcttgccttttcagatgtatggatacaagattatgcaaaacatagatgagtagctagtcaaatcatcaaaactgaataatttgtaatttcgactggacttggatgtggtgtttacatgcaggggagaaacatgtcatatttaactcagaagggagcctggataagtttgttagtatttactctcctccctcccttcccacaactatgcttttcagtttttaatcaaacaggaaagtgatgctcagaacaagcccgggaaactctacacacaactggtgtcagctcagctcaagatccaagacatcaaatcacaaagatcagcgcttcttttagaaatcagcagaatcaagcagattctggagcaagagaaaaacataattcctggttttcccgctgcactacagcagatggatatgaagtcattggaggaggaatacaaagctctgcaaggtgataaatcgggggaagttgagtacttccagtctcttgatgaaacaattaatgggatgaaggggattttggatcctgtcaaatgccaatgtggactggagtacaacttaaaacttgatggtgaagccatggatataagctaagcaagaacgaccacatacgcagatgcccatctccaccagatttcgtgcattttagatctgtacagtgtgagagatggattattctttggaaggtacagaatcttctcgcatgtatacgggtggatgctttgggcagagcttgacagcgtcatcgcgaataatatagaattctgatgttagaactatctggagcttgaacggactatacggccatagttttgttcaataattgtttttccttacgctcaaccgcttgtccagattgcagacataaaagatgctcatgttttttctaatcaccaa

SEQ ID NO: 8485 - DNA, 1662 bp, Zea Mays
gccgattcgtaattcaacaactagctgcatcgtcttctccaccgaccttgccgccgtcgccccgccgctccatccggtaagacatggaggagtacctggagagcatgaaatctctccgctcctacatgaacgatctggaggacgacgccgcgaagcggtctgtcgaggagcagcagcagcgtacagccatcgacgctcacgacagcgatgtcgcgctagtgatggcgcaagcaaagcaggcgagcgaggaggccgagcggctggccacagcgagggctaaggtaggcatgcagatggccgagaagcagggaaggattgccacgctggacatcgagtgcgccacactgaagcagaccttggagctcctccgtcaggaaactgcaagtacatttgtgaaactctgtgagaaaagattgttctacacaaagagaacagaaaccttgactgtcaaactacaggagcaacaggaatggtttagtatgaagaataagattactagacaggagccacatgttgccaaatctcagagcaagcaaaacttcattgaaggtacaggtttctctgaaaacagaaaaaatacttagcgtctttccatgccatttcatgcctgtgttgtattcatgttgacatgcttccacatatggggagtttattgcacagggtacattagccatttcatgtgtgacatattttattattgtttacattgtgtgtctgttaaactagtgattctgctttctcccctcctaccgaggtctattgaaatctacataatcttgccttttcagatgtatggatacaagattatgcaaaacatagatgagtagctagtcaaatcatcaaaactgaataatttgtaatttcgactggacttggatgtggtgtttacatgcaggggagaaacatgtcatatttaactcagaagggagcctggataagtttgttagtatttactctcctccctcccttcccacaactatgcttttcagtttttaatcaaacaggaaagtgatgctcagaacaagcccgggaaactctacacacaactggtgtcagctcagctcaagatccaagacatcaaatcacaaagatcagcgcttcttttagaaatcagcagaatcaagcagattctggagcaagagaaaaacataattcctggctgcactacagcagatggatatgaagtcattggaggaggaatacaaagctctgcaaggtgataaatcgggggaagttgagtacttccagtctcttgatgaaacaattaatgggatgaaggggattttggatcctgtcaaatgccaatgtggactggagtacaacttaaaacttgatggtgaagccatggatataagctaagcaagaacgaccacatacgcagatgcccatctccaccagatttcgtgcattttagatctgtacagtgtgagagatggattattctttggaaggtacagaatcttctcgcatgtatacgggtggatgctttgggcagagcttgacagcgtcatcgcgaataatatagaattctgatgttagaactatctggagcttgaacggactatacggccatagttttgttcaataattgtttttccttacgctcaaccgcttgtccagattgcagacataaaagatgctcatgttttttctaatcaccaa

SEQ ID NO: 8486 - DNA, 1296 bp, Zea Mays
ttcttttcttcccattcaagccgatttgacttttgactggccgattcgtaattcaacaactagctgcatcgtcttctccaccgaccttgccgccgtcgccccgccgctccatccggtaagacatggaggagtacctggagagcatgaaatctctccgctcctacatgaacgatctggaggacgacgccgcgaagcggtctgtcgaggagcagcagcagcgtacagccatcgacgctcacgacagcgatgtcgcgctagtgatggcgcaagcaaagcaggcgagcgaggaggccgagcggctggccacagcgagggctaaggtaggcatgcagatggccgagaagcagggaaggattgccacgctggacatcgagtgcgccacactgaagcagaccttggagctcctccgtcaggaaactgcaagtacatttgtgaaactctgtgagaaaagattgttctacacaaagagaacagaaaccttgactgtcaaactacaggagcaacaggaatggtttagtatgaagaataagattactagacaggagccacatgttgccaaatctcagagcaagcaaaacttcattgaaggggagaaacatgtcatatttaactcagaagggagcctggataagtttgaaagtgatgctcagaacaagcccgggaaactctacacacaactggtgtcagctcagctcaagatccaagacatcaaatcacaaagatcagcgcttcttttagaaatcaatcaagcagattctggagcaagagaaaaacataattcctggttttcccgctgcactacagcagatggatatgaagtcattggaggaggaatacaaagctctgcaaggtgataaatcgggggaagttgagtacttccagtctcttgatgaaacaattaatgggatgaaggggattttggatcctgtcaaatgccaatgtggactggagtacaacttaaaacttgatggtgaagccatggatataagctaagcaagaacgaccacatacgcagatgcccatctccaccagatttcgtgcattttagatctgtacagtgtgagagatggattattctttggaaggtacagaatcttctcgcatgtatacgggtggatgctttgggcagagcttgacagcgtcatcgcgaataatatagaattctgatgttagaactatctggagcttgaacggactatacggccatagttttgttcaataattgtttttccttacgctcaaccgcttgtccagattgcagacataaaagatgctcatgttttttctaatcaccaa

SEQ ID NO: 8487 - DNA, 368 bp, Zea Mays
cgtaattcaacaactagctgcatcgtcttctccaccgaccttgccgccgtcgccccgccgctccatccggtaagacatggaggagtacctggagagcatgaaatctctccgctcctacatgaacgatctggaggacgacgccgcgaagcggtctgtcgaggagcagcagcagcgtacagccatcgacgctcacgacagcgatgtcgcgctagtgatggcgcaagcaaagcaggcgagcgaggaggccgagcggctggccacagcgagggctaaggtaggcatgcagatggccgagaagcagggaaggattgccacgctggacatcgagtgcgccacactgaagcaggggtagcagtccaacatggaga

SEQ ID NO: 8488 - DNA, 545 bp, Zea Mays
gtcgatcgttggttcattttccctcgcctgatttctcgtgccctcctcgttctcgtcagctctggagacttccacacgcggcttacgctcctcgtcagccctcggctctcgtcctcggagaacgcgcgctcgtccgactacggagatggagctgcagcacctcgtcatggaccagaacaactaagcctcggacaacgcctcgtggtccaactccctcaccgacgccttcctcggcaagtcctccaagatgcagcctcaatcaataaagggaattcttggttctattattgttccatctacatctgacttgagtgtggcccctcccttgtcaaacatctcaggttcagaaaatgagttcaaagaaagcccagcaaccttttgtgcagggcctcgactttattcatgttggtcctgttaatgattggattgagtcatttcggcctcaaggattcctgaacttggtggaatagaagcaacatttgcagattttaatcaaatttatgacaatacaattttgaaaatgcaatcgctgttgacaagcggtg

SEQ ID NO: 8489 - DNA, 1228 bp, Zea Mays
attcaattccataagcaagaaggaggagggaactgctgatgaagtggtggattggtctcatggtaaacaactttgggaactttgcaaagacaagtatgagcccttatggctcaggggaggaaagcactgtgatttggagctctttccggaatacatccggcacctcaagaattttttccactcactagagaaatcgccatcccataggcaagcatggagggagaatgtggaccggattgaaccctcgcggaagagcactgatttctttgaaccctcgcgaaagagcacagaccaaaggaaaaaatcaaggtcaactcgagataagacgagaaacactgaacatagatatagcaacgtcgagaaggtagacaagctaaagatatcatttgatcagttcgagaaatccaggagaagtgttgatatcttcgagaggccaaagaggaacattgagcagctggattgtggccggaagagtgtcgacagattggacaggatctgggctagttaattcctttctttcacatgatatacaggttgggcttcggttgttttgggggattttacaggtgtggcgttaagagttgattcaccgacactaaaggagccaagcgtcgttgacgaggcttcgtgtagatgtgatggcttgtgtggtgggagaagtgtatgttgttggtcttcaaaaaaattgttatctggtcttaaactaaatgacactggggaggagtccatggcagcattgtgtataatctaatgctttggatcaacgatgtttttttcttctatttcattgaatcgaacttttccttccatggatattggctgtgtatggattttacggaccgtgaagttaaaagaaaggtgaattagataacttacaatatatttctaatactatggcttttaattttattttaatgaaacttttattttaacaaaactatgctaatttctaatttatcaaaatctatataataaaatggtgtatcttgatgtgtaattaaggttttgataaatatgttgctatatttatcgtaaaagagtaggctagtttctaactctatcactaggtatccaactatataaaggacacaacttaaatgcgtaatataaataaaaaaactcaacagtaccgttgaataattagatagtttctatattgaatttcgaatatagatagcatgctagtttctatattgaatttcgaatatagatagcatgctgttcttat

SEQ ID NO: 8490 - DNA, 1690 bp, Zea Mays
ctcttgtgtggtggttcaacgagtgtggtttgtcatcttcaagaaaattgggttgctgtgtggcttcagttggacatgggatgttttctccagattgtgttgttgcgtgaccaatcttattggaaaggcttacaggaaaaggtccaacagtttgatcatcgtagcttggtatgactattcaggatatgggcaatcatcaggaaagccgagtgaacacaatacttatgctgacatagaggcagcttacaagtgcctcatagagaaatttggtgccaaggaagaagaaataattctttatggacaatctgttggaagtgggcctactgtagatttggccagtcgtttatctcagctgcgagctgttgtcctgcatagtcctatattgtcagggctgagagttatgtatcctgtgaagcgcacatattggtttgacatctacaagaatattgataaaatccctcaagttacatgtcctgtgctcattatacatggaactgctgatgaagtggtggattggtctcatggtaaacaactttgggaactttgcaaagacaagtatgagcccttatggctcaggggaggaaagcactgtgatttggagctctttccggaatacatccggcacctcaagaattttttccactcactagagaaatcgccatcccataggcaagcatggagggagaatgtggaccggattgaaccctcgcggaagagcactgatttctttgaaccctcgcgaaagagcacagaccaaaggaaaaaatcaaggtcaactcgagataagacgagaaacactgaacatagatatagcaacgtcgagaaggtagacaagctaaagatatcatttgatcagttcgagaaatccaggagaagtgttgatatcttcgagaggccaaagaggaacattgagcagctggattgtggccggaagagtgtcgacagattggacaggatctgggctagttaattcctttctttcacatgatatacaggttgggcttcggttgttttgggggattttacaggtgtggcgttaagagttgattcaccgacactaaaggagccaagcgtcgttgacgaggcttcgtgtagatgtgatggcttgtgtggtgggagaagtgtatgttgttggtcttcaaaaaaattgttatctggtcttaaactaaatgacactggggaggagtccatggcagcattgtgtataatctaatgctttggatcaacgatgtttttttcttctatttcattgaatcgaacttttccttccatggatattggctgtgtatggattttacggaccgtgaagttaaaagaaaggtgaattagataacttacaatatatttctaatactatggcttttaattttattttaatgaaacttttattttaacaaaactatgctaatttctaatttatcaaaatctatataataaaatggtgtatcttgatgtgtaattaaggttttgataaatatgttgctatatttatcgtaaaagagtaggctagtttctaactctatcactaggtatccaactatataaaggacacaacttaaatgcgtaatataaataaaaaaactcaacagtaccgttgaataattagatagtttctatattgaatttcgaatatagatagcatgctagtttctatattgaatttcgaatatagatagcatgctgttcttat

SEQ ID NO: 8491 - DNA, 983 bp, Zea Mays
tgccgttccgggggtgccgtggtgaagaggatgagagaagggactaagggaagctgaaagtgcatggatttgtgcaagataatagaacagggcaaaaagtagctatgttaattggaaaatgggatgaagctatgtattatgtgcttggggatccaagtgttaaacccaagggatatgacccaatgtcagaagcagttcttttatgggagagggacaagtctcttaatcagacacgttacaacctttctccttttgcaatttctctaaatgaattgacaccacatttgttgaacaagttggctcctactgattctcgtttgagaccagaccaaaggcatctggaaaatggtgaatatgagatggcaaattcagagaaacttaggcttgaacaactgcaacggcaggcacgacaactgcaagaaaaaggatggagaccaaggtggtttaagaaggatgatggcgacagttaccgctatatgggtggatactgggaagcgagggagacggggaactgggacggtattccggacatctttcgccagaatagtttgtctccaggactgcactaactacccttcttccctatgttatacttgtgtatctccaccaaacatttaacgaagttatggtggcaacaaggcagagccaaagcatagcgtttcttcgtgggcatggtcaacctcgtgtcggctggggttggacaagtggttggaaacgtaggtttcatttttgaatttcaggactaattttgtcttggaatgcggttagtttagatttgttttttatgccttggcggctaatccacggatggtaggctttgccgcgcgctctagtgtcttgggccatgtatggagtattatctatggacatcgggtgatttcaatcgtcgtcacaatacttcttgactgttacaatcgaatttacacaacataagatgtgatatctggctcaatttggattgaatctataattgtccttgtgtc

SEQ ID NO: 8492 - DNA, 1002 bp, Zea Mays
atcatcttcaagtcccccacatcgctgggttgaggagcagcgggcggtggatccatgttggctggggcgccattggaggtgcatggatttgtgcaagataatagaacagggcaaaaagtagctatgttaattggaaaatgggatgaagctatgtattatgtgcttggggatccaagtgttaaacccaagggatatgacccaatgtcagaagcagttcttttatgggagagggacaagtctcttaatcagacacgttacaacctttctccttttgcaatttctctaaatgaattgacaccacatttgttgaacaagttggctcctactgattctcgtttgagaccagaccaaaggcatctggaaaatggtgaatatgagatggcaaattcagagaaacttaggcttgaacaactgcaacggcaggcacgacaactgcaagaaaaaggatggagaccaaggtggtttaagaaggatgatggcgacagttaccgctatatgggtggatactgggaagcgagggagacggggaactgggacggtattccggacatctttcgccagaatagtttgtctccaggactgcactaactacccttcttccctatgttatacttgtgtatctccaccaaacatttaacgaagttatggtggcaacaaggcagagccaaagcatagcgtttcttcgtgggcatggtcaacctcgtgtcggctggggttggacaagtggttggaaacgtaggtttcatttttgaatttcaggactaattttgtcttggaatgcggttagtttagatttgttttttatgccttggcggctaatccacggatggtaggctttgccgcgcgctctagtgtcttgggccatgtatggagtattatctatggacatcgggtgatttcaatcgtcgtcacaatacttcttgactgttacaatcgaatttacacaacataagatgtgatatctggctcaatttggattgaatctataattgtccttgtgtc

SEQ ID NO: 8493 - DNA, 2137 bp, Zea Mays
atttgttgttctaacattgctaatgaatacaaattttgcttggagtaatagatatttgtagggcctattccttcgtagacaccaagaagcatgagcatttgttcattatttggaaactttgtttttttgtagaaaggcagttgatattattttgtgtactaaatttatggccagctcgatcctacaattggggcttattattattttttttctgtttgccaagatttctattcagttttatcaggaggaagtacaactgaatcagaccctgacactgcaagccacatggctgaagttgaaactgaggaagatgaagttacatactttgatacaagagactttttatctgcagagtctttacggagtgcttcatgtcaaaggagggaactaattgcacatggttttggatcagaatatgttggagattctgttacaaatactgtcaaaactactaaatatccctttgtgttacgtagggataagctaccagagccgaaggaaaaagagaaacatataggattatggtcaataattagagaaaatatagggaaagacctgtcaggtgtttgtctacctgtttatttcaatgaacctctttcttctttacaaaaatgttttgaagatttggagtactcttacttggttgaccatgcactacactggggaaaacagggtgacagcttaatgaggatacttcatgtagcagcatttgcagtatcaggttatgcttcaaccgaaggtcggcaatgcaaacccttcaatcccctactgggggaaacatatgaagctgattatccagataaaggacttcgttttttctctgaaaaggtcagtcatcacccaatggttgttgcatgccactgtgacggcagaggttggagattctggggtgattccaatctgaaagggaagttctggggtcgatccattcagcttgacccaataggcgttcttacgctccaatttgatgacggagaaacatttcagtggagtaaagtgactacttccatttacaatatcataattggcaaaatttactgtgaccattatggcacaatgcgcatcaatggaagtggccagtactcctgcaagcttaaatttaaagaacagtcaattattgatcgcaatccacaccagttgttgacgtcgttcgggaagaagcttctcttggtggtggtttctgctattgctaaagtggcactatgagtacaaggtgcatggatttgtgcaagataatagaacagggcaaaaagtagctatgttaattggaaaatgggatgaagctatgtattatgtgcttggggatccaagtgttaaacccaagggatatgacccaatgtcagaagcagttcttttatgggagagggacaagtctcttaatcagacacgttacaacctttctccttttgcaatttctctaaatgaattgacaccacatttgttgaacaagttggctcctactgattctcgtttgagaccagaccaaaggcatctggaaaatggtgaatatgagatggcaaattcagagaaacttaggcttgaacaactgcaacggcaggcacgacaactgcaagaaaaaggatggagaccaaggtggtttaagaaggatgatggcgacagttaccgctatatgggtggatactgggaagcgagggagacggggaactgggacggtattccggacatctttcgccagaatagtttgtctccaggactgcactaactacccttcttccctatgttatacttgtgtatctccaccaaacatttaacgaagttatggtggcaacaaggcagagccaaagcatagcgtttcttcgtgggcatggtcaacctcgtgtcggctggggttggacaagtggttggaaacgtaggtttcatttttgaatttcaggactaattttgtcttggaatgcggttagtttagatttgttttttatgccttggcggctaatccacggatggtaggctttgccgcgcgctctagtgtcttgggccatgtatggagtattatctatggacatcgggtgatttcaatcgtcgtcacaatacttcttgactgttacaatcgaatttacacaacataagatgtgatatctggctcaatttggattgaatctataattgtccttgtgtc

SEQ ID NO: 8494 - DNA, 2159 bp, Zea Mays
ctccacggtactgcgccgcccagtactccgacagccacttcgctgctgctgctatgtcctgcgcgcagccgatgcggcgccgatctccatggttgtgcgaaacctaggcggcgggcgcgagcgaggccacaaggcggcatctgcctcctgagtggggagcgggctcccccgatccacatcgtgcgggctggtggctgcgtcgcgatgaacccgttatgctgcatcgcgccggtctcgctcgagcacgctgcggatcagctccacgagcacccgcagcgcatcctcgctggtgcaccgccggcgacgccggccccaaagcaggatgcggttgtgggggtgctgcacaagtgggtcaactatgggaaggggtggcggtcgcggtggttcgtgctcgaggatggggtgctatcctactacaagctccgcggagctggtgctgggggggtagccgtgtcgcccgctgctgctgcagccagagtgatcggggacgggagtgccgtgcagcaggcgcgggaggtggccgcgggggcaggaaagctgtggaagccgtttggcgtgatacacctcaaggtctcgtctattcgtgcaagcaagtctgatgataagaggctgtacatattcagtggaacaaagacactacatttgaggtgtgaaactgaggaggataggaatgcgtggatagatgcattgctggcagcgaaggatcagttcccacggtcacagactagcaatgatgttggttctatggcagatattatgttgtcctctgagaagcttagggcacggctgcttcaagagggtctgtgtgaagcagtggtcagggagtgtgaatctattatgatgagtgagctactggaactgcacaatcatataaagtctcagcagcagcagcattctattttgatagaccgccttcggcaactggagacggagaaagttgaactggagagaacagttgtccatgagactaaggagagggaaacacttggctatgccaacagcagacaaagtgatttctattcagttttatcaggaggaagtacaactgaatcagaccctgacactgcaagccacatggctgaagttgaaactgaggaagatgaagttacatactttgatacaagagactttttatctgcagagtctttacggagtgcttcatgtcaaaggagggaactaattgcacatggttttggatcagaatatgttggagattctgttacaaatactgtcaaaactactaaatatccctttgtgttacgtagggataagctaccagagccgaaggaaaaagagaaacatataggattatggtcaataattagagaaaatatagggaaagacctgtcaggtgtttgtctacctgtttatttcaatgaacctctttcttctttacaaaaatgttttgaagatttggagtactcttacttggttgaccatgcactacactggggaaaacagggtgacagcttaatgaggatacttcatgtagcagcatttgcagtatcaggttatgcttcaaccgaaggtcggcaatgcaaacccttcaatcccctactgggggaaacatatgaagctgattatccagataaaggacttcgttttttctctgaaaaggtcagtcatcacccaatggttgttgcatgccactgtgacggcagaggttggagattctggggtgattccaatctgaaagggaagttctggggtcgatccattcagcttgacccaataggcgttcttacgctccaatttgatgacggagaaacatttcagtggagtaaagtgactacttccatttacaatatcataattggcaaaatttactgtgaccattatggcacaatgcgcatcaatggaagtggccagtactcctgcaagcttaaatttaaagaacagtcaattattgatcgcaatccacaccaggagatctgcgtgtcatttcttaagaaagagaaagaaagtaccacatacatcaaacgaccgaaaacagccaaaaccacctttatccctacagccagggactgagaaaataaaagctttggctgttacaacggtgacacctagaccatttgaatacaaaaaccacagagggataggccatcaagatctacacagttgtagctcgtgcccagaccaggaagtcttgcagtttggag

SEQ ID NO: 8495 - DNA, 2118 bp, Zea Mays
cgtccacttggcgagcatctcacatcctagcgcttgatccgatcatccaatcttcaagtttattcatcagtatcaccttgcgaagaagctcatgcttaacgacatcttggggtcaacccagctttggtccttcgcatcacgtgatcaattagcgtacctaaataatgcttcacagaagcgaattaaacacttagtgatgatacatcataactcctacgagcacacactaggtaactatgactctacgataattataatcttcgagataatcgttcttaattcaaacatccaatcaacaataattgaacacaagcctcaaactagagcgtaatatctaaaactagactgaatattatagaacaccaaaagactaacaaacttagaatcattagtcttagacatctaaatttagaataaggataaaagcacattaactgactttctaaatcacttatttagactaatttggataacacactaattacatgaatatcacattagttttagatctagcagacaactcattatcaacttaatagaattccataagactatagcttgaacacctaaaaacctacaaacagtggtaaatcctgcccgccacccgtttaaaatacttaacctgcctttcgtattattaatccaatcacacttgatttatacattcaataatacattcctagcataatatgcattttaaacctaagctttacgcgacacaattatttgtcaaacatgaacacagttgcaacaatgcatgtaacaaggcattttatcaaacatataataaaaccacaatgtgcctgtgctacagacaagatattcgtcacataattttgcatcaaaattctagacctcaacccctaactccactactttataattctaaaaataattatatcaccacaaaacagcacaccgacacaacaacggatctagccataatcactaagcgcacctatgctaaataaaaggatcatcgcactaacccattaatttattcaatgatctaattatcacgaataacccatccgctcaacatgaccaaaacgacttgataacccatccgctcagaataacccattcggtacaaattagacgaaaatgactcagtttgtttaaatgtcatgtagattatatttagacatttaacaaatgaaaacaacacataccatccaatcaattaaatttagggtttttagtattctggaagagagtgagaagatatataggccaactgacttctaattgaacaatttatagtgtaaattcaaaaaatttgaaaatttcggatgatagaataaaaatatcagaggtcaccgataaacaggaaaatcggatttatcggatatcatatcgccgataaagtttttcttacgcttttaacggcaagggcgagagactgacggtctgggcacgtcagcatgcagagacgcatgtccatggtgaggacgagtagatgagcagggacgagcttaggcgaccgtcaagccatgatgacttgagggcgaagtcgatgacgagcaccatggagggaacgacgctgctgcggaagtcagagacgacgaagattattggtttcagcgtttcgtcgaatatctagcggatgctgtattggggctgcttctcttcatcaatcctcatggatctctcctctgaaatctcacaggtcacaacgagctgacgttgtagctgggaccgacggagaactcccatgctgagtacaaggaacaatgacgtcgaggcgaaggttggtgacggcagccgggtgaggcgagcccgcggcggctagcgtgctcgaccaccacggacgcggctggagagggagcaggacaccggggcggcatccctggcaccgtagggccgacgacggagccagggcgttgatcgcagagggcgcggtcgagccacaggacagcatccaggcgtactggagcaggaacgagcagccggggaagaagctgggcgatccaagcgctggtgaggggcgagctgtaggaaggagcatggaggacaccggcagaacctagagcagcgccaggggagcagagtgcgctgatgagctctagcagcgctatggcaggcactggtgaagagacaatgcctccacgtggtcag

SEQ ID NO: 8496 - DNA, 12864 bp, Zea Mays
gggaatcatacgaagtataaaagacaacatgaacaattaaatatgttgttattattgaatcatttctattttattactatgaagaaataggaatgatatcatattacaagtgtaccttcggcttgaggaaaggtaaagagtacaagcgtgacgcaaaagcaaatgccaagtcagcgtaaacagtactggagcactgttcatctatttataggcacgggacgcagcccatgtaaaattacactcatgctctttacatttgctaataattctatagtaatccatcggggtctagatagccttttcctctttaagtcggtttccttttctgttatcatgccgaagctcccttgcgcacagcttcagcttcgttccattcttcgtatcccttgtgcttcttctcactgtgattttgactcaagcccgaagggtccgagttcgaaggtacctgctcatgtattatactccagaaacattgttaaatcatgtttttgaggaccttcggaagtcgaaggtccccaacagtagcccctcgcaatattaatttgttagaatgataaattcagattgcgatatggacgaaggccttaagccgaaggtccgaaaaaacaccttccctatgctagaatagcatcaatcaatgacaagcggggccctcccacttgcaacgcgctaggcgtataaataagagcacactgtgagcacatttggcacgcttccttgccatctgctcttgctttcgcaaattttagttcttgcataccaacgcttgcctgactttttagaatttttagcttcggccttaagagctcgttttcaacatttccgaagatgtctcaggataacaaagctgccgccgaaacaaagctgagcctttctgaggagaagaatcttgggtttcttgaatcaatagcaaagactaatacagagaagattactagggagattttagaaggtttatctgaagacagcggtgatagtgacagttatgacgtggagagtgggggtaaagactccgaagatcgaccgtggcgaccaagtcacaaagtcttcggaaaatcgagtattaaacagagtcatctcgataacatgagggggagatattttcgggacatgtctactgtgagggcagatgacggagagaggactgtgcttactcccgaagagaatgaagttgtgatcttccgaaacttttttaaagctgggcttcggttccccttaagcaaatttgtggttgaggttttaaagatctatcaggtctaccttcatcaaattactcccgtagctatcacaagaatgagaatctttgtctgggtcgtgaggaaccagggcttggagccaaatgcaaaaagtttctgcaatgtgcatgaactgttatatgagacgaaaccctagggcaaagagcaatatcataacaattttggctgctatagcttcgtcgctcgctctggctcgagctgtcccgtgccaacattccagaaaagatggcctggggactggatgaaggaatggttttacgtgaaaaacgatttaaaggcacgagaagacgttaaagatattatcatgcgtcctatctggcagcgcttcggccttcggaagccgaaggtggaaattgatgaagcagccgaagaatgccaaaaggctttcggcatagtctgttctttcatcgggacgagggatttagtccaggagcacatagccttcagagtgtgtccacttgtagagcaatgggaaatgccaaaggaaactatcagcaagtctgacgaaggtggactggttagattgaaatacaccttcagatacgagggtaagtttattgagccagatgatgattggttgaagtgcatcgaagctacaagcaacagactgcttggaccatattcaaaggtagaagataacacgctatctgcgaccttcggaggccggaagaagaagaggctgaatagagtttttgatgctattgggtttatgtaccctaattaccgctacccgctgaaagggcaaaagagaaaaagcgcaacttctggaaaaggtgatgctgtagttgctctgagtgaggccgcaccaaagaggaaaaagatgaaggtccttactcaccgaccgcacttcatcgaaccggcctcagtgcccgactttggtgatgagacgtctacggctactgaagccaaaggacctgctcttacacagaagaacgaagagccggctatgatgccgaaggctgataatattaaagaaatagaggccgcgaaaacaaagatagtataagttataagcccttcggcaggaatgatagtgccaaaggaacaaaaagacctcatgacgactccgaagaggaaaaggatggtcaatgtattagatgtgctagagacgataaagtcttcaagtaccactccgaagaaacctgccgaagctccaaaaacgcaagttgaggcaaaaccatccgaagacgaagctgcaaagagccagaccgaggccgaagctgggccttcagagcccgccaaggaggaatccttggaaaccagaggagaaacgaaagaagaggctataaagcaaattctgcctgaaaaaactctctcttcaactcccaaagcatcttccagagtacctgattacattgtacgacatgcttcgggcaaaaggctatctgaagaggaaaagcgagaagctcatcattatgcccagaaattaaaatgtccaaaaggggcgttgatattcaacggcagcggagaagaagacttcttgtattgtctcgcagacagcaaggagatctctgtctgccgggagatgggaagaagcttcggattcccgatgctagaagacgggctctcggtattatcaaaagatgaattggccgacagcttaacatacaacagcttaaaggtgagagaataagatttttgtacttaaaaacaaaaaattttcgtttgcttaaacttaataccacacttcttttgcagggccttattcttagcaacgccctcagggcgcaaaaaagcgctgaagatgaaggatgtaccatggccttgaataaccttcgttccgaagtaattgaactaaggaacgaaggtcttgaaaaagacaaaatattaaactcattgataaacaagataaaagaagacgaggctacttcaaaagcccaatctgagatccagaaatgcgaaattgaagatcttcgaaaacaactggcagaagaaaaattaaaatgtgcaattgccgaagctgaccgagacgccagtgaatactggaaaaatcactgcgaaaagacagttgtggagcttcgttcttcaaaagaaagatgctatgaaaaatctgtggcatgtgtacaaaagattaaaaccagcttcgccaatattggcgcatactcaaatgaggacaacttcgtactaggcgatcctgaaggtccaatcgaatggatcaacggcgaagctaaagcctttgaggaagttttgagtggccgcggagatgtctgtgccttctcaggtgccaggggaattgcggctatcttagagaaggcagaatgcgaacatgtgaagattctggcccaaggcgaagctgcgttttctattgaagatacaaaagacccctcggctgaggcaagcttggttggcggaaagttttttaccgacatctgggaaaatggttgccgagggatggctcacgaaattataaagaaaagtgaaaaagatacccacgatgctagagaagcagcaaaggcagccgaaaaaactgcagaacttgaaaggcggataggtattgtctaattgcttttgactttatgttttattttgtgacttcgaacttattcatgttttatatcgcagccgaattgtctcctcccccggagcccttcgagtcacaggccgaccccgaagcaaaaaaggaaaatgaaattactaagatggctgaagctattatggacaaagttgtgactcaactactaaacgaagctgcggaagtagttttaaaagaagaatagctattgttgtaaaaacattcggaatattgatgtaatatttgctgaacaaagtgtgtaatattctatagctttgaaagtaatatataagttgtatgtaattcagttctttacgatgcatgaaactttacatacataccgtttttgagccttcggcgaaaaaacaccttcccttcttttcatgcttcgtgaagaatatccatattccgtgaaaatattatgcttcgtaagcaatagatcttctctgatactaaagttgatgaaactgtacttcttcaaactttattttgtgccttggcacaatttcttcgaaacaatttccgaagattaacattgtattcccttcttgtgccattgatgcaatatgatgtatgatgtcatgttatgcgaatgatgtgatgatgctatgatatgcaaaatgatatttgtgccgaagatacacacacgttcccacagtagaacacaatctctttgtcgtttatttttcggcttcaccgcttattttttggtgtatcagcgttcacttttcgctgtaagcctcccttaggagcttcttcgccttttactttggcggtatcagcgtttatttttcgctgtaagcctcccttagtagcttcttcgccttttacttcggcggtatcagcgtttatttttcgctatacgctctgcattccctttggaacgacttttgagcagaaaacttacgctgcgctcccttaggaacgactttttgtaacttcagcaaacttacactgtgttccgcagaacgacttttttgtagcttcggagatactttctatagacacgagctcttaagaacgagttttcatgcttcggcaacgttttggattctgtatgtctgtgtataagatatattttcactatgacaaaaacgaagctgttacaagaaattgaaaacgacaagaaaaacttaggctttcaatgattgttccttattaaaaggaaaaatggtaacaaatgcaagaactatttcagcaacaggatatcttctggtagatgtgcttcgactctggtacaatactgttgattatgcgagcttcggactcctctctgaagtctcgttgctgatgagtatgctggctcccttctagctgttggccttgtgtgtattggtggtggaggtggaagctgttgccaagatgcctgagattggcttgccgaagcaacagaagctgcagaatggttacccatatactctggaatgtacggtgagtggtacgaagcagtatgcataacttgcttcggctggctctgttgggctgcagcctctgctatctctttctgtttctgcatggtgacatggcacatcctggtagtatggctcttgtcctcaccacagaataggcaataaatttttctgggctgatccccaaaccttcctccgaagcccctgacgcctctgccccttggagctggggggcgaggatagctctgttgcttccccgaagcctgggaggaatagtgcggcctctgttgctgacttcccctgtcgtcattctgagtagagtggattgatctgacgtgcctaggttgtactctccctccgaagcccctggtcatttcggagaacctgtaagcttcctcccttctttgtcaaaagtcattatctgcgtggatatattcatccatcttctgaagtagtttctccagggtctgagggggtttcctggcgaagtattgggctataggtcctggccgaagccccttaatcatggcctcaataacagtttcattgggcaccgttggtgcctgtgccctcagtcgtaagaaccttcttacatacgcctgaaggtattcttcgtgatcctgggtgcactggaacaaagcttgaacagtgactagcttcgtctgaaacccttggaaactggtgatgagcatgtccttcaggttttgccatgatgtgattgttcctagccgaagagaagagtgccaggtttgtgcaacatttttgactgccatgacgaaggatttcgccatgactgcagtattgccgccatatgaagatatggttgcctcgtagctcatcagaaattgcttcggatctgagtgtccgtcatacatggggagctgaggtggtttgtaagacgggggccaaggtgtagtctgcaattctgttgacagaggagaagcatcatcaaaggcaaaatttccatgatggaaatcctcataccagtcatcctcgttgacgaagccctcttagtgaagctctctgtactggggccttcggttctgttcatcttgagtaagatgacgaacttcttcagaggcttcgtcgatctgcctttgtaggttagctagccgagccatcttttccttcttcctttgcacttgctgatgaagcatctccatattcctgatttattggtccaagtcgtcctcctgaggcgttggactggtggccttcctcttctggcttcgggcctcccgaagagaaagggtctcctggttcgggtccagcggctgcagagcggcaacccctgttgctgaagctttctttggcggcatgaagaaggtcgatgcttgccgaaggtggtcaaaaatggttcaccggaggtgggtgccaatgttggggacttgctctcaaatgcttcggcttaagagcaaggcaacacaaagaatgttaaacgttaaagtccttcatccttcggagcattatttcccttaggatataatgactttcagacgaaggttatgaagggcataccttcgtaagcacgacatataaaaatagagagggaatcatacgaagtataaaagacaacatgaacaattaaatatgttgttattattgtatcatttctattttattactatgaagaaataggaatgatatcatattataagtgtaccttcggcatgagggaaggtaaagagtacaagcgtgacgcaaaagcaaatgccaagtcagcgtgaacagtactggagcactgttcatctatttataggcacgagacgcagcccatgtaaaattacactcatgccctttacatttgctaataattctatagtaattcatcggggtctagatagccttttcctctttaagtcggtttccttttctgttatcatgccgaagctcccttgcgcacaacttcggctttgttccattcttcgtatcccttgtgcttcttctcactgtgattttgactcaagcccgaagggtccgagttcgaaggtacctgctcatgtgttatactccaaaaacattgttaaatcatgtttttgaggaccttcggaagccgaaggtccccaacatgtaccttctttgttcctcattatcaaatattgtatgttctgtcacatacatctttaaacccttcattttctctttctccgttgctttgtgatgataagcatctaatatctgaaagggaacacaaggacagtgttggtcacttgttctcaaatgctgtgaatcaagaacaaggcaacacaattgttaaagattaagaaccttcgtcttctaaagcattatttcctcatgggtataatgctcattagacaaaggtcaagaatgacataccttcatcatttaacatgtgaataagaatgcataaggatgaagcagtaactgcatcttattacttcattcatatttgtattccataaattacgtatgaatattaacaggattaatgttacattggtaccttcgtcttgctcgaaggtgtggatgcgagagagtgattacaacccagtgtgaacagtacggtgttacttttcatctatttataggcacatgatgcagtctgggtaaaattacatccatgcccttgaacatttgtttataagcagcttaaactaataaggtctatctagtgttttccttctttgcttgatctgagtcgaagctactgagcttcggtgttttgcattattgcttcttcccaaggtcttcgtcttgagaacctttggcagaagtggggcggacctcttgtggcattttgctaaaggtgtttatgtcttgaggaccttcggcggagaagaagacccccaacggtagccccttcgcggtgctagatcgtttttttcgtaacgagctcggtccatgaaaaatacaaaggcttcagaatgccgaaggtccaaaaaacatcttccctgagcttgttatcgaaaaacgattaaaatattccaggcgctaggtggtccaccgttcaaccagtgtatacgatctggcggttcaccttcttctcctgcagcactatataagcagacatgttggtgagaagttaccacaacattcattgccatcgcactgttgtgctgttaaaaattttaaccgaagccgaagctttctggattgcgcttcgaacaagctcttcgtcacttgaaattagcttcgtcttaaggagtctaaacactgaaatggcccaagttagatccactgctagggtgtcccatgagggagatgaggctgaagtgactgaaacaacaccgatatcagaagcgatgagacgatcaggtctagttgtgtcagaagaaactactgccgaagatgctactaccgaagctgagcaaagtgtgccgaaggcggaagtgatgatgaaagtgaggaggacaacgacattctaagcccatcaaaacctagtcacattgaattcggaaaatcgatcgtaacagaagaggaattagttgtgatgaaaaagttaggctattttggggaagatgaaggtaaacttattcgctttgctggcgaagaagtgatttcggagccgaaagaagatgaaggtgttgtgtttaggagcttcttcagggcagggttgcgatttcccctgtatgatatgatgggaatagttttgaaaagttttgaaatatatctccatcagctaacaccgaatgccattttaggctcagtgtctacatatgggctctctgaagctagggtaagagtagaattcagggtggtagccagtcatattagcaccagggacttagtgcaggaatatgtggcaaactaaactttttcgacctctagcggttgggggatgccaaagaagaaggaaggagggaaaaatatgaacttgtttgacttccctaccgtttcaaatttgaaaagcaattcaaaaaaccatgttctgaatggttagaaatgatagaaaccatgtgccatgaaatcctcggaaattatacaaagaaagaagatcagttaatggctgctgccttcggcatccggccgaaacgaaggttgaatcgaatgatggatgccctgaatttgaatacccagattacgacagacttgacgaagggggcaggagagcaaaaagaaaaacggttgtcaacattctgagtaggcaagctgcccggtctgtcaaagaagaccaagaaactttgaagaagatgaaaacagtgtcggagccgaaggcactgactcctaaaaaacggaagcttgctatagagtcctcggagaagacgaagacacaagatgtgttgaaaccaattgcaagcccttcgtcttctgctgctgaggtcttagaaatattgaaggtaatgactgagtccttcccattcacaccgctaagtcctctgggattggaacttaccagcctcttacagaaaaaggaagtatcttcagctgctgaagggagagacgaggttcagaagaaacgacgcattatgaatatactacaagcaattgaacaaactctgcctccagcttcggcaaactgccaaagcgactaatgctgaagccactggtacagccgaaggtgaaaaccttacaaccactctgtccgaaatcgacagacttatattagatgtggttgtggagaaggaggtgatcgcgacaatttcagacaagagaaagaagattgatgaaacctcttcagagggagcgaattttgacctacggcacctgggcggccaacaactctctgaagaggacaaatcagagttgaaagaatttgcgatttcgtgtggttaccagcaggggtcgacgaagatatcattggatgcttccgcaatcatgcttgtgcgaaaattataagcaccctattgaagagtgttggattcccgaagcttgagaaggacatcagctgctataggcgtcagcatatcataggcagcctgttttattctaacttcaaagtaagaacctttctacaagttaccactgatatgttcgtattagcttaagtattttaattttgagttcgtttttatagagcttgttactgagaaaagctttaaagatgcaacaagatgatgaggatagaaaaagcaaagctattgtcaaaggtttagaggataaaatcagagaacttaaagattctctaacagaaaaggatgagttgctgcgctcagccgaaggatcccttgctgaggagcaagttcaaaataagaaattgagcaaagagctggcggatgcgcatatacttttagaagaaacttccagccgattcaaccgggaatctgaaaccttgaaaatgtcacttaaggttgagggtgagaagaattcgaagctcagtgaagcgttgagagctcttaaggagaggtgcttcaactttgcaagccaatgcactactcgattgaaaaacatattcaattcagttggagctgcatctgaagaagctaacttctctgccgaaaatatcctcggggccctcgaatgcgtggagaaagaagtcgatgtcctcgatgaagttatcaccggccatggagacttctgtgcattggtggcttctcgtggtacaaccgctgctctcataaaggccgggtgtgtggcagaaccgcccgaattattccagcttaagtgcctaagtcacgcctcaggggtcgtaacacacttaaatcagaataacccgtcagtccctcagatctagtctgataaagccacttaaccaggatcaaataccacaaactcactcgaaggtgagtcagagaagaaatacaataaaagaggaaaccttaaattaaagtacaggagttattacacaaatcggagtttttcaagtagctgatatgagttcacaaaataaaatgcagcggataatcgatatcgtcgatagcgaggaattgggcagggcctatcccactactcctcctgctcctctcttgtcggagcagcatcccactcgaccgtccaactcggtggcagggtggtaggccaagtcacaccatcaaccatatcctagagcgtacctacaaaaattatgccacaagcaaggctaagtatactaatactcagctagacttacccggtgtgaggagtctactcctctacctctagaccatgcagctgtttggcagaggggtttgggttgccaaaagcactagctgagtctaaaatcaatttttagcttttcaatttctagcatcattatcttagctaagtgtgctccttctaagcatacatggtagcaagcatttagtacaatcaacaagttatctcaggtaaaacctcatttcacttcttactcaatgtagtacaaggggtcaaacagtctcattagctgcgagaagcagacgattcgaatcgagttttatccttgcaaggtaaacctaaacacacgacatgtcagggcactccgtccccacacacgttaaccatccccatcgattccccgttcgcggtcaggccccaccgccttggcatacaatgctccactaaccccggctgctgccgtgcagtgaccgcacttgtacccaccatagctagcatgggagacccagtctcaggtcgcatgaggggtaaagtccgcgcccggcttcactcaggtactaggtttaccggttaccatatttcctgacatgtgcttagtacgttcaaatgcttgactcaggtatccacacattaatccttaattccttttcccgtctcatggacaaggcatcctccctagatccaagtccatagaccatcataggtcccgttatcaagatgaatacaatcaattcctgacctcgcgcgagtgctagaaaaatcactcgacttctatcgagatcctgattagcaaagcaactactcgacctagcatactagtattcatctcaaaaaggaattttaagttcatgcaactagaggtttcaagcaactcctacacttaagtgcatattacaagagtacaaacattaagtgtagtaaagtagcatatatagatacgattatgcataaaaccggggcttgccttcaatagctggggctacggggagatcctcgatggcagtctcagaagcttgctcctggtcttcctcgtggacagctccttgctcagggatgagcacgtactctccgtcagcgatattgcaatctaatgaatgcaatgagtaagatacatgcatggcatgatatgcaattttacaattaaaatttgatgggggaggattaatttaatatggtggagcttaatcttactactgaaggtttttgtggtacacttagtaaattagggtcaagcttggttaagctaattggtaagttcattttggtgttccactgatttctttttaatgtcttagtgagagtctattaagatttccagctgagttcattggagtgagatttattttccctctctttctttctatttcttttatgcttttaaggtgggtttgaactacaagatagctcaataaattttcaaaaattctacaaaaattacagtggtttcttattggtgtataattctctgtctcaaaatttggggcttaaaagtgaggggagaggggaactgccgctgatagagagcatctcaccatcttatagtggtttcttaagtttggtacctggcagaggtactcttttccgatgttgaacccatcatggccatgatggattcaccatcataattcttttctttgtaaaaatccccatccagtatgaagcatcaccttttgttttaaaacaaaacattttgtttttctaaagcaaggctaag

SEQ ID NO: 8497 - DNA, 2678 bp, Zea Mays
ccgctgacaaccggacatcccaatcgaatcagatgagaagctggaggctgctctacgatctccttcggcgcctgctcaaacccaccgatactcccggccaaatccgcccggcatcacacctttccacaaaatccggccaggctgcggcgcaatccgctgccgccgacccaacccgcgcggtgtcgctcctggccgagcgggactggttcgctcggatcaactcagagttcgccgccccactccggcagctgggcccgcgcttcgtcgtccgcgcgctgcagcacgccgccggcgagccgctcctctgcgtgcgcctctacgtctgggcatcgaggttcggtcagcacttcgcgcgggaccggtccgtgcggcgcgcgctcggggacgccctgttgcggcgcgggcccgtggtgctctccgcggcactggtcgccgacgtacggagctgtggctgcgaggtctcggaggagctgctgtgcgcgctggtggagagctggggcaggctcgggctggcgcactacgcgcacgaggtgttcgtgcaagtgccgcgcctgggactgcggcccagcacggccatttacaatgctgtgatcgccgcatcggtgagggcaggcgcggtggacgccgcgtacctcaggttccagcagatgcctgcggacgggtgtcggccggactgcttcacgtacaataccctggtgcacggagtctgccgacgcgggatcgtcgacgaggcgctaaggctggtgaagcaaatggagcgggcagggatcaggccgaatgttgtcacatacaccatgttggtcgatgggttctgcaatgctagcagagttgaagaagctgtttgtgtgttggagaggatgaaggagaagggagtgtcagcaactgaggctacatacaggtctctggttcatggtgcatttcgttgccttgaaaaagaaagggcatacaggatgctgagtgagtggattgagagtgatcctactctgcattcaattgcatatcatactttgctgtattgcctctcgaagaatgatatggacaaagaggcagttgaacttgcgaagaagatgagcaaaaggggatatctccttggcagcacaacattcagcattgtgatcccttgcgctgtgaaagtcttggagtcaagtgatctgtgtgagttggtagatgatttcatcaagaaaggggggaatctgggatttgatatgtatattatgattattaaatcctttctgaggtgcaaggatatctcaaaggcaaataagtattttagtcagatggtttcagatgggcttttgtctagtgtggaatcttacaacattgtgatagattgctttgccaaggcaggtgaagtggaaagagcactggagaccatcaaagttatgcaagagtcaggatgagaaaaatagagaaagctcagaaactttttaatgacatgtcaaggtatggtgtatctccagacagttacacatacaatgccctgataaaagctctatgtgatgaaagaagagttgatgaagctaaagaaattatacttgcaatggagtccatttcctgcattggtactaaacaacacacgtattggccagttgttggtgcacttactaaaatgggtcgtttcagtgaggcaggaatgttcatgaataaactgcatagaaaaaatgcccacttaggttcagtgcttatttaagggcagggtcagatattttggtccagactgtcaaagcatgacttatcagtcacatgatattttgctcggtggatgctgccctctcctgtgatgaatggatctatatcctcatctctgctaagctactatacaactgatgtttaccgttgattcacatgatctatttcaatcatgcttattgtgtccaccctttgttttcctattgagccatccatagtaatggtgacagtgtgcttgcattccctcagcaaatgttgatcaataattggacttcttagtaccttgaagtattgggcactgtgatgcatggcatttcaaggatgcaatgaatttgggcttgtccctctgaaaacctattcagaacaatttggacatttggaccggcaatgcctaaaagaattgggcacgcaaatacgaaatagccaggaccaggaatccgggttcatacaaatggaagatactgaggtccttgtaatgacaatgaataaattccgcaaacaaccactcattcgtggcaaggctagcgaagccattaaaattgaaaaggcagcttataatcacaactgttttgtagctgtagaattgttgggtagtaaagcttttttttgttttgttttgatctaattggatatctagttaccaacataactacatatcctttgttttgttttaattgcacctaggtgggccaagaagacttccacaatgcaccagtgggcattgtcccatttctgggacgagaacagcagctatgacggaattttgcattccagatgtgacagatacaatgcattgttattaaagcgttaaaactgtatgaaccaacttttcaaagtttaaatgtttaaacgaacgttgaaacgtcttttcagacttgacatagaatttcaaatatagaataagttcatacataagttgagttcacaaactaaatagcattagcataaaaagaatcagatcaagttcaacaacacaagttacaactttc

SEQ ID NO: 8498 - DNA, 3388 bp, Zea Mays
ccgctgacaaccggacatcccaatcgaatcagatgagaagctggaggctgctctacgatctccttcggcgcctgctcaaacccaccgatactcccggccaaatccgcccggcatcacacctttccacaaaatccggccaggctgcggcgcaatccgctgccgccgacccaacccgcgcggtgtcgctcctggccgagcgggactggttcgctcggatcaactcagagttcgccgccccactccggcagctgggcccgcgcttcgtcgtccgcgcgctgcagcacgccgccggcgagccgctcctctgcgtgcgcctctacgtctgggcatcgaggttcggtcagcacttcgcgcgggaccggtccgtgcggcgcgcgctcggggacgccctgttgcggcgcgggcccgtggtgctctccgcggcactggtcgccgacgtacggagctgtggctgcgaggtctcggaggagctgctgtgcgcgctggtggagagctggggcaggctcgggctggcgcactacgcgcacgaggtgttcgtgcaagtgccgcgcctgggactgcggcccagcacggccatttacaatgctgtgatcgccgcatcggtgagggcaggcgcggtggacgccgcgtacctcaggttccagcagatgcctgcggacgggtgtcggccggactgcttcacgtacaataccctggtgcacggagtctgccgacgcgggatcgtcgacgaggcgctaaggctggtgaagcaaatggagcgggcagggatcaggccgaatgttgtcacatacaccatgttggtcgatgggttctgcaatgctagcagagttgaagaagctgtttgtgtgttggagaggatgaaggagaagggagtgtcagcaactgaggctacatacaggtctctggttcatggtgcatttcgttgccttgaaaaagaaagggcatacaggatgctgagtgagtggattgagagtgatcctactctgcattcaattgcatatcatactttgctgtattgcctctcgaagaatgatatggacaaagaggcagttgaacttgcgaagaagatgagcaaaaggggatatctccttggcagcacaacattcagcattgtgatcccttgcgctgtgaaagtcttggagtcaagtgatctgtgtgagttggtagatgatttcatcaagaaaggggggaatctgggatttgatatgtatattatgattattaaatcctttctgaggtgcaaggatatctcaaaggcaaataagtattttagtcagatggtttcagatgggcttttgtctagtgtggaatcttacaacattgtgatagattgctttgccaaggcaggtgaagtggaaagagcactggagaccatcaaagttatgcaagagtcaggtttctctcctaatcttgtgacttttaacacattgataaatggatatttgaaactaggcaatgtacatgatgcaaaagcatttcttaaaatggtcatggaacatggtttaatgccagatgtcattacttttacttcccttattgacgggctatgtcatacccatcagctggatgatgccttcaattgcttcagtgagatgtctgagtggggtgtcaggccgaatgtccagacgtacaatgttctaatacatggactttgttcagctgggcatgttagcaaggccattgaacttcttaataagatgaaaatggatggcattacacctgatgcatattccttcaatgcacctattttgagtttttgcaggatgagaaaaatagagaaagctcagaaactttttaatgacatgtcaaggtatggtgtatctccagacagttacacatacaatgccctgataaaagctctatgtgatgaaagaagagttgatgaagctaaagaaattatacttgcaatggagtccatttcctgcattggtactaaacaacacacgtattggccagttgttggtgcacttactaaaatgggtcgtttcagtgaggcaggaatgttcatgaataaactgcatagaaaaaatgcccacttaggttcagtgcttatttaagggcagggtcagatattttggtccagactgtcaaagcatgacttatcagtcacatgatattttgctcggtggatgctgccctctcctgtgatgaatggatctatatcctcatctctgctaagctactatacaactgatgtttaccgttgattcacatgatctatttcaatcatgcttattgtgtccaccctttgttttcctattgagccatccatagtaatggtgacagtgtgcttgcattccctcagcaaatgttgatcaataattggacttcttagtaccttgaagtattgggcactgtgatgcatggcatttcaaggatgcaatgaatttgggcttgtccctctgaaaacctattcagaacaatttggacatttggtatgtttcttcagcatctgttacctattgtgttaaaaaaatgtctacataaagtgtcaagctttatgcaactctattgattctttgagcatgtaattactagctagagaaattctagaaatagttatcccctatattcttggccttattcatgcttgataaagaaagaggaaacataaaattttcttcagagaaaaaactgtcaccttatggatatacatgaatcagggtgcagtactacatgatacatttgtttgaactgtaggctagagattgctaccctacaaatttggtctttaagcactcaatcgacacagcaaatgacatcaggtccttacttttttcgcccctttccttagccttgacgatgcccgccaacagcctggttggtcattcaccaccattgcattacctttgaaagtggttaagtttttctctcacatagtctgacagtgctgagttaaacagccacttcatcaccagcagtgttcatttcttgttatggtgaatcatccattcaatgttcttgttcatctttcgtcatctgtcttgtttttacaggaccggcaatgcctaaaagaattgggcacgcaaatacgaaatagccaggaccaggaatccgggttcatacaaatggaagatactgaggtgggccaagaagacttccacaatgcaccagtgggcattgtcccatttctgggacgagaacagcagctatgacggaattttgcattccagatgtgacagatacaatgcattgttattaaagcgttaaaactgtatgaaccaacttttcaaagtttaaatgtttaaacgaacgttgaaacgtcttttcagacttgacatagaatttcaaatatagaataagttcatacataagttgagttcacaaactaaatagcattagcataaaaagaatcagatcaagttcaacaacacaagttacaactttc

SEQ ID NO: 8499 - DNA, 3123 bp, Zea Mays
ccgctgacaaccggacatcccaatcgaatcagatgagaagctggaggctgctctacgatctccttcggcgcctgctcaaacccaccgatactcccggccaaatccgcccggcatcacacctttccacaaaatccggccaggctgcggcgcaatccgctgccgccgacccaacccgcgcggtgtcgctcctggccgagcgggactggttcgctcggatcaactcagagttcgccgccccactccggcagctgggcccgcgcttcgtcgtccgcgcgctgcagcacgccgccggcgagccgctcctctgcgtgcgcctctacgtctgggcatcgaggttcggtcagcacttcgcgcgggaccggtccgtgcggcgcgcgctcggggacgccctgttgcggcgcgggcccgtggtgctctccgcggcactggtcgccgacgtacggagctgtggctgcgaggtctcggaggagctgctgtgcgcgctggtggagagctggggcaggctcgggctggcgcactacgcgcacgaggtgttcgtgcaagtgccgcgcctgggactgcggcccagcacggccatttacaatgctgtgatcgccgcatcggtgagggcaggcgcggtggacgccgcgtacctcaggttccagcagatgcctgcggacgggtgtcggccggactgcttcacgtacaataccctggtgcacggagtctgccgacgcgggatcgtcgacgaggcgctaaggctggtgaagcaaatggagcgggcagggatcaggccgaatgttgtcacatacaccatgttggtcgatgggttctgcaatgctagcagagttgaagaagctgtttgtgtgttggagaggatgaaggagaagggagtgtcagcaactgaggctacatacaggtctctggttcatggtgcatttcgttgccttgaaaaagaaagggcatacaggatgctgagtgagtggattgagagtgatcctactctgcattcaattgcatatcatactttgctgtattgcctctcgaagaatgatatggacaaagaggcagttgaacttgcgaagaagatgagcaaaaggggatatctccttggcagcacaacattcagcattgtgatcccttgcgctgtgaaagtcttggagtcaagtgatctgtgtgagttggtagatgatttcatcaagaaaggggggaatctgggatttgatatgtatattatgattattaaatcctttctgaggtgcaaggatatctcaaaggcaaataagtattttagtcagatggtttcagatgggcttttgtctagtgtggaatcttacaacattgtgatagattgctttgccaaggcaggtgaagtggaaagagcactggagaccatcaaagttatgcaagagtcaggtttctctcctaatcttgtgacttttaacacattgataaatggatatttgaaactaggcaatgtacatgatgcaaaagcatttcttaaaatggtcatggaacatggtttaatgccagatgtcattacttttacttcccttattgacgggctatgtcatacccatcagctggatgatgccttcaattgcttcagtgagatgtctgagtggggtgtcaggccgaatgtccagacgtacaatgttctaatacatggactttgttcagctgggcatgttagcaaggccattgaacttcttaataagatgaaaatggatggcattacacctgatgcatattccttcaatgcacctattttgagtttttgcaggatgagaaaaatagagaaagctcagaaactttttaatgacatgtcaaggtatggtgtatctccagacagttacacatacaatgccctgataaaagctctatgtgatgaaagaagagttgatgaagctaaagaaattatacttgcaatggagtccatttcctgcattggtactaaacaacacacgtattggccagttgttggtgcacttactaaaatgggtcgtttcagtgaggcaggaatgttcatgaataaactgcatagaaaaaatgcccacttaggttcagtgcttatttaagggcagggtcagatattttggtccagactgtcaaagcatgacttatcagtcacatgatattttgctcggtggatgctgccctctcctgtgatgaatggatctatatcctcatctctgctaagctactatacaactgatgtttaccgttgattcacatgatctatttcaatcatgcttattgtgtccaccctttgttttcctattgagccatccatagtaatggtgacagtgtgcttgcattccctcagcaaatgttgatcaataattggacttcttagtaccttgaagtattgggcactgtgatgcatggcatttcaaggatgcaatgaatttgggcttgtccctctgaaaacctattcagaacaatttggacatttggctagagattgctaccctacaaatttggtctttaagcactcaatcgacacagcaaatgacatcaggtccttacttttttcgcccctttccttagccttgacgatgcccgccaacagcctggttggtcattcaccaccattgcattacctttgaaagtggttaagtttttctctcacatagtctgacagtgctgagttaaacagccacttcatcaccagcagtgttcatttcttgttatggtgaatcatccattcaatgttcttgttcatctttcgtcatctgtcttgtttttacaggaccggcaatgcctaaaagaattgggcacgcaaatacgaaatagccaggaccaggaatccgggttcatacaaatggaagatactgaggtgggccaagaagacttccacaatgcaccagtgggcattgtcccatttctgggacgagaacagcagctatgacggaattttgcattccagatgtgacagatacaatgcattgttattaaagcgttaaaactgtatgaaccaacttttcaaagtttaaatgtttaaacgaacgttgaaacgtcttttcagacttgacatagaatttcaaatatagaataagttcatacataagttgagttcacaaactaaatagcattagcataaaaagaatcagatcaagttcaacaacacaagttacaactttc

SEQ ID NO: 8500 - DNA, 3341 bp, Zea Mays
ccgctgacaaccggacatcccaatcgaatcagatgagaagctggaggctgctctacgatctccttcggcgcctgctcaaacccaccgatactcccggccaaatccgcccggcatcacacctttccacaaaatccggccaggctgcggcgcaatccgctgccgccgacccaacccgcgcggtgtcgctcctggccgagcgggactggttcgctcggatcaactcagagttcgccgccccactccggcagctgggcccgcgcttcgtcgtccgcgcgctgcagcacgccgccggcgagccgctcctctgcgtgcgcctctacgtctgggcatcgaggttcggtcagcacttcgcgcgggaccggtccgtgcggcgcgcgctcggggacgccctgttgcggcgcgggcccgtggtgctctccgcggcactggtcgccgacgtacggagctgtggctgcgaggtctcggaggagctgctgtgcgcgctggtggagagctggggcaggctcgggctggcgcactacgcgcacgaggtgttcgtgcaagtgccgcgcctgggactgcggcccagcacggccatttacaatgctgtgatcgccgcatcggtgagggcaggcgcggtggacgccgcgtacctcaggttccagcagatgcctgcggacgggtgtcggccggactgcttcacgtacaataccctggtgcacggagtctgccgacgcgggatcgtcgacgaggcgctaaggctggtgaagcaaatggagcgggcagggatcaggccgaatgttgtcacatacaccatgttggtcgatgggttctgcaatgctagcagagttgaagaagctgtttgtgtgttggagaggatgaaggagaagggagtgtcagcaactgaggctacatacaggtctctggttcatggtgcatttcgttgccttgaaaaagaaagggcatacaggatgctgagtgagtggattgagagtgatcctactctgcattcaattgcatatcatactttgctgtattgcctctcgaagaatgatatggacaaagaggcagttgaacttgcgaagaagatgagcaaaaggggatatctccttggcagcacaacattcagcattgtgatcccttgcgctgtgaaagtcttggagtcaagtgatctgtgtgagttggtagatgatttcatcaagaaaggggggaatctgggatttgatatgtatattatgattattaaatcctttctgaggtgcaaggatatctcaaaggcaaataagtattttagtcagatggtttcagatgggcttttgtctagtgtggaatcttacaacattgtgatagattgctttgccaaggcaggtgaagtggaaagagcactggagaccatcaaagttatgcaagagtcaggtttctctcctaatcttgtgacttttaacacattgataaatggatatttgaaactaggcaatgtacatgatgcaaaagcatttcttaaaatggtcatggaacatggtttaatgccagatgtcattacttttacttcccttattgacgggctatgtcatacccatcagctggatgatgccttcaattgcttcagtgagatgtctgagtggggtgtcaggccgaatgtccagacgtacaatgttctaatacatggactttgttcagctgggcatgttagcaaggccattgaacttcttaataagatgaaaatggatggcattacacctgatgcatattccttcaatgcacctattttgagtttttgcaggatgagaaaaatagagaaagctcagaaactttttaatgacatgtcaaggtatggtgtatctccagacagttacacatacaatgccctgataaaagctctatgtgatgaaagaagagttgatgaagctaaagaaattatacttgcaatggagtccatttcctgcattggtactaaacaacacacgtattggccagttgttggtgcacttactaaaatgggtcgtttcagtgaggcaggaatgttcatgaataaactgcatagaaaaaatgcccacttaggttcagtgcttatttaagggcagggtcagatattttggtccagactgtcaaagcatgacttatcagtcacatgatattttgctcggtggatgctgccctctcctgtgatgaatggatctatatcctcatctctgctaagctactatacaactgatgtttaccgttgattcacatgatctatttcaatcatgcttattgtgtccaccctttgttttcctattgagccatccatagtaatggtgacagtgtgcttgcattccctcagcaaatgttgatcaataattggacttcttagtaccttgaagtattgggcactgtgatgcatggcatttcaaggatgcaatgaatttgggcttgtccctctgaaaacctattcagaacaatttggacatttggctagagattgctaccctacaaatttggtctttaagcactcaatcgacacagcaaatgacatcaggtccttacttttttcgcccctttccttagccttgacgatgcccgccaacagcctggttggtcattcaccaccattgcattacctttgaaagtggttaagtttttctctcacatagtctgacagtgctgagttaaacagccacttcatcaccagcagtgttcatttcttgttatggtgaatcatccattcaatgttcttgttcatctttcgtcatctgtcttgtttttacaggaccggcaatgcctaaaagaattgggcacgcaaatacgaaatagccaggaccaggaatccgggttcatacaaatggaagatactgaggtccttgtaatgacaatgaataaattccgcaaacaaccactcattcgtggcaaggctagcgaagccattaaaattgaaaaggcagcttataatcacaactgttttgtagctgtagaattgttgggtagtaaagcttttttttgttttgttttgatctaattggatatctagttaccaacataactacatatcctttgttttgttttaattgcacctaggtgggccaagaagacttccacaatgcaccagtgggcattgtcccatttctgggacgagaacagcagctatgacggaattttgcattccagatgtgacagatacaatgcattgttattaaagcgttaaaactgtatgaaccaacttttcaaagtttaaatgtttaaacgaacgttgaaacgtcttttcagacttgacatagaatttcaaatatagaataagttcatacataagttgagttcacaaactaaatagcattagcataaaaagaatcagatcaagttcaacaacacaagttacaactttc

SEQ ID NO: 8501 - DNA, 2460 bp, Zea Mays
ccgctgacaaccggacatcccaatcgaatcagatgagaagctggaggctgctctacgatctccttcggcgcctgctcaaacccaccgatactcccggccaaatccgcccggcatcacacctttccacaaaatccggccaggctgcggcgcaatccgctgccgccgacccaacccgcgcggtgtcgctcctggccgagcgggactggttcgctcggatcaactcagagttcgccgccccactccggcagctgggcccgcgcttcgtcgtccgcgcgctgcagcacgccgccggcgagccgctcctctgcgtgcgcctctacgtctgggcatcgaggttcggtcagcacttcgcgcgggaccggtccgtgcggcgcgcgctcggggacgccctgttgcggcgcgggcccgtggtgctctccgcggcactggtcgccgacgtacggagctgtggctgcgaggtctcggaggagctgctgtgcgcgctggtggagagctggggcaggctcgggctggcgcactacgcgcacgaggtgttcgtgcaagtgccgcgcctgggactgcggcccagcacggccatttacaatgctgtgatcgccgcatcggtgagggcaggcgcggtggacgccgcgtacctcaggttccagcagatgcctgcggacgggtgtcggccggactgcttcacgtacaataccctggtgcacggagtctgccgacgcgggatcgtcgacgaggcgctaaggctggtgaagcaaatggagcgggcagggatcaggccgaatgttgtcacatacaccatgttggtcgatgggttctgcaatgctagcagagttgaagaagctgtttgtgtgttggagaggatgaaggagaagggagtgtcagcaactgaggctacatacaggtctctggttcatggtgcatttcgttgccttgaaaaagaaagggcatacaggatgctgagtgagtggattgagagtgatcctactctgcattcaattgcatatcatactttgctgtattgcctctcgaagaatgatatggacaaagaggcagttgaacttgcgaagaagatgagcaaaaggggatatctccttggcagcacaacattcagcattgtgatcccttgcgctgtgaaagtcttggagtcaagtgatctgtgtgagttggtagatgatttcatcaagaaaggggggaatctgggatttgatatgtatattatgattattaaatcctttctgaggtgcaaggatatctcaaaggcaaataagtattttagtcagatggtttcagatgggcttttgtctagtgtggaatcttacaacattgtgatagattgctttgccaaggcaggtgaagtggaaagagcactggagaccatcaaagttatgcaagagtcaggatgagaaaaatagagaaagctcagaaactttttaatgacatgtcaaggtatggtgtatctccagacagttacacatacaatgccctgataaaagctctatgtgatgaaagaagagttgatgaagctaaagaaattatacttgcaatggagtccatttcctgcattggtactaaacaacacacgtattggccagttgttggtgcacttactaaaatgggtcgtttcagtgaggcaggaatgttcatgaataaactgcatagaaaaaatgcccacttaggttcagtgcttatttaagggcagggtcagatattttggtccagactgtcaaagcatgacttatcagtcacatgatattttgctcggtggatgctgccctctcctgtgatgaatggatctatatcctcatctctgctaagctactatacaactgatgtttaccgttgattcacatgatctatttcaatcatgcttattgtgtccaccctttgttttcctattgagccatccatagtaatggtgacagtgtgcttgcattccctcagcaaatgttgatcaataattggacttcttagtaccttgaagtattgggcactgtgatgcatggcatttcaaggatgcaatgaatttgggcttgtccctctgaaaacctattcagaacaatttggacatttggaccggcaatgcctaaaagaattgggcacgcaaatacgaaatagccaggaccaggaatccgggttcatacaaatggaagatactgaggtgggccaagaagacttccacaatgcaccagtgggcattgtcccatttctgggacgagaacagcagctatgacggaattttgcattccagatgtgacagatacaatgcattgttattaaagcgttaaaactgtatgaaccaacttttcaaagtttaaatgtttaaacgaacgttgaaacgtcttttcagacttgacatagaatttcaaatatagaataagttcatacataagttgagttcacaaactaaatagcattagcataaaaagaatcagatcaagttcaacaacacaagttacaactttc

SEQ ID NO: 8502 - DNA, 2874 bp, Zea Mays
atcgttctcatatctcatccatctataaattcgaagatccggacatcccgctgacaaccggacatcccaatcgaatcagatgagaagctggaggctgctctacgatctccttcggcgcctgctcaaacccaccgatactcccggccaaatccgcccggcatcacacctttccacaaaatccggccaggctgcggcgcaatccgctgccgccgacccaacccgcgcggtgtcgctcctggccgagcgggactggttcgctcggatcaactcagagttcgccgccccactccggcagctgggcccgcgcttcgtcgtccgcgcgctgcagcacgccgccggcgagccgctcctctgcgtgcgcctctacgtctgggcatcgaggttcggtcagcacttcgcgcgggaccggtccgtgcggcgcgcgctcggggacgccctgttgcggcgcgggcccgtggtgctctccgcggcactggtcgccgacgtacggagctgtggctgcgaggtctcggaggagctgctgtgcgcgctggtggagagctggggcaggctcgggctggcgcactacgcgcacgaggtgttcgtgcaagtgccgcgcctgggactgcggcccagcacggccatttacaatgctgtgatcgccgcatcggtgagggcaggcgcggtggacgccgcgtacctcaggttccagcagatgcctgcggacgggtgtcggccggactgcttcacgtacaataccctggtgcacggagtctgccgacgcgggatcgtcgacgaggcgctaaggctggtgaagcaaatggagcgggcagggatcaggccgaatgttgtcacatacaccatgttggtcgatgggttctgcaatgctagcagagttgaagaagctgtttgtgtgttggagaggatgaaggagaagggagtgtcagcaactgaggctacatacaggtctctggttcatggtgcatttcgttgccttgaaaaagaaagggcatacaggatgctgagtgagtggattgagagtgatcctactctgcattcaattgcatatcatactttgctgtattgcctctcgaagaatgatatggacaaagaggcagttgaacttgcgaagaagatgagcaaaaggggatatctccttggcagcacaacattcagcattgtgatcccttgcgctgtgaaagtcttggagtcaagtgatctgtgtgagttggtagatgatttcatcaagaaaggggggaatctgggatttgatatgtatattatgattattaaatcctttctgaggtgcaaggatatctcaaaggcaaataagtattttagtcagatggtttcagatgggcttttgtctagtgtggaatcttacaacattgtgatagattgctttgccaaggcaggtgaagtggaaagagcactggagaccatcaaagttatgcaagagtcaggtttctctcctaatcttgtgacttttaacacattgataaatggatatttgaaactaggcaatgtacatgatgcaaaagcatttcttaaaatggtcatggaacatggtttaatgccagatgtcattacttttacttcccttattgacgggctatgtcatacccatcagctggatgatgccttcaattgcttcagtgagatgtctgagtggggtgtcaggccgaatgtccagacgtacaatgttctaatacatggactttgttcagctgggcatgttagcaaggccattgaacttcttaataagatgaaaatggatggcattacacctgatgcatattccttcaatgcacctattttgagtttttgcaggatgagaaaaatagagaaagctcagaaactttttaatgacatgtcaaggtatggtgtatctccagacagttacacatacaatgccctgataaaagctctatgtgatgaaagaagagttgatgaagctaaagaaattatacttgcaatggagtccatttcctgcattggtactaaacaacacacgtattggccagttgttggtgcacttactaaaatgggtcgtttcagtgaggcaggaatgttcatgaataaactgcatagaaaaaatgcccacttaggttcagtgcttatttaagggcagggtcagatattttggtccagactgtcaaagcatgacttatcagtcacatgatattttgctcggtggatgctgccctctcctgtgatgaatggatctatatcctcatctctgctaagctactatacaactgatgtttaccgttgattcacatgatctatttcaatcatgcttattgtgtccaccctttgttttcctattgagccatccatagtaatggtgacagtgtgcttgcattccctcagcaaatgttgatcaataattggacttcttagtaccttgaagtattgggcactgtgatgcatggcatttcaaggatgcaatgaatttgggcttgtccctctgaaaacctattcagaacaatttggacatttggaccggcaatgcctaaaagaattgggcacgcaaatacgaaatagccaggaccaggaatccgggttcatacaaatggaagatactgaggtgggccaagaagacttccacaatgcaccagtgggcattgtcccatttctgggacgagaacagcagctatgacggaattttgcattccagatgtgacagatacaatgcattgttattaaagcgttaaaactgtatgaaccaacttttcaaagtttaaatgtttaaacgaacgttgaaacgtcttttcagacttgacatagaatttcaaatatagaataagttcatacataagttgagttcacaaactaaatagcattagcataaaaagaatcagatcaagttcaacaacacaagttacaactttc

SEQ ID NO: 8503 - DNA, 3092 bp, Zea Mays
atcgttctcatatctcatccatctataaattcgaagatccggacatcccgctgacaaccggacatcccaatcgaatcagatgagaagctggaggctgctctacgatctccttcggcgcctgctcaaacccaccgatactcccggccaaatccgcccggcatcacacctttccacaaaatccggccaggctgcggcgcaatccgctgccgccgacccaacccgcgcggtgtcgctcctggccgagcgggactggttcgctcggatcaactcagagttcgccgccccactccggcagctgggcccgcgcttcgtcgtccgcgcgctgcagcacgccgccggcgagccgctcctctgcgtgcgcctctacgtctgggcatcgaggttcggtcagcacttcgcgcgggaccggtccgtgcggcgcgcgctcggggacgccctgttgcggcgcgggcccgtggtgctctccgcggcactggtcgccgacgtacggagctgtggctgcgaggtctcggaggagctgctgtgcgcgctggtggagagctggggcaggctcgggctggcgcactacgcgcacgaggtgttcgtgcaagtgccgcgcctgggactgcggcccagcacggccatttacaatgctgtgatcgccgcatcggtgagggcaggcgcggtggacgccgcgtacctcaggttccagcagatgcctgcggacgggtgtcggccggactgcttcacgtacaataccctggtgcacggagtctgccgacgcgggatcgtcgacgaggcgctaaggctggtgaagcaaatggagcgggcagggatcaggccgaatgttgtcacatacaccatgttggtcgatgggttctgcaatgctagcagagttgaagaagctgtttgtgtgttggagaggatgaaggagaagggagtgtcagcaactgaggctacatacaggtctctggttcatggtgcatttcgttgccttgaaaaagaaagggcatacaggatgctgagtgagtggattgagagtgatcctactctgcattcaattgcatatcatactttgctgtattgcctctcgaagaatgatatggacaaagaggcagttgaacttgcgaagaagatgagcaaaaggggatatctccttggcagcacaacattcagcattgtgatcccttgcgctgtgaaagtcttggagtcaagtgatctgtgtgagttggtagatgatttcatcaagaaaggggggaatctgggatttgatatgtatattatgattattaaatcctttctgaggtgcaaggatatctcaaaggcaaataagtattttagtcagatggtttcagatgggcttttgtctagtgtggaatcttacaacattgtgatagattgctttgccaaggcaggtgaagtggaaagagcactggagaccatcaaagttatgcaagagtcaggtttctctcctaatcttgtgacttttaacacattgataaatggatatttgaaactaggcaatgtacatgatgcaaaagcatttcttaaaatggtcatggaacatggtttaatgccagatgtcattacttttacttcccttattgacgggctatgtcatacccatcagctggatgatgccttcaattgcttcagtgagatgtctgagtggggtgtcaggccgaatgtccagacgtacaatgttctaatacatggactttgttcagctgggcatgttagcaaggccattgaacttcttaataagatgaaaatggatggcattacacctgatgcatattccttcaatgcacctattttgagtttttgcaggatgagaaaaatagagaaagctcagaaactttttaatgacatgtcaaggtatggtgtatctccagacagttacacatacaatgccctgataaaagctctatgtgatgaaagaagagttgatgaagctaaagaaattatacttgcaatggagtccatttcctgcattggtactaaacaacacacgtattggccagttgttggtgcacttactaaaatgggtcgtttcagtgaggcaggaatgttcatgaataaactgcatagaaaaaatgcccacttaggttcagtgcttatttaagggcagggtcagatattttggtccagactgtcaaagcatgacttatcagtcacatgatattttgctcggtggatgctgccctctcctgtgatgaatggatctatatcctcatctctgctaagctactatacaactgatgtttaccgttgattcacatgatctatttcaatcatgcttattgtgtccaccctttgttttcctattgagccatccatagtaatggtgacagtgtgcttgcattccctcagcaaatgttgatcaataattggacttcttagtaccttgaagtattgggcactgtgatgcatggcatttcaaggatgcaatgaatttgggcttgtccctctgaaaacctattcagaacaatttggacatttggaccggcaatgcctaaaagaattgggcacgcaaatacgaaatagccaggaccaggaatccgggttcatacaaatggaagatactgaggtccttgtaatgacaatgaataaattccgcaaacaaccactcattcgtggcaaggctagcgaagccattaaaattgaaaaggcagcttataatcacaactgttttgtagctgtagaattgttgggtagtaaagcttttttttgttttgttttgatctaattggatatctagttaccaacataactacatatcctttgttttgttttaattgcacctaggtgggccaagaagacttccacaatgcaccagtgggcattgtcccatttctgggacgagaacagcagctatgacggaattttgcattccagatgtgacagatacaatgcattgttattaaagcgttaaaactgtatgaaccaacttttcaaagtttaaatgtttaaacgaacgttgaaacgtcttttcagacttgacatagaatttcaaatatagaataagttcatacataagttgagttcacaaactaaatagcattagcataaaaagaatcagatcaagttcaacaacacaagttacaactttc

SEQ ID NO: 8504 - DNA, 3238 bp, Zea Mays
atcgttctcatatctcatccatctataaattcgaagatccggacatcccgctgacaaccggacatcccaatcgaatcagatgagaagctggaggctgctctacgatctccttcggcgcctgctcaaacccaccgatactcccggccaaatccgcccggcatcacacctttccacaaaatccggccaggctgcggcgcaatccgctgccgccgacccaacccgcgcggtgtcgctcctggccgagcgggactggttcgctcggatcaactcagagttcgccgccccactccggcagctgggcccgcgcttcgtcgtccgcgcgctgcagcacgccgccggcgagccgctcctctgcgtgcgcctctacgtctgggcatcgaggttcggtcagcacttcgcgcgggaccggtccgtgcggcgcgcgctcggggacgccctgttgcggcgcgggcccgtggtgctctccgcggcactggtcgccgacgtacggagctgtggctgcgaggtctcggaggagctgctgtgcgcgctggtggagagctggggcaggctcgggctggcgcactacgcgcacgaggtgttcgtgcaagtgccgcgcctgggactgcggcccagcacggccatttacaatgctgtgatcgccgcatcggtgagggcaggcgcggtggacgccgcgtacctcaggttccagcagatgcctgcggacgggtgtcggccggactgcttcacgtacaataccctggtgcacggagtctgccgacgcgggatcgtcgacgaggcgctaaggctggtgaagcaaatggagcgggcagggatcaggccgaatgttgtcacatacaccatgttggtcgatgggttctgcaatgctagcagagttgaagaagctgtttgtgtgttggagaggatgaaggagaagggagtgtcagcaactgaggctacatacaggtctctggttcatggtgcatttcgttgccttgaaaaagaaagggcatacaggatgctgagtgagtggattgagagtgatcctactctgcattcaattgcatatcatactttgctgtattgcctctcgaagaatgatatggacaaagaggcagttgaacttgcgaagaagatgagcaaaaggggatatctccttggcagcacaacattcagcattgtgatcccttgcgctgtgaaagtcttggagtcaagtgatctgtgtgagttggtagatgatttcatcaagaaaggggggaatctgggatttgatatgtatattatgattattaaatcctttctgaggtgcaaggatatctcaaaggcaaataagtattttagtcagatggtttcagatgggcttttgtctagtgtggaatcttacaacattgtgatagattgctttgccaaggcaggtgaagtggaaagagcactggagaccatcaaagttatgcaagagtcaggtatggtgtatctccagacagttacacatacaatgccctgataaaagctctatgtgatgaaagaagagttgatgaagctaaagaaattatacttgcaatggagtccatttcctgcattggtactaaacaacacacgtattggccagttgttggtgcacttactaaaatgggtcgtttcagtgaggcaggaatgttcatgaataaactgcatagaaaaaatgcccacttaggttcagtgcttatttaagggcagggtcagatattttggtccagactgtcaaagcatgacttatcagtcacatgatattttgctcggtggatgctgccctctcctgtgatgaatggatctatatcctcatctctgctaagctactatacaactgatgtttaccgttgattcacatgatctatttcaatcatgcttattgtgtccaccctttgttttcctattgagccatccatagtaatggtgacagtgtgcttgcattccctcagcaaatgttgatcaataattggacttcttagtaccttgaagtattgggcactgtgatgcatggcatttcaaggatgcaatgaatttgggcttgtccctctgaaaacctattcagaacaatttggacatttggtatgtttcttcagcatctgttacctattgtgttaaaaaaatgtctacataaagtgtcaagctttatgcaactctattgattctttgagcatgtaattactagctagagaaattctagaaatagttatcccctatattcttggccttattcatgcttgataaagaaagaggaaacataaaattttcttcagagaaaaaactgtcaccttatggatatacatgaatcagggtgcagtactacatgatacatttgtttgaactgtaggctagagattgctaccctacaaatttggtctttaagcactcaatcgacacagcaaatgacatcaggtccttacttttttcgcccctttccttagccttgacgatgcccgccaacagcctggttggtcattcaccaccattgcattacctttgaaagtggttaagtttttctctcacatagtctgacagtgctgagttaaacagccacttcatcaccagcagtgttcatttcttgttatggtgaatcatccattcaatgttcttgttcatctttcgtcatctgtcttgtttttacaggaccggcaatgcctaaaagaattgggcacgcaaatacgaaatagccaggaccaggaatccgggttcatacaaatggaagatactgaggtccttgtaatgacaatgaataaattccgcaaacaaccactcattcgtggcaaggctagcgaagccattaaaattgaaaaggcagcttataatcacaactgttttgtagctgtagaattgttgggtagtaaagcttttttttgttttgttttgatctaattggatatctagttaccaacataactacatatcctttgttttgttttaattgcacctaggtgggccaagaagacttccacaatgcaccagtgggcattgtcccatttctgggacgagaacagcagctatgacggaattttgcattccagatgtgacagatacaatgcattgttattaaagcgttaaaactgtatgaaccaacttttcaaagtttaaatgtttaaacgaacgttgaaacgtcttttcagacttgacatagaatttcaaatatagaataagttcatacataagttgagttcacaaactaaatagcattagcataaaaagaatcagatcaagttcaacaacacaagttacaactttc

SEQ ID NO: 8505 - DNA, 1751 bp, Zea Mays
catgatttcaacgatgatatatgtgtatatactggaaatttagacaccttcccgttgtagaaaatggtgaggttattgctatgctggacattgcaaaatgcctttatgaagcaatagcaagactggaaaaggctgcagaacaaggaagtgcaatagcagctgctgttgaaggggtcgaacgtcaattaggagggaacttttcagctccttctgctctcattgaaactctaagggagaggatgttcaaaccttctctgtcaaccatcgtcacagagaatacaaaagtagcaattgtttcgcctacagatcctgtgtgtgtagcagcacaaaaaatgcgagagttttgtgttaattcagtggttgtctctacaggaaacacattgcaggggatctttacctcaaaagatatacttatgcgtgttgtgtcacaaaatatttcccctgagttgactctagtagaaaaggtgatgactgttaacccagattgtgccacattagaaacaacaattcttgatacattacatataatgcatgatggcaaattcttgcatattcctgttattgacaaagatggacagattgctgcttgcctggatgtcctgcaacttacccatgcaactattcaattggttgaaggagggaatggaactgtgaataatgtcgcaaactcggtaatgcagaggttctgggactctgctcttgcattggagcctccagatgaggaatttgatagccatagcgaggtatccttactcctgcagtcagaggctggagatggaaagagtagtgtttatccccctgtggttggcaattcgttttcctttaagctccaagaccgaaaaggccgtgtgcacagatttacttgtggctcagagagcttggacgagcttgtgtcttctgtaagacaaagattaagtattgctgatgaaaaagaagctgtgcaactcttgtatgaagatgatgaaggtgaccgagtgctgctgacaacagatgccgatcttgctggtgcactgctgcatgccaaatcatctgggttgaaggtgctgaagttgcacatcgaagaccctagtttgaacactgaagtgacaaaaccatcccaagagctggcaccacctcccctcaagagtgggatatcgatggttcatgttgggttaacggccggtgtagtcgctctcagtggcgcagcagtgatggtttacttgaaacgatctcaactgtgatttcgaaaatcggaggatgttttttaggagcttgattatctgaaacaagcattgccatcagctaatgcattctgaagctttgccttcactcggtgccatttacaagctaagaactgaaggaatgtacagaaatgaagaccacatctgtgatcttttgatgagctgaaagtccgtacaggccacgggacaagatcactgtttttggaggtgaatttctgggcagaacggcgtgcctatctttgttcattcagcacaagccgtggcaatttcacgactatgatgtaatgtgtaaacattacatatttgttcctattcatactgatgtatttgtttgtagataaaaactcatttcacatgacactattgtttgagaattgagaggggtctggtagaatgtcacctgattttgaggatagaatcgaatacataacatatatgtgctagaatacataacatatatatgctaggattcatttttagatattgttcaaaacgtaaacaaaagattatataacattattacagtctgct

SEQ ID NO: 8506 - DNA, 1906 bp, Zea Mays
ttcctgtctggctcgtcgtctctttatagattcagacagagcaagaaaaacgaggcctgatttcttgcagggcgtgcggcggcagcgcatgcgggttctctccttccccccttcctctccctctctccggacaacaccctcttcccttcttgcaccctcgttgttgttagattagagtaccaatatatagttccccacatcggccaggagcccaggaatcctcgcatcccgacatccgatttctctccctctccctcccttcccttcctctgcttccggggaggaggagaggaaagagacgaagggcgcgccgggaaggaggaccaggaggggaggcacacaacgcttcctcttgcacgcgggagtcctcaagcctcctccttggccttggctccaattcggggtgccataacacgacctctgccggcggccggccaccggcacccatgtcgcccttctacctcgctcgcggtgcttccaagctagtgagaaggattacctcggagacatcagtcgagctcaagattctctctgaaaaatggcggcttctcctcgctggcgtcatttttcagtacattcatggtttggccgctcatggggttcattatttgcaccggccggggcccacccttcaagatcttggcttcatgattcttccggagcttgggaaagaaaggggttacatcagtgagacattgtttacgttcatcttcctcgcctttgttggacatttcatcctttcatccttcagactaaacgcttctacactgttctgatatggcgcagggtacttgcattcttatgtgtttctcagtttcttcgaataataacattctatgcaacacagcttccaggacctaattatcattgtcgagagggctcacatctggctagattaccaccaccccagaatgcagctgaggtcttcctgattaatttcccaagaggagtgatttatggatgtggtgacttgatattttcatcccacatgattttcaccctagtttttgtcattacataccagaaatatggaagcatgaggttttgtaagatgcttgcttggtgcgtggctattgttcagagtcttcttattgtatcttctcgcaagcattacagcgttgatgttgttgttgcatggtatacggtgaatttggtggtcttttttgtggataagaagcttacagaacttcctgatcgatcggtggggtccacatcaatacttcctctgagtgcaaaggataaagataccaagttgaaagaagaaaatacgagattgctgaatggtaactctatggattcagctgatcggagaccacgaacacaaatgaatggaaagcaaattgataatgaaagccaagttgatagtgaaactgtgaaagcatgatatactctgatggagggggttttgtttgctaaaagctgttcagacagctaaggccctgttcgtttgttacggattgatggatcggaacgattcctaatcggattgctttagtttatataaacctcagctggaacgattccggggattgcttctctagtttatataaatctcaacgggaacgattctggatgtaattctacacaaacgaacaaggcccaaagaagaaatatgggatgccacgcgctttggtgcctagctccttgatgacttgatgacatagctacgaaggaaatagctttacatctcgctgttctaggcagcagaagttttgtttgcactttgcaaaactgtatatccttctcagctgtctcattgtaacccattctttttctggtttctttcctttattttccagcttggagttcagattctttctttatattaactgtgaatagatagtacacatctgaggttctttgcatgcgaacagtattcgtatagtcaatataaaattgtccttat

SEQ ID NO: 8507 - DNA, 1929 bp, Zea Mays
ttcctgtctggctcgtcgtctctttatagattcagacagagcaagaaaaacgaggcctgatttcttgcagggcgtgcggcggcagcgcatgcgggttctctccttccccccttcctctccctctctccggacaacaccctcttcccttcttgcaccctcgttgttgttagattagagtaccaatatatagttccccacatcggccaggagcccaggaatcctcgcatcccgacatccgatttctctccctctccctcccttcccttcctctgcttccggggaggaggagaggaaagagacgaagggcgcgccgggaaggaggaccaggaggggaggcacacaacgcttcctcttgcacgcgggagtcctcaagcctcctccttggccttggctccaattcggggtgccataacacgacctctgccggcggccggccaccggcacccatgtcgcccttctacctcgctcgcggtgcttccaagctagtgagaaggattacctcggagacatcagtcgagctcaagattctctctgaaaaatggcggcttctcctcgctggcgtcatttttcagtacattcatggtttggccgctcatggggttcattatttgcaccggccggggcccacccttcaagatcttggcttcatgattcttccggagcttgggaaagaaaggggttacatcagtgagacattgtttacgttcatcttcctcgcctttgtgttgtgtcaattttgctttgcagtggacatttcatcctttcatccttcagactaaacgcttctacactgttctgatatggcgcagggtacttgcattcttatgtgtttctcagtttcttcgaataataacattctatgcaacacagcttccaggacctaattatcattgtcgagagggctcacatctggctagattaccaccaccccagaatgcagctgaggtcttcctgattaatttcccaagaggagtgatttatggatgtggtgacttgatattttcatcccacatgattttcaccctagtttttgtcattacataccagaaatatggaagcatgaggttttgtaagatgcttgcttggtgcgtggctattgttcagagtcttcttattgtatcttctcgcaagcattacagcgttgatgttgttgttgcatggtatacggtgaatttggtggtcttttttgtggataagaagcttacagaacttcctgatcgatcggtggggtccacatcaatacttcctctgagtgcaaaggataaagataccaagttgaaagaagaaaatacgagattgctgaatggtaactctatggattcagctgatcggagaccacgaacacaaatgaatggaaagcaaattgataatgaaagccaagttgatagtgaaactgtgaaagcatgatatactctgatggagggggttttgtttgctaaaagctgttcagacagctaaggccctgttcgtttgttacggattgatggatcggaacgattcctaatcggattgctttagtttatataaacctcagctggaacgattccggggattgcttctctagtttatataaatctcaacgggaacgattctggatgtaattctacacaaacgaacaaggcccaaagaagaaatatgggatgccacgcgctttggtgcctagctccttgatgacttgatgacatagctacgaaggaaatagctttacatctcgctgttctaggcagcagaagttttgtttgcactttgcaaaactgtatatccttctcagctgtctcattgtaacccattctttttctggtttctttcctttattttccagcttggagttcagattctttctttatattaactgtgaatagatagtacacatctgaggttctttgcatgcgaacagtattcgtatagtcaatataaaattgtccttat

SEQ ID NO: 8508 - DNA, 2348 bp, Zea Mays
ttcctgtctggctcgtcgtctctttatagattcagacagagcaagaaaaacgaggcctgatttcttgcagggcgtgcggcggcagcgcatgcgggttctctccttccccccttcctctccctctctccggacaacaccctcttcccttcttgcaccctcgttgttgttagattagagtaccaatatatagttccccacatcggccaggagcccaggaatcctcgcatcccgacatccgatttctctccctctccctcccttcccttcctctgcttccggggaggaggagaggaaagagacgaagggcgcgccgggaaggaggaccaggaggggaggcacacaacgcttcctcttgcacgcgggagtcctcaagcctcctccttggccttggctccaattcggggtgccataacacgacctctgccggcggccggccaccggcacccatgtcgcccttctacctcgctcgcggtgcttccaagctagtgagaaggattacctcggagacatcagtcgagctcaagattctctctgaaaaatggcggcttctcctcgctggcgtcatttttcagtacattcatggtttggccgctcatggggttcattatttgcaccggccggggcccacccttcaagatcttggcttcatgattcttccggagcttgggaaagaaaggggttacatcagtgagacattgtttacgttcatcttcctcgcctttgtgttggtactaatcttttttgtttggttgttgtctttcttttcccttcggtgggggtagatggccatgactgcacattgggaattggctatttgttttaaaccaactgacaactgtgcagtgtatacctgacgaattactatgtcatgctttattcacaatgtactcttcactcgcatttgcattctcctgttgctaccaaaattttcttattcctgaaatgcatctattttgttctaatctgcatgtttagcctaactcattttttttacggaggtaaccctgcttttataaaacctaacacgtcttacaaaagaagtaacctaactcaattgtgacaagatgattccaatttgcagttgttttttcccacaatggaccaatcttttgtcctaactgcaagttttgcattgctcaattgtcagtgtcaattttgctttgcagtggacatttcatcctttcatccttcagactaaacgcttctacactgttctgatatggcgcagggtacttgcattcttatgtgtttctcagtttcttcgaataataacattctatgcaacacagcttccaggacctaattatcattgtcgagagggctcacatctggctagattaccaccaccccagaatgcagctgaggtcttcctgattaatttcccaagaggagtgatttatggatgtggtgacttgatattttcatcccacatgattttcaccctagtttttgtcattacataccagaaatatggaagcatgaggttttgtaagatgcttgcttggtgcgtggctattgttcagagtcttcttattgtatcttctcgcaagcattacagcgttgatgttgttgttgcatggtatacggtgaatttggtggtcttttttgtggataagaagcttacagaacttcctgatcgatcggtggggtccacatcaatacttcctctgagtgcaaaggataaagataccaagttgaaagaagaaaatacgagattgctgaatggtaactctatggattcagctgatcggagaccacgaacacaaatgaatggaaagcaaattgataatgaaagccaagttgatagtgaaactgtgaaagcatgatatactctgatggagggggttttgtttgctaaaagctgttcagacagctaaggccctgttcgtttgttacggattgatggatcggaacgattcctaatcggattgctttagtttatataaacctcagctggaacgattccggggattgcttctctagtttatataaatctcaacgggaacgattctggatgtaattctacacaaacgaacaaggcccaaagaagaaatatgggatgccacgcgctttggtgcctagctccttgatgacttgatgacatagctacgaaggaaatagctttacatctcgctgttctaggcagcagaagttttgtttgcactttgcaaaactgtatatccttctcagctgtctcattgtaacccattctttttctggtttctttcctttattttccagcttggagttcagattctttctttatattaactgtgaatagatagtacacatctgaggttctttgcatgcgaacagtattcgtatagtcaatataaaattgtccttat

SEQ ID NO: 8509 - DNA, 3406 bp, Zea Mays
aaaaccgattccgttttcgaaaaataccgttaccggtgaatccgatcgaaaaatttcgcaatcggtttacggaataccgaaaaattccgaaaccgttttcatccctagtcgttaccttccagatggacgtgataaaatacctaggcccaccacggaggttccatggttccatcgtcattgtgtgttgtcaagtgatgtgggttgtcaactcctagatggtcaactcttagacggtccatgagaaaacacccaagcctaacacgacacgaagccacatgcagcgcaatgctcccggatagtaccacctcgctagctgaaggaggacgagcggccgagcaagctataaaaaagggactgatctctttttcaactcgaactttctcggccttttggctaagataaagtgcattatctacttttgtatgtgggccatgtccactttaattttaaatttatttttatagggagggtccactttaatttataatttattttttatggagagggccctcgcgtgtcgtatagccattgcactatacattaaatatgtagtgttatgtgtttaaacggtctaaatggtttggtactgtctaaccttttgtgaagtaaacacaaagcttttgatgtcctctttatctaagctatgtacctacaaaagaagggataattgttagtatgtagtatgtaaattttagcaagagtaaatgagtaaatccataaatatatttgctccaacaaaataacaataaaatggcacatcaaagatcatccacaaacatagccacatagatagtgtttacaaagtacaaaccattgttttcaggtcgggcgaccagctggtcgttcagaggaccgactaggtgcctaatcgcgattagggtgatgattaggacacctaatcggtcctggtcgacctctggtcgtcccctaatcgtcctatatatttctggacatatgtatatataatatgatatatgtatatataagcaatactgcaataggcattatatgagtctgaaagtctgaaattgaaactgagtaacagactgaaaggcaatataggcatatagcactatagcataactgaaactgaaatattgaatacaaggctacaagcagtaatgcagtacctactacctagagcatatcatcattcaagcaaaaagcagcagcagcttctccaacagattcagattcatcagaattcagacaataggaaagataggaaagggggagaaggggggaccttgagatgaggagctcatctcgtcgctagtgttttggagccgttgccggtgttctagagccgcagtttgtgttctagactcaatagaggagaggaaaagtttcaagggatgacaatgagtggcggcgtattgcctttatactactgtagatggatcgaaaaaatagaagcccagtagcccactagaaaccctagccgcctgaacaatttctggtcgatttaccatctagtcagacgactaatcgcccctaatcgatgactagtcggatgacttggacgacttgatactctagtcgagtcgtccggctgatcggccactactaggcgaccgacccgattaattgtgattagtcggacgacttgaaaacagtggtacaaacaaagcaccatagacatagcatagttcttagtttcttacaaacaaagcaatagtttatatggatcaatcgatatgatgcctgcgaacatgcttgcattgaagcggttgatccctattggaatgggttctgagaggaggttgttggagacattgatgaacctgagctctggctgggagaagtccagcatcgagccctcaaagcggttgttggcgagcgacaactcgagcagtcgtgtttaggtgatgtaccttgggatggggctggagaacttgttggagaggtgtagcttgcggaggccgcgcttgggtccgaacgtgccctcggggatggtgtcggacaatcgatatcacgacagttagagcatcttgagcggccgcacatgggtccgaacttgccctcagggatggtgtcagacagtcggttttgcgacaggtagagcatcttgagcgagcgccgacacattggggaacgtgtcagtgagcttgttgttggagaggctaagcgcatgcaggcttgggagcattgcgagggcaccgtggagcagggggatcgtcactgtgggcgcgctggttggtcaatggtatgcaggaaggaccgaatgagcagggggccggcgtcgtgggcgagctgggcggccagcagcggctcccagacctggatgacggcagttccgtgacctggagtttggagaagggcggctacaacagggttcggggcatacattgccctagttacggctcaacccgccacattttggccaaataaaaaacggcctaataagcgggataaaattgtttagactggtggtttaaacggtcggctaaaattgttaggaaaacactgattcttttgagttatcagtgattaatattgaaattgcctgccgatgctagcctgtaaagacttctataaagttccttggtgttgtgtcgttgtccagaccctaggcagtttgcatgagcttctacggtcctacctgtaaattagttgagtttatttgtaatataacttatgtatgtgtattgtgtatcatagccatcttccagtcctttactacgctgaagcataaactgctcttagtgcaaactcactgaagtctcaattgtgcctcgtaatttctgaagcttttggttttaccttttgttagtactctgttattattatctatttcacaaataagtcaatctgctgtctatttttactgcagatcattggattttgtccacaaatataaggacatttggtataatccacctgaataggcaaatggcaggtggcagggttgcacatgctaccctcaagggccccagcgtggtgaaggagatcttcattggactgaccctgggtctgatcgctggaggtatgtggaagatgcaccactggaacgagcagaggaaaactagatccttctacgacatgcttgacaagggccagatcagcgtcgtcgtcgaggagtagttcccacgtgtcacctcagaagtttttttttccagttgtttttgaaaactcactctggagggcacgacaaagtgaatgctgtggagatttggcttgaaaataagcataaccatttgagaacaccagcttctgttgaattgtcttttcttgtcatgactatttgagcatgtccgtgtcgtaaccaaacatctgatctactttacaatatgttttatgtgatctttgcgattaactgtgctcgactttatgttgtgatttatgtgattggatcacggttacctaacaggctatttgcaaacctgtgttttgacgtagctttcag

SEQ ID NO: 8510 - DNA, 1109 bp, Zea Mays
atttactgttgttctgtgtacttcacttcccagtatttctgtgttcatccaaaacctgaatggattgagggttctatgctttgcataacataggaaattaactgctagacatggttttaagggcatggctgtgttgtattaccttcctaggttgggttgggaatcaggttgcatttaaaactacgtccaaatgatgcatgctctaaacctatattcttgtgacatttttttctcgaaaagcgcaggagaactgcactccaatatattatagcagaagggaaggggaaaagaaccccggatacaaggcacccttacagaagggaagggaggccacacagaagcatacataaaacaatccataaggaaaggataagccacacacacccctatgaagatctgaatctgaccctaagaaagtggagagcggggcagccaggaaggataatcccttggcaccagcccacttgcccacttctccctctcctcatgtgcagtctgtaggagaagagagaggttaggagccactcccatcaaaaaacccactctatttctatgggtccagatcaacccacgctccaagagagagaggaggcaaatggcaggtggcagggttgcacatgctaccctcaagggccccagcgtggtgaaggagatcttcattggactgaccctgggtctgatcgctggaggtatgtggaagatgcaccactggaacgagcagaggaaaactagatccttctacgacatgcttgacaagggccagatcagcgtcgtcgtcgaggagtagttcccacgtgtcacctcagaagtttttttttccagttgtttttgaaaactcactctggagggcacgacaaagtgaatgctgtggagatttggcttgaaaataagcataaccatttgagaacaccagcttctgttgaattgtcttttcttgtcatgactatttgagcatgtccgtgtcgtaaccaaacatctgatctactttacaatatgttttatgtgatctttgcgattaactgtgctcgactttatgttgtgatttatgtgattggatcacggttacctaacaggctatttgcaaacctgtgttttgacgtagctttcag

SEQ ID NO: 8511 - DNA, 3960 bp, Zea Mays
atttactgttgttctgtgtacttcacttcccagtatttctgtgttcatccaaaacctgaatggattgagggttctatgctttgcataacataggaaattaactgctagacatggttttaagggcatggctgtgttgtattaccttcctaggttgggttgggaatcaggttgcatttaaaactacgtccaaatgatgcatgctctaaacctatattcttgtgacatttttttctcgaaaagcgcaggagaactgcactccaatatattatagcagaagggaaggggaaaagaaccccggatacaaggcacccttacagaagggaagggaggccacacagaagcatacataaaacaatccataaggaaaggataagccacacacacccctatgaagatctgaatctgaccctaagaaagtggagagcggggcagccaggaaggataatcccttggcaccagcccacttgcccacttctccctctcctcatgtgcagtctgtaggagaagagagaggttaggagccactcccatcaaaaaacccactctatttctatgggtccagatcaacccacgctccaagagagagaggaggtaatccaaccctttcttcctcaaacccgtgacctgatctgaagccctttctcaccagcccaaaaaactgatatctccttgttgaggtgctaaactgtgcaggccaaaaaaccttaagacgatgtaccaaaagactctagagaaaacgcaggataccagcatatgatgatagttttgaagtcttgatcaaagagagggcatctgactggatgattcatgcctctttttgcaagacggtctgtagtccaacatttattttgagctaccagccacaagaagaaccgacatttagagggagcccaagacctccatatctgcttgtggtgagcaaaaacacaagtcatagaatagaccactataagcaactttcgcagagtatttgccattaggtgcaatagagaaaatatgtttatcctcaatatctggctgcaaaaatagaactgagagagcattccagaggtgcagatagtccgctaaggctcccaccgttagagcacccttaatatccccaatccacctcctatttagcaggccttcttgcacagttctttttgctggttattctttttgggattatgctaaacagccttggggcaaagtctgacacttcttccattgatccatttgtccacccagaataaggtattagatccattaccaattacagtggtcagcacaacagagaagaaggatttggctttacatggcaccttaattggaagatcagcccatggatgggtagggtcagttttcttcaaccatagagccatctcattcggagagcccagcacagctctgggaaactcgagattcccaagtctcccaaattcataggcatgcaaacctttccctgagcaaccatacaatgcccaccctttgcttcctttctacctgtccacaagaagcctcttctaatcttgtcaatagcgacaatggcccatttaggaaaatcaattggcatagcagctgacataccagtgtgaacgtgctgaactaatacccttctgcctgccctgttcatcaggccagtcttccaatttgggagcttattagcaattttgtccaccaagggtaagaactggtctttgttcaactttcgtaaggaaagagggagttccaaatatttgcatggaaaggaagcaatttcacatggcaaacaattttggacctccaggatggtgtgctgggagcatctgatagggaaaatattggacttctgagcattgttgcgaaggccagaggcatcctcaaacaactcaaggatttccagagaaatggaaatgtcttcctgagtagggtgcaaaaatagagccacatcatcaacataaattgaaatcctgtgaagcttcttcctattagatagaagctgcaacaatccagcttcctcggccttggaaaaaagaagaccaagcacatccatgacaaggatgaacaacattggggataaggggtttccttgcctcaagcctcttctatgctgaatcctgttgcctggacaaccattgagaagaacttgagtgaaagaggatccaagtaaaccacaaataatatctctccaaaactgcccaaaacccatttgctgcataacttcaatcaaaaagggccaagacacataatcaaaagcttttgtaatgtctaacttgaaaagaagactggccttattctgctgatgcaacaatcttgaagtctgctggacaagcataaagttatcctggataaatcttcctttaataaaagccctctggcaaggggagaccaagctatttaaccttctagaaagcctgttggcaaggatcttggtgaccaatttagcaaaactgtgcacctgactaattggtctgaaatcacacatctgatcaaccccctcctttgggatcatggtaatatatgtagagttgagcctacctagattcacaaagtttctattccaaattgttgtcactgcatttagcacatcctctttgattgtgttccaacactctttgtagaatctcccagtgaatccctcaggccttggggccttatcagatggaaggcttctgatggtatccaaaacttcttgttctaaactaggaagctccaactcagaaagatcatgggctggcagcccaagagcctctagatcaatagttctttctctagaatcaaacttcccaatgaggttggagtagaactggtctaccaaagcagctttcttaggttggttagtatatatgatcattccatcactcaaccttgtcaccaaattcttttgagatatctggcatgaatgtgaaaaaattagtatttgcatccccttttaaccatgaaattctatatcttagtcttgccattgttcttctaaaggaagccaacaataaggactgcttcttaagcttaaattttaaccataatttagcaggagatagagccccaccttcttgtcattccatctctgtaatctcttcgctgtctctttaagtttcatgcctagggtcaggaaagggcaaccaaccggttggacagaagaccaagcatcttggacaacctcctgaaaccctccaatttggtccaaaataaatgttaggagctattacatattcgattttcgggtctagctagcatacttcaagttgatttttcatcttcaactcttatgtttaaagctttgcaacacggatcttcatgactcaatcttcttagacaatttccgactttagcttatatcctagacccgaaacttactccattcatcacattttattaggtcttatgagcttgttgttgctttacatttccatgtaggttctaggatacatgatattgaggagtaagtattggtgcacatgagtacatcacaccagctgctgtggcaaatggcaggtggcagggttgcacatgctaccctcaagggccccagcgtggtgaaggagatcttcattggactgaccctgggtctgatcgctggaggtatgtggaagatgcaccactggaacgagcagaggaaaactagatccttctacgacatgcttgacaagggccagatcagcgtcgtcgtcgaggagtagttcccacgtgtcacctcagaagtttttttttccagttgtttttgaaaactcactctggagggcacgacaaagtgaatgctgtggagatttggcttgaaaataagcataaccatttgagaacaccagcttctgttgaattgtcttttcttgtcatgactatttgagcatgtccgtgtcgtaaccaaacatctgatctactttacaatatgttttatgtgatctttgcgattaactgtgctcgactttatgttgtgatttatgtgattggatcacggttacctaacaggctatttgcaaacctgtgttttgacgtagctttcag

SEQ ID NO: 8512 - DNA, 3958 bp, Zea Mays
atttactgttgttctgtgtacttcacttcccagtatttctgtgttcatccaaaacctgaatggattgagggttctatgctttgcataacataggaaattaactgctagacatggttttaagggcatggctgtgttgtattaccttcctaggttgggttgggaatcaggttgcatttaaaactacgtccaaatgatgcatgctctaaacctatattcttgtgacatttttttctcgaaaagcgcaggagaactgcactccaatatattatagcagaagggaaggggaaaagaaccccggatacaaggcacccttacagaagggaagggaggccacacagaagcatacataaaacaatccataaggaaaggataagccacacacacccctatgaagatctgaatctgaccctaagaaagtggagagcggggcagccaggaaggataatcccttggcaccagcccacttgcccacttctccctctcctcatgtgcagtctgtaggagaagagagaggttaggagccactcccatcaaaaaacccactctatttctatgggtccagatcaacccacgctccaagagagagaggaggtaatccaaccctttcttcctcaaacccgtgacctgatctgaagccctttctcaccagcccaaaaaactgatatctccttgttgaggtgctaaactgtgcaggccaaaaaaccttaagacgatgtaccaaaagactctagagaaaacgcaggataccagcatatgatgatagttttgaagtcttgatcaaagagagggcatctgactggatgattcatgcctctttttgcaagacggtctgtagtccaacatttattttgagctaccagccacaagaagaaccgacatttagagggagcccaagacctccatatctgcttgtggtgagcaaaaacacaagtcatagaatagaccactataagcaactttcgcagagtatttgccattaggtgcaatagagaaaatatgtttatcctcaatatctggctgcaaaaatagaactgagagagcattccagaggtgcagatagtccgctaaggctcccaccgttagagcacccttaatatccccaatccacctcctatttagcaggccttcttgcacagttctttttgctggttattctttttgggattatgctaaacagccttggggcaaagtctgacacttcttccattgatccatttgtccacccagaataaggtattagatccattaccaattacagtggtcagcacaacagagaagaaggatttggctttacatggcaccttaattggaagatcagcccatggatgggtagggtcagttttcttcaaccatagagccatctcattcggagagcccagcacagctctgggaaactcgagattcccaagtctcccaaattcataggcatgcaaacctttccctgagcaaccatacaatgcccaccctttgcttcctttctacctgtccacaagaagcctcttctaatcttgtcaatagcgacaatggcccatttaggaaaatcaattggcatagcagctgacataccagtgtgaacgtgctgaactaatacccttctgcctgccctgttcatcaggccagtcttccaatttgggagcttattagcaattttgtccaccaagggtaagaactggtctttgttcaactttcgtaaggaaagagggagttccaaatatttgcatggaaaggaagcaatttcacatggcaaacaattttggacctccaggatggtgtgctgggagcatctgatagggaaaatattggacttctgagcattgttgcgaaggccagaggcatcctcaaacaactcaaggatttccagagaaatggaaatgtcttcctgagtagggtgcaaaaatagagccacatcatcaacataaattgaaatcctgtgaagcttcttcctattagatagaagctgcaacaatccagcttcctcggccttggaaaaaagaagaccaagcacatccatgacaaggatgaacaacattggggataaggggtttccttgcctcaagcctcttctatgctgaatcctgttgcctggacaaccattgagaagaacttgagtgaaagaggatccaagtaaaccacaaataatatctctccaaaactgcccaaaacccatttgctgcataacttcaatcaaaaagggccaagacacataatcaaaagcttttgtaatgtctaacttgaaaagaagactggccttattctgctgatgcaacaatcttgaagtctgctggacaagcataaagttatcctggataaatcttcctttaataaaagccctctggcaaggggagaccaagctatttaaccttctagaaagcctgttggcaaggatcttggtgaccaatttagcaaaactgtgcacctgactaattggtctgaaatcacacatctgatcaaccccctcctttgggatcatggtaatatatgtagagttgagcctacctagattcacaaagtttctattccaaattgttgtcactgcatttagcacatcctctttgattgtgttccaacactctttgtagaatctcccagtgaatccctcaggccttggggccttatcagatggaaggcttctgatggtatccaaaacttcttgttctaaactaggaagctccaactcagaaagatcatgggctggcagcccaagagcctctagatcaatagttctttctctagaatcaaacttcccaatgaggttggagtagaactggtctaccaaagcagctttcttaggttggttagtatatatgatcattccatcactcaaccttgtcaccaaattcttttgagatatctggcatgaatgtgaaaaaattagtatttgcatccccttttaaccatgaaattctatatcttagtcttgccattgttcttctaaaggaagccaacaataaggactgcttcttaagcttaaattttaaccataatttagcaggagatagagccccaccttcttgtcattccatctctgtaatctcttcgctgtctctttaagtttcatgcctagggtcaggaaagggcaaccaaccggttggacagaagaccaagcatcttggacaacctcctgaaaccctccaatttggtccaaaataaatgttaggagctattacatattcgattttcgggtctagctagcatacttcaagttgatttttcatcttcaactcttatgtttaaagctttgcaacacggatcttcatgactcaatcttcttagacaatttccgactttagcttatatcctagacccgaaacttactccattcatcacattttattaggtcttatgagcttgttgttgctttacatttccatgtaggttctaggatacatgatattgaggagtaagtattggtgcacatgagtacatcacaccagctgctgtggtacagatgccgctttagattgcctctaaattgcacccttaggtttagattattgcattgcttctgttacgctgtatatacatatgcatttctatttcacttctctttactcctataaagcaccagtttcaccagtttccatggttccaccgccgtcgtgtatcgtcaatttaagtgggtcgttactagggatgaaaacggtcggtaaacactaaaaccattaccgttttcatattttttttattggaaacaaaatcgaaaacggtaactccggaaacggaaacgatatcggtatttcggaaacatcgggaacgaaagttcggtgcggaaaatacaccggtaacggtcgaaatctaaaatacgaccggtaaatatatcaaacttcacaatacaacaaagttgacaaaagatcattaagaccacaagttcacaattcatgatataacaagttcacaatataacaagttcacaatgtaacaagttcacaaggatcacaaatttataatataaaaagtt

SEQ ID NO: 8513 - DNA, 1543 bp, Zea Mays
ctggcttccccgtcggcgccggcgtgcagagtttgcacggcggatccgtttcggtgcgggtgtagagggcgtgtgcgagggccgagtggactattctagtttctgcgcatgccctcacggatctttagactccagggttcaacttcactgtgaatacgctgacgctacgagaagtcatcacggaaggggtctcgaagcaaggtgcaaagactcacctgccgtctctgatgggctttgctggctgggtatccatgctgctcttcctcctggtcgccggtgctgtagcaaatgaccagatcttcaccacttcaggtgtgccatttgggcggagttcgcgtgagccaagttaccgcgtcgaattccatcctgttgattcaccattccatccagagaatggtcaagaatcggtaccaatggctagtcatgatgggaaacgttataaatgctttctaccagttgaagaaactaaaaccatgaagtcaatgcttccgcaaaatgcaactaatgttataatagaaagtgaaaggagaattaagccaaaggagccagatgagttacttgaggttctcaaggaccagtgcttctacaggcatgaaggttggtggtcgtatgaattctgttatcatgggaaaatcagacaggtccatgtagacgacgataaggttatccaagaatttgttctaggcgaattcgatgacgacgcgactgctgcataccatgaaaatatcacttctgagttagttgacgatgaccatcatgtgaaagatatatctcagaggtatcatgttcacttgtatacaaatgggactgtatgcgatctcacagatattccgcgggagacagaggttagatttgtctgctcggagcctactgtactgattagttcagtcaaggagatctcttcctgcagatatgttgtaacgattcaaagtcccatgctttgcaaaaacccgttattccaggaagaaaaacgaaccctctccatccactgcaatgagttgcctgctagagcggaatccagcgcggaggatgactcgcttccaaaagaagctcagatttccatcatccccgatcaggatgagctacatgatttcccagcctatgctacttgatttgcctccaataattatgtttgatgtagaaaaaaaaacaccattttggaggcgcaggggcaactgagcaacactatgtattaactatctcgtagatactacagcagaggctccttgtaaagcaggttgagacgatcattctgcagttcttattatataggatgattacgaaggtaacatgtttgggacagtaacatttgcttgaaatgtatatagtctacaacaagaataatgccagcattcttgaaatgtaggtgtgcgagcacttttacacgaagtaatattgctctggtgtgacgaacgatctgttgtcggttgagatgaaaaggcgttcgccttctattaagaatgtaaatggtacaaaaggatgtaaatggtacggatattatctgttcgtatttgaatttaatccggtttgagatgtatccgag

SEQ ID NO: 8514 - DNA, 1488 bp, Zea Mays
gcttgctcgagtttgaagaaaaacttagccttttcggtttccttggccgttcggatctggcttccccgtcggcgccggcgtgcagagtttgcacggcggatccgtttcggtgcgggtgtagagggcgtgtgcgagggccgagtggactattctagtttctgcgcatgccctcacggatctttagactccagggttcaacttcactgtgaatacgctgacgctacgagaagtcatcacggaaggggtctcgaagcaaggtgtgccatttgggcggagttcgcgtgagccaagttaccgcgtcgaattccatcctgttgattcaccattccatccagagaatggtcaagaatcggtaccaatggctagtcatgatgggaaacgttataaatgctttctaccagttgaagaaactaaaaccatgaagtcaatgcttccgcaaaatgcaactaatgttataatagaaagtgaaaggagaattaagccaaaggagccagatgagttacttgaggttctcaaggaccagtgcttctacaggcatgaaggttggtggtcgtatgaattctgttatcatgggaaaatcagacaggtccatgtagacgacgataaggttatccaagaatttgttctaggcgaattcgatgacgacgcgactgctgcataccatgaaaatatcacttctgagttagttgacgatgaccatcatgtgaaagatatatctcagaggtatcatgttcacttgtatacaaatgggactgtatgcgatctcacagatattccgcgggagacagaggttagatttgtctgctcggagcctactgtactgattagttcagtcaaggagatctcttcctgcagatatgttgtaacgattcaaagtcccatgctttgcaaaaacccgttattccaggaagaaaaacgaaccctctccatccactgcaatgagttgcctgctagagcggaatccagcgcggaggatgactcgcttccaaaagaagctcagatttccatcatccccgatcaggatgagctacatgatttcccagcctatgctacttgatttgcctccaataattatgtttgatgtagaaaaaaaaacaccattttggaggcgcaggggcaactgagcaacactatgtattaactatctcgtagatactacagcagaggctccttgtaaagcaggttgagacgatcattctgcagttcttattatataggatgattacgaaggtaacatgtttgggacagtaacatttgcttgaaatgtatatagtctacaacaagaataatgccagcattcttgaaatgtaggtgtgcgagcacttttacacgaagtaatattgctctggtgtgacgaacgatctgttgtcggttgagatgaaaaggcgttcgccttctattaagaatgtaaatggtacaaaaggatgtaaatggtacggatattatctgttcgtatttgaatttaatccggtttgagatgtatccgag

SEQ ID NO: 8515 - DNA, 1489 bp, Zea Mays
tctgatccttacttcctttcccggcgcctgatcgtacaaagctgcgcgcttgctcgagtttgaagaaaaacttagccttttcggtttccttggccgttcggatctggcttccccgtcggcgccggcgtgcagagtttgcacggcggatccgtttcggtgcgggtgtagagggcgtgtgcgagggccgagtggggttcaacttcactgtgaatacgctgacgctacgagaagtcatcacggaaggggtctcgaagcaaggtgtgccatttgggcggagttcgcgtgagccaagttaccgcgtcgaattccatcctgttgattcaccattccatccagagaatggtcaagaatcggtaccaatggctagtcatgatgggaaacgttataaatgctttctaccagttgaagaaactaaaaccatgaagtcaatgcttccgcaaaatgcaactaatgttataatagaaagtgaaaggagaattaagccaaaggagccagatgagttacttgaggttctcaaggaccagtgcttctacaggcatgaaggttggtggtcgtatgaattctgttatcatgggaaaatcagacaggtccatgtagacgacgataaggttatccaagaatttgttctaggcgaattcgatgacgacgcgactgctgcataccatgaaaatatcacttctgagttagttgacgatgaccatcatgtgaaagatatatctcagaggtatcatgttcacttgtatacaaatgggactgtatgcgatctcacagatattccgcgggagacagaggttagatttgtctgctcggagcctactgtactgattagttcagtcaaggagatctcttcctgcagatatgttgtaacgattcaaagtcccatgctttgcaaaaacccgttattccaggaagaaaaacgaaccctctccatccactgcaatgagttgcctgctagagcggaatccagcgcggaggatgactcgcttccaaaagaagctcagatttccatcatccccgatcaggatgagctacatgatttcccagcctatgctacttgatttgcctccaataattatgtttgatgtagaaaaaaaaacaccattttggaggcgcaggggcaactgagcaacactatgtattaactatctcgtagatactacagcagaggctccttgtaaagcaggttgagacgatcattctgcagttcttattatataggatgattacgaaggtaacatgtttgggacagtaacatttgcttgaaatgtatatagtctacaacaagaataatgccagcattcttgaaatgtaggtgtgcgagcacttttacacgaagtaatattgctctggtgtgacgaacgatctgttgtcggttgagatgaaaaggcgttcgccttctattaagaatgtaaatggtacaaaaggatgtaaatggtacggatattatctgttcgtatttgaatttaatccggtttgagatgtatccgag

SEQ ID NO: 8516 - DNA, 1623 bp, Zea Mays
gttcccctcccctctactgtacctctgatccttacttcctttcccggcgcctgatcgtacaaagctgcgcgcttgctcgagtttgaagaaaaacttagccttttcggtttccttggccgttcggatctggcttccccgtcggcgccggcgtgcagagtttgcacggcggatccgtttcggtgcgggtgtagagggcgtgtgcgagggccgagtggggttcaacttcactgtgaatacgctgacgctacgagaagtcatcacggaaggggtctcgaagcaaggtgcaaagactcacctgccgtctctgatgggctttgctggctgggtatccatgctgctcttcctcctggtcgccggtgctgtagcaaatgaccagatcttcaccacttcaggtgtgccatttgggcggagttcgcgtgagccaagttaccgcgtcgaattccatcctgttgattcaccattccatccagagaatggtcaagaatcggtaccaatggctagtcatgatgggaaacgttataaatgctttctaccagttgaagaaactaaaaccatgaagtcaatgcttccgcaaaatgcaactaatgttataatagaaagtgaaaggagaattaagccaaaggagccagatgagttacttgaggttctcaaggaccagtgcttctacaggcatgaaggttggtggtcgtatgaattctgttatcatgggaaaatcagacaggtccatgtagacgacgataaggttatccaagaatttgttctaggcgaattcgatgacgacgcgactgctgcataccatgaaaatatcacttctgagttagttgacgatgaccatcatgtgaaagatatatctcagaggtatcatgttcacttgtatacaaatgggactgtatgcgatctcacagatattccgcgggagacagaggttagatttgtctgctcggagcctactgtactgattagttcagtcaaggagatctcttcctgcagatatgttgtaacgattcaaagtcccatgctttgcaaaaacccgttattccaggaagaaaaacgaaccctctccatccactgcaatgagttgcctgctagagcggaatccagcgcggaggatgactcgcttccaaaagaagctcagatttccatcatccccgatcaggatgagctacatgatttcccagcctatgctacttgatttgcctccaataattatgtttgatgtagaaaaaaaaacaccattttggaggcgcaggggcaactgagcaacactatgtattaactatctcgtagatactacagcagaggctccttgtaaagcaggttgagacgatcattctgcagttcttattatataggatgattacgaaggtaacatgtttgggacagtaacatttgcttgaaatgtatatagtctacaacaagaataatgccagcattcttgaaatgtaggtgtgcgagcacttttacacgaagtaatattgctctggtgtgacgaacgatctgttgtcggttgagatgaaaaggcgttcgccttctattaagaatgtaaatggtacaaaaggatgtaaatggtacggatattatctgttcgtatttgaatttaatccggtttgagatgtatccgag

SEQ ID NO: 8517 - DNA, 1504 bp, Zea Mays
atcaaaggcgtaaactcggcgtagacggagactgcagacgcccggaccacaggaacaccgaagtaccgaacactaccggccacacgctcgagaataggcggcggtgcaggtcctcctccatctctgtcgtgactattctagtttctgcgcatgccctcacggatctttagactccagggttcaacttcactgtgaatacgctgacgctacgagaagtcatcacggaaggggtctcgaagcaaggtgcaaagactcacctgccgtctctgatgggctttgctggctgggtatccatgctgctcttcctcctggtcgccggtgctgtagcaaatgaccagatcttcaccacttcaggtgtgccatttgggcggagttcgcgtgagccaagttaccgcgtcgaattccatcctgttgattcaccattccatccagagaatggtcaagaatcggtaccaatggctagtcatgatgggaaacgttataaatgctttctaccagttgaagaaactaaaaccatgaagtcaatgcttccgcaaaatgcaactaatgttataatagaaagtgaaaggagaattaagccaaaggagccagatgagttacttgaggttctcaaggaccagtgcttctacaggcatgaaggttggtggtcgtatgaattctgttatcatgggaaaatcagacaggtccatgtagacgacgataaggttatccaagaatttgttctaggcgaattcgatgacgacgcgactgctgcataccatgaaaatatcacttctgagttagttgacgatgaccatcatgtgaaagatatatctcagaggtatcatgttcacttgtatacaaatgggactgtatgcgatctcacagatattccgcgggagacagaggttagatttgtctgctcggagcctactgtactgattagttcagtcaaggagatctcttcctgcagatatgttgtaacgattcaaagtcccatgctttgcaaaaacccgttattccaggaagaaaaacgaaccctctccatccactgcaatgagttgcctgctagagcggaatccagcgcggaggatgactcgcttccaaaagaagctcagatttccatcatccccgatcaggatgagctacatgatttcccagcctatgctacttgatttgcctccaataattatgtttgatgtagaaaaaaaaacaccattttggaggcgcaggggcaactgagcaacactatgtattaactatctcgtagatactacagcagaggctccttgtaaagcaggttgagacgatcattctgcagttcttattatataggatgattacgaaggtgtgcgagcacttttacacgaagtaatattgctctggtgtgacgaacgatctgttgtcggttgagatgaaaaggcgttcgccttctattaagaatgtaaatggtacaaaaggatgtaaatggtacggatattatctgttcgtatttgaatttaatccggtttgagatgtatccgag

SEQ ID NO: 8518 - DNA, 1570 bp, Zea Mays
atcaaaggcgtaaactcggcgtagacggagactgcagacgcccggaccacaggaacaccgaagtaccgaacactaccggccacacgctcgagaataggcggcggtgcaggtcctcctccatctctgtcgtgactccagggttcaacttcactgtgaatacgctgacgctacgagaagtcatcacggaaggggtctcgaagcaaggtgcaaagactcacctgccgtctctgatgggctttgctggctgggtatccatgctgctcttcctcctggtcgccggtgctgtagcaaatgaccagatcttcaccacttcaggtgtgccatttgggcggagttcgcgtgagccaagttaccgcgtcgaattccatcctgttgattcaccattccatccaagatgattacggtgtgttcaacaggagaatggtcaagaatcggtaccaatggctagtcatgatgggaaacgttataaatgctttctaccagttgaagaaactaaaaccatgaagtcaatgcttccgcaaaatgcaactaatgttataatagaaagtgaaaggagaattaagccaaaggagccagatgagttacttgaggttctcaaggaccagtgcttctacaggcatgaaggttggtggtcgtatgaattctgttatcatgggaaaatcagacaggtccatgtagacgacgataaggttatccaagaatttgttctaggcgaattcgatgacgacgcgactgctgcataccatgaaaatatcacttctgagttagttgacgatgaccatcatgtgaaagatatatctcagaggtatcatgttcacttgtatacaaatgggactgtatgcgatctcacagatattccgcgggagacagaggttagatttgtctgctcggagcctactgtactgattagttcagtcaaggagatctcttcctgcagatatgttgtaacgattcaaagtcccatgctttgcaaaaacccgttattccaggaagaaaaacgaaccctctccatccactgcaatgagttgcctgctagagcggaatccagcgcggaggatgactcgcttccaaaagaagctcagatttccatcatccccgatcaggatgagctacatgatttcccagcctatgctacttgatttgcctccaataattatgtttgatgtagaaaaaaaaacaccattttggaggcgcaggggcaactgagcaacactatgtattaactatctcgtagatactacagcagaggctccttgtaaagcaggttgagacgatcattctgcagttcttattatataggatgattacgaaggtaacatgtttgggacagtaacatttgcttgaaatgtatatagtctacaacaagaataatgccagcattcttgaaatgtaggtgtgcgagcacttttacacgaagtaatattgctctggtgtgacgaacgatctgttgtcggttgagatgaaaaggcgttcgccttctattaagaatgtaaatggtacaaaaggatgtaaatggtacggatattatctgttcgtatttgaatttaatccggtttgagatgtatccgag

SEQ ID NO: 8519 - DNA, 1458 bp, Zea Mays
atcaaaggcgtaaactcggcgtagacggagactgcagacgcccggaccacaggaacaccgaagtaccgaacactaccggccacacgctcgagaataggcggcggtgcaggtcctcctccatctctgtcgtgggttcaacttcactgtgaatacgctgacgctacgagaagtcatcacggaaggggtctcgaagcaaggtgcaaagactcacctgccgtctctgatgggctttgctggctgggtatccatgctgctcttcctcctggtcgccggtgctgtagcaaatgaccagatcttcaccacttcaggtgtgccatttgggcggagttcgcgtgagccaagttaccgcgtcgaattccatcctgttgattcaccattccatccagagaatggtcaagaatcggtaccaatggctagtcatgatgggaaacgttataaatgctttctaccagttgaagaaactaaaaccatgaagtcaatgcttccgcaaaatgcaactaatgttataatagaaagtgaaaggagaattaagccaaaggagccagatgagttacttgaggttctcaaggaccagtgcttctacaggcatgaaggttggtggtcgtatgaattctgttatcatgggaaaatcagacaggtccatgtagacgacgataaggttatccaagaatttgttctaggcgaattcgatgacgacgcgactgctgcataccatgaaaatatcacttctgagttagttgacgatgaccatcatgtgaaagatatatctcagaggtatcatgttcacttgtatacaaatgggactgtatgcgatctcacagatattccgcgggagacagaggttagatttgtctgctcggagcctactgtactgattagttcagtcaaggagatctcttcctgcagatatgttgtaacgattcaaagtcccatgctttgcaaaaacccgttattccaggaagaaaaacgaaccctctccatccactgcaatgagttgcctgctagagcggaatccagcgcggaggatgactcgcttccaaaagaagctcagatttccatcatccccgatcaggatgagctacatgatttcccagcctatgctacttgatttgcctccaataattatgtttgatgtagaaaaaaaaacaccattttggaggcgcaggggcaactgagcaacactatgtattaactatctcgtagatactacagcagaggctccttgtaaagcaggttgagacgatcattctgcagttcttattatataggatgattacgaaggtgtgcgagcacttttacacgaagtaatattgctctggtgtgacgaacgatctgttgtcggttgagatgaaaaggcgttcgccttctattaagaatgtaaatggtacaaaaggatgtaaatggtacggatattatctgttcgtatttgaatttaatccggtttgagatgtatccgag

SEQ ID NO: 8520 - DNA, 1474 bp, Zea Mays
atcaaaggcgtaaactcggcgtagacggagactgcagacgcccggaccacaggaacaccgaagtaccgaacactaccggccacacgctcgagaataggcggcggtgcaggtcctcctccatctctgtcgtgactattctagtttctgcgcatgccctcacggatctttagactccagggttcaacttcactgtgaatacgctgacgctacgagaagtcatcacggaaggggtctcgaagcaaggtgtgccatttgggcggagttcgcgtgagccaagttaccgcgtcgaattccatcctgttgattcaccattccatccagagaatggtcaagaatcggtaccaatggctagtcatgatgggaaacgttataaatgctttctaccagttgaagaaactaaaaccatgaagtcaatgcttccgcaaaatgcaactaatgttataatagaaagtgaaaggagaattaagccaaaggagccagatgagttacttgaggttctcaaggaccagtgcttctacaggcatgaaggttggtggtcgtatgaattctgttatcatgggaaaatcagacaggtccatgtagacgacgataaggttatccaagaatttgttctaggcgaattcgatgacgacgcgactgctgcataccatgaaaatatcacttctgagttagttgacgatgaccatcatgtgaaagatatatctcagaggtatcatgttcacttgtatacaaatgggactgtatgcgatctcacagatattccgcgggagacagaggttagatttgtctgctcggagcctactgtactgattagttcagtcaaggagatctcttcctgcagatatgttgtaacgattcaaagtcccatgctttgcaaaaacccgttattccaggaagaaaaacgaaccctctccatccactgcaatgagttgcctgctagagcggaatccagcgcggaggatgactcgcttccaaaagaagctcagatttccatcatccccgatcaggatgagctacatgatttcccagcctatgctacttgatttgcctccaataattatgtttgatgtagaaaaaaaaacaccattttggaggcgcaggggcaactgagcaacactatgtattaactatctcgtagatactacagcagaggctccttgtaaagcaggttgagacgatcattctgcagttcttattatataggatgattacgaaggtaacatgtttgggacagtaacatttgcttgaaatgtatatagtctacaacaagaataatgccagcattcttgaaatgtaggtgtgcgagcacttttacacgaagtaatattgctctggtgtgacgaacgatctgttgtcggttgagatgaaaaggcgttcgccttctattaagaatgtaaatggtacaaaaggatgtaaatggtacggatattatctgttcgtatttgaatttaatccggtttgagatgtatccgag

SEQ ID NO: 8521 - DNA, 1362 bp, Zea Mays
atcaaaggcgtaaactcggcgtagacggagactgcagacgcccggaccacaggaacaccgaagtaccgaacactaccggccacacgctcgagaataggcggcggtgcaggtcctcctccatctctgtcgtggtgtgccatttgggcggagttcgcgtgagccaagttaccgcgtcgaattccatcctgttgattcaccattccatccagagaatggtcaagaatcggtaccaatggctagtcatgatgggaaacgttataaatgctttctaccagttgaagaaactaaaaccatgaagtcaatgcttccgcaaaatgcaactaatgttataatagaaagtgaaaggagaattaagccaaaggagccagatgagttacttgaggttctcaaggaccagtgcttctacaggcatgaaggttggtggtcgtatgaattctgttatcatgggaaaatcagacaggtccatgtagacgacgataaggttatccaagaatttgttctaggcgaattcgatgacgacgcgactgctgcataccatgaaaatatcacttctgagttagttgacgatgaccatcatgtgaaagatatatctcagaggtatcatgttcacttgtatacaaatgggactgtatgcgatctcacagatattccgcgggagacagaggttagatttgtctgctcggagcctactgtactgattagttcagtcaaggagatctcttcctgcagatatgttgtaacgattcaaagtcccatgctttgcaaaaacccgttattccaggaagaaaaacgaaccctctccatccactgcaatgagttgcctgctagagcggaatccagcgcggaggatgactcgcttccaaaagaagctcagatttccatcatccccgatcaggatgagctacatgatttcccagcctatgctacttgatttgcctccaataattatgtttgatgtagaaaaaaaaacaccattttggaggcgcaggggcaactgagcaacactatgtattaactatctcgtagatactacagcagaggctccttgtaaagcaggttgagacgatcattctgcagttcttattatataggatgattacgaaggtaacatgtttgggacagtaacatttgcttgaaatgtatatagtctacaacaagaataatgccagcattcttgaaatgtaggtgtgcgagcacttttacacgaagtaatattgctctggtgtgacgaacgatctgttgtcggttgagatgaaaaggcgttcgccttctattaagaatgtaaatggtacaaaaggatgtaaatggtacggatattatctgttcgtatttgaatttaatccggtttgagatgtatccgag

SEQ ID NO: 8522 - DNA, 1465 bp, Zea Mays
atcaaaggcgtaaactcggcgtagacggagactgcagacgcccggaccacaggaacaccgaagtaccgaacactaccggccacacgctcgagaataggcggcggtgcaggtcctcctccatctctgtcgtgactccagggttcaacttcactgtgaatacgctgacgctacgagaagtcatcacggaaggggtctcgaagcaaggtgcaaagactcacctgccgtctctgatgggctttgctggctgggtatccatgctgctcttcctcctggtcgccggtgctgtagcaaatgaccagatcttcaccacttcaggtgtgccatttgggcggagttcgcgtgagccaagttaccgcgtcgaattccatcctgttgattcaccattccatccagagaatggtcaagaatcggtaccaatggctagtcatgatgggaaacgttataaatgctttctaccagttgaagaaactaaaaccatgaagtcaatgcttccgcaaaatgcaactaatgttataatagaaagtgaaaggagaattaagccaaaggagccagatgagttacttgaggttctcaaggaccagtgcttctacaggcatgaaggttggtggtcgtatgaattctgttatcatgggaaaatcagacaggtccatgtagacgacgataaggttatccaagaatttgttctaggcgaattcgatgacgacgcgactgctgcataccatgaaaatatcacttctgagttagttgacgatgaccatcatgtgaaagatatatctcagaggtatcatgttcacttgtatacaaatgggactgtatgcgatctcacagatattccgcgggagacagaggttagatttgtctgctcggagcctactgtactgattagttcagtcaaggagatctcttcctgcagatatgttgtaacgattcaaagtcccatgctttgcaaaaacccgttattccaggaagaaaaacgaaccctctccatccactgcaatgagttgcctgctagagcggaatccagcgcggaggatgactcgcttccaaaagaagctcagatttccatcatccccgatcaggatgagctacatgatttcccagcctatgctacttgatttgcctccaataattatgtttgatgtagaaaaaaaaacaccattttggaggcgcaggggcaactgagcaacactatgtattaactatctcgtagatactacagcagaggctccttgtaaagcaggttgagacgatcattctgcagttcttattatataggatgattacgaaggtgtgcgagcacttttacacgaagtaatattgctctggtgtgacgaacgatctgttgtcggttgagatgaaaaggcgttcgccttctattaagaatgtaaatggtacaaaaggatgtaaatggtacggatattatctgttcgtatttgaatttaatccggtttgagatgtatccgag

SEQ ID NO: 8523 - DNA, 1905 bp, Zea Mays
gcatgttctttctctactctagtaggcactcagttgatatcagctgcaactgtcatctatgctctaagaaacctgagccatgcttctacaacagctgtggttctgagaccttggttcattgcactagtggcagctggagctatcgaaaggcttgcaggattggcgctaggagtttccatggagcgcgactgggttgtgttgcaggaacaaacaggcctgttgcattagctcaagctaatgctgtgctcaatcgacttgatctagtttgtgagacagttggtgcttctgtttttggccttcttttgtccaaataccatcctgtgacctgtttaaagattgctagtggtctaatgatatgcagtttccctgttctggtaaaccacatttatcatcactcctaaaacttgaatatggtagccagatgtagcgtactcacaatgctatatggtatttccaatttcaggtcatgttgggtcaactaatcaatagagtttcttgccatgcacttgattcctctagaactgccactgatgaatctatttgtgctgatcttttagatgtacgcaggatagttccaaatagcttgagggctatcaaacatggatggaatgagtataagcagcaaacagttctacctgcaagtgcagctaccgtgttcctaaatttcaatgttgcacttgctccaggtgccataatgactgcattattgatgcatcgtggtaccagtccatccattgttggtgctttcagtggattgtgctctatcatgggccttgttgcaacattcatctcctcaagcctggtgaaaagagttggaattctaaaggcgggagctgctggattgatatttcaagcttcactcttgtcaatcgcgctcacagtgtattgggctggttcaatttcgcaaacgacacctctacttatattcctagcatccattgcattgtcgcggttggggcacatgtcttatgatgttgtggggactcaaattgtccagacaggtgttcctgcttcaaaagcaaatctaattggaggaatggaggtttcaattgcaagccttgcggagctagtcatgcttgctatggctataattgcgaatgatgtctcccatttcggcttcctggcgatcctgtctgtgtcatcagttgctggggcagcatggatgttctgtcggtggttaacaaatccaacagatgagcagagggaactattcatggttgatcccctttatcaagttcaggcaatgtaagtactggtttttgtatctttgctgttactttattaggaaatccgggatcagaagtttttgaacttctaattgacaagggatatttgtatgtctctcaatcttattctttggcaggatatttgcatccctgatttccagtttagctattatctaaatggaaactactattattaatgtccagacataaaatattaatcactcgtaacgtaataagatgttacctcacgttttgcagatagtggatgaggcaggaaacaaccaggaaaactgcaggcgcctacttgctggtggtgcttgttggatctgcaataccgttacgatgatactaagatacagtgtgacatttaggttcaatacgggatacacttagggtagaagcatttgctcctcgtggcctcagccatgcgcagaattcaatttgtatactcgttcatctcctcacctgtacaacacatatttgatctgtataagtgttacttgttatagctgatgtagaacaacattaacagccatcggtagcacacagtcaatgaaatctaaccccctcacctttcctctgatgctgcaaatgtgtaactgtatcttttattggatccactgtcttctttctcctgtcatcttggttccttgttaggcatgtacatccctgaacctct

SEQ ID NO: 8524 - DNA, 2164 bp, Zea Mays
ggggatgattcattgcaagattggtggttgagggtacataattttctcccaaagtgttacattaccaacgttgaggttgatgttagtactgtaaataaagaagaaactttcgatgatcatccatcattggcaccaggacgcaacattccgcttgttaatcttcgaggagatattctagattctagtccttttccgctgcacgatagggcttcctgtccttcaggttttgaagagttgccggtcttgtctgaaggagagcaacatactttggcatccactcctgctcatcctgctggactatatgctctatatgctagttacttatttggtaacttggtggaacaactgtggaattttgcttggcctgccacactggcaattcttcatccaaatctattgcctgtggccattgttggtttcttcacgaagctttcagtgtttgttggggctcccatagttggcaaacttatggatcatttcccccgaatacccatgtacacagcattgaatgctgtgcaggtaggcactcagttgatatcagctgcaactgtcatctatgctctaagaaacctgagccatgcttctacaacagctgtggttctgagaccttggttcattgcactagtggcagctggagctatcgaaaggcttgcaggattggcgctaggagtttccatggagcgcgactgggttgtgttgttagcaggaacaaacaggcctgttgcattagctcaagctaatgctgtgctcaatcgacttgatctagtttgtgagacagttggtgcttctgtttttggccttcttttgtccaaataccatcctgtgacctgtttaaagattgctagtggtctaatgatatgcagtttccctgttctggtaaaccacatttatcatcactcctaaaacttgaatatggtagccagatgtagcgtactcacaatgctatatggtatttccaatttcaggtcatgttgggtcaactaatcaatagagtttcttgccatgcacttgattcctctagaactgccactgatgaatctatttgtgctgatcttttagatgtacgcaggatagttccaaatagcttgagggctatcaaacatggatggaatgagtataagcagcaaacagttctacctgcaagtgcagctaccgtgttcctaaatttcaatgttgcacttgctccaggtgccataatgactgcattattgatgcatcgtggtaccagtccatccattgttggtgctttcagtggattgtgctctatcatgggccttgttgcaacattcatctcctcaagcctggtgaaaagagttggaattctaaaggcgggagctgctggattgatatttcaagcttcactcttgtcaatcgcgctcacagtgtattgggctggttcaatttcgcaaacgacacctctacttatattcctagcatccattgcattgtcgcggttggggcacatgtcttatgatgttgtggggactcaaattgtccagacaggtgttcctgcttcaaaagcaaatctaattggaggaatggaggtttcaattgcaagccttgcggagctagtcatgcttgctatggctataattgcgaatgatgtctcccatttcggcttcctggcgatcctgtctgtgtcatcagttgctggggcagcatggatgttctgtcggtggttaacaaatccaacagatgagcagagggaactattcatggttgatcccctttatcaagttcaggcaattggatgaggcaggaaacaaccaggaaaactgcaggcgcctacttgctggtggtgcttgttggatctgcaataccgttacgatgatactaagatacagtgtgacatttaggttcaatacgggatacacttagggtagaagcatttgctcctcgtggcctcagccatgcgcagaattcaatttgtatactcgttcatctcctcacctgtacaacacatatttgatctgtataagtgttacttgttatagctgatgtagaacaacattaacagccatcggtagcacacagtcaatgaaatctaaccccctcacctttcctctgatgctgcaaatgtgtaactgtatcttttattggatccactgtcttctttctcctgtcatcttggttccttgttaggcatgtacatccctgaacctct

SEQ ID NO: 8525 - DNA, 2550 bp, Zea Mays
attctgggttttcctctacaccacaacgctacgaaactcttcatccatttgatccacatcaaacggctgatagggcccctcctatctctcctacatcttctccactcccctggattgagttggacaacttggcgcttcacctcgctcgctgctctcctctcagtcctctggttctccgtcctctcgcctcgcgcggccgcgcctgcgcctcgtcagcaagataaggctgcagcctgcaggccacagtgcaggcccatgcttccagaatcttccggaaccttgcgccgagcctgaactccccggcggcgcctggccctgtgaaggctgcatgagtagtcgcgccgccgccgccgccgcagcggagccatggggatgctcgccgccgccgttgcccccgctctcctcgcctcgccacaggcatccctcgtccgccgccgcctctccggtgcgtggacgctgcgcctgaagcccgctgctgcctcccacggcgtcgcggcgctcagggtacataattttctcccaaagtgttacattaccaacgttgaggttgatgttagtactgtaaataaagaagaaactttcgatgatcatccatcattggcaccaggacgcaacattccgcttgttaatcttcgaggagatattctagattctagtccttttccgctgcacgatagggcttcctgtccttcaggttttgaagagttgccggtcttgtctgaaggagagcaacatactttggcatccactcctgctcatcctgctggactatatgctctatatgctagttacttatttggtaacttggtggaacaactgtggaattttgcttggcctgccacactggcaattcttcatccaaatctattgcctgtggccattgttggtttcttcacgaagctttcagtgtttgttggggctcccatagttggcaaacttatggatcatttcccccgaatacccatgtacacagcattgaatgctgtgcaggtaggcactcagttgatatcagctgcaactgtcatctatgctctaagaaacctgagccatgcttctacaacagctgtggttctgagaccttggttcattgcactagtggcagctggagctatcgaaaggcttgcaggattggcgctaggagtttccatggagcgcgactgggttgtgttgttagcaggaacaaacaggcctgttgcattagctcaagctaatgctgtgctcaatcgacttgatctagtttgtgagacagttggtgcttctgtttttggccttcttttgtccaaataccatcctgtgacctgtttaaagattgctagtggtctaatgatatgcagtttccctgttctggtcatgttgggtcaactaatcaatagagtttcttgccatgcacttgattcctctagaactgccactgatgaatctatttgtgctgatcttttagatgtacgcaggatagttccaaatagcttgagggctatcaaacatggatggaatgagtataagcagcaaacagttctacctgcaagtgcagctaccgtgttcctaaatttcaatgttgcacttgctccaggtgccataatgactgcattattgatgcatcgtggtaccagtccatccattgttggtgctttcagtggattgtgctctatcatgggccttgttgcaacattcatctcctcaagcctggtgaaaagagttggaattctaaaggcgggagctgctggattgatatttcaagcttcactcttgtcaatcgcgctcacagtgtattgggctggttcaatttcgcaaacgacacctctacttatattcctagcatccattgcattgtcgcggttggggcacatgtcttatgatgttgtggggactcaaattgtccagacaggtgttcctgcttcaaaagcaaatctaattggaggaatggaggtttcaattgcaagccttgcggagctagtcatgcttgctatggctataattgcgaatgatgtctcccatttcggcttcctggcgatcctgtctgtgtcatcagttgctggggcagcatggatgttctgtcggtggttaacaaatccaacagatgagcagagggaactattcatggttgatcccctttatcaagttcaggcaatatagtggatgaggcaggaaacaaccaggaaaactgcaggcgcctacttgctggtggtgcttgttggatctgcaataccgttacgatgatactaagatacagtgtgacatttaggttcaatacgggatacacttagggtagaagcatttgctcctcgtggcctcagccatgcgcagaattcaatttgtatactcgttcatctcctcacctgtacaacacatatttgatctgtataagtgttacttgttatagctgatgtagaacaacattaacagccatcggtagcacacagtcaatgaaatctaaccccctcacctttcctctgatgctgcaaatgtgtaactgtatcttttattggatccactgtcttctttctcctgtcatcttggttccttgttaggcatgtacatccctgaacctct

SEQ ID NO: 8526 - DNA, 2895 bp, Zea Mays
ctccctctacccattctgggttttcctctacaccacaacgctacgaaactcttcatccatttgatccacatcaaacggctgatagggcccctcctatctctcctacatcttctccactcccctggattgagttggacaacttggcgcttcacctcgctcgctgctctcctctcagtcctctggttctccgtcctctcgcctcgcgcggccgcgcctgcgcctcgtcagcaagataaggctgcagcctgcaggccacagtgcaggcccatgcttccagaatcttccggaaccttgcgccgagcctgaactccccggcggcgcctggccctgtgaaggctgcatgagtagtcgcgccgccgccgccgccgcagcggagccatggggatgctcgccgccgccgttgcccccgctctcctcgcctcgccacaggcatccctcgtccgccgccgcctctccggtgcgtggacgctgcgcctgaagcccgctgctgcctcccacggcgtcgcggcgctcagggtacataattttctcccaaagtgttacattaccaacgttgaggttgatgttagtactgtaaataaagaagaaactttcgatgatcatccatcattggcaccaggacgcaacattccgcttgttaatcttcgaggagatattctagattctagtccttttccgctgcacgatagggcttcctgtccttcaggttttgaagagttgccgtacaggtcttgtctgaaggagagcaacatactttggcatccactcctgctcatcctgctggactatatgctctatatgctagttacttatttggtaacttggtggaacaactgtggaattttgcttggcctgccacactggcaattcttcatccaaatctattgcctgtggccattgttggtttcttcacgaagctttcagtgtttgttggggctcccatagttggcaaacttatggatcatttcccccgaatacccatgtacacagcattgaatgctgtgcaggtaggcactcagttgatatcagctgcaactgtcatctatgctctaagaaacctgagccatgcttctacaacagctgtggttctgagaccttggttcattgcactagtggcagctggagctatcgaaaggcttgcaggattggcgctaggagtttccatggagcgcgactgggttgtgttgttagcaggaacaaacaggcctgttgcattagctcaagctaatgctgtgctcaatcgacttgatctagtttgtgagacagttggtgcttctgtttttggccttcttttgtccaaataccatcctgtgacctgtttaaagattgctagtggtctaatgatatgcagtttccctgttctggtaaaccacatttatcatcactcctaaaacttgaatatggtagccagatgtagcgtactcacaatgctatatggtatttccaatttcaggtcatgttgggtcaactaatcaatagagtttcttgccatgcacttgattcctctagaactgccactgatgaatctatttgtgctgatcttttagatgtacgcaggatagttccaaatagcttgagggctatcaaacatggatggaatgagtataagcagcaaacagttctacctgcaagtgcagctaccgtgttcctaaatttcaatgttgcacttgctccaggtgccataatgactgcattattgatgcatcgtggtaccagtccatccattgttggtgctttcagtggattgtgctctatcatgggccttgttgcaacattcatctcctcaagcctggtgaaaagagttggaattctaaaggcgggagctgctggattgatatttcaagcttcactcttgtcaatcgcgctcacagtgtattgggctggttcaatttcgcaaacgacacctctacttatattcctagcatccattgcattgtcgcggttggggcacatgtcttatgatgttgtggggactcaaattgtccagacaggtgttcctgcttcaaaagcaaatctaattggaggaatggaggtttcaattgcaagccttgcggagctagtcatgcttgctatggctataattgcgaatgatgtctcccatttcggcttcctggcgatcctgtctgtgtcatcagttgctggggcagcatggatgttctgtcggtggttaacaaatccaacagatgagcagagggaactattcatggttgatcccctttatcaagttcaggcaatgtaagtactggtttttgtatctttgctgttactttattaggaaatccgggatcagaagtttttgaacttctaattgacaagggatatttgtatgtctctcaatcttattctttggcaggatatttgcatccctgatttccagtttagctattatctaaatggaaactactattattaatgtccagacataaaatattaatcactcgtaacgtaataagatgttacctcacgttttgcagatagtggatgaggcaggaaacaaccaggaaaactgcaggcgcctacttgctggtggtgcttgttggatctgcaataccgttacgatgatactaagatacagtgtgacatttaggttcaatacgggatacacttagggtagaagcatttgctcctcgtggcctcagccatgcgcagaattcaatttgtatactcgttcatctcctcacctgtacaacacatatttgatctgtataagtgttacttgttatagctgatgtagaacaacattaacagccatcggtagcacacagtcaatgaaatctaaccccctcacctttcctctgatgctgcaaatgtgtaactgtatcttttattggatccactgtcttctttctcctgtcatcttggttccttgttaggcatgtacatccctgaacctct

SEQ ID NO: 8527 - DNA, 2825 bp, Zea Mays
ctccagacggaactgtggccgcatctccctctacccattctgggttttcctctacaccacaacgctacgaaactcttcatccatttgatccacatcaaacggctgatagggcccctcctatctctcctacatcttctccactcccctggattgagttggacaacttggcgcttcacctcgctcgctgctctcctctcagtcctctggttctccgtcctctcgcctcgcgcggccgcgcctgcgcctcgtcagcaagataaggctgcagcctgcaggccacagtgcaggcccatgcttccagaatcttccggaaccttgcgccgagcctgaactccccggcggcgcctggccctgtgaaggctgcatgagtagtcgcgccgccgccgccgccgcagcggagccatggggatgctcgccgccgccgttgcccccgctctcctcgcctcgccacaggcatccctcgtccgccgccgcctctccggtgcgtggacgctgcgcctgaagcccgctgctgcctcccacggcgtcgcggcgctcagggtacataattttctcccaaagtgttacattaccaacgttgaggttgatgttagtactgtaaataaagaagaaactttcgatgatcatccatcattggcaccaggacgcaacattccgcttgttaatcttcgaggagatattctagattctagtccttttccgctgcacgatagggcttcctgtccttcaggttttgaagagttgccggtcttgtctgaaggagagcaacatactttggcatccactcctgctcatcctgctggactatatgctctatatgctagttacttatttggtaacttggtggaacaactgtggaattttgcttggcctgccacactggcaattcttcatccaaatctattgcctgtggccattgttggtttcttcacgaagctttcagtgtttgttggggctcccatagttggcaaacttatggatcatttcccccgaatacccatgtacacagcattgaatgctgtgcaggtaggcactcagttgatatcagctgcaactgtcatctatgctctaagaaacctgagccatgcttctacaacagctgtggttctgagaccttggttcattgcactagtggcagctggagctatcgaaaggcttgcaggattggcgctaggagtttccatggagcgcgactgggttgtgttgttagcaggaacaaacaggcctgttgcattagctcaagctaatgctgtgctcaatcgacttgatctagtttgtgagacagttggtgcttctgtttttggccttcttttgtccaaataccatcctgtgacctgtttaaagattgctagtggtctaatgatatgcagtttccctgttctggtcatgttgggtcaactaatcaatagagtttcttgccatgcacttgattcctctagaactgccactgatgaatctatttgtgctgatcttttagatgtacgcaggatagttccaaatagcttgagggctatcaaacatggatggaatgagtataagcagcaaacagttctacctgcaagtgcagctaccgtgttcctaaatttcaatgttgcacttgctccaggtgccataatgactgcattattgatgcatcgtggtaccagtccatccattgttggtgctttcagtggattgtgctctatcatgggccttgttgcaacattcatctcctcaagcctggtgaaaagagttggaattctaaaggcgggagctgctggattgatatttcaagcttcactcttgtcaatcgcgctcacagtgtattgggctggttcaatttcgcaaacgacacctctacttatattcctagcatccattgcattgtcgcggttggggcacatgtcttatgatgttgtggggactcaaattgtccagacaggtgttcctgcttcaaaagcaaatctaattggaggaatggaggtttcaattgcaagccttgcggagctagtcatgcttgctatggctataattgcgaatgatgtctcccatttcggcttcctggcgatcctgtctgtgtcatcagttgctggggcagcatggatgttctgtcggtggttaacaaatccaacagatgagcagagggaactattcatggttgatcccctttatcaagttcaggcaatgtaagtactggtttttgtatctttgctgttactttattaggaaatccgggatcagaagtttttgaacttctaattgacaagggatatttgtatgtctctcaatcttattctttggcaggatatttgcatccctgatttccagtttagctattatctaaatggaaactactattattaatgtccagacataaaatattaatcactcgtaacgtaataagatgttacctcacgttttgcagatagtggatgaggcaggaaacaaccaggaaaactgcaggcgcctacttgctggtggtgcttgttggatctgcaataccgttacgatgatactaagatacagtgtgacatttaggttcaatacgggatacacttagggtagaagcatttgctcctcgtggcctcagccatgcgcagaattcaatttgtatactcgttcatctcctcacctgtacaacacatatttgatctgtataagtgttacttgttatagctgatgtagaacaacattaacagccatcggtagcacacagtcaatgaaatctaaccccctcacctttcctctgatgctgcaaatgtgtaactgtatcttttattggatccactgtcttctttctcctgtcatcttggttccttgttaggcatgtacatccctgaacctct

SEQ ID NO: 8528 - DNA, 544 bp, Zea Mays
cgcgtgcgcctgcgacggcgtgaagtgcgtcgccataccggcggtggccgcagcagactcccagcaaagcacgcaaccacgcgagaatcacctcctcccgaacggcgcgctctttgcccaaacccggtcaaaatcctcccacgaaattcttcctccacgagacaccagctgcacaaccctgcccactaaatcctaacccaaaccaagcagcctagagatacaccggaccggaatcgaatctccgggtcctcgcgcggcggcacgacactagccaaacagagcaccagaaaggcgggatcttgaggactaaactaaaccagggccattttgctgcggtgcagcagcagaggctatgatgagggagccatcagatcatgcccgttggcgatcgatttgatgataagataaggggatttggcgtctgatttcgcgaggcggggattgggtggctgccaagaacacacgcgtggcgtgggtaggaagcgaagcgaggcagagaagggaagagataagacgccaagaaaaaaagtgaacaaagaattgg

SEQ ID NO: 8529 - DNA, 329 bp, Zea Mays
tcccttgtcaacagcaccacccccaactaagggtagtgcggcatagaacacctcgaatgcacgaagtgcagatttatccctgtcgccgagcccccggaggatctggcagtagtcctcaggaccaagtagctcgccccgaaacgacgagagggccgaaccaagccctcgcctatcttcaggcgcgacgcggagcagcttctcgacacagcgacccgcggcggctgaggacacgcgcccgcggtcctgtgcgccccctccgccgccgccgccacgggtgcgcttggagatggtcttggtggtgcgcgcgcgccgaaactccggaccgagcg

SEQ ID NO: 8530 - DNA, 598 bp, Zea Mays
attttggatcacaaaaataagtaaacgggttatatttgtaaacataagtagcactcataggctacgatcatccctaccctcaaataatccaatacaaacattaactttttttttctttagaaaggtacataaataaactagcaaaaaggccatttgcagatcgcaattgcaagcccaaccgattgcacacctggaccacggttcccttctctttttctctggcttggatcgtcacgcagaaggtgatactatttctttcaccgtgccctcgagaaagatgccatttcaatgacttcatatccaaaaccggtggaggagagcacagcttcgagaattccagcaccaatttgacccatttgcatggctgacaatccaagtccaattatgcaggacgaaccacagctgcagatctgattcagcagagaacacatcgcaccgctcctcacctctcttttccacccttcacagcctttgagctgttcctgccacacaaaagggccacaaaccacaagctgctgatgaatgacaagacgctctctccatcttcggcagagctggcatctcctcaaagcagcaaaggcatcacgagccaaaaagg

SEQ ID NO: 8531 - DNA, 905 bp, Zea Mays
tacacatcatcatgcccttttccagaaacacaagccccggattggatgttattgttaaccacgcatttgcattgccacgaatcagaagaacccaaatgcgccagcaatccggagctcagtcactactcactctatagtctctaccctacccttgggtgtcaggacccagagattacagtcacaattgccctgtcaaacaaagaagaacgtacccccgtctgtacaacaaacttcttccagccttggctgttccgcagaagcaaaaccatacagtacaggagggtccaggcccttctagagacctggggttcttcgttcgttcgctcgcaaaatgcttcgaagcaagccgctctgagaggtcgcattgtgttctttactcctcgatgctgttctttgtgttccggtgctggatggcgtagtgcctctgcagctcccggagcctctcaagaagctcctggaacgacggccgttgctgcgggtcgctgctcacagcaagggaaatcgttaacaggaatagttaagcacagtacaatagctttcttctacagggacagacagttcaagatcattagcgcttagcctgaaaatttacccttccctaaaagcagtacagacagaagggataagcattaagcagtaagtacctttcccagcagctcaggataattgatttccactgaggatctacttcacttgggatatccaacctttggttcataaaacccactgcaccaatgacctacatagaaattgtcaaaactaggaagataaggattatcttgaaaagaattactgggtaaaagtgtgctccgcagaacctagcaatttgagtagctatcatttccatgtagccacttatactagcagtaatcacaatctaaaaggaaaaacttgaagcagtcaac

SEQ ID NO: 8532 - DNA, 2625 bp, Zea Mays
atctcaaccataactgtcataattgcatttaaggttctccaaatgaccacactagttccacatgtaatactgtcaattcattagctctaaaaaatatcaggatcccaaggcaaacagaaattgttctttgagcgtagtagtacaataaagattcagattcaaaatactacgacagtatgaccattctgagccttaaaatgaccatgtaatttactcctatttgagtacgccatacgcagagtagaagataacctcccgaaatatagaaactggtccctaggctacattttatttctccactatgcaggtgacaatctccagaatcccagagccacgcaaccataataaacttaaactggacacaggcacacatcaattctgccacgtttcatctccactataaaaggaacagtaacaacatagctcagttcagccattgtgcaccaaagatattgtaccatgtattccaacatcattaagatcaatggctcataatccgccctcaaaggcttcaactcaatccaatggccagtgttctttgtatcatcccacgccctggcttcaacgttgctttccactcccctgcacaagcgaaacccgggttcaatcccccacagccgtctttgatttcccaccgaaaaaaaggttcctttcatcaggcgccgctccaccttcacgaaaagtcatggccgggcaccgcttccagctatggcgccaggccaccatgacaccccatggcagtttcagaacacccctgacgacaactggccacgatgcccagcgggaggcacagcatgtggagccccagcagcaagcggacgtgcgtgtgtcggaagtgctgaggcgaggggcgccattgcgcccttggcagtaatgaaaagcagcagcaggtgcttcgagcaggagcacgtgtggctcagggagaaggaccagcaggagtggctgagcagcgagaggtttctcaccggctgcaagcggtggggtcgatgttactcaccaggcgggagaggttccacagcgagttcctgtgccgcatcatgccttgggagatggggtcgctcttgtggcagaattttccctactatgtcaggtgagacacccacttcatctgttcgacattttgtttgaaccaagctaacattagtgggctgaaaactagagagtatgtgtttgttcccttttgaatgcacaagtgagaatgggaggcagctgctgagtgagtatgttgtgtcccacctgtggcacaagagtgtcacatcacgtttggaatcctcacagcatctccaacaatgcctcaaactagtgcctcaaattgaaatataggactctacacaggaaacactactccaacagtgcctcattttgtaaaactttgtcaaaaacatatagggcaccctctcaagtgcctcaaatatactacacactagtgggttaccctataatctagaattagggctttactgttggagcagaatatattgttggtgccctaaatcatataaaacatactcatttttaaattatagggcatttttataggacactttgttggagatgctctcaggagggtggatattgctccaaagttctctaggtataattgtataaagcagttaggatgaagatacttagtattgctataaatgcttgggttgtgaaatttgtttaatgcaggaactgagcttttacagggggaacttgttagagctcctgcacatgagttgcaagtgccgctattggttctggacagcagcgttcttgcaccatatgtaaaatactgaattttcagagtacaaaggcatgatgcaactttgcaaacctcacatttcacctgatcgatagggattatggggaggattactcagaaagtgaggaggatgagcatgctgattgctgagtcagaggatgatggctcagaatctgaaagggaagacaaaggtgatgaagattggacaagcaacaatggaaaatatggtgaaagtgacgatgaggatgcctcaaatctgtggaagacctaaaaaatctggatgacctaataaggttggtccgttgtactattgagcatttgccaaggtaatttatcttatctccctgtcatgttgcataagaaaatgaatttcgatgcttttcgcagaagacacatatttggctgtttctaaaaagtttaccagtttcatttacagagaaaattatattgtgccacttttgtgcctctctaaaacgagtggacattttgaagtgcagtgcaaatgaatgtaaagacattatccctgaaggaccatatggcgtactttagcaaatctggtattagatagttgaggcgaaataagacttactattgccttgttatgcattataattggcctaggcttgtactttcatgtacctgaacttgctggtgacagagttttccagatttaaatgttcgcccgtttgtataattagatatatgagtataactagatatatgagacgtgaaccttaattaatctgattattcattttattttttgcaaattttatcttgttttgtattttactgtagcgttagcacgtccacactactatttattgtctgttacaaacaattgcgtgaaacttaaactatggaaataaatatcgtca

SEQ ID NO: 8533 - DNA, 1447 bp, Zea Mays
atataatctagattataatccagattatataatgtataaactgaaacaaacaggacatcactacaggtctacagcctcccgcattcatggccgccccagccgactgttgcatgcatctgctagcgccacacggctggctgtaatccgtgtggtcaccatgccatggctcacggtaagattcggctaaccgttctgaacggcgacaaaacaatataaagaagctgaatgcggccacaacacaactgcgcatgcaaatacaatgacgcgccatggtaagggtccagaatataacacctcccattaccttaaaaaaacacctgcccaattcgctatctgttcccgtgattacaacagtccaatcaatggatgcaacgggtattcgcagagcacgtagattctgctccacgacgtcgtgccaggtctactaggtccggccgccgccacgggcatgacctcacgcacgcagccgcctcagctagctgcaggcggctcgcagctcatggccatgggcgtccgcagccgagccgcccctgcccatgttcatcagggtggtcaggtgcgagacctccttgggcaccgacgccgtcagcacctgcatgacgacaaggccaccgtcaccattcaccatttcattcatcgcatcacgctcatcttcaacgcacagcgttgttacgtatacgcacctcgtggccgtcgtcggtgatgaggacctcgtcctcgatccggatccccataccgcggtacctgctcggcgcgcgctcgttcaggaccggggccgccgggatgtacaccccgggctcgatcgttattacctgcacaaatacaacgcgcacgcacatggaccagaacgtgcttgtcagtcactcactcactgctggagctgctccaaactccaaactcaaaaatggcgattgacctggctctaagcccccaacaacggatttaattggtgcctgaccggtccggcaaacattacattgcagttagtgggtggtagtaatacgaattctgtgaggatgagctactgttgggcctgtgatggtgccagacacagaagccaattgggctgttgtacttgtatatatcccagattcaatcaacgcgtggacaaaaaaaactcgaccggcgggggtaagacagcccccgggcattgtattaaaaagaagaccttttcacacaggtggagaaaaccctcgaacccttgctccacccatacatagcgacatcgaagcccatgtgagaacgaccacgaccggggctgagccttagacctgtgctttgacgtgggacagacgaggagatttttttaaccacagcctgaaattcgctcccacggggagtcgaacccaggacctgaggagtgctactcagacaacctaaccaactcagctagaggccctttcgcaatcaacgcgtggacacagcaggggaaaagggggtaaatgag

SEQ ID NO: 8534 - DNA, 2084 bp, Zea Mays
aaattccctcacatgctttactctctcctcgcatcttagcctataaaaggactgaggaattgcgatacctctcccactaactgatcatcttctctagatcttctcatcataccgataccggcctcaacgccctctttttcccagcctcacaaccaattcctgtttcagtcgatcgcagttagcatggccacgacacagagctgtcagagcaggagcagcgcctgcagcaaggctgctgcttgcttcccggccgccgtagcggtcgacgaggagcacggccaccacagccaccagctgaagggaggagcgcaggaggaggctgagaacgacaataataagccggagctccggcgtggcccctggacggtagacgaggacctcaccctcgtcaactacatcgccgacaacggcgagggtcgctggaacaacctcgcccgcgccgccgggctgaagcggacgggcaagagctgccggctgcggtggctcaactacctccggcccgacgtgaagcgtggcaacttcagcgccgacgagcagctgctcatcctcgacctccacacccgctggggcaaccggtaattagtcaactttttcctcccaagtccgagatcgatcaccgacacgtcgtcttagcttgcacgtgccggagtttttggactggaaatcgtgtggacggccgcaaggtagccctgttgaaaacggcagcttgctctccagtccagtagtaatagaagctagtgcccactgcccacgtacatgatgcacctgtcactgcaccgagaccgtatggtatttgtacgtacgtgcacaggtatatacaactatcccccggcccgtaccgtatagacgtggagccgtacgtatttgtataacataacagtgcggccgatgtggcacatgacaagacaacacggcgcacacaagaggcgaattgtacaagtacatctttcgctttcactccagcactgttcacgaaagctgcacgcctctacttttagcttgcttggcgcgcgttctctctctctccacaaatccaagctgttccagttcgatccctcgcattctctctaattgcgttctcgatcctgtgatttctttttccccctccgatccactccagatggtcgaagatagcgcagcacctgccgggaaggacggacaacgagatcaagaactactggaggacccgggtgcagaagcacgccaagcagctcaactgcgacgccaacagcaagcgcttcaaggacgccatgcgctacctctggatgccgcacctcgccgacgacgtcgataccatcgctgcggccaacgacgacgacgaagaccaccaccaccacctacgcctcctcgtcctgcaccaccaccaggcccagcacctgcagcaagctgctgccgcggccggcggcgctgccaacgaccttgctgcgggcgcctacgacgtccgccagctgcacgcgctgccgtcgtcgggcatggcggcgacgtcgtcgtccgactcgctcgcgtcggagtcgtacgatgacggaggcctgcttttcgcgaacttgcgcgccggcgagatgctgatggacggcggagattgggcggcgcagcaggaggccgaccaagggctgtggccgccgccgccgccgccgccgtctgatcttgatcagtcggtggtgcaggctgctggtgccggcgctggccagtttcaggacatggagctcagtggttgggtgcaaggcttctccgagagcattacagataacttttgggccttggaggaaatttggaagatgcaatgagcgagcaattttacatcttacacatccatccaaattaaagacaacatagatacacatatacatatcatatattctaacaacaggtgccatatacgatatacatacacaagttgttgtatagttgtattccgcttatatatatattttttttgcctctcaatgaagttcattcttatagaggttggaagcaaaggatggtattgtttatgcaagttgaaacaatatttggtctgtcagcctgtcctctatctagtgaaaaagggcaactatatatatgcatagacagagcattattattac

SEQ ID NO: 8535 - DNA, 781 bp, Zea Mays
gctgtttctgtctcactgacaagtgggccgcggtgggcagaaattcccgtcttccagctaaccgcgacgccgcgcttgtccgaactcgccgccgtggatttcggaaatcgtgtaacggattgggcccatgtggcgcagtcggggccgtctggtactgttaaataggtcgccccctctccacatgtccgttcggtcaccactatctacccaaaccactagtgccggcaatctcgcgtagaggtgggcagagcatcaccggagttggccgcttcaccgacgtggcaactgcggtgccgtaggagactcgacgtcggccgcgtggtgtacacctagatcttggggcgggtcgatttggtggctggggcgccagggggagctcgtcggcgacaagaatcgctgcgcttcccccctgcatcgtggacaaccacctgtgaacgctttcccttcgaagagcctgtgaccgaggatcctggtgcccagcagatagaagtagctgagcaggagctcattgaaggcaagttgtgcccttgaccacttttgttacccaataatgttctttataatcatttaccatgcataggcttaattttgatgggacccgataggtcaccctagattgtttatctctttaccttgttatccctgaatcacttgggtagtttttctattgctttacatggttttgggataatatttcattatatccatgttccatttattttgttattctatttatgttcatgtcaagatcattaatgttaattggaacatggagcttaac

SEQ ID NO: 8536 - DNA, 2082 bp, Zea Mays
atgcctccgccctcgccctcccgccaatctcgtagcagcgcccgccccatccccgcagccgtcaccagcgcgtacatagaagctgaacaccggcaacgtgttcgcggcgctcgagtccctcaagaagaagaagaagggcggcaaaggcaaggcagccgggaggaggacggcgagggggccgcgcagcggcaagagccaccgcagaagaagcagttctgggctcccgcaccacttaccaccaagtcatgggcggacgtcgaggacgacaacgactacttcgccaccaccgcgtcgccacgcctcgtctggggcactgccggtgagcccgccaaggaagaggacgacatcgatgatgttgtgcgcgccgcccttcaggaggtagcaaccttgggcaacaaagttgagaaagagatggaggacatggccttcttctttgctgaattggcgctgatgcaatacggatacggcttggtgacacgtctgccttctctggttgctgcttctgctgtctacgcggtcaggctcactgtcaagagagctccctctggaccgacgccctcaagcaccacactgttgtgtaccaggtgctcggaggagcgacccgcgaagggcagcggcagctggtcttcacctgttggttcagtgccggctggagggcaaccaagagcagacaatggatccactacaattgaaattgctctgaagattgcatttcgtaaattttctcttgatcatggaattatggccagtagtgaaaatagtacaagaaatgaaagaaacattaagttgaaggtacttgttctaaatggttcctatcatggtgatactctgggtgttatggaagctcaagctccatcgtcttatacatctttttcttcagtagccatggtccacgttcagaggcggatctgcgcggcccagttactacagcgaataggcggcccatcaggtcacgttccgtcccgacgtagagtcgccagtcctcccacaatctccagccgccactacgcctccctctagctccagccgccactacgccggtcgcagagtcgccagctgcctagacgcccggaggcccgcgggcgctccctcctgggctgctggcctccttcacattattggagccagaggagcgggcggcggcttgcactccatcccatcgcttgggtgcgtcgccccgaatccaatcgcctggtcaagtctgttgctgccggaggtagacggacgccttatcgtgctcgtggccgcagctagcgcgccggagccacagctggagcgctcgccggcgacgagtcgccgccccgcaaggagcctacgcaggcacgcaccgccacgtctaggcgccaggcggagacgttattaccacaacattaaaggagatgccttcactccagaaagcattgcctccagaacttgctgataatgtgctcaggttatatcgtgaatgcttacggagggcgaagtatattggccatcagaaacacaatacagaacttttagtcgccatggtgagacaacaattcaagaaaaacatgcatgaaactgatccagagaagatacagaaaatgaaggacgatgctgcaaggggccttatcaatcatattctatatgagtccgagaagattacaggacgcaagttttcagcatgggggcagtttctacagctaaagcttcgcaatcttagaaagtgtctccttatcctggcagaagagtcatccatggacctggacctgaagatcctcccgccttttgccgccacgcctttgaattccagccgctactttctcgtgagccctcgcatcattcaccagatccttctgctgaggccactcctttcatctttcagcacagtttcatcgcctgtatcagctactcccatcaccagtcctagcgcacgggctctcgaggaaaattgtcgatccgggaaaggaagacggacggccataattgccgacaaggggcgtgtcgtttagcctgctgcaatgagtagagagaaggatggattgtagctgtgctgtgcttgggtgccaccctcaagtttctacactttctacctactgcaggtctcctatacaatcatac

SEQ ID NO: 8537 - DNA, 2284 bp, Zea Mays
atgcctccgccctcgccctcccgccaatctcgtagcagcgcccgccccatccccgcagccgtcaccagcgcgtacatagaagctgaacaccggcaacgtgttcgcggcgctcgagtccctcaagaagaagaagaagggcggcaaaggcaaggcagccgggaggaggacggcgagggggccgcgcagcggcaagagccaccgcagaagaagcagttctgggctcccgcaccacttaccaccaagtcatgggcggacgtcgaggacgacaacgactacttcgccaccaccgcgtcgccacgcctcgtctggggcactgccggtgagcccgccaaggaagaggacgacatcgatgatgttgtgcgcgccgcccttcaggaggtagcaaccttgggcaacaaagttgagaaagagatggaggacatggccttcttctttgctgaattggcgctgatgcaatacggatacggcttggtgacacgtctgccttctctggttgctgcttctgctgtctacgcggtcaggctcactgtcaagagagctccctctggaccgacgccctcaagcaccacactgttgtgtaccaggtgctcggaggagcgacccgcgaagggcagcggcagctggtcttcacctgttggttcagtgccggctggagggcaaccaagagcagacaatggatccactacaattgaaattgctctgaagattgcatttcgtaaattttctcttgatcatggaattatggccagtagtgaaaatagtacaagaaatgaaagaaacattaagttgaaggtacttgttctaaatggttcctatcatggtgatactctgggtgttatggaagctcaagctccatcgtcttatacatctttttcttcagtagccatggtccacgttcagaggcggatctgcgcggcccagttactacagcgaataggcggcccatcaggtcacgttccgtcccgacgtagagtcgccagtcctcccacaatctccagccgccactacgcctccctctagctccagccgccactacgccggtcgcagagtcgccagctgcctagacgcccggaggcccgcgggcgctccctcctgggctgctggcctccttcacattattggagccagaggagcgggcggcggcttgcactccatcccatcgcttggctagcgcgccggagccacagctggagcgctcgccggcgacgagtcgccgccccgcaaggagcctacgcaggcacgcaccgccacgtctaggcgccaggcggagacgttattaccacaacattaaaggagatgccttcactccagaaagcattgcctccagaacttgctgataatgtgctcagggtaacgtttcttttgcaccttttgctttttgctgtggtctccttgtattatgggtcacggccaactttcaaatcaacttgtactgttgtactgttaatgaatagtcagtcatcaggcttcattcatttgcatcagttaccctaaattctagcttcagcttttccagaagacacatctaatatgcaccctgtagcctagttttttgttacttttattaaaaattgtcatgaatgaaacaaaacaaaatcatagtcgatgctggagaaaaaacattttttttccatttattgttctctcctttttcatgatgtagttatatcgtgaatgcttacggagggcgaagtatattggccatcagaaacacaatacagaacttttagtcgccatggtgagacaacaattcaagaaaaacatgcatgaaactgatccagagaagatacagaaaatgaaggacgatgctgcaaggggccttatcaatcatattctatatgagtccgagaagattacaggacgcaagttttcagcatgggggcagtttctacagctaaagcttcgcaatcttagaaagtgtctccttatcctggcagaagagtcatccatggacctggacctgaagatcctcccgccttttgccgccacgcctttgaattccagccgctactttctcgtgagccctcgcatcattcaccagatccttctgctgaggccactcctttcatctttcagcacagtttcatcgcctgtatcagctactcccatcaccagtcctagcgcacgggctctcgaggaaaattgtcgatccgggaaaggaagacggacggccataattgccgacaaggggcgtgtcgtttagcctgctgcaatgaggtgagcctgcatcctgagggaatttcatggtggggctatgacatgttggcttcagcaggtcaacgct

SEQ ID NO: 8538 - DNA, 15064 bp, Zea Mays
ccttattcggtgctgcctagagacttctttgcatacgttcgttctctagaactcttccttatctccacgtacatgctcagtcttcattctgagatttggcacgtcgtcgctctcagcctatcgcgctagcaaagctgctcagccatcgcacctctgttgctccagcgccctcatctcccctgtcccgacgtgcaggtcttcactcttcacggatgctgctcaacgctcgttcttcctgttcttggctctcaccttcagatcgctcggccctagctcctcctaccaacaagtgtcgccatgctctaggtccccggctccgactcgtctccctcgactagaagtcatcgcgccagcagccactttgtggcgccacgctcagccccatcctcaagctacactcgccgaatagcatcctcctcgtcgcgctcggaagcagctacttaactcattttttccttcctgtggtgcgtcgtcgcgtggagctgctgaacgccgacgtctccagcttctgtatcgccatgccggcgctcgtctccccaacaccgttgttgcctactgcgcctactactcgctctacagcagctcgccggctccctggaaattccccagtcatcggccgacttccttgcctcaccgttcgccgcgtcgtcatccctgctgtctcgcgacgtcgtgctcctcacactttatttcctccatgtcggtgatgcttactgaaaacctgaatcacgtcatcggtgaatcaatcgtttggtggagtaattttctggagactggtcatcaccctgaagacttgtgacattttattttcttagtcttcggctctcttctctgcatcaaaggcaagccccggtgcatccaccaccttccttgtcgtttacaaaacttttatcacttgatatgatgcattaggtgatatgagttgcgtgatcaaacaattgatgcattaccatccttgagaatttgaataatcattccttgatacctattttatgaaaaactagtgtcgcttagccctgcttaaagtgataagattttgaaatttattttgattactggttattgttatgtgtgaatgaacttgagttagataattaatatgagaccgggtgggtggcttgcatcgtgaaatgagtcagtgtagtgctccgcctgtgtcgattaaggaccgtttgatgtaggcctgttgtggttgagactttgcaactagccacatgccccggtaagcctgaacccggctattccatacgtgaaaacacaatcgtgcactggacgtgggagatggtgggagtagcgtgtaccctcctggctagaggctagacagaggagtactgtgctcccgggtagcgcggaccggttcacgttgtggaggatctgtgagaactgttgacatatgcaagggttaagtgctacatatgtcgtgtggttagggatccccagctgggtataatcggttcaaatcgtcgttgctcctcggttatggagacttgaccctccgaccactcatcgtagttaataagtgaaacatgaattggttaaaagaaagctagatcagacaagtgaaaatgctctagatcaggaaaatctagaatcaggtaagaacttaaattgataattaaaagatggcttaaggatctagtattagtaagtttttctgcaaaatgagtccttgattattgcttagtcgtaccttgattcctaatcagccagcatatccttgagagtctttttccttagtcgggtaagacttgcgaaagtacacttcgtgctcagggttttcgaacccatgttgttgcaggtactagatttgtgctgctttgatggtgctaagtgtcggtgggctcggccttcctatataagtatatcccatctttatcttctttttgaggattgtcgcttatgctagcatgtaatccaaacttacaaatattttataacatttcaaagtataatattttaatcacatttgtaatcactccgataatgtaaacttattgtaatttgaaagctttgtaataaaaattctgctgcaaaaattttggtatgtgatttgtgtttacttaatcttgcgattttggtaatagtggtttatctgaggtcctttgggacactcggacagatcctggtaaattatcgggcacacatgcatagttgtttgaggtctttgatacaaggatagatgcatgtgggtcctataatttgggaggatccgccacacaacctctgcagagtctaaaactagtatactagccgagctcacgggcatgagcagctcaggaatctcgcatgattaaattatggaacctaaactcaatttgtcatttgcatctgaatgggatttgttattaattttgttctattattattatggtttggtatctacttatacttagtaattgctaataaaattttgaccaactttaaaagcaatgctcagctttaaccattctctttgataagccttacacttcatgagctcccacctttggtgtgttcatgccacattattccccacaacttgttgagcgatgaacatgtgtgagctcacccttgctgtctcacaccccccataggagaagaacatgtggttcaagaggagccgcataacgaggagttcgattcgatctaggtggcgtatcccagttgattattgtgacatttatctctatacactctattattatatatgttgtcttctttggcgcatgtatgaggtgcacccggctttgtctcttaaaactcgggtgtgacagaagtggtatcagaggaatgttgactgtaggacgaaacctagatagaaatggacagacccttaactacttaccttactctgattctttctatacttatcttgatcctgtctcaccttctactgttctactctgattaaccttacctttgctactctgattctttcataaaacttatattaatcttatctcatctatttccgctttactctgattattcttacattttctttctaaaagacaaatgtggattttacactttgaaatcctgtgcctaaagtgacctttaggaataggagacctacttttaagaacaaaaacaaaactatttttataggtatctatacgcttgagtgtttgttcttatgatatctgtttgatttggatctttgattgagtgtgatgaattgtggagtaatgtccataattgcatctgcatatacacctagacataagggaaaatattattaaaatagacaacataaaatattctctattaaaaatatatctagttatacagatccctcttatcttaaaagacgctctcttatcttaataagatccatcttgtcttaaaagatactctcttaccttaatagattcatcccatctcgaaaagattttcaacttatcccaatagatctaactaatctcaaaagattctatcttattcttagagactcatcttgtcctaataaacatacttatccccaccactttgcttatctcatgatagcgtaataaacatgatctattctaaaataatttaagtagatcttatctagtctaatttgattataccaatttaaatcttgatcccatctaatctgatcagatctaatctaatggacaaacgtgttaaataatactggtaaaatgagattggatcgtactcttgtaaatatgttctaacctaaattggagatttaatccaacctggccatatgcaactaccttaaccacctgatagttgcataacccctctgttttaaccaacagagattctgatctacctacactatataatccattctatctcaaaaatagattctaacatatcctaataatatatatcctaccctggtagatctatctgacttaaactagtctaatctagttatatccaatctaatctagaccctacctaatctaatatggtttaatctatgttacaagtattaactaaaccatatttctataaatcggtttaaacttaaacgggtatcttagaccaactcgtccatgaaatcacaaactagcctatgttataggttgcctaacccatttattccaaaagcaaagtaaaactctgtttactccacctaccctgtgtactcgcaattgttatcccaacttggataatggcatctaacactatgaccgatggtccctaattcaaaccccccaaaggaagctcgattatgccatagtacactcattctatgtcaacactcacctaatagttaaaacatgatgtactcttgtttctataccacacctattaatggcataaaaattttaggtgtataaaaaaatatactaactggaagttccacttagataaaaaaatatactagaacttcgaaaagataaagtcagcttgatatgctcaactaagtgtattcttaaatgggattatagaatctaatgtgatctaagctaatatgacctaatccaatgtggtctgcttaaacagattagtggtacttagacccttctagccaggtgttaacttaacttttcacattagatcaactcaaccatgagctaacccaacccgtagaatcatgatgaatgttataatctatctatccccacctaacatcaaacaaacttttaacctacatcatgtagactacctcatcttgacaaaaattctatcctacctttggatattcaccttatacgactagttgccccaatctggacataaaacaaagattaagccctgccaaagaatattcagttcataatcagttagtagcctattcgtctgcctgccaaataattttccttgcaaaattatattaccgtatgcttctaacttcgatagtcaatgccaggaaagaaagattattaggcaacaacaaacaaaaatgaatcctccaaatcctccaccggttggaatcgatcaagtggttgccacccaaatgatggtaatacaacaaatgacaaacatggtcaccgaattgcaaaattagataatacaagaacgcgaggaaatacgtcagtaccggctggagatacgtcaagaaataaggcaagcgcggttggaaagacagcgacaacgacaacgacaacaacaacctccaccaccaccagctccaccaagctacataaacatatatataaatttctactatttgtaagatctaaatgttactttagttagtaaatggtatgatactatttcaggaggaataataaggtctaattgaccccatgtgttgctaataaagtatgcatcatgctgagatttttgtttgtgcatatattttgagatgacttggttatataccctgttcttacaaatctcgaggacgagatttttgttaagggggtaggatttgtaagacccaaaatgtgtataagaaaaaaatcgtaaattcagatatctcaaattatactgaagtattgaaatatgaggactcaattttgaaaaccaagaattatttcagaaaagaagtaatagaaaagttttctattcaactaaaacattaagcacatcatcagatgatgcaccataagcatctatttacatgaatatctaagtttgaagtaacttttaattcatcttgtcccacaatcaaaataccattttcctaaaaagagaggaacaatatgagtgtgtctcatatttcaaacatttaaccaattaaaataaatgtgtatctattgtttcataattgatttggagtatgtagtgaaaatgtgaattcctaaactttatcttagattggaattagaattttataatgtcaaaaaaattaatatggggattcaaattatgaatttgaaaataagaaaggaaagatgctatacaaaatgaataagtaaataaatataatatgtccatactagtatgtttattttgtacattaatttgggtacaagttcacaacactatttgaattcaaacttgagatttaaatttgaaagggaagagggaaagaaaagaaaataaaagggttaaaagagtgctaagcaaatataaataggatatatatatattaaaaatactagttcatcctgaggaagtataaaacttgtgcacttcatttttttatgaagaagccacaactcaaattttgaagttcaaatattggaaattcaaaataaagaagaaaggagaaaagaaaaaaagaaaaagaggaactagagaaatcgtgcatttgggcccatttagggctcgttcggttgtaccggaataagccaggatttattccagctcatcaaaatctatataaattagagaagtaatccgactaggaattaatccgaggctccaatccggaacaaccgaacagggccttaactgtttcgcgtcggcccacttcacctccctgctcccgcgcagcctgctttcgctcacccacacgcctacttccgcttcggccaccaagcagcccaccagcgcgccgcccaaaccctagccgctagatgtcgcgcgtgcggtgataccggtcatgtgggcccacaccgcggcctaactgaaagggaaataggcttacaccttttcttaaatgattttggtggttgaattgcccaacacaaataattggactaactagtttgctctagattataagttctacaggtgccaaaggttcaacacaaaccaataaaaagtccaagaaagggttcaaataaaaagagcaaaagacaaccaaaggctgccctggtctggcgcaccagactgtccgatgtgacaccggacagtgtccggtgcactagggtggattctctccaactcgctagcttcaggaatttggggagccactccgctataattcaccggactatccggtgtgccaagcggagtaacggctaacagcgccaacggtcgtctgcaaaaggtgaacagtgatgaacagtgcgcgactgcgcgcgcagagtcagagtaggcgccagaaggcgcaccggacggtgaacagtgactgtccggtgcaccaccggactgtccggtggtcccacatgtcagagctccaatggtcggaacccaacggcttggtgatgtggctggcacaccggacagtgtccggtggcgcaccggactgttcggtgtgccatacgacagaagccctcaccaacgaccattttggtggttggggctataaatacccccaaccaccacacttcaatgcatccaagttttcagccatcaaacctcatacaagagctatagacttcattccaagacacaaacaaagagatcaaatcctctcccaagtccggaatcactccaaacaaattagtgactagagagagacttttgtgttcttttgagctcttgcacttggattgcttttcttcttcctctattcttgtttccaactcacttgtaatcaaagcaagagacaccaagttgtggtggtacttgtagtggattaagtgtcccatttgattgaagagaaaggctcactcggtctaagtgaccgtttgagagagggaaagggttgaaagagacccggtctttgtgaccacctcaacggggagtaggtttgcaagaaccgaacctcagtaaaacaaatcaccgtgttcatccgctttatttgtttgttgatttgttttccctctctttcggactcgaatttaattctaacgctaaccccggcttgtagtgtgtgcttaagtttgtaaatttcagattccgcctattcacccccctctaggtgactttcaattggtatcaaagcccggtacttcattagagcctaaccgctcgaagtgatgttgggagatcacgccaagaaggagatggtgaccggcgagaagcccgccacaagccacgggaaggctccatcgggagagtccagcaacaaggtgaagggagccccttcacacaccaagtcgcatcggagcggcgagaagaaaaagaaaatgaagaaggtggtctactacgagatcgattcttcatcaccttctacatccggctccgacgcgccatccgtcacttctaagtgccatgagcgcaagaagtttagtaagatccccctatgctatcctcgcattcctaaacatactcctttactttccgttccattagacaaaccacacgtgtttgagggtgaagattattctatgtggagtgctagaatgaaaggtcatctaacctcactccacaaaagtatatggaatgttattgagtatggagcgcaggtaccacaggtgggggataaagactatgactcagatgaggccgaccaaatacgacactttaactcccaagcaacaactatactccttgcctctttaagtcgagaggagtataacaaagtgcatgggttagagtccgccaaagatatttgggatgtgctcaagaccgcgcacgaaggagatgaggtgacaaggatcaccaagagagaaacgatcgagggggagctcggtcgattcatgcttcaccaaggggaggagccacaagtcatgtacaaccgactcaaaaccttggtgaaccaagtgcgcaacctcgggagcaccaaatgggatgaccatgaaatggtcaaggttattctaagatcacttgtatttcttaatcctacacaagttcaattaattcacggtgatcctagatacaagctaatgtctcccgaggaggttataggaaaatttgtgagctttgaattgatgatcaaaggctccaagaaaatcatcgagcaaggcgcctcctccacacccgaaatgcaacccgtcgcattcaaggcgacggaggagaagaaagaagagtctacatcaagtagacttcctatcgacgcctctaagctcgacaatgaggagatggcgttcatcatcaagagctttcgccaaatcctcaagcaaaggagggggaaggactacaagccccgctccaagaaagtttgctacaagtgtggtaagcccggtcatttcattgctaaatgtccattatcaagtgatagtgacaggggcgacgacaagaaggggagaaggaaggagaagaagaaatattacaagaagaagggcggcgatgcccatgtatgccgtgagtgggactccgacgaaagctccaccgactcctccgacgacgaggacactgccaacatcgccgtcaataagggtcttctcttccccaacgtcggccacaagtgcctcatggcaaaggacgacaaaaagaaggtaaaatctagagcttctactaaatatgcaacatctagtgatgaggctagctctagtgatgatgaggataatttgctcaccctttttgccaacttaaacatgcaacaaaaaaaaattgaatgaattgattagtgctattcatgagaaggatgaactcttggacagccaagaggacttccttattaaagaaaataaaaagcgtgttaaagttaaaaatgcttatgctcaggagatagaaaaatatgaaaaattaactagtgagctaagcacttgcgatagaaaaatatgaaaaattaactagtgagctaagcacttgccatgacactatttccaaccttagatttgaaaatgataaattgattgctaaggttgagaaattaaatgttagtgatgattctattgtcaaccttagaaatgataatgctaatttgattgctaagattgacaaattgaatgcatctctctctagccttaaaattgagaatgaaaaaataattgctaaggctaaagatttaaatgtttgcaatgtttctatttccaatcttagggatgagaacgctattttacatgctaagattgttgaattaaatacttgcaaaccctctacatctaccgttgagcatgttactatttgcactagatgtagagatgttaatattgatgttattcatgatcacattgctatgattaaataacaaaataatcatatagcaaaattagatgctaaaattgttgagcatgaattagagaatgaaaaatttaaatttgctcgtagtatgctttatagtgggagacgccctggcattaaggatggcattggcttccaacatggaggcaatgtcaaactcaatgcccctaaaaaattgtctaactttgttaagggcaaggctcccatggctcaagataacgagggttacattttataccctgccggttatcctgagcacaaaattaggataattcactctaggaagtctcactctggctctcatcatgcttttatgtataagagtgagacatctagttctaggtaatccactcatgtcaaattgcctaaaaagaaatctcctatagcatcaaatgaacctaatatttcatttaagacttttgatgcatcatatgttttaactaataaatcaggcaaagtagttgccaaatatgttgggggcaaacacaaggggtcaaagacctatgtttgggtacccaaggtgcttgtttctaatgtcaaaggacccaagaccgtttgggtacctaagaacaaggcctaaatttgttttttaggtttatgcatccgagggctcaagttggatcattgatagcggatgcacaaaccacatgacaggggataaaaggatgttctcctcctacgagaaaaaccatgatccccaaagagctatcacattcggggatggaaatcaaggtttggtcaaagtacttggtaaaattgctatatcacctgaccattctatttccaatgtttttcttgtagattctttagattacaatttgctttctgtttctcaattatgcaaaatgggttacaactgtctttttacggatttaggtgttactgtctttagaagaagtgatgattcagtagcatttaagggagtgttagagggtcagctatacttagttgattttaatagagctgaactcgacacttgcttaattgtaaagactaacatgggttggctctggcatcgccgactagcgacgttgggatgaagaatcttcataagcttctaaagggagagcacattttgggactaacaaatgttcattttgagaaagacagggtttgtagcgcatgtcaagtagggaagcaagttggtgttcatcatccacacaagaatatcatgacgactgacaggccgcttgagctactccacatggatctattcggcccgatagcttacataagcatcggagggagtaagtactgtctagttattgtggatgattattctcgcttcacttgggtggtctttttgcaggaaaaatcacaaacccaagagaccttaaagggattcttgagatgggctcaaaatgagttcggcttaaggatcaaaaagattagaagcgacaacggaacggagttcaagaactcacaaatagaaggcttccttgaggacgagggcatcaagcatgagttctcttctccctacacacctcaacaaaatggtgtagtggagaggaagaatagaactctacttgatatggcaaggaccatgcttgatgagtacaagacttcggaccggttttgggcagaagcaatcaacatcgcttgctatgccatcaaccgtctctaccttcaccgaatcctcaagaagacatcgtacgaactcctcaccggtaaaaagcccaatgtttcatattttagagtctttggaagcaaatgctttattcttgttaaaagagatagaaaatctaaatttgctcctaaggcggtagaaggctttttacttggttatgattcaaacacaagggcatatagagtctttaacaagtccactggactagttgaagtttcttatgacattgtgttttatgagactaacggctctcaagtagagcaagttgatcttgatgagctagatgatgaagaggctccgtgcgtcgcgctaaggaacatgtctattggggatgtgtgtcctaaagaattcgaagagcctccacatgcacaagatcaaccatcttcctccatgcaagcatctccaccaacccaagatgaggatcaagctcaagatgatgaaaatgaagatcaagaggagccacctcaagaggagcacaatgatcaaggggaaatactaatgatcaagacaaggaagatgatgagggtccaagaccgcctcacccaagagtccaccaagcaatacaacgagatcaccgcgtgaacaccatcctcggcgatattcaaaaggtggtaaccactcgatctcgtgttgctcatttttgtgaacattactcctttttgtcttccattgagccatacagggtggaaaacgcattaagggattcagattgggtgttggcattgcaagagaagctcaacaacttcacgaggaatgaggtatggcatttagttccacgtcctaatcaaaatgttgtaggaaccaagtgggtcttctgcaacaagcaagatgagcatggtgtggtgacaaggaacaaagcctgacttgtggccaagggttactcccaagttgaaggtttggattttggtgaaacctatgcacccgtagctaggcttgagtcaattcgtatattacttgcctatgctacttaccatggcttcaagctttatcaaatggaggtgaaaagtgccttcctcaatggaccaatcaaggaggaggtctatgttgagcaacctcccggctttgaagatagtaagtaccctaaccatgtatataaactctctaaggcgctttatgggctcaagcaagccccaagagcatggtatgaatgcctaagagattttcttatcactaatggcttcaaagtcggaaaagtcgatcctactctctttactaaaacaattgcaaatgatttgtttgtatgccaaatttatgttgatgatatcatatttgggtctactaacaaatctacatgtgaagagtttagtaggataatggttcaaaaattcgagatgtctatgatcggggagttgaagtacttcttaggatttcaagtgaagcaactccaagaaggcaccttcatcagccaaaccaagtatattcaagacatactcaccaagtttagaatgaaggatgccaagcccatcaagacacccatgggaaccaatgggcatctcgacctcgacacgggaggtaaatccgtagatcaaaaggtatatcggtcgatgataggatctttactctatttatgtgcatctcgaccgaatattatgctttccgtatgcatgtgtgcaagattccaagccgatcctaaggaagttcaccttagggccgtaaaacgaatcttgagatatttagtttatactcctaagtttggcctttggtaccccaagggatccacttttgatttaattggatattcagatgctgattgagcagggtgtaaaattgatagaaagagcacatcagggacttgtcagttcttgggaagatccctggtgtcttgggcttcaaagaagcaaaattccgtagctctttccaccgccgaagccgagtacattgccgcaggacattgttgcgcacaattgctttggatgaggcaaacccttagtgactatggttacaaattaaccaacgttcctctcctatgtgataatgagagtgcaatccgcatggcggataatcctattgagcacagccgcactaagcacatagccattcggtatcactttttgagggatcaccaacaaaggggggatatcgatattgcatatgttagcaccaaagaacaattagccgatatctttaccatgccattagatgagaaaacttttgccaaacttaggcatgagctaaacattcttgattctaggaattttgattgatatattgcacacatagctcatttatgtacctttgatcatatctctttcatgtgctatgactaatgtgctttcaagtgaattttatgctaagtcatagattgaaagggaaaaggagtcttcggcgaagacaaggcttccactccactccatcaaattatttacccttcgccgtcgctccgcaccgctctccaatttggtataatcttcactcctatattatttaccaaagggggagaaagtctgacaaagggcttatatttcactcacaagtatctgttttggcgattcatgccaaaggaggagaaagtatcagcccaaagcaaaaggaccgcaccaccaccaattttaaaaaaatagtcttctcaaatttgtattaaaagaaggttttttaattggtatcttattttttatagaactttcaaattggtataacccctttcaaaatttatatctaaaaccctcttgaacactaagaggagaattttattaagtgggagttttgtttagtcaaaagaaaagcattggaaacagggggagaaaatttcaaatcttgaaaatgcttctcaaaatcttattcatttacctttgactatttgcaaagagactttgaaaagaatttccaaaagaatttgcaaaaacaaaacaagtggtgcaagtgtggtccaaaatgctaaattagaagaaagcatccatgcatatcttatgaaatgtatattggtttaattccaagtaacctttgcacttacatcatgtaaactagttcaattctgcacttatacatttgctttggtttgtattggcatcaatcaccaaaaagggggagattgaaagggaaataggcttacaccttttcctaaatgattttggtggttgaattgcccaacacaaataattggacaaactagtttgctctagattataagttctacaggtgccaaaggttcaacacaaaccaataaaaagtccaagaaagggttcaaataaaaagagcaaaagacaaccgaaggctgcccttgcctggcgcaccggactgtccggtgtgccaccgaacagtgttcggtgcaccaccggccagtgtccggtgcaccagggtggattctctccaactcgctagcttcaggaatttggggagccactccgctatagttcaccggactgtccggtgtagcatcggactatccggtgtgccaagcggagtaacggctaatagcgccaacggtcgtctacaaaaggtgaacagtgatgaacagtgcgcgactgcgcgcgcagagtcagagcaggcgccagaaggcgcaccggacggtgaacagtgactgtccggtgcaccaccggactgtccggtggtcccacatgttagagctccaatggtcggaacccaacggcttggtgaacgtggctggcgcaccgaacagcgtccggtgcgccatacgacagaagccctcac

SEQ ID NO: 8539 - DNA, 899 bp, Zea Mays
ctcagtcttcattctgagatttggcacgtcgtcgctctcagcctatcgcgctagcaaagctgctcagccatcgcacctctgttgctccagcgccctcatctcccctgtcccgacgtgcaggtcttcactcttcacggatgctgctcaacgctcgttcttcctgttcttggctctcaccttcagatcgctcggccctagctcctcctaccaacaagtgtcgccatgctctaggtccccggctccgactcgtctccctcgactagaagtcatcgcgccagcagccactttgtggcgccacgctcagccccatcctcaagctacactcgccgaatagcatcctcctcgtcgcgctcggaagcagctacttaactcattttttccttcctgtggtgcgtcgtcgcgtggagctgctgaacgccgacgtctccagcttctgtatcgccatgccggcgctcgtctccccaacaccgttgttgcctactgcgcctactactcgctctacagcagctcgccggctccctggaaattccccagtcatcggccgacttccttgcctcaccgttcgccgcgtcgtcatccctgctgtctcgcgacgtcgtgctcctcacactttatttcctccatgtcggtgatgcttactgaaaacctgagtaagtgctccaatgtctaaaattatggtgggtgccaaaagtttgtctgatatatgacgtcgttcggtagttgttgtctggtagatgatgtagttgtatgtgtctcgacgtcttagctgttcacttaatatgccacttcttgtgactgtgattttaatatcgtagatttatgcttgcgtcggtgatgatggttgtgtgttttgattataggagagtgtggtccgagaaaaattgtttcatgtgtgttat

SEQ ID NO: 8540 - DNA, 578 bp, Zea Mays
cgccagcgtgctatggtgatgccagcatattatccactgaggccaggaagttgggcaaaaaccaacactttctgttctcattagcatcacaggctaacatttaaaccaagttctcaaacacaacaactctgttagtacacgttccaacattgcatcccaacaaaggcaaattcccacaatcacagggtccaggtgcccttgggacaaagactattatcattacaggatcctaatgctcaccaccagtagagtttagtcgtagaaggacacctgccgcgcatccaaacctgctaaccttaaaacattagccatcgaagggacagagatttgagaatgctccctgtacaggcctcaaagacacatttacctatctgttgtgaaacaccaccacaagcgcgagttcctgaagctcagtggatgtggcagccgcggaagattattcattttggtgagaattagtggtaggcgtagaagcagggtttcgctggacaaagcggcctgctgggcgtagccccctgttgtgtccacgctgcctgaacgcttgtccagaagcaggaggcccctcggttcgttcttcc

SEQ ID NO: 8541 - DNA, 215 bp, Zea Mays
ccttgttgtagtactccacaaatatgtcatcattccaagaaatgtacgccctccctaacttcttacccttctccatatgcaacagcagatctcgcgtcctccaccctgcattaagccgaagtgtcgggcgactaagagaggactagggtggaggtggcggcatagtggtcggggaggaggcgagtcagaggaaggaagcagtgcaacgctcggtg

SEQ ID NO: 8542 - DNA, 3432 bp, Zea Mays
tagtattccaaaacctgattttaaaatactttacttccaaacatgccgtcgaccaaatcagattcgaagacagcacaaaaatataataaccgaaactgcaagagtgaactcaaaaaaatctcatctcatttctccatccattcatcatcatgattataatacattgacgacagagaaaaccaagagaacggaaaatggaaacataacggactccaaaatcagtctctagcccgtctagtccaaaagtatggtatatgccccagtgcccgtatgcctgtatccttcaccactgcttactaaccatatcactccatcagaaacacatgctgtaagataccgacgactatgtcccactaaacctgcacctaaagaacaaaaatgatctcacaccaccatgatcaccgatatatctacacgccatctccagttaacacaacactaccaacatctccgactggcaaaacatcatgcagcttggatccaagggacacactatgttggtgtcagattcagctcgatgccacgctgcctcgcactctccaggatgctctcagtgttgctcccactggctttgcagtaattcagatgggcgtgccacagcttgaaggagaagggatagaccgatgccgcctgctgatagaacctcttcaaaatctctgtggcatgcagtttctccaggaggcctgcaccttctagccatactgattccggtgcgacaggtacagctcgaaagatggcattgatcagaacagagcttgcccagaacctggtcccagtggaggctgcgccataacctgtgaagtgcttagctacgaatccaccaacagccaagcccaggcgatagtttgcaggaagagcctccatgactgtttcaacaaaatcaaccaggtacttcacatcgctaatgctttttggaaggagggatgggccaaagcacacttcaaggacagagtttatcagagaagaatctgcaggaacagaaccaatagtatcatctataagctgcctaagcctatgcttcttaatattctggcaaaaccttcgtgacagcagctccctcgtgggcaagttgcaatgatcagcaaggtagccaatgattaaactgaatgtagcccgagtttgagcatctgtcgaagatgatgatttctccagctccagtgcatgaattgcagcatgttctcttatacagtgctcgtaccactccccatgagccaatttcaatgctttactcgcagccatttgtgcttcctgtaggttgttctccagtatcttatacagtgagaggtttagtaaccgaaagacgagatcttctgatatagatggaccagaaccaactgcctgaggtgaaacaagtgatgatgttccaggttcttcactgctcagttctatacaaatagcagcattgctttggatatcacagtcctttccatgttcttcaaaccagcaagtcagtaccttctcagctaactcggcatcagtggccagagcatgttcaacatattgattccacatatattgaattccttgtgcctctttaggccaattcaagatcaactcatcaaagcttttcagacctggacatgtaccatgctttctgtctaaccgagctgagatcagaagaatctgaggacacattgggtactccttcatgtaggtcaccagcatatcaacagaagattttaagcctccaatggccgctagacaactaatgtggttaacagcgaggaattgtgataacatcaggtaagatggatccccgtttttaacacactcactaatatcttcagccatcttacaagcagcaaaatttagaagatctgtaatcttatctctgttgtctacactgggatcaatagaaggccatattaaagcacgaggtaaagctttctgaaactccagctgatcaataatttcctctggaaggttcctgtaaattaagacatataggcacgaaatccaaaatatgcatctgtcggacatggtcaagcaagaaatgacatcagcaagcaacttgtcaccagaattatcaggcattgcagttggaagaattccaataatcctagaaactgccttgtctatatttccagacatgcacaggaagtaaatcatctgtaagaaaatgtctagtatgaaagcacttctttcttgtagatccttgtcagtctcagctgtcatttggcagagcatgctcaaagcatcgttataagcatccaatcgatcatcaacgcgtaacctactatttatatacataagccataattcataagaataaacattgtgttgcacctagaaagaaaacaaagtataaggtttgttgataattatacaatagcatctacaaattataaagcaatcatgcatcaattgaatgtaaaccacaaatataaaatgccctaaatctcatctatagttttttcatgtcctaaaaagctgaaagcacaatctggcactataggggtgcaaccataagcaaacaagccataccaaatgaccaaaatttagcttttgcgtgaataaggtccgcaactgatacattagaacaagcagtgtaataataaaaataaaaaagaaaaaaaatgtttatagctaatgcattccaacataaaatgtttaaggcttgaactaaatggcaagagagcaaccagtaaatagtttaccgcatcagaaaacatgtcatcttttccaagtccttcatccttttgatagtaaatatggagataaaacacccacaggataactgtacttggatcagcctcaatggaccgcgccagaaatgaaagagcctgcaaaatacacattatttagagttacggtaatggccaacgttacaatatccaacctgaattcaactgtgtagaagcagctaaacatgttctaatctgaaaggtacaacatccaatgcagaagttgaccttgattctgtcaggcttgtttacttttccacaatataaatcaagggctgcctccaagaagaattcaatatcaacagaaccctgtacaatcttattctacacgatatgaagttacacagcaataatcaaaatgcaagcagatcagatatcaatgaagtaaatatattcattcaaaccaaaaatgtcatatcatcatgttccaacttacaactactatgaaatgtatactttaaatgtctgtaaattcttggtccagtgcagaaggaaattgtcaaaatcagagcatttttcattggaaccacaagaaaagagtgcagtgttaacaagtaccaatataacataatcaatatgccattatgcaagaatagaaagagcaaaaaacttcaagaataagtttagtgtaaagaaccagactccaatatgtatgccacttctgtgatgtgatgataactgcaatacagtgtgctctacccaccttcctgctatccagcattcgaaattttagtagttgtctgttcct

SEQ ID NO: 8543 - DNA, 1550 bp, Zea Mays
acgcgcgccgcttctcccttttcgttcccagaggacgacctgggcaccgtctcgatggggactgtgtacacctccttcacgctcttctccgtggcctcgtcgcccgtggtcacgcgtataggccccaagcgcgcgctcgtcgtcggcaccagcggatacgtgctcttcatcctcgccaacctcgtcccgtcatggtacacaatggtcccagcttcactctaccttggttttactgcatcgatcatttgggttgggcagggtacataccttacatcagctgccctcagtcacgcaagagaaaataatttgcccgagggtccaactttagggagcttcaatggggagttttggggaatgtttgctagcacacaggtgattggaaatttgatctcgcttgctctgctgagaaatggaaaggatggtggaagtatcacagggaaaaatcttctgtttgctgtgtttcttggttgtatgattgtgggcattgtattaatgtgtttactttcgaaaagagatgagaaaaaagataatactccaacgcattcctcatttggagctatgttgaagtacatcattgcgccacttaaggacaaaagaatgcttctcaccattcctcttatagcatattcaggtttacaacaggcatttgtatgggcggtattcacaaagagtattgtaacacccgttcttggcatcagcggcgttggtggagccatggcaatttatggtgcagcagatgtagtttgttctttggttgctggacgattgacctccggacttcgctcagcagcatttatagtgtcggttggagctattcttcaggccatagtcctgttctggctgcttcttttttacagtccaatggatggactgcttggcgcagcgataccattattcataggtgccttgtggggtgttggtgacggtgtcttgaatacacagttaagtgcattacttgggcttctgttcgaagatgtcaaggaggctgcctttgcacagctgaaggtgtggcagtcgggcgccatcgcagtcatcttcttcctgagcccaagcatcacgctgcaagccatgcttctcctgatggccgcggctctcgtcatctcctttggctcattcctgttccttacccttgttgttgagaagtcatcgcccgtcagagcctgaagtgcgaaaccatttcccgatgtccagaccggcgccagcgtgacttggtcagtgttaccagtggcctgggcagcgccatcgttgtatcccaatttcaccggaaacgcagcatccgtcgagtgcgatttgtggcacagtggtaccatttcaggcagccagtatctgaaccgaagctgtagcagctagcagttcgtgcaacggggaaaccgtcaatttgggcacgcttcttgctttgccagtagtggtcctttctccttttgcaatgtctgcactgcagcaatgttgttggaaaaaaaggatgttgtaagaaatgttgtttcatttgtaccacgtcctatcagagtggtcttttttttttttgaaagatctatcgctctgcttttaag

SEQ ID NO: 8544 - DNA, 1510 bp, Zea Mays
atgatttcagattctggttgccgtctaatgatccaaaatacctgttgtttaccttggataatgcgaggatactatccacttggaaagttttgggagatcccgaggccacgtggtggaccgtcctttttttctaaaaaaaatccacccgcaaacggcaagaaacatacaagaacacacggacaaaaaaacgcaggaaatcatcattcatcagccagcggccgcgcttactgacaagccagcgagcgactgcccagtggggcccgggcccgggctcgggctcggccgcatgcctcgtctcgtatcctctgctgccgctctcccgcgccggccaccggacctcccctccaggcctcccaactataagagcttctagaaccttctccctcggttcactgcacactcaactctcgcgccccacggcacgcccctcgctggccgcagccatgaacgcccaccgcgacgaggaggccgtctcgccgctcatcgcagcgcccggcggtcggagccacgccgccgacgcgcacgtcctctcggcagccttcctcttcgtcttctccgcctacagcgccgcccagaacctccagacctccgtcaacaccgaggacgacctgggcaccgtctcgatggggactgtgtacacctccttcacgctcttctccgtggcctcgtcgcccgtggtcacgcgtataggccccaagcgcgcgctcgtcgtcggcaccagcggatacgtgctcttcatcctcgccaacctcgtcccgtcatggtacacaatggtcccagcttcactctaccttggttttactgcatcgatcatttgggttgggcagggtacataccttacatcagctgccctcagtcacgcaagagaaaataatttgcccgagggtccaactttagggagcttcaatggggagttttggggaatgtttgctagcacacaggaggctgcctttgcacagctgaaggtgtggcagtcgggcgccatcgcagtcatcttcttcctgagcccaagcatcacgctgcaagccatgcttctcctgatggccgcggctctcgtcatctcctttggctcattcctgttccttacccttgttgttgagaagtcatcgcccgtcagagcctgaagtgcgaaaccatttcccgatgtccagaccggcgccagcgtgacttggtcagtgttaccagtggcctgggcagcgccatcgttgtatcccaatttcaccggaaacgcagcatccgtcgagtgcgatttgtggcacagtggtaccatttcaggcagccagtatctgaaccgaagctgtagcagctagcagttcgtgcaacggggaaaccgtcaatttgggcacgcttcttgctttgccagtagtggtcctttctccttttgcaatgtctgcactgcagcaatgttgttggaaaaaaaggatgttgtaagaaatgttgtttcatttgtaccacgtcctatcagagtggtcttttttttttttgaaagatctatcgctctgcttttaag

SEQ ID NO: 8545 - DNA, 1831 bp, Zea Mays
tcgtcccgttccccaaatcaaaattcacaatcacgaagaagaacacgagagcagaacctcgactttgggctgggcagacggcataccgcagagcgcagagagcacgccacccacctcgtcccctcaatttcgcctgttcgccccaacgcctctccatggcgggcgccgacgcagggctcgcgtcggccgccggcgacgtcgaggaggccgcgcccctggtcgccggccccggctcccgccgcgcgcccgcctcggtgatgggggcgtcccgcgacgtgcacctgctgagctccgcctttctcttcgtcttcctcgcctaccatgcggcgcagaacctccaaagcactgtcaacacggacgagaacctgggctccatctcgctgggcgtgctctacacgtccttcacggcgttctcggcggcgggctccgcggtggtgcggtggatgggatccaggcgcgcgctcgtggccggcacctccggctacctcctctttatcgcagcgaacctcctaccgtcctggtacacaatggtcccagcttcactctaccttggttttactgcatcgatcatttgggttgggcagggtacataccttacatcagctgccctcagtcacgcaagagaaaataatttgcccgagggtccaactttagggagcttcaatggggagttttggggaatgtttgctagcacacaggatggtggaagtatcacagggaaaaatcttctgtttgctgtgtttcttggttgtatgattgtgggcattgtattaatgtgtttactttcgaaaagagatgagaaaaaagataatactccaacgcattcctcatttggagctatgttgaagtacatcattgcgccacttaaggacaaaagaatgcttctcaccattcctcttatagcatattcaggtttacaacaggcatttgtatgggcggtattcacaaagagtattgtaacacccgttcttggcatcagcggcgttggtggagccatggcaatttatggtgcagcagatgtagtttgttctttggttgctggacgattgacctccggacttcgctcagcagcatttatagtgtcggttggagctattcttcaggccatagtcctgttctggctgcttcttttttacagtccaatggatggactgcttggcgcagcgataccattattcataggtgccttgtggggtgttggtgacggtgtcttgaatacacagttaagtgcattacttgggcttctgttcgaagatgtcaaggaggctgcctttgcacagctgaaggtgtggcagtcgggcgccatcgcagtcatcttcttcctgagcccaagcatcacgctgcaagccatgcttctcctgatggccgcggctctcgtcatctcctttggctcattcctgttccttacccttgttgttgagaagtcatcgcccgtcagagcctgaagtgcgaaaccatttcccgatgtccagaccggcgccagcgtgacttggtcagtgttaccagtggcctgggcagcgccatcgttgtatcccaatttcaccggaaacgcagcatccgtcgagtgcgatttgtggcacagtggtaccatttcaggcagccagtatctgaaccgaagctgtagcagctagcagttcgtgcaacggggaaaccgtcaatttgggcacgcttcttgctttgccagtagtggtcctttctccttttgcaatgtctgcactgcagcaatgttgttggaaaaaaaggatgttgtaagaaatgttgtttcatttgtaccacgtcctatcagagtggtcttttttttttttgaaagatctatcgctctgcttttaag

SEQ ID NO: 8546 - DNA, 438 bp, Zea Mays
atggataataggttcacaaatataagagagctaggttccaagggaaagagaagcaatccactgttgcttgaagagtttacatggcaaaatgaatgggttgaagaagaatctgatggtgataacatttgggatgccgtggatgaagctctaggtgcaagtcagggtctccgaggccgaaatttgcctaggactgctgctgctgatggttcctcctctcaaacccagacacaaacctatgttagaaccagaaaacgacccagaaatgcagcagctacagctcaagacatacgtgaagaagatgacaattctcctgctgaagatgaacaagaacaagagacagcaagacaaatgaatgatgatgacgatgaaggcgaacaagaatcaggtgtaaggggagctgcaggtgatgaatttcagttggatgcagtgttcggctag

SEQ ID NO: 8547 - DNA, 1272 bp, Zea Mays
ctgcccgcccgcccggccggcgatctctacacagtgcgcatgcatggcaaaggcgcggtaaaaataaaaaacgtgtgtgccgtgccgggccaaacgcacaaacagcgcgcgggcggcgtacgacgtcgcgcccaccgcgtgccgctcccagactggatttcatcaagataatcctgaaactggagccaacaagcagacagagaaagaagagcaagaagaccggctcccagccgatacacggatcgatatggtgacagtgagagaggagactcgcaaggggccatggacagagcaggaggacctgcaactgggctcaaccggacaggcaagagctgccggctgcgctgggtcaactacctccaccctggcctcaagcgtgggcgcatgtctccccatgaagagcgactcatcctagagctgcacgctcggtggggaaacaggtggtccaggatagcacgccgcttgccagggcgcactgacaatgagatcaagaactactggaggacacacatgagaaagaaggcacaggagaggaagaggaacatgtctccatcgtcgtcctcgtcttcgctgacttaccagtcaggctacccagatactccatcaaccattggagttgagggacaggagcttcatggtggcagtggctgcatcacaagcatcctgaagggcacccctccggacatggatggctatcccatggaccagatatggatggaaattgaggcgccacagatgccctcggaggagagctttgttggggggaaccataatgtgtgcagcagccttgccaccccgctgccaccaccaactgtctgggaatactacccagatgcctgctggaaggttgacgatgagatcaagatggcaacacaatttcaatttggttatagtgaaggagttgggccctgcttctgatgccataaatattgggtcagattactaagttatacacctacctagcagaagtgaagtgcttttgtagaaacaagctttagcatggatctgaatatttatctccgcgcttagaattgcaggtctatggatctatgcatggttgctatgtatctatctagtgtgcaagacaagattatcttaatttgtccttgatgctatggaatacaagggcaaaggtactatatctgtttactcacagtataattagctaccctttgagacttttctgttggacatgatgccaacaatacatgttatattgatatagatggtcttaacttggaagggtttaaagtttcagtccacagaaaccat

SEQ ID NO: 8548 - DNA, 852 bp, Zea Mays
accgttatctggccacgtgatatttttgccgctcgatgccgcgtctccagctccaagcgcgtccggccacccacacctctgcccctccatgcatcttcctagtcctagccgcagctcctcatcttcctgcgcgcgctccttctctgtctcccatggccgagcgtcctccctgctcctctctcctttatctccctctccatgccggcgcttccctagctcgttttcccatctccctgctccttcccatggtgcgcagggcgtcctcccctcgactccctccctagctccccaccgctcgccttcctctccttcctagtcgcccgtctccagctcggtctgcactcgccgtccctgccccctcgctgtttttgtgccagccgagctcgcccagcccctcgcctctccacctcatcaacgccctcagccatggatgtcgaatcccctctctttagtgcctttctttgcagcccctgcgtcgccgtgcatgtaaggtgtttgtctaaatgctcaagaggagtgtcgtgtcgtggacagcccttttggcgtcgtcgggtgtttgatgttttgcgcatcccgtctacgacaccgtcgaccctcagtgatatttcgttcttgctttgtcgttttatcgatcgacgtctatttgctaatgtgaagtgtgtgtatgtgcctatgtgtgttgaggagcgacatctgtggaatctgggtgaagaagaaacagagcacgtccgacgcttactagctgctggtgaaaggattgaatcggctatcatggtcgtttagtgtcgatcgagtcaaccttagtcgtgtgaggacacgtgtcatctaaagagcaagattggtacctggaat

SEQ ID NO: 8549 - DNA, 2880 bp, Zea Mays
accgttatctggccacgtgatatttttgccgctcgatgccgcgtctccagctccaagcgcgtccggccacccacacctctgcccctccatgcatcttcctagtcctagccgcagctcctcatcttcctgcgcgcgctccttctctgtctcccatggccgagcgtcctccctgctcctctctcctttatctccctctccatgccggcgcttccctagctcgttttcccatctccctgctccttcccatggtgcgcagggcgtcctcccctcgactccctccctagctccccaccgctcgccttcctctccttcctagtcgcccgtctccagctcggtctgcactcgccgtccctgccccctcgctgtttttgtgccagccgagctcgcccagcccctcgcctctccacctcatcaacgccctcagccatggatgtcgaatcccctctctttagtgcctttctttgcagcccctgcgtcgccgtgcatgtaaggtgtttgtctaaatgctcaagaggagtgtcgtgtcgtggacagcccttttggcgtcgtcgggtgtttgatgttttgcgcatcccgtctacgacaccgtcgaccctcagtgatatttcgttcttgctttgtcgttttatcgatcgacgtctatttgctaatgtgaagtgtgtgtatgtgcctatgtgtgttgaggagcgacatctgtggaatctgggtgaagaagaaacagagcacgtccgacgcttactagctgctggtgaaaggattgaatcggctatcatggtcgtttagtgtcgatcgagtcaaccttagtcgtggtaagctaccattatttctgctatttagccgatgtatgagttagatggataaaatagttacgatgattttcttatctctagcttagatatgttgtatgttcctctattttattgtggtaattgtgcttatacgaggtggtgtctaagcgatacgatgcgatgcgaatggtaattgtgcttggatgaatatatgtgtatgcataatgtgtttaaattgatttttttttgtttgcatgtatgtgatggtaggtttaaaatactaggttatgagaaataaatggattcatatatgtgattaactaggtggttttagctctaatttagaaggatgtgttagaatagttgaagtatcaaacatatgaaaattttagaagtaactaggagctaagttaaaattattgttgtctagacctgcatgtccaattttaattatgcagtgaagtaaatcatgttttctgtaaaagtgttatatataaaagttatagctaacttctttaacttgcttgtgctaaaattttatggccataggtttagtagtttaggagttatgatttttccaagtccagtttcagaatctgtccaaattctgtacatgtttcgaaaattggattctttggctaagctaaactgagaatcagccctcagtaattctataagaattgtagtactttttttaagatttccaacaaattttggatcaccctttttggtgatttgtaagttaaattacagtcgtttgaagtacgatatctaaatctgtccaaatttagatagcagagcatttcttatatcttttcaccttgatacgtattgaattaagctgagatatttataaatgaattgtaaacaatcctattagctttctaaaaagtctaggatcatctgaattggatgactgagactccagttatgaatttttgaagtgaagagccgaattctgtccaaatttggacagaatttaagtttagcactgtttgacctttcaaaatgtctaatcatgttgtgatgataatacaaaagttatagaggactttctaagcttctcagaaagttctagtttactatttttggatgcctattttgtgagttatgggctaaacaaatagttgttgttctgctgtccaaattcaacgagtattaaaatgactatatggagtttcttttgtgtggatacctagatttggttagttcttgttttgattaatgaagtcttatagttgcatatatatatgtgtgtgtgttgtttcgtggcgaggggttgtagtttggtcatgttcaccaaggtacagtgtcacacccgggttttaggggtctaaaactcgggcgcgaaataaacaacaggtgtgttgggaccaagtctcacacatatgatgaatagtggtacagaaacgaatgtcacatctttattatataataggagttctgtacaaaataaataaataattacattataaggagacaatgatccagcaacctaaagttgactgggagacaacggcctagacctctaacgaacacatcgcagcatcctccatgcgcctcatcctgtggtacctgttcttgacctatgggggtgtgagacagcaagagtgagctcacatacgttcgtcgctcaacaagttgtggggaataatgtgtatgaactcgccaaaggtgagagctcatgtgaagtgtaaggcttaccaaagagaatgtttgaagctgagcattgcttttaaagttggttaaaattttattagcagttactaagtattagtaaataccaaacccaattaagtagtagaacaaaaataataacaacaccctcaatgcaatgcatatgacaaaattgaatttagttccataaattagtcatgtgagggtccgagctactcatgaccgtgagcacggctgatataccagttttacactttgcagaggttgcgcatatttatccacaagttatgttacgcatctgccacggggttgtacgggcctcattgtaatacccaatttgtaatttgcaagagctaataccaaagggagaaacaagttcactttatctatgtgggagtttgaactttttgtgcca

SEQ ID NO: 8550 - DNA, 1025 bp, Zea Mays
atggaggacgaagatgacaagaaggaggtcgccgtggtcgggtcctccgccgccgacccagtagcagactcctcggccgccgacgcctcacacgagtacactggcatcgagaaggagatcttcgaccgtctcctggagagaaggatcgacgaagctgtctaccggccgtcggtcttccgcgaacagctccaccggcacttcaagcggctgccgaggagctacgccatcaatttgaacgcggaggacgtccttctgcacagcaagatcctcgagtgcgccgccgaccctgacaagcgccccgtcttccatgcccgcttcttgaaatgcatccatggtccagttgttgattcaaaagacaacccatggggctctctcactgctacttccagatacgcaggagtcccctgtcttcatgaaataattttttctacaattgaccggccaagagtcctcgctcagctgtctgccttgctgtctgaagttggactgaacattcttgaagctcatgttttctcaacaagggatggcttttgtttgcatatgtttatcgttgatggctggcatacagaggagacatatgatttggtgcagtgtctcaaggagacagcggcacgcaattatgtgttacgaagcggctttgaaatcggccttcattccaatttgaaagcacaacgcacagagaaagacaggcgaaggcagagaagaaggatatagaagtttggccaactcattcacaagggagatacacgatgctatccctacaaaatttatagttcatatgtataagaactaagggtatatttgtaattttatatgaaggcgtactatgatttgctactataaatatgtgtacaatgccatgcagagagcacggtggaagggaaaactggaataatttcgccttcgaagttgtgatcttttattatcactatttttgcttatgaaggtacatgtaataatctatgaaggaaaagaagcaataacaaaaacacgtcaacaactattcccctccgaacaattgtatt

SEQ ID NO: 8551 - DNA, 1299 bp, Zea Mays
atactgcaacaagctctagcgttacttttaatatgcttcagccatttgatgctcccctgcctccacacgtgcgctagcacagttccaatgctacatcaaagtaacgcttcttgattactgataatgccaaatcctagctttttagcgtttcttttctcccctaaaaatgagttcagggtgtagtattttcctaaaggatgggagatccattctccgatacaaaaaagtgagtctaaggatgcaatattttcctaaaaaaggaagagttcttgctaacatttcttatcttggtcttacgaaggaggtattcctttttcataaagtcacataataattatgtaatttcatcttattgtattggcttctataagtattttatccatgttccagataatatgagcaagcaacttttataagtctttaatatgtgatttccatggtcatatctcatttaaaaggaaaacttcatgtattcatattacaaatgataatttaagagccctggcaaaagggataatgattaaaacttgaatgatcataattgccatggttacattgctatgtcaatcgtgcgttttttgcttactatttcccctctataattgtatgcatctatgtggctatattttttatgctctttttgatgcttccactttgcttctgtagttgtttgtgttttggaatcaaggtgcacatttgcatgaattggatcttttagcgaccagaccatatagttgtgtacaaccaaatatcatttgtggatttagagaaagaactcttcatgaagtcattcatagcatcatatggaagaaatgtcattgccatcacccagatgaaacattccactatctgtcaactccaacaaaactattgtctagaccaaaacaatcattctccaaattaacaggatagtcctggagatgaaggccaggacctaccgtcgtttgagtcaccataaaaaagaagcaacattcgattggttggttggctaacggacccagcgcattgtccaaagctcaaccgcagcatggcgggaggcagctcatgcacatcagccagtcaccgatcgagcatcggcttgcggtaccggatagagcaagtgatacatttggcggatagatagccagcttttgtctaatactatagtttacaatgttgtatctaaacactatttatcaaaaccatggtatgtttggagctaccaaaactacggtattatcatagcaattgcaaagtataatattataaaactatggttctgagaaacaacgttgccaaacatgccctgatcggttgaaa

SEQ ID NO: 8552 - DNA, 967 bp, Zea Mays
ccttccagttcccacgaaaaaggaaaaaagaaaactcaagagcccaggcttatctagaaacctcgctaaccctcgaggcctcgagtagctatgaagcagcgaggcgacgacggtgccgacggcgcagctgctttcgccggctgcctggattgcaggtcctccgaccattgctttttgcggtaaagagaccctttccatactatccttcgcttttcgattgtgtcgatgttgtagctttcgtgccggcagggaggcaacgccgccgccgccgccgacagtgacgacgctgctgccgccttcggtttctaactccttcgatcatcgcttttctgagttgtttgtgttttggaatcaaggtgcacatttgcatgaattggatcttttagcgaccagaccatatagttgtgtacaaccaaatatcatttgtggatttagagaaagaactcttcatgaagtcattcatagcatcatatggaagaaatgtcattgccatcacccagatgaaacattccactatctgtcaactccaacaaaactattgtctagaccaaaacaatcattctccaaattaacaggatagtcctggagatgaaggccaggacctaccgtcgtttgagtcaccataaaaaagaagcaacattcgattggttggttggctaacggacccagcgcattgtccaaagctcaaccgcagcatggcgggaggcagctcatgcacatcagccagtcaccgatcgagcatcggcttgcggtaccggatagagcaagtgatacatttggcggatagatagccagcttttgtctaatactatagtttacaatgttgtatctaaacactatttatcaaaaccatggtatgtttggagctaccaaaactacggtattatcatagcaattgcaaagtataatattataaaactatggttctgagaaacaacgttgccaaacatgccctgatcggttgaaa

SEQ ID NO: 8553 - DNA, 982 bp, Zea Mays
ccttccagttcccacgaaaaaggaaaaaagaaaactcaagagcccaggcttatctagaaacctcgctaaccctcgaggcctcgagtagctatgaagcagcgaggcgacgacggtgccgacggcgcagctgctttcgccggctgcctggattgcagggaggcaacgccgccgccgccgccgacagtgacgacgctgctgccgccttcggtttctaactccttcgatcatcgcttttctgaggtacaaacttagttccatggcttccgatgacactgctgaaatgtgaatgttctgtttcgacgacgttgccaagaaaattgttgggaaatcatacaactctcctatcatcagttacagggacttcaactatcctactagatttaacattgatcgtatctcttaaattcacatttgtagttgtgtacaaccaaatatcatttgtggatttagagaaagaactcttcatgaagtcattcatagcatcatatggaagaaatgtcattgccatcacccagatgaaacattccactatctgtcaactccaacaaaactattgtctagaccaaaacaatcattctccaaattaacaggatagtcctggagatgaaggccaggacctaccgtcgtttgagtcaccataaaaaagaagcaacattcgattggttggttggctaacggacccagcgcattgtccaaagctcaaccgcagcatggcgggaggcagctcatgcacatcagccagtcaccgatcgagcatcggcttgcggtaccggatagagcaagtgatacatttggcggatagatagccagcttttgtctaatactatagtttacaatgttgtatctaaacactatttatcaaaaccatggtatgtttggagctaccaaaactacggtattatcatagcaattgcaaagtataatattataaaactatggttctgagaaacaacgttgccaaacatgccctgatcggttgaaa

SEQ ID NO: 8554 - DNA, 976 bp, Zea Mays
ccttccagttcccacgaaaaaggaaaaaagaaaactcaagagcccaggcttatctagaaacctcgctaaccctcgaggcctcgagtagctatgaagcagcgaggcgacgacggtgccgacggcgcagctgctttcgccggctgcctggattgcagggaggcaacgccgccgccgccgccgacagtgacgacgctgctgccgccttcggtttctaactccttcgatcatcgcttttctgaggtacaaacttagttccatggcttccgatgacactgctgaaatgtgaatgttctgtttcgacgacgttgccaagaaaattgttgggaaatcatacaactctcctatcatcagttacagggacttcaactatcctactagatttaacattgatcgtatctcttaaattcacatttgtagttgtgtacaaccaaatatcatttgtggatttagagaaagaactcttcatgaagtcattcatagcatcatatggaagaaatgtcattgccatcacccagatgaaacattccactatctgtcaactccaacaaaactattgtctagaccaaaacaatcattctccaaatgatagtcctggagatgaaggccaggacctaccgtcgtttgagtcaccataaaaaagaagcaacattcgattggttggttggctaacggacccagcgcattgtccaaagctcaaccgcagcatggcgggaggcagctcatgcacatcagccagtcaccgatcgagcatcggcttgcggtaccggatagagcaagtgatacatttggcggatagatagccagcttttgtctaatactatagtttacaatgttgtatctaaacactatttatcaaaaccatggtatgtttggagctaccaaaactacggtattatcatagcaattgcaaagtataatattataaaactatggttctgagaaacaacgttgccaaacatgccctgatcggttgaaa

SEQ ID NO: 8555 - DNA, 1050 bp, Zea Mays
ccttccagttcccacgaaaaaggaaaaaagaaaactcaagagcccaggcttatctagaaacctcgctaaccctcgaggcctcgagtagctatgaagcagcgaggcgacgacggtgccgacggcgcagctgctttcgccggctgcctggattgcagggaggcaacgccgccgccgccgccgacagtgacgacgctgctgccgccttcggtttctaactccttcgatcatcgcttttctgagttgtttgtgttttggaatcaaggtgcacatttgcatgaattggatcttttagcgaccagaccatataggtacaaacttagttccatggcttccgatgacactgctgaaatgtgaatgttctgtttcgacgacgttgccaagaaaattgttgggaaatcatacaactctcctatcatcagttacagggacttcaactatcctactagatttaacattgatcgtatctcttaaattcacatttgtagttgtgtacaaccaaatatcatttgtggatttagagaaagaactcttcatgaagtcattcatagcatcatatggaagaaatgtcattgccatcacccagatgaaacattccactatctgtcaactccaacaaaactattgtctagaccaaaacaatcattctccaaattaacaggatagtcctggagatgaaggccaggacctaccgtcgtttgagtcaccataaaaaagaagcaacattcgattggttggttggctaacggacccagcgcattgtccaaagctcaaccgcagcatggcgggaggcagctcatgcacatcagccagtcaccgatcgagcatcggcttgcggtaccggatagagcaagtgatacatttggcggatagatagccagcttttgtctaatactatagtttacaatgttgtatctaaacactatttatcaaaaccatggtatgtttggagctaccaaaactacggtattatcatagcaattgcaaagtataatattataaaactatggttctgagaaacaacgttgccaaacatgccctgatcggttgaaa

SEQ ID NO: 8556 - DNA, 1000 bp, Zea Mays
ccttccagttcccacgaaaaaggaaaaaagaaaactcaagagcccaggcttatctagaaacctcgctaaccctcgaggcctcgagtagctatgaagcagcgaggcgacgacggtgccgacggcgcagctgctttcgccggctgcctggattgcaggtcctccgaccattgctttttgcgggaggcaacgccgccgccgccgccgacagtgacgacgctgctgccgccttcggtttctaactccttcgatcatcgcttttctgaggtacaaacttagttccatggcttccgatgacactgctgaaatgtgaatgttctgtttcgacgacgttgccaagaaaattgttgggaaatcatacaactctcctatcatcagttacagggacttcaactatcctactagatttaacattgatcgtatctcttaaattcacatttgtagttgtgtacaaccaaatatcatttgtggatttagagaaagaactcttcatgaagtcattcatagcatcatatggaagaaatgtcattgccatcacccagatgaaacattccactatctgtcaactccaacaaaactattgtctagaccaaaacaatcattctccaaatgatagtcctggagatgaaggccaggacctaccgtcgtttgagtcaccataaaaaagaagcaacattcgattggttggttggctaacggacccagcgcattgtccaaagctcaaccgcagcatggcgggaggcagctcatgcacatcagccagtcaccgatcgagcatcggcttgcggtaccggatagagcaagtgatacatttggcggatagatagccagcttttgtctaatactatagtttacaatgttgtatctaaacactatttatcaaaaccatggtatgtttggagctaccaaaactacggtattatcatagcaattgcaaagtataatattataaaactatggttctgagaaacaacgttgccaaacatgccctgatcggttgaaa

SEQ ID NO: 8557 - DNA, 899 bp, Zea Mays
ccttccagttcccacgaaaaaggaaaaaagaaaactcaagagcccaggcttatctagaaacctcgctaaccctcgaggcctcgagtagctatgaagcagcgaggcgacgacggtgccgacggcgcagctgctttcgccggctgcctggattgcaggtcctccgaccattgctttttgcggtaaagagaccctttccatactatccttcgcttttcgattgtgtcgatgttgtagctttcgtgccggcagggaggcaacgccgccgccgccgccgacagtgacgacgctgctgccgccttcggtttctaactccttcgatcatcgcttttctgagttgtgtacaaccaaatatcatttgtggatttagagaaagaactcttcatgaagtcattcatagcatcatatggaagaaatgtcattgccatcacccagatgaaacattccactatctgtcaactccaacaaaactattgtctagaccaaaacaatcattctccaaattaacaggatagtcctggagatgaaggccaggacctaccgtcgtttgagtcaccataaaaaagaagcaacattcgattggttggttggctaacggacccagcgcattgtccaaagctcaaccgcagcatggcgggaggcagctcatgcacatcagccagtcaccgatcgagcatcggcttgcggtaccggatagagcaagtgatacatttggcggatagatagccagcttttgtctaatactatagtttacaatgttgtatctaaacactatttatcaaaaccatggtatgtttggagctaccaaaactacggtattatcatagcaattgcaaagtataatattataaaactatggttctgagaaacaacgttgccaaacatgccctgatcggttgaaa

SEQ ID NO: 8558 - DNA, 1274 bp, Zea Mays
gtctgctgctacttcacatcttgtccgcacacgtggctagtgctgtttcatttgcctaccaaccggttcctgacttgccgctctgccttccagttcccacgaaaaaggaaaaaagaaaactcaagagcccaggcttatctagaaacctcgctaaccctcgaggcctcgagtagctatgaagcagcgaggcgacgacggtgccgacggcgcagctgctttcgccggctgcctggattgcaggtcctccgaccattgctttttgcggtaaagagaccctttccatactatccttcgcttttcgattgtgtcgatgttgtagctttcgtgccggcagggaggcaacgccgccgccgccgccgacagtgacgacgctgctgccgccttcggtttctaactccttcgatcatcgcttttctgagttgtttgtgttttggaatcaaggtgcacatttgcatgaattggatcttttagcgaccagaccatataggtacaaacttagttccatggcttccgatgacactgctgaaatgtgaatgttctgtttcgacgacgttgccaagaaaattgttgggaaatcatacaactctcctatcatcagttacagggacttcaactatcctactagatttaacattgatcgtatctcttaaattcacatttgtagttgtgtacaaccaaatatcatttgtggatttagagaaagaactcttcatgaagtcattcatagcatcatatggaagaaatgtcattgccatcacccagatgaaacattccactatctgtcaactccaacaaaactattgtctagaccaaaacaatcattctccaaatgtaagccaacttcaatgtatttattgattcatttttattttttttaaattacttacattcatatgtttctatgctaccacattgatttacgtaccagtaacaggatagtcctggagatgaaggccaggacctaccgtcgtttgagtcaccataaaaaagctcaaccgcagcatggcgggaggcagctcatgcacatcagccagtcaccgatcgagcatcggcttgcggtaccggatagagcaagtgatacatttggcggatagatagccagcttttgtctaatactatagtttacaatgttgtatctaaacactatttatcaaaaccatggtatgtttggagctaccaaaactacggtattatcatagcaattgcaaagtataatattataaaactatggttctgagaaacaacgttgccaaacatgccctgatcggttgaaa

SEQ ID NO: 8559 - DNA, 664 bp, Zea Mays
ccttccagttcccacgaaaaaggaaaaaagaaaactcaagagcccaggcttatctagaaacctcgctaaccctcgaggcctcgagtagctatgaagcagcgaggcgacgacggtgccgacggcgcagctgctttcgccggctgcctggattgcaggtcctccgaccattgctttttgcggtaaagagaccctttccatactatccttcgcttttcgattgtgtcgatgttgtagctttcgtgccggcagggaggcaacgccgccgccgccgccgacagtgacgacgctgctgccgccttcggtttctaactccttcgatcatcgcttttctgagttgtttgtgttttggaatcaaggtgcacatttgcatgaattggatcttttagcgaccagaccatatagttgtgtacaaccaaatatcatttgtggatttagagaaagaactcttcatgaagtcattcatagcatcatatggaagaaatgtcattgccatcacccagatgaaacattccactatctgtcaactccaacaaaactattgtctagaccaaaacaatcattctccaaatgatagtcctggagatgaaggccaggacctaccgtcgtttgagtcaccataaaaaagaaaaggcacttgaagttcaaagttaaggccctgtttggg

SEQ ID NO: 8560 - DNA, 886 bp, Zea Mays
ccttccagttcccacgaaaaaggaaaaaagaaaactcaagagcccaggcttatctagaaacctcgctaaccctcgaggcctcgagtagctatgaagcagcgaggcgacgacggtgccgacggcgcagctgctttcgccggctgcctggattgcaggtcctccgaccattgctttttgcggtaaagagaccctttccatactatccttcgcttttcgattgtgtcgatgttgtagctttcgtgccggcagggaggcaacgccgccgccgccgccgacagtgacgacgctgctgccgccttcggtttctaactccttcgatcatcgcttttctgagttgtttgtgttttggaatcaaggtgcacatttgcatgaattggatcttttagcgaccagaccatataggtacatatagtgttagttcatactacctatgtacaaacttagttccatggcttccgatgacactgctgaaatgtgaatgttctgtttcgacgacgttgccaagaaaattgttgggaaatcatacaactctcctatcatcagttacagggacttcaactatcctactagatttaacattgatcgtatctcttaaattcacatttgtagttgtgtacaaccaaatatcatttgtggatttagagaaagaactcttcatgaagtcattcatagcatcatatggaagaaatgtcattgccatcacccagatgaaacattccactatctgtcaactccaacaaaactattgtctagaccaaaacaatcattctccaaattaacaggatagtcctggagatgaaggccaggacctaccgtcgtttgagtcaccataaaaaaggctaggcagaaatccttaaagttcaattatgaggaaaatgtactcgac

SEQ ID NO: 8561 - DNA, 688 bp, Zea Mays
aattatttaaaataaactatattattattattattattcaaaaattaaaaatagattaaacaacaacagacatccattcaatttcccgatgaaacaaagctaaattattgaactcggtgacagactgacagcagtgaacacgaacaaagcagacacgcatctcgatcctctgctgcctacaatttcaaacacatgagacgagacaggacgacgactcatgtgacactcacgcgtgcagtggctcacatcacatgcatgcgatgcgagtgataatacactggagagcgaggctactgagcgaagcaaacggctaatcaacaacaacctaacgacaatggcggttggacacacgacggcgacggcgacatgaaagaaagcacaacacaggttctgcaccgtcaccttcttgttcttcacgcagttgtcgtgcgtcaggtccgcgcgcgccagcgccagcacggccgccgccgccaggaggagcagggccgccgacgagggcttcggtgacgccatcctctcgctctcttctactgttgaagcaagctgctggtagtaacttcgagtagtagagtgggtgattaatgttactgcttggttcggttcagcccttgagggtgtgtggttatttataaccgtggcccgtgccgtgccggtgcccgtgcccgtgcccgtgcccgtgcgagatgca

SEQ ID NO: 8562 - DNA, 1136 bp, Zea Mays
gagaactaatagtacttggagatgaacaaccatgtttccatcctagcggttctcatcgtctatgtctctgttgttctcctgctcaattcccatgtagggttatgcagctgctacaagcgcatcttcagttttggtgatgataccatggacactggcaatttcgtacacttgattgggaaggccccatctaagtacaaggaagctccctatggcaagacattttttagacatgcaactggccgcatttccgatggtcgtgtcctcattgatttctatgcggaagcactcaagctaccaatgataccaccaattttacctgagaagaactctgggtatttcccgcatggcgccaacttcgctgtgttgggtgccacagcacgtgacagactcttctactcagggagcccatggtgtctaggggcacaaataagttggtttaatgaaatggtggatcgtatagctcctggagacggatggaaatatcatttcagatgtcatcgcatacataagccatatgatcgaggaacttattctcattaatggtgcgaaagcattcgtggtccccaataacttccccattgggtgtttggcatcatacctaagtagattccatagtgacaaccatgaggactacgatgagcacgggtgcattaagtcattaaatgagttctcccaaaagcataatgaacaactttattctgatatcggacgactcagattcacttacccaaatgtgaagctaatatatgctgactactacaatgccaccatggaattcatcaaaaaccctggcagatttggtattggtgatcctctagtagcatgttgtggcggcaatggaccttaccacaccagcatggagtgtaatggaacggcaaagctttggggtgatccacaccactttgccaattgggatggcatgcacatgacagagaaggcatacaacatcattgtggaaggggtgttaaatgggccatttgccgatcctccattttcccttagttgctaggattaattagacttgcatttctttacaacatgtagcctacattttataataatggaagtattttttatttatactacttgaaggaagaaatgaacatgtaactttcaaaattattgcaataatgcac

SEQ ID NO: 8563 - DNA, 655 bp, Zea Mays
ctcaactcactaggagtggggacccacctgtcatccctttgcgctgtcgcggcaacaaaccacgcgagatctgcagcgaactttcccccttttccgtcggcgtcgttgctggcgagttcatactccgcttgccataaagctgtcatgcgccacctctcctctagtaaccctaaccatccgaatcctctaacctacgaagaaccaagagcctcaccccagctggaggccgccgccattgacttccccgtacaccgccgtagaaacctattggccgtggtctgggcttccccagagacatcgtgtgactacccgtgggaattctagggctggattgccgatccagccgcggcaatttcttgtcggagcaccgtctccgcacctcttcgtgtattgcgccatcatcatcacggactcgggtgaagagtaggtagcccaggaggaggtccacaacgaggagtacgagcttatctaggtggcgtctcgtagtcagcttatggtgccaaggaataattattagttcactttactgttatcacttatttttgtaagactcttccgctatgtaataataatatttgtgacatttatctctatacacttggtcattataggtgttgttcttctttggcgcacatatgagacgcacctggcttta

SEQ ID NO: 8564 - DNA, 1040 bp, Zea Mays
tggggacccacctgtcatccctttgcgctgtcgcggcaacaaaccacgcgagatctgcagcgaactttcccccttttccgtcggcgtcgttgctggcgagttcatactccgcttgccataaagctgtcatgcgccacctctcctctagtaaccctaaccatccgaatcctctaacctacgaagaaccaagagcctcaccccagctggaggccgccgccattgacttccccgtacaccgccgtagaaacctattggccgtggtctgggcttccccagagacatcgtgtgactacccgtgggaattctagggctggattgccgatccagccgcggcaatttcttgtcggagcaccgtctccgcacctcttcgtgtattgcgccatcatcatcacggactcgggtgagcgccctttctgcactattacctacacgctgggaatcgccatatggttagttggtcgccggggttgtttagggtgggcaaccacggtcgaaacgtacggtgaatccgtctgactccttgggcgacgttcacctggatctcccctagtgatgaccctcatgaccgttcatggggactgccgcacgagatagcactattaggattgagtgattaccgtgaggaaatggggaattgggttcgccggcatgagggctccgctgtgatccactgttgcgccgtcgcgggctgaccgacgaaggagaaggtctcctagccgtctgttcagctgtgggcgactaagattaaccatcacgtaccacttcgcaagatttgatctgggatgtcggttcggtgatgagtgatttggattaagtcggggcgtggtcgtctctcaaactttaaaaccggatcgagcggccaggacggattgcgaagtgttgtatcacatgattctaatctgggccgatcggtcgagatcggacggccaggattcgttgataccccttcgaccgtgccattttgtaaaagtgcccttgatgtttttagttatcaacctgcagtcctggtcttttataaaatcattacgccgaggtcctga

SEQ ID NO: 8565 - DNA, 215 bp, Zea Mays
cctcgtgatcagccccatccgggtcatgggggcggaagatctcaacacctgtcagatgttcgaccacaagcccgaaccagaatttatcaacattctcataagtattgagtcacgtttgatgctggtacgtgaattaactacgtgatgcggagaaccagaactaagttgacctcaagatggtgcaaggagtggtcttcttcgtacaacgatgtcgt

SEQ ID NO: 8566 - DNA, 428 bp, Zea Mays
agtgctcccttcaacctctggacaccggaccggccgcgcggattccgcgggtggtgcacgcctcgcaacaacctgggcgctcctctgccctattaaaagccgtctctgtaccccctcccctccttccatcgagctggcacccgaattcgagtcatcccatacccgaccgccatgggtggaagtgtgagaatgatgttcgccatggggaagactctggctcgtcgatgtagatccctcggggatgggccgtgcggataaataaggccaccaggatgtctgtcatggccttgcctggtgggattgtggaccggaggctacacagtttctcaccggagggacttcaacgccagcgattcgcccaacaccgtgtccgacctcgtccccaccttcgctcccgcgagaggttaggagtcagctgaagatcatcc

SEQ ID NO: 8567 - DNA, 1024 bp, Zea Mays
ggagaactagcaatacttgaagatgaacaaccatatttccattctagtgattctcatcgtcgatgtgtctgttgtcctcctgctcaattcccatgtagggttatgcagctgctacaaccgcatctttagttttggtgacgataccatggacactggaaatttcattcacttgattgggaaggccccatctaagtacaaggaagccccctatggcaagacattttttagacatgcaactggccgcatttctgatggtcgtgtcctcattgatttctatgctgccaagaagcaatttctaagtgattctcttgtcattatgggtggaattggtcaaaatgactactactcatatttcatcaaaggtaaacctcccaaggatggaaatatcatttcagatgtcatcgcagacataagccatttcatcgaggagcttattgtcgttaatggggcgaaagcattcgtggtcgccaataactttcccgttgggtgtttggcatcatacctaagtaggttccacagtgacgaccatgaggactacgatgagcatgggtgccttaagtcgttcaatgagttctcccaaaagcataatgagcaactttattctgccatcggacaaatcagatactcttacccaaatgtgaaggtaatctatgctgactactacaacgccaccatggaattcatcaagaagcctagtagatttggtattggtgatcctctagtagcatgttgtggcggcaatggaccataccacaccagcatggagtgcaatggcacagcaaagctttggggtgacccacaccacttcgccaattgggatggcatgcacatgacagagaaggcatacaacatcattatggaaggggtgttaaatgggccatttgctgatcctccatttccacttagttgctaggattagttacgctaggaattccttacaacatgtagccaatattttttataataatggaagtattttggatttatactacttcaaggaagaagtaactttcaaaattattgc

SEQ ID NO: 8568 - DNA, 875 bp, Zea Mays
ggagaactagcaatacttgaagatgaacaaccatatttccattctagtgattctcatcgtcgatgtgtctgttgtcctcctgctcaattcccatgtagggttatgcagctgctacaaccgcatctttagttttggtgacgataccatggacactggaaatttcattcacttgattgggaaggccccatctaagtacaaggaagccccctatggcaagacattttttagacatgcaactggccgcatttctgatggtcgtgtcctcattgatttctatggagcttattgtcgttaatggggcgaaagcattcgtggtcgccaataactttcccgttgggtgtttggcatcatacctaagtaggttccacagtgacgaccatgaggactacgatgagcatgggtgccttaagtcgttcaatgagttctcccaaaagcataatgagcaactttattctgccatcggacaaatcagatactcttacccaaatgtgaaggtaatctatgctgactactacaacgccaccatggaattcatcaagaagcctagtagatttggtattggtgatcctctagtagcatgttgtggcggcaatggaccataccacaccagcatggagtgcaatggcacagcaaagctttggggtgacccacaccacttcgccaattgggatggcatgcacatgacagagaaggcatacaacatcattatggaaggggtgttaaatgggccatttgctgatcctccatttccacttagttgctaggattagttacgctaggaattccttacaacatgtagccaatattttttataataatggaagtattttggatttatactacttcaaggaagaagtaactttcaaaattattgc

SEQ ID NO: 8569 - DNA, 1268 bp, Zea Mays
ggagaactagcaatacttgaagatgaacaaccatatttccattctagtgattctcatcgtcgatgtgtctgttgtcctcctgctcaattcccatgtagggttatgcagctgctacaaccgcatctttagttttggtgacgataccatggacactggaaatttcattcacttgattgggaaggccccatctaagtacaaggaagccccctatggcaagacattttttagacatgcaactggccgcatttctgatggtcgtgtcctcattgatttctatgcggaagcactaaaactgccaatgataccacccattttacctgagaagaactttgggtgtttcccacatggcgccaacttcgctgtgtttggtgccacggcacgtggcaaagtcttcttttcagggagcccctggtgtataggcacacaaatgtactggtttgatcaattggtagatcgtatagctcccggagatggtaacaatatataattcagtccaaacacatccataataaattcatgcatgatgtgtataatattcttattgataattcattcatccattgcatgattgttctcttatatatcagctgccaagaagcaatttctaagtgattctcttgtcattatgggtggaattggtcaaaatgactactactcatatttcatcaaaggagcttattgtcgttaatggggcgaaagcattcgtggtcgccaataactttcccgttgggtgtttggcatcatacctaagtaggttccacagtgacgaccatgaggactacgatgagcatgggtgccttaagtcgttcaatgagttctcccaaaagcataatgagcaactttattctgccatcggacaaatcagatactcttacccaaatgtgaaggtaatctatgctgactactacaacgccaccatggaattcatcaagaagcctagtagatttggtattggtgatcctctagtagcatgttgtggcggcaatggaccataccacaccagcatggagtgcaatggcacagcaaagctttggggtgacccacaccacttcgccaattgggatggcatgcacatgacagagaaggcatacaacatcattatggaaggggtgttaaatgggccatttgctgatcctccatttccacttagttgctaggattagttacgctaggaattccttacaacatgtagccaatattttttataataatggaagtattttggatttatactacttcaaggaagaagtaactttcaaaattattgc

SEQ ID NO: 8570 - DNA, 1137 bp, Zea Mays
aaggagaactagcaatacttgaagatgaacaaccatatttccattctagtgattctcatcgtcgatgtgtctgttgtcctcctgctcaattcccatgtagggttatgcagctgctacaaccgcatctttagttttggtgacgataccatggacactggaaatttcattcacttgattgggaaggccccatctaagtacaaggaagccccctatggcaagacattttttagacatgcaactggccgcatttctgatggtcgtgtcctcattgatttctatgcggaagcactaaaactgccaatgataccacccattttacctgagaagaactttgggtgtttcccacatggcgccaacttcgctgtgtttggtgccacggcacgtggcaaagtcttcttttcagggagcccctggtgtataggcacacaaatgtactggtttgatcaattggtagatcgtatagctcccggagatggtaaacctcccaaggatggaaatatcatttcagatgtcatcgcagacataagccatttcatcgaggagcttattgtcgttaatggggcgaaagcattcgtggtcgccaataactttcccgttgggtgtttggcatcatacctaagtaggttccacagtgacgaccatgaggactacgatgagcatgggtgccttaagtcgttcaatgagttctcccaaaagcataatgagcaactttattctgccatcggacaaatcagatactcttacccaaatgtgaaggtaatctatgctgactactacaacgccaccatggaattcatcaagaagcctagtagatttggtattggtgatcctctagtagcatgttgtggcggcaatggaccataccacaccagcatggagtgcaatggcacagcaaagctttggggtgacccacaccacttcgccaattgggatggcatgcacatgacagagaaggcatacaacatcattatggaaggggtgttaaatgggccatttgctgatcctccatttccacttagttgctaggattagttacgctaggaattccttacaacatgtagccaatattttttataataatggaagtattttggatttatactacttcaaggaagaagtaactttcaaaattattgc

SEQ ID NO: 8571 - DNA, 958 bp, Zea Mays
aattagtagcacatgtaaggagaactagcaatacttgaagatgaacaaccatatttccattctagtgattctcatcgtcgatgtgtctgttgtcctcctgctcaattcccatgtagggttatgcagctgctacaaccgcatctttagttttggtgacgataccatggacactggaaatttcattcacttgattgggaaggccccatctaagtacaaggaagccccctatggcaagacattttttagacatgcaactggccgcatttctgatggtcgtgtcctcattgatttctatggtaaacctcccaaggatggaaatatcatttcagatgtcatcgcagacataagccatttcatcgaggagcttattgtcgttaatggggcgaaagcattcgtggtcgccaataactttcccgttgggtgtttggcatcatacctaagtaggttccacagtgacgaccatgaggactacgatgagcatgggtgccttaagtcgttcaatgagttctcccaaaagcataatgagcaactttattctgccatcggacaaatcagatactcttacccaaatgtgaaggtaatctatgctgactactacaacgccaccatggaattcatcaagaagcctagtagatttggtattggtgatcctctagtagcatgttgtggcggcaatggaccataccacaccagcatggagtgcaatggcacagcaaagctttggggtgacccacaccacttcgccaattgggatggcatgcacatgacagagaaggcatacaacatcattatggaaggggtgttaaatgggccatttgctgatcctccatttccacttagttgctaggattagttacgctaggaattccttacaacatgtagccaatattttttataataatggaagtattttggatttatactacttcaaggaagaagtaactttcaaaattattgc

SEQ ID NO: 8572 - DNA, 2974 bp, Zea Mays
gactagtcacctgttggcagggtccggttcacgccgcggcggctcgactggactcccctcgtcatggccggcgtcagcggccgcggggccgcggagagggtggccgccgccgtggaggcggtgggatccggtggctgggagttccgaaacgcgtacaggcgccagctgctcgcgctgtcgcggcggatccggctccttggcccctttgtcgaggagctccgggaggtaccctgtgtacccgcggtggaaccggagcgggcgctggcggtgctcgccgacgcgctggaggaggcgctcgacctgctccagctcggccgcgacgggagcaggatattcctgggataaagtaatgaagaagtttcatgaatcaattgttcagctggagcaagctttgtgtgatttttcatatgataaattggacatatctgatgaagttagagagcaggttgagttagtgcatgtacagctcaaaagagccaaagaacgggttgacatgcctgatgatgagttctacaatgaattactttcactgtataacaagagccacgacccaagtgctgaattggatatccttggaagattgtcagaaaagctgcacctgacgaccatcaccgatctcacacaagaatcgcttgctttgcatgagatggtggcatccggtggcggtaatgatcctggagaacacattgaaaaaatgtcgatgctactgaagaagatcaaggactttgtgcaaactcagaaccctgaaatgggcccgccgatgactaccaagctaatggatcccaatggggagccaagacccagaaacatccctgatgagttccggtgtccaatttctcttgagctgatgaaagaccccgttattgttgctactggccagacatatgagcgggcattcatcgagaaatggctagcttctgggcaccagacttgtccaaatactcaacagaggatgccaaacacaacactgacaccaaactatgttcttagaagccttattgcacagtggtgcgaggccaacgggatcgatccaccgaagcgctcgacgcagcctgacaaacctacatcttcgtgctcttcgagcgaacgtgctaacatcgacgctcttctctccaagttatgctccgcagatcctgaggaacagagatcagctgctgcggagctccggctcctggcaaagcggaatgcaaacaatcgtatctgcattgcctaggctggtgccattcccttaatattgagtctcctgtcgtcatctaatctgcagacccaggaacgtgctgtgactgcacttctgaacctctctagtcacgaatataacaagactagcatcatttcatccggtgccgtcccgggcatagttcatgtcttgaagaatggaagcatggaggcacgggagaatgccgcagccacccttttcagcctgtctgtggtcgatgaatacaaggtaacaatcggaggaacaggagccatccccgctcttgtagttttgctgagtgagggcagccaacgcgggaagaaggatgcagcagccgccctgttcaacctgtgtatctaccaggggaacaagggccgtgccatacgagctggcctggtgccactcatcatggggctcgtgacgaaccccaccggagctctgttggacgaggccatggcgatactctcgatactgtccagtcaccccgagggcaaggccgcgattggggcggccgagcccgtccccgtgcttgtggagatgatcggaagcgggtcgccgaggaacagagagaatgctgcggctgtgatgctgcatctgtccgtgcagtccgtgcatctagcccgggcgcaggagtgcggcatcatggtcccgctacgggacctggccctgaatggcacggagagggggaggagaaaggcggtgcagctccttgagcgaatgagcagattcctggttcggcaacaagagggtatcagctcccatgagcagatgttggacgagctcgaacgtcaacttgatgccttcggacctggtgttacagaggccgatatccttgaacaatcgggacttctttaacccacggttgcatgatgatgatgaatctatcttcgccataatactatcaaaagaggtcttcttttggggatagtactaccaaaaaagttcatgctgaaccagagttctttcatggcgacgttctatcggtactgatgctgatctgtccgtccggtttggcttcttccatgcttgtgtgctgaagctcccatcgctccatcagtttctgggaacgtaaggtagcacagaatgatgagatgtgtacagtctactatgtatgctgctccagacgtcatatagctatgtacattttttttcactatggtactataaaaaatgaggagttttagcggcggacttgatcagtaatacttatttcgtgcatgcgtacttgttggcgttagttccagattccagaattttttttggggacacgtatgcatttgggattccaacattggtagtgcgtggtattggaatctagtatggcagtgctagttgcaaccagaatgctattcatgcctctgaaatgcagcaagtgcacacgttcatgtcgatttcttttcttttttacccaaggagaaacatttcatctctgcttttgagaaagcaattatcatggaagatggaacagtttcgtatcgaattcacgcgaaatgtttccaagaagagcacgtatacacgtttggcagctctggtgaaggaagcaagaagactgcgtctgttggcagatctggtgaaggaagcaagaagaccgtcgtctacaagtgctgatgggccacgtcgttcgaataggccgaggaagagcaatgcaaacatgtatgggctggcgtgggtgaatgtgatagaaggtccatgtaatgtctattccttagactttgttcttttaatttcatgtggattgaagtgtattgaaataaattgcaatgaatttcaacttctatg

SEQ ID NO: 8573 - DNA, 3124 bp, Zea Mays
tggaggtgcgggcaactccaacgacgcgatccggcccgcccgcgacgctgacacgaccgcgggacccacccaatacgacgccactaccccgcttttctcgcacctatttaccgcccctgccactgtctcctttccctctgactagtcacctgttggcagggtccggttcacgccgcggcggctcgactggactcccctcgtcatggccggcgtcagcggccgcggggccgcggagagggtggccgccgccgtggaggcggtgggatccggtggctgggagttccgaaacgcgtacaggcgccagctgctcgcgctgtcgcggcggatccggctccttggcccctttgtcgaggagctccgggaggtaccctgtgtacccgcggtggaaccggagcgggcgctggcggtgctcgccgacgcgctggaggaggcgctcgacctgctccagctcggccgcgacgggagcaggatattcctggtccttgatagggataaagtaatgaagaagtttcatgaatcaattgttcagctggagcaagctttgtgtgatttttcatatgataaattggacatatctgatgaagttagagagcaggttgagttagtgcatgtacagctcaaaagagccaaagaacgggttgacatgcctgatgatgagttctacaatgaattactttcactgtataacaagagccacgacccaagtgctgaattggatatccttggaagattgtcagaaaagctgcacctgacgaccatcaccgatctcacacaagaatcgcttgctttgcatgagatggtggcatccggtggcggtaatgatcctggagaacacattgaaaaaatgtcgatgctactgaagaagatcaaggactttgtgcaaactcagaaccctgaaatgggcccgccgatgactaccaagctaatggatcccaatggggagccaagacccagaaacatccctgatgagttccggtgtccaatttctcttgagctgatgaaagaccccgttattgttgctactggccagacatatgagcgggcattcatcgagaaatggctagcttctgggcaccagacttgtccaaatactcaacagaggatgccaaacacaacactgacaccaaactatgttcttagaagccttattgcacagtggtgcgaggccaacgggatcgatccaccgaagcgctcgacgcagcctgacaaacctacatcttcgtgctcttcgagcgaacgtgctaacatcgacgctcttctctccaagttatgctccgcagatcctgaggaacagagatcagctgctgcggagctccggctcctggcaaagcggaatgcaaacaatcgtatctgcattgcctaggctggtgccattcccttaatattgagtctcctgtcgtcatctaatctgcagacccaggaacgtgctgtgactgcacttctgaacctctctagtcacgaatataacaagactagcatcatttcatccggtgccgtcccgggcatagttcatgtcttgaagaatggaagcatggaggcacgggagaatgccgcagccacccttttcagcctgtctgtggtcgatgaatacaaggtaacaatcggaggaacaggagccatccccgctcttgtagttttgctgagtgagggcagccaacgcgggaagaaggatgcagcagccgccctgttcaacctgtgtatctaccaggggaacaagggccgtgccatacgagctggcctggtgccactcatcatggggctcgtgacgaaccccaccggagctctgttggacgaggccatggcgatactctcgatactgtccagtcaccccgagggcaaggccgcgattggggcggccgagcccgtccccgtgcttgtggagatgatcggaagcgggtcgccgaggaacagagagaatgctgcggctgtgatgctgcatctgtccgtgcagtccgtgcatctagcccgggcgcaggagtgcggcatcatggtcccgctacgggacctggccctgaatggcacggagagggggaggagaaaggcggtgcagctccttgagcgaatgagcagattcctggttcggcaacaagagggtatcagctcccatgagcagatgttggacgagctcgaacgtcaacttgatgccttcggacctggtgttacagaggccgatatccttgaacaatcgggacttctttaacccacggttgcatgatgatgatgaatctatcttcgccataatactatcaaaagaggtcttcttttggggatagtactaccaaaaaagttcatgctgaaccagagttctttcatggcgacgttctatcggtactgatgctgatctgtccgtccggtttggcttcttccatgcttgtgtgctgaagctcccatcgctccatcagtttctgggaacgtaaggtagcacagaatgatgagatgtgtacagtctactatgtatgctgctccagacgtcatatagctatgtacattttttttcactatggtactataaaaaatgaggagttttagcggcggacttgatcagtaatacttatttcgtgcatgcgtacttgttggcgttagttccagattccagaattttttttggggacacgtatgcatttgggattccaacattggtagtgcgtggtattggaatctagtatggcagtgctagttgcaaccagaatgctattcatgcctctgaaatgcagcaagtgcacacgttcatgtcgatttcttttcttttttacccaaggagaaacatttcatctctgcttttgagaaagcaattatcatggaagatggaacagtttcgtatcgaattcacgcgaaatgtttccaagaagagcacgtatacacgtttggcagctctggtgaaggaagcaagaagactgcgtctgttggcagatctggtgaaggaagcaagaagaccgtcgtctacaagtgctgatgggccacgtcgttcgaataggccgaggaagagcaatgcaaacatgtatgggctggcgtgggtgaatgtgatagaaggtccatgtaatgtctattccttagactttgttcttttaatttcatgtggattgaagtgtattgaaataaattgcaatgaatttcaacttctatg

SEQ ID NO: 8574 - DNA, 160 bp, Zea Mays
ctcttctgctggatcattcgtattgtatccttcctcggattgcttcttttgttctactacaaatatgctcaacatgacagggagaggtctcgaggtcaagcctggacccactgtcaagtgtgtgcttggacatgactttatcctgcactttctagtgtaa

SEQ ID NO: 8575 - DNA, 2620 bp, Zea Mays
gggtgcctgtgctcatgccattgccattgccattgccatgctgcgtgccgctgttgcccgtgcttcacctgcgctgcgcccccctgctccactccatcctagtagctctacagcttcgagtagctcgctctcactcgcgctctctaccgctccggctcgctgagaccctgaccctgtgtccctgtctatatatacacgcgcgccccctttccgggcatcccttttcctcccgcccgcgcccccgtcttttcctttccgcgtgccctaatttctcgctgcgccttgtcccccacacctccctccctccgccgctggtgctctctcctcctatacatacaaacacatacacacaagctcgctcgctcgctcacgggctgtgagagaggccgtggaaaggaatctttcagctcacacctccctatccctccctccctccctcccttctcctcctactgctactgctcgccaggtcccctcgctcgctcgtcgtcttcaacctcacacaattatttgtgctcccgctccttccgtccgtccttcctcccccctcccctctcccgctcctgctgccttgcctctcagccgagggacgccaaggtctctgccaggatggtgtaggccgtgcctctgtaagttcttcgtttcctagctttactatcaacgcgcacgtattagttcactcgttcgttcgtctctggttgtgtggattattggggaggagtagcagtagtggcagtctgatctggtttagcatgtcttcttgcattcgggttgttttttacggcacctcctacatagtagcagtagcagtactgtggtagagatgttgatttgtgacaaggattgaccttggactgaaggttgatggacaatacagaggctagtacattttttacagtgaaatctactgtgtgggttaaactcgggtggttactcactgctctgtcgtagtattaactggtcaagtaaggaactggaggaattaactccttttcttctgctcatactggagtaggtcatgcacggcagtgtaaatgttgcctggagccagctgcagatcatcctgtcacctgagtaaattgtggcctaacaactcgcgcattatgaggtgtggtggtgagggatgggcgatggcctttgcagatgaaggagcgacagcgctggcggcctgaggaagacgccgtcctgcgcgcctacgtccggcagtacggcccccgcgagtggcacctggtgtcgcagcgcatgaacgtggccctcgaccgcgacgccaagtcgtgcctggagcgctggaagaactacctccgccccgggatcaagaagggctcgctcaccgaggaggagcagcgcctggtgatccgcctgcaggccaagcacggcaacaagtggaagaagatcgccgccgaggtgcccgggcgcacggccaagcgcctcggcaagtggtgggaggtgttcaaggagaagcagcagcgggagctgagggacagccgccgcccgccgccggagcctagccccgacgagcggggcaggtacgagtggctgctcgagaacttcgcggagaagctcgtcggagagaggccacagcaggctgccgctgcgccgtcgccgctgctcatggccgcgcccgtgctgccgccctggctgtcgtccaacgccgggccggccgccgccgccgccgccgccgtcgcgcacccgccgccaagaccgccgtcgccgtccgtgacgctcagcctcgcgtccgccgcggtggcgccgggcccgcccgcgcccgcgccatggatgccggatcgcgccgcggccgacgcggcgccgtacgggttcccgagcccgtcgcagcacggcggcgccgcgcccccgggcatggcggtcgtggacgggcaggcgctggcggagctcgccgagtgctgccgcgagctggaggaggggcggcgcgcgtgggcggcgcaccggcgggaggctgcgtggcggctgaagcgcgtggagcagcagctggagatggagcgcgagatgcggcggcgcgaggtgtgggaggagttcgaggccaagatgcgcaccatgcggctggagcaggcggccgccgcggagcgcgtggagcgggaccaccgggagaaggttgccgagctccgccgcgacgcgcaggtcaaggaggagaagatggccgagcagtgggccgccaagcacgcgcgcgtcgccaagttcgtcgagcagatgggggggtgctcccgttcatggtcctctgccaccgacatgaactgttgaactggacaaacgagccgctgaccacaccgtcgctagctatcgcgtgctacgtgctccggttcacggctttcttgcattctgggacgcgacttgtaaacgccatggattttcttgctcacgttcacttccgctttctttctttctttttttcttttctttttatttacaactgttgttacggtcggttcagtgcttctctctctatctactagtagttgatcagagtcaagaaatgtaatgctgccgttactgtcgtagtttcatcctctctaaacatgcgttctgtctgtttttgatcatgccaagcttcaaccttagcactgaataaatagaacgagaaaaaaaaatcagacaaagtttcaaa

SEQ ID NO: 8576 - DNA, 1494 bp, Zea Mays
gggtgcctgtgctcatgccattgccattgccattgccatgctgcgtgccgctgttgcccgtgcttcacctgcgctgcgcccccctgctccactccatcctagtagctctacagcttcgagtagctcgctctcactcgcgctctctaccgctccggctcgctgagaccctgaccctgtgtccctgtctatatatacacgcgcgccccctttccgggcatcccttttcctcccgcccgcgcccccgtcttttcctttccgcgtgccctaatttctcgctgcgccttgtcccccacacctccctccctccgccgctggtgctctctcctcctatacatacaaacacatacacacaagctcgctcgctcgctcacgggctgtgagagaggccgtggaaaggaatctttcagctcacacctccctatccctccctccctccctcccttctcctcctactgctactgctcgccaggtcccctcgctcgctcgtcgtcttcaacctcacacaattatttgtgctcccgctccttccgtccgtccttcctcccccctcccctctcccgctcctgctgccttgcctctcagccgagggacgccaaggtctctgccaggatggtgtaggccgtgcctctcgcgcattatgaggtgtggtggtgagggatgggcgatggcctttgcagatgaaggagcgacagcgctggcggcctgaggaagacgccgtcctgcgcgcctacgtccggcagtacggcccccgcgagtggcacctggtgtcgcagcgcatgaacgtggccctcgaccgcgacgccaagtcgtgcctggagcgctggaagaactacctccgccccgggatcaagaagggctcgctcaccgaggaggagcagcgcctggtgatccgcctgcaggccaagcacggcaacaagtggaagaagatcgccgccgaggtgcccgggcgcacggccaagcgcctcggcaagtggtgggagaaggttgccgagctccgccgcgacgcgcaggtcaaggaggagaagatggccgagcagtgggccgccaagcacgcgcgcgtcgccaagttcgtcgagcagatgggggggtgctcccgttcatggtcctctgccaccgacatgaactgttgaactggacaaacgagccgctgaccacaccgtcgctagctatcgcgtgctacgtgctccggttcacggctttcttgcattctgggacgcgacttgtaaacgccatggattttcttgctcacgttcacttccgctttctttctttctttttttcttttctttttatttacaactgttgttacggtcggttcagtgcttctctctctatctactagtagttgatcagagtcaagaaatgtaatgctgccgttactgtcgtagtttcatcctctctaaacatgcgttctgtctgtttttgatcatgccaagcttcaaccttagcactgaataaatagaacgagaaaaaaaaatcagacaaagtttcaaa

SEQ ID NO: 8577 - DNA, 1851 bp, Zea Mays
acggcccatcacccatcacgtatcgctccctccctcggccctcgatcgtacggcgcgagcgttgcgctccacgccttcctcttcctcgtctggcatcgcgaaccgccgcaccccacccacccgcccacaggccacagcccacccccttctccaggtctctccccggcggcggcgggtgcggttctccggccatcaccgtgcgcaccaggaaaaactatgaggaggtacagccccccttatcgcagcccccccaggaggggatatggtggcagaggaagaagcccccctcctcccaggaggggatatggaggacgcaaggagggtagtggaagccttttggtccgcaacatcccattaagtgtcagagcggaggatcttcgagttccttttgaaaggtttggccctgttcgggatgtttacattccaaaggactattactctggagtcttgtccaatgaagttcttctatgaagacaagatttgatactttgagaaaattaatttcatgaagagaagatgagagacatatatactggctggtacatgagaagataaaagagagtcaagtcaatttcaagtacttttgtgactttttcaaatgttggggaacttgaagcgaacgatttttatgaagatactctttatgaggatcaccttacgtagttgtatacaagaaacttggacactagagcctgggcatcttactgctttttgcaacacttgcttctcttctgatggaatgtttgtaagttgttgactgtgcttcgctgagaaccatagagggcacagtgaatatttgaatttgatggtaaaacgccaacaagacaccattgtgaacactttgcatcttcatttgtttgtcacttccttgaatttttcctctccgtactgtctaatgaaactaacatatgcagggagcctcgaggatttgcctttgtagagtttgttgatccttacgatgcctctgaagcccagtatcacatgaatcgccaagttttctttggtcgggaaatagctgttgttcttgctgctgagtcacgaaaaaggccagaagaaatgcgcagcagaactagagtaagaggttactctggtcatgaaggtcgccggtcttcttactatggtcggtctcgttctcgctctcctcgctatcggggccgtcctcggtcgagatcatactctcctgctccaaggcgggggaatgactactctgcctctccaaggagacaggaagcccatcgctcatctcctcccaggcgcctgccaaaggagcatgatgaagataagaagcggaggtcctactctcctgccagtagagatgatgctgacaatgtttatgagaagaggtcgcccccagcagacagcgatggatctcctctgcaccgcaggtcccccaaggagtactcgggctcacctcctggatcccgctccaggtccgccgacgattctcctgttgccagtgactgatcgaccgatggatgctacaatatgaatggtatgcgcatgcggtcatcagtcctatgtctttgtcagaccgagctcactaaacttacccccctttgggggtcgatgttgtattgctaagttccgtttgtgctaagtattagcgcatactgctagactgccactgtcgtctgtgctatgcatgcttttgatctcgagtgatgtttgaggaaccagtgatcgtgttgatggtgctgaacattggaacctgcagtacagtgtagcatgatgcttgcttgctgggccacggcccgttcactgggacctgttgcgtttccgtctttcgagtttgattgatgctgctgcgggtgcttttagccgtcctgtgctactactcccttttcgaattag

SEQ ID NO: 8578 - DNA, 1408 bp, Zea Mays
ctctcttatcaaggcacgggcgcacggcacggcccatcacccatcacgtatcgctccctccctcggccctcgatcgtacggcgcgagcgttgcgctccacgccttcctcttcctcgtctggcatcgcgaaccgccgcaccccacccacccgcccacaggccacagcccacccccttctccaggtctctccccggcggcggcgggtgcggttctccggccatcaccgtgcgcaccaggaaaaactatgaggaggtacagccccccttatcgcagcccccccaggaggggatatggtggcagaggaagaagcccccctcctcccaggaggggatatggaggacgcaaggagggtagtggaagccttttggtccgcaacatcccattaagtgtcagagcggaggatcttcgagttccttttgaaaggtttggccctgttcgggatgtttacattccaaaggactattactctggggagcctcgaggatttgcctttgtagagtttgttgatccttacgatgcctctgaagcccagtatcacatgaatcgccaagttttctttggtcgggaaatagctgttgttcttgctgctgagtcacgaaaaaggccagaagaaatgcgcagcagaactagagtaagaggttactctggtcatgaaggtcgccggtcttcttactatggtcggtctcgttctcgctctcctcgctatcggggccgtcctcggtcgagatcatactctcctgctccaaggcgggggaatgactactctgcctctccaaggagacaggaagcccatcgctcatctcctcccaggcgcctgccaaaggagcatgatgaagataagaagcggaggtcctactctcctgccagtagagatgatgctgacaatgtttatgagaagaggtcgcccccagcagacagcgatggatctcctctgcaccgcaggtcccccaaggagtactcgggctcacctcctggatcccgctccaggtccgccgacgattctcctgttgccagtgactgatcgaccgatggatgctacaatatgaatggtatgcgcatgcggtcatcagtcctatgtctttgtcagaccgagctcactaaacttacccccctttgggggtcgatgttgtattgctaagttccgtttgtgctaagtattagcgcatactgctagactgccactgtcgtctgtgctatgcatgcttttgatctcgagtgatgtttgaggaaccagtgatcgtgttgatggtgctgaacattggaacctgcagtacagtgtagcatgatgcttgcttgctgggccacggcccgttcactgggacctgttgcgtttccgtctttcgagtttgattgatgctgctgcgggtgcttttagccgtcctgtgctactactcccttttcgaattag

SEQ ID NO: 8579 - DNA, 2942 bp, Zea Mays
ccgagacaagccttctcccgcaaatgtggagcctgcttcaaacccgcgacctagtgatttagtgatagtgtgagacaactctcaccactgcactaggttcgtccttctatatttagtctaagcatgttgtgaaaaaatgttacattgtatatacaacatattcatttccatgttatttgtcaaaaaatgatctagtttcaaaagttcaaaccaacaagaaattcaaaatacaggggttttctttataattgacaaatatagggaccatcacattgttggatcttgacattagaaatatacagttactgacagagtctgctggtgcataatacgagcaactgggggggggggggggggggctggtgacaatcaagattcagtagttcagtgcaaccatttccagtttgagtgaaataaagtaataaacttatattccaagtccagtgattgatcaaatgtggcatcaaactatcatgagtgctgcatgtttttaggtctacaactgttgtgtgcaaaaaaaaatgatcttttgcacaaacactaccagtgtagtcaatgaaaataatgatattgctggattattgtagaaataagcagcctagcctataagtttcctagttacctatttctatcattgagagagaaaattccctttttgcaaatgatttcttaagtcctaatcaggttgtccctataaagcacagaattgtatcctggtcttatgaagcaaatatgaatcagcaggagttttcaactgaatttcttcatctccatggcatgcaagttatactctaagcccaatacttccaaaccatcagggtcagtatctctctatggtctttacccacattgcgtacaagcttacatcagaataatgcaatatgatacccagattttcagcagaactcacaaacattttggaaacaatgtctagtagctgatatgggtgacacaaattcggaaaagttgatgttggtgtctcacagttccaatagctatgatgaaacaatgaaatgtacaattttcagcaccagaagagcaaatgaggcaacttagctgaagacataccgaagaactagctgcataattcaaatttgtgctctgttggtcatccgatgatgttttttgattcctagtgttcaaaagatggactacaacggcctgaataagtagatccaaaacttagtttcaacaaaaaactagagatcaagtgagacaattaatctaagtaccttcctgaaatcatgtggatgagcaaccccagtaatttttacatcacaactaggaggctttctgacactaatattctcaatcctgatcgaatatacaccaaaaatggattggagataatctacagaaatcacgtgaacatgtaacaaatacttgaattagtgggaaaagactgttctcactaacaattatgatgaacaaactatttaatgcaaatgagaaaaacaaaacgaggtagggttttctcctgtaaagatggtagatgaagatggactttaagaaaaaaagcataaacatatatatgaaaaaggacagattctgtggtggccaagtttttagtaaaaagaatacttgattagtacagtgtagtttatccccaacccaaatctagatcgtacagtgtagactctaatgccttatatcctcttaatgtttttagaaagttattcgtacacatgaacattaacagtggtggatgactggaaatagactaaaacatcttagttcttatttatagtgacgattatatgtctcacgataaggatatttgagattttttgtttatataagtttttttaatacttccatgttaggattggttactagttccaatttgatacaaaaattttttgggaacttgtcggaatgtgttcctatttattgataggcttttggtttacgcggccaattgcagcgagtggttgtcaaaaaaacttttgtaactaatcgtgtaggggattttggtctgttattaggaattttagtttttttttaactcatgtcattttcactccaaaacacctaaaacaatataagcaataagaccattgattttataaatggtttccggcatcaattcatgcaaaatgtgagttgaaagcgtatgatatttttcatgacccatcactgacacgtttcttcagcatagcatcggtcttaccttgctcaacaacaacatcggaaattgaagggaggatccaatatttctcctttttggaaactccaaaacaaggaaaagcaaaaggcttgtttacctggattaggattagatcatggagcaaaataataaaccaatagcatgagcataaaaccatataccatttaacatgcaaataccttgtaaataacagcatgcggtgtcaagtacagcttcctcgagcgaaagtctcttcgacatacatataccccaataggtaagtaaagtagcatgagcacacctactccccaagctacgattagtaatagagataataaagtccactgagcaatttgatacttgacaaaattatcttccatttctgcaaatgatgcatcatagaggacctcatcctcaaaacttccatcatagtcgtttgaagataaaccagctagtaagtgtctctccagtgcatctacttgtactctttcatctgggagttccatctgcaattcataagcactgctaaataaaaatgtatattaagttgctagccaaatcattttttattaggcccatcagaatctgaggaaatttgaatgtaaaattatgcatcagatgacagatacattaaatgatgcagaagtgcagcagtatgttgctttcttgaaagtttacagtaattacatttttaagaacgacacaattaaaacccatgtatcacattttagtaaataaaagttgtatcaaacacattttgttgcataattgtaatctgcattctgcaaaaatgttt

SEQ ID NO: 8580 - DNA, 707 bp, Zea Mays
ctgcggtattctcctccagagccactttgatggactcattttgcacttgcaaggatggaaggagttgggataaatctgctagattcttctccatggcttccgtctgcttctgactcctcgtcttgtactaaggccgcaacgacccagatctgcgtccaggctgcggcggcgatggcagaggccccaatccgagtctagatcaaggtcacagtggcgattaatgcagaggatgaggtggaggtgaagggcgatgcttccactctcggtattggggtggggatgacggaggagagtggggtgcagtggtggctcatcgacatcagtcgctggcacccttcccccacccaattcgacactacagcctccctcctactaattcacgagggaaccaccatctctaggtaccgtgtcgatagaggataggagaaacaagttgcaaggtattttgaatgtgctaaaaaggtctaggcatgatgagatgagatgggcaagatgatcgtgttggatgaagaggaggagaagaccgggctgccgcagctcgaggggaagcacaacaagttcatctacaacagtaacggcgagatcgaacgagaggaggtggcagatgtggctgagacgagggcggagcttggcgcactgatgctaaggggctgttggggccggaggggcggcacctacgcttccacaatgacgaggatgacgaggaa

SEQ ID NO: 8581 - DNA, 1271 bp, Zea Mays
ctgaataatagctaccttggattgccacaccttcattactgatgacatgacccagatagtgtagttttttctgagcaaaggagcatttggatagcttgatcttgaattggtgctggtccaatacagagaaaacaacatgtatatgttgtatatgatcaacccatgtagcactaaagatcaaaatatggtcaataaagacaaccacacacttgcgaaagaatggtgcaagcactgagttcatagcaagttgagatgtagccggacctccagttactccatatggcatgactcgatgctcataatgtccactatgagtttgaaatgtggttttctggatgtcttttgggtccatttggatttggtgataccctgagctcagatccaaactagtgaaccataccactccttgcaattcatccaataattcatcaattactggaatgggatatttgttcttcactgtaatggcattgaggcaacggtagtcaacacataatctccagtcaactatttcttgcgacctaagataacaggagacgcaaaggggttacaactaggttgtgtcatcccattcttaaggagttcaactatttgtctctcaatttcgtccttttgagctgggttgtaatgatagggatgaagacaaaagggtaccactccagggatgagagttatggtgtggcaatgagatctgggaggaggtaggcgtttgggtgggtcaaataaggaggtcaattcaatagaaggcctttgatctcctgagaaagatgttgtatgttgggcgtttctagaattggttgcacttccatagtacaccataactcatccaaccgtgccatatgatataactgaaaggctgacacttgttccaacttggagcaatcagttcgctgaccttgtagaattaccagctactgctcatggtaaaaacataaccatttctcctgctagtgaacctgcatcgggctgtgggaagatagccagtccatacccaagatgacatcataacactgtagaggtaacaccttgaggttaacacacaagatatggctttgaatgttcatttgacatcgaggaatttgatgagtgcaacatataacttgaccattcaccactttgacaataacagactgagatagagctactaatccaggaccaaaagctgccaagagctagctaataaaagaggatgaactacctgaatccacaagcataaccactattttggagaacatggatgcaattaatgtcaccgtttgtggggcttcaat

SEQ ID NO: 8582 - DNA, 2656 bp, Zea Mays
ccgggaccggctcctcagaaaccggccgcctatctctcccccttccctccgtgttcgtcggccccggccccatattttctctagccttgctcgtgtggctggaagagtggagatcggggaagcgtttgtgttggcactctggacggccgagcccgacatggaccgcgacgaggaggtgggccacggcgaccgctcgctcctattcatcggcgatgaggacgatctcggcgtcgaccgggacggcggatccccgccgacctcctccgacgatggatcattctccgaccggagcgacgccgagacacgcgccggccatgtccggcgtcgcgacggcggcgagcgtgaggacacgcccgaggacggccagaatggcgcgtggccgcagagttacaggcagtcgatcgacatgctgagcgcggtgccgtcgccgacgatgaactcgatcatggcagcgagcccgagcctgaccagattcggcagctccttcctcaaggccgggagctccttcttcctgaggaaaggcgagggctcggggctgccgctcaccaggccgctgctgccgccctcgctcccgcagctgtcgcagtcgtcgttgcacccgcagccgcggcccgtgaagcagtccacggacagcctcgcccaggcgccgcggtggccggctgcgcacgaggcggagctgcccgagagaccctccaggcaatgcctgaaatccgattatatcgagcttcctccgcctgctagcaagtgcagcaggaaccaatcaatcatcaatgggttcaatgtgctgtgcggcgttggaattctcaccacggcttatggaatcaaggaagggggatggctaagcctcctgctgctccccttgctgggtggcagctcgtgctacacgggcttgcttctcaagaggtgcatagacagttcgcccaacattgagacatacccagacattggacaagtcgctttcggaatctttggtcggatctttgtatcggttgtcctgtacatggagctttatgcaagctgcgtggagtacattacgctgctaggagacagcttgtcgtcagtgtttccctcagcgcatttagctttcactggcatcgacctgaacgcgcacaatctctttgcaaccacaatggccttggcaatcctcccatcagtctggctcaggaacctcagtctcctctcatatctttctgctggaggcgtgatcgcgacgatcacggtcatcgtctgcctatgctgggttggcatcggagaaggaattgggtttcgcttttccggtgctgtagtgaacgtgacccaccttccagtggcactcggcctgtatgggtactgctactcaggacactcggtgttcccaaacatctactcgtccatgaaggagcgctcgcagtttccattcgtgctcatgttctgcttcacggtggtaacgcttgtgtacgccggagttgcggtctcagggttcctgatgttcggcgagtccactatgtcacagttcaccctaaacttgccacagcagtacatcccatccaagattgccatttggatgacggttgtgaatccttacacaaagtatgcactgacgatgacgccggtcgccttgtcgatagaggaagccctaccaaagaagatgcagagttacctggtcggaatgctcgttaggacatgcctcgtcctctcaaccgttgcggtggctctgcttttcccttactttgccctggtgatggcactgcttggatccgtgttcacaatgctcgtggccttgatactcccatgcgcatgctacctctccatcaagaagggcgcagtgcccttgtgggagatcatcctgtgcataatcatcatagcgattggcgttgtgtgcgcgtgcatcggctcatttacctcgatcaaccagatgattagcagcagatagtgtctgcgtagctgttgcagattctttctttccaatgttgacagagctgaaactagcagtctgtcgttttttttttgtttttttgtttttgcagctacgtttatttgttccttctttttgacagaaaaaagaaactcggtaagaaagtttttctgtaacagggtgaagttatatttcaggcaatcatgatagtaattcttttgcgtacaattatgaaccacaggatgaagttatactaatttttccgacagctatggacacatatgaaccacaggatggccacacaacaggcacatctccgatctctcaccatgacacttttttttgttttgttttggggttgctgttgttgggaaactagtcagtatatatggcacatgtgatggacatcacgtcctcacctaccagggcgctacagctccagcacacgagcatggtgacgcagcggcgcatgatgtagaacctggccctctgctccttcaccaggcccgccaggcggcccggcaccgacctgcccgcggcggccctggacggccggctcttcagccccgccgccgccgacgccgacgccgacctccggctccccttcttggaaagcggcgtcttgctcttgtcgtccatgtgcatctccatctcttcctgtacgagctctctgcagtggcagttgttcttggaaatggtggaagcttgcaatgtgtggctctctctctctctctctggagtctggttgcggttggcttgttg

SEQ ID NO: 8583 - DNA, 3113 bp, Zea Mays
gcacatagaagatctgcttaaacatctgatacatttcggttcaaggatagcgagggagtcgaaccgcaagaacttcggcagcaacagagccgcgaaccaggcatcagcaggcagcgtgcagattcaccagagtccagcttctccagtggcgtcggccacacgccagccatttcttaccaacaatcagccatgaacacgcttagctgtgacaagtgccgcatggtttggttgatggagcatcattatcagttgttacggttcatcacaaattttcaaacgattcattgtcagctggatggagcatccatcatttgttatgtatactagccctgaatcctgatcatgtaacagcaacttggacgtggttgaaacctaaaagtggccggctgctttgtgtcaggctgatgtggcgcctgcgttgggccggtttagacgagtaggtccaacctggatctgaccccacatgtcagtgactcaactgcaggggatctttctccggtctggacctgaccaaacaatgctggatgtaaagcagtcgtcggtgtcaatattttttaaaaaatcctatatttctttagaatcagctcgtacttctataatctcttatctactactataataaaaatatttatataaaaaataagtatataaaaataagtatttaaacattgatggttggctccatatttatacacttaatcaatagaaaatatatattttgtgttaatgttataccccggagtcgagtggcgagtccaatctcagactagccacgtgtacggcgtgcagtccttgctacgcgcacccctcctaccgcacacgcgaatccagccagcccacccaccgccgccgcctgctcgtccgcctctataagatgagacctgcccaccgccatggcgccatcccctccctcgaatcactcaggcggccagccgggagcgagagcgagctggaggagctcgattcgatgcgttgctgagcgtgggtcaatcgattcgggtcgggcggtggcgcagtccgagagatctgaaccctagcggccgtctgcccgtccggatctgtgaccagccctgctcggtgcttcggcggcatgagtgcctggaaggcgtggggaggagaagcggcggagatatgagcggaggaggcagcggcagcggggacgagttcgggcgggcggtggcacgcgccgcggttgcgcaggcgctggaggccgcggggttcgactgcgcgcaccgctccgcggtggacgcggtcgtcgacgtcctcttgcgctacatcacccacctgggccggtccgccgccttcaacgccaacctcgccggccgcgcgctcgccaacgaactcgacgtcatccaggtgctcgaggaggtcggcgccgacacggacggcttcgcgggcgcggcggacacgggccgctgcctcgttggttccggcgtcgtcagggacctcatggcgttcgtcgactccaaggacgaggtgccgttcgcgcggccgctgcctaggttccccgtccagcgcgtgcagccgcagccctctgccagcccggctgcggcggcggcggggagggagactgggttgaagcacgtgccggagtggctgcctgcgttcccggatccgcacacctatgtgagcacggaggtgtgggatgagccttcggcgaccaaggacagggtggacaaggtggagcaggtgcggcaacggaggaaggccgagaaatccctgctcagcttgcagcgaaggctggctatggcaggcgcggatgggtttcatccagcggttgcattggcggaggatagcgcagagaaggggaaggagatacaggcagctgggacaaagagaaacccgtttcttgagccagcattgccgcctggggagaaggatgtatctgaggttggtatgcctccggaaaagaagaaactatctgtcctcgaggcatttgcgccagctatgcaatctagaaccatcgtcagggatgttgatgctggggcaggattggatgaaaaccaaaggagcattgttcccaaagagagggctccggtgcaccttaagattggatttggaaagaagccgttggcagcagctctgaattcaagaaccctggacctgagagaagatccatccttcttgaaagaggaagcaaaggatgacaagaagcggagagcaggcatgatattaagggcatcaatggagaacccacaagagcttcctcagctctaaagttgtttgcggaggaagtgccgtacccagagtggagttgcatcatggtgtaattgtggaacttcagtttccagaatcttgaggccatgttccctgatacaaccttctcaggatcaccatgccctgatacaacctgcaccggactctcctgcctccacctaccgttttcctaaaacaccatgcgctgatagattctgcagcactgtaactgaagttggaagttccaccatctcactgcgttgaagttggtggttgtgctggtatttcacctttaactgtaaggactaatttgggaacccaatttttccactggattttcattttcctaaggaaaattagttcattttcccttgagaaaataggaatcccttagaaaaatatagtttccaaactagccctaaaattaaaagtgggttgtggttcaaacggagctgatttttgtgaggccatgttcctcatccccagacatggcatccaaaagaaagtttagttcttgtagctgtactccctggtagaatgagagaggtttgtacaaaaggtaacctgattgttcttaccaagacttgtcatagaaaggattgatgtatctagtggctactcaagggacagcttcataatgccgtatgtgttggcacgcgcacgcaccccgccgttgtgtttgggacgaaaacacttcctagaattcctagataactgttgaaggacttttatgaggatttattgattgattcgagttcatgtccttaatgacttgatgtagtgcttcatagttggaggctggggttgtataacagtgtaccatatggttctttcgacttttgcccccatctaacttgagtatttaagattgaacttgtaaagattttattttaaaaggaagcatgttgaaatgtgtc

SEQ ID NO: 8584 - DNA, 5015 bp, Zea Mays
tcacctcgtccttgctgcaaaaacatcatcttttatacagtcattgtgcgcactggcccctttccactggcaagaagaccctgaagtcatcgatgtgcggtattgcccttgtcctcgccagtgaccgccttgtcatcgttccctgtgccactgcaactactgccgcattggagacccagcactcctgcaagaggaagggcgtgccagatgagctgaaggaggccctgcgccggcggggccctgatagcctaggctacagaagtcgctgccttcttgctgatggcacggttgttgttggtgatggttgcaatgatggagtagagggtaaaatcggtgtgagtgactctagtgttgctgatttgttcttcatcggagcaacactgcatcttaggggagctaagctggtttcgcagccgctggtggcccccagtggaagtgtctttctgtataatggtgagatatatggaggaattcaggttgcggatgatgaaaatgacacccaagctcttttcaactctctggaatcttgttgttcatgtgattgccatgctcttggtagagataaaacatgtacttgttgtggtactgggagtggtgccaaatcagttttgcaagttctttccacaatcaaaggtccatgggctttgatatactggcagatgaagtcaaatacgatttggtttggccgggatgcatttgggagaagaagcctcttggtacattggcccacagctgatgattctcacttcatattatcatcagtatcacccccttcatttgcaaagattcactctgatcaaacagtgtcagatcgtgacatgtctaaccatactaaagctagctactgggaagagcttccttgtgggatatacagcatgcatatgaaagacattggaaagcatggtgcatgcatgaaggaagggtggattgtggaagttaacacacataaatggatggcttcttcattgaatggattgatcaaatgggagaggaaactcacagttcctaccatggagaacattcctgttgacagagggaaccatcagttgtctcagagcttcataagctcaagagaacctgaagaaaatacgaataatgggatcacaaaggcagattttctgtcagattctagtttatgtgatgcaaattgcataacacagtcagcacatagagtattggttgcattaagggaatctgtaatgctgcggactaaaatgaacacactctttcagggtactctggatagatctgaggacggagagtcagccccaatagcagtcctcttctccggtggcttagactccatgctacttgcagcactgctagaccagtgcattgattccaaatggataattgatttgttaaatgtcagttttgatgggcaacttgcccctgataggatttctgcaatagctggactgaaggagcttcagaggatatctccgtgccggagatggcgtcttattgagattgacactgctttgacagacttgaacggggaaagtgaacatgtgatgtcactcatacacccttcaaatacctttatggtggaacgcattggatcaggagatgagactagatgtgcagagaatatggaaaaggaatatgggaagagatgataggtgcatctctgatcatggcaaggaggcccgtttcccatttcttgacgagaacgtgataaaaactttgttggaaattccgttatgggaaattgctaagcttgatgaacctgttggaaggggtgacaagaagatcttgagagaggttgcaaggctgctgggcctacaagaagctgctcttcagccaaagcgcgcgatccagttcggttcaaggatagcgagggagtcgaaccgcaagaacttcggcagcaacagagccgcgaaccaggcatcagcaggcagcgtgcagattcaccagagtccagcttctccagtggcgtcggccacacgccagccatttcttaccaacaatcagccatgaacacgcttagctgtgacaagtgccgcatggtttggttgatggagcatcattatcagttgttacggttcatcacaaattttcaaacgattcattgtcagctggatggagcatccatcatttgttatgtatactagccctgaatcctgatcatgtaacagcaacttggacgtggttgaaacctaaaagtggccggctgctttgtgtcaggctgatgtggcgcctgcgttgggccggtttagacgagtaggtccaacctggatctgaccccacatgtcagtgactcaactgcaggggatctttctccggtctggacctgaccaaacaatgctggatgtaaagcagtcgtcggtgtcaatattttttaaaaaatcctatatttctttagaatcagctcgtacttctataatctcttatctactactataataaaaatatttatataaaaaataagtatataaaaataagtatttaaacattgatggttggctccatatttatacacttaatcaatagaaaatatatattttgtgttaatgttataccccggagtcgagtggcgagtccaatctcagactagccacgtgtacggcgtgcagtccttgctacgcgcacccctcctaccgcacacgcgaatccagccagcccacccaccgccgccgcctgctcgtccgcctctataagatgagacctgcccaccgccatggcgccatcccctccgtctctgacccgcctacccatccccaccatttgccgcccaatccgccccgccgcgctccgccttgcctcgactcgaattcttaccaaccgtttgtggcttgaatttgaattccagctcgaatcactcaggcggccagccgggagcgagagcgagctggaggagctcgattcgatgcgttgctgagcgtgggtcaatcgattcgggtcgggcggtggcgcagtccgagagatctgaaccctagcggccgtctgcccgtccggatctgtgaccagccctgctcggtgcttcggcggcatgagtgcctggaaggcgtggggaggagaagcggcggagatatgagcggaggaggcagcggcagcggggacgagttcgggcgggcggtggcacgcgccgcggttgcgcaggcgctggaggccgcggggttcgactgcgcgcaccgctccgcggtggacgcggtcgtcgacgtcctcttgcgctacatcacccacctgggccggtccgccgccttcaacgccaacctcgccggccgcgcgctcgccaacgaactcgacgtcatccaggtgctcgaggaggtcggcgccgacacggacggcttcgcgggcgcggcggacacgggccgctgcctcgttggttccggcgtcgtcagggacctcatggcgttcgtcgactccaaggacgaggtgccgttcgcgcggccgctgcctaggttccccgtccagcgcgtgcagccgcagccctctgccagcccggctgcggcggcggcggggagggagactgggttgaagcacgtgccggagtggctgcctgcgttcccggatccgcacacctatgtgagcacggaggtgtgggatgagccttcggcgaccaaggacagggtggacaaggtggagcaggtgcggcaacggaggaaggccgagaaatccctgctcagcttgcagcgaaggctggctatggcaggcgcggatgggtttcatccagcggttgcattggcggaggatagcgcagagaaggggaaggagatacaggcagctgggacaaagagaaacccgtttcttgagccagcattgccgcctggggagaaggatgtatctgaggttggtatgcctccggaaaagaagaaactatctgtcctcgaggcatttgcgccagctatgcaatctagaaccatcgtcagggatgttgatgctggggcaggattggatgaaaaccaaaggagcattgttcccaaagagagggctccggtgcaccttaagattggatttggaaagaagccgttggcagcagctctgaattcaagaaccctggacctgagagaagatccatccttcttgaaagaggaagcaaaggatgacaagaagcggagagcaggcatgatattaagggcatcaatggagaacccacaagagcttcctcagctctaaagttgtttgcggaggaagtgccgtacccagagtggagttgcatcatggtgtaattgtggaacttcagtttccagaatcttgaggccatgttccctgatacaaccttctcaggatcaccatgccctgatacaacctgcaccggactctcctgcctccacctaccgttttcctaaaacaccatgcgctgatagattctgcagcactgtaactgaagttggaagttccaccatctcactgcgttgaagttggtggttgtgctggtatttcacctttaactgtaaggactaatttgggaacccaatttttccactggattttcattttcctaaggaaaattagttcattttcccttgagaaaataggaatcccttagaaaaatatagtttccaaactagccctaaaattaaaagtgggttgtggttcaaacggagctgatttttgtgaggccatgttcctcatccccagacatggcatccaaaagaaagtttagttcttgtagctgtactccctggtagaatgagagaggtttgtacaaaaggtaacctgattgttcttaccaagacttgtcatagaaaggattgatgtatctagtggctactcaagggacagcttcataatgccgtatgtgttggcacgcgcacgcaccccgccgttgtgtttgggacgaaaacacttcctagaattcctagataactgttgaaggacttttatgaggatttattgattgattcgagttcatgtccttaatgacttgatgtagtgcttcatagttggaggctggggttgtataacagtgtaccatatggttctttcgacttttgcccccatctaacttgagtatttaagattgaacttgtaaagattttattttaaaaggaagcatgttgaaatgtgtc

SEQ ID NO: 8585 - DNA, 5164 bp, Zea Mays
aagcgctcacctcgtccttgctgcaaaaacatcatcttttatacagtcattgtgcgcactggcccctttccactggcaagaagaccctgaagtcatcgatgtgcggtattgcccttgtcctcgccagtgaccgccttgtcatcgttccctgtgccactgcaactactgccgcattggagacccagcactcctgcaagaggaagggcgtgccagatgagctgaaggaggccctgcgccggcggggccctgatagcctaggctacagaagtcgctgccttcttgctgatggcacggttgttgttggtgatggttgcaatgatggagtagagggtaaaatcggtgtgagtgactctagtgttgctgatttgttcttcatcggagcaacactgcatcttaggggagctaagctggtttcgcagccgctggtggcccccagtggaagtgtctttctgtataatggtgagatatatggaggaattcaggttgcggatgatgaaaatgacacccaagctcttttcaactctctggaatcttgttgttcatgtgattgccatgctcttggtagagataaaacatgtacttgttgtggtactgggagtggtgccaaatcagttttgcaagttctttccacaatcaaaggtccatgggctttgatatactggcaggcagatgaagtcaaatacgatttggtttggccgggatgcatttgggagaagaagcctcttggtacattggcccacagctgatgattctcacttcatattatcatcagtatcacccccttcatttgcaaagattcactctgatcaaacagtgtcagatcgtgacatgtctaaccatactaaagctagctactgggaagagcttccttgtgggatatacagcatgcatatgaaagacattggaaagcatggtgcatgcatgaaggaagggtggattgtggaagttaacacacataaatggatggcttcttcattgaatggattgatcaaatgggagaggaaactcacagttcctaccatggagaacattcctgttgacagagggaaccatcagttgtctcagagcttcataagctcaagagaacctgaagaaaatacgaataatgggatcacaaaggcagattttctgtcagattctagtttatgtgatgcaaattgcataacacagtcagcacatagagtattggttgcattaagggaatctgtaatgctgcggactaaaatgaacacactctttcagggtactctggatagatctgaggacggagagtcagccccaatagcagtcctcttctccggtggcttagactccatgctacttgcagcactgctagaccagtgcattgattccaaatgatttctgcaatagctggactgaaggagcttcagaggatatctccgtgccggagatggcgtcttattgagattgacactgctttgacagacttgaacggggaaagtgaacatgtgatgtcactcatacacccttcaaatacctttatggatttgaacattggtattgcactctggttggctgctggtggtgatggttgggtggatggaagtatatgtcgtatgcaagatggttctcgctataagtacaggtcgagatctagagtccttatagtgggttctggggctgatgagcagtgtgctggttatggtagacatcggactaaatataggcttggagggtggaacgcattggatcaggagatgagactagatgtgcagagaatatggaaaaggaatatgggaagagatgataggtgcatctctgatcatggcaaggaggcccgtttcccatttcttgacgagaacgtgataaaaactttgttggaaattccgttatgggaaattgctaagcttgatgaacctgttggaaggggtgacaagaagatcttgagagaggttgcaaggctgctgggcctacaagaagctgctcttcagccaaagcgcgcgatccagttcggttcaaggatagcgagggagtcgaaccgcaagaacttcggcagcaacagagccgcgaaccaggcatcagcaggcagcgtgcagattcaccagagtccagcttctccagtggcgtcggccacacgccagccatttcttaccaacaatcagccatgaacacgcttagctgtgacaagtgccgcatggtttggttgatggagcatcattatcagttgttacggttcatcacaaattttcaaacgattcattgtcagctggatggagcatccatcatttgttatgtatactagccctgaatcctgatcatgtaacagcaacttggacgtggttgaaacctaaaagtggccggctgctttgtgtcaggctgatgtggcgcctgcgttgggccggtttagacgagtaggtccaacctggatctgaccccacatgtcagtgactcaactgcaggggatctttctccggtctggacctgaccaaacaatgctggatgtaaagcagtcgtcggtgtcaatattttttaaaaaatcctatatttctttagaatcagctcgtacttctataatctcttatctactactataataaaaatatttatataaaaaataagtatataaaaataagtatttaaacattgatggttggctccatatttatacacttaatcaatagaaaatatatattttgtgttaatgttataccccggagtcgagtggcgagtccaatctcagactagccacgtgtacggcgtgcagtccttgctacgcgcacccctcctaccgcacacgcgaatccagccagcccacccaccgccgccgcctgctcgtccgcctctataagatgagacctgcccaccgccatggcgccatcccctccgtctctgacccgcctacccatccccaccatttgccgcccaatccgccccgccgcgctccgccttgcctcgactcgaattcttaccaaccgtttgtggcttgaatttgaattccagctcgaatcactcaggcggccagccgggagcgagagcgagctggaggagctcgattcgatgcgttgctgagcgtgggtcaatcgattcgggtcgggcggtggcgcagtccgagagatctgaaccctagcggccgtctgcccgtccggatctgtgaccagccctgctcggtgcttcggcggcatgagtgcctggaaggcgtggggaggagaagcggcggagatatgagcggaggaggcagcggcagcggggacgagttcgggcgggcggtggcacgcgccgcggttgcgcaggcgctggaggccgcggggttcgactgcgcgcaccgctccgcggtggacgcggtcgtcgacgtcctcttgcgctacatcacccacctgggccggtccgccgccttcaacgccaacctcgccggccgcgcgctcgccaacgaactcgacgtcatccaggtgctcgaggaggtcggcgccgacacggacggcttcgcgggcgcggcggacacgggccgctgcctcgttggttccggcgtcgtcagggacctcatggcgttcgtcgactccaaggacgaggtgccgttcgcgcggccgctgcctaggttccccgtccagcgcgtgcagccgcagccctctgccagcccggctgcggcggcggcggggagggagactgggttgaagcacgtgccggagtggctgcctgcgttcccggatccgcacacctatgtgagcacggaggtgtgggatgagccttcggcgaccaaggacagggtggacaaggtggagcaggtgcggcaacggaggaaggccgagaaatccctgctcagcttgcagcgaaggctggctatggcaggcgcggatgggtttcatccagcggttgcattggcggaggatagcgcagagaaggggaaggagatacaggcagctgggacaaagagaaacccgtttcttgagccagcattgccgcctggggagaaggatgtatctgaggttggtatgcctccggaaaagaagaaactatctgtcctcgaggcatttgcgccagctatgcaatctagaaccatcgtcagggatgttgatgctggggcaggattggatgaaaaccaaaggagcattgttcccaaagagagggctccggtgcaccttaagattggatttggaaagaagccgttggcagcagctctgaattcaagaaccctggacctgagagaagatccatccttcttgaaagaggaagcaaaggatgacaagaagcggagagcaggcatgatattaagggcatcaatggagaacccacaagagcttcctcagctctaaagttgtttgcggaggaagtgccgtacccagagtggagttgcatcatggtgtaattgtggaacttcagtttccagaatcttgaggccatgttccctgatacaaccttctcaggatcaccatgccctgatacaacctgcaccggactctcctgcctccacctaccgttttcctaaaacaccatgcgctgatagattctgcagcactgtaactgaagttggaagttccaccatctcactgcgttgaagttggtggttgtgctggtatttcacctttaactgtaaggactaatttgggaacccaatttttccactggattttcattttcctaaggaaaattagttcattttcccttgagaaaataggaatcccttagaaaaatatagtttccaaactagccctaaaattaaaagtgggttgtggttcaaacggagctgatttttgtgaggccatgttcctcatccccagacatggcatccaaaagaaagtttagttcttgtagctgtactccctggtagaatgagagaggtttgtacaaaaggtaacctgattgttcttaccaagacttgtcatagaaaggattgatgtatctagtggctactcaagggacagcttcataatgccgtatgtgttggcacgcgcacgcaccccgccgttgtgtttgggacgaaaacacttcctagaattcctagataactgttgaaggacttttatgaggatttattgattgattcgagttcatgtccttaatgacttgatgtagtgcttcatagttggaggctggggttgtataacagtgtaccatatggttctttcgacttttgcccccatctaacttgagtatttaagattgaacttgtaaagattttattttaaaaggaagcatgttgaaatgtgtc

SEQ ID NO: 8586 - DNA, 5260 bp, Zea Mays
gcacactcagaccagaccgccgccgccgcgccggtgatcgagtctcgtcggcgctaccttcacgccacaagacaataagcatcgacagccaggttcggctccaccaaacgtccttgctgcaaaaacatcatcttttatacagtcattgtgcgcactggcccctttccactggcaagaagaccctgaagtcatcgatgtgcggtattgcccttgtcctcgccagtgaccgccttgtcatcgttccctgtgccactgcaactactgccgcattggagacccagcactcctgcaagaggaagggcgtgccagatgagctgaaggaggccctgcgccggcggggccctgatagcctaggctacagaagtcgctgccttcttgctgatggcacggttgttgttggtgatggttgcaatgatggagtagagggtaaaatcggtgtgagtgactctagtgttgctgatttgttcttcatcggagcaacactgcatcttaggggagctaagctggtttcgcagccgctggtggcccccagtggaagtgtctttctgtataatggtgagatatatggaggaattcaggttgcggatgatgaaaatgacacccaagctcttttcaactctctggaatcttgttgttcatgtgattgccatgctcttggtagagataaaacatgtacttgttgtggtactgggagtggtgccaaatcagttttgcaagttctttccacaatcaaaggtccatgggctttgatatactggcaggcagatgaagtcaaatacgatttggtttggccgggatgcatttgggagaagaagcctcttggtacattggcccacagctgatgattctcacttcatattatcatcagtatcacccccttcatttgcaaagattcactctgatcaaacagtgtcagatcgtgacatgtctaaccatactaaagctagctactgggaagagcttccttgtgggatatacagcatgcatatgaaagacattggaaagcatggtgcatgcatgaaggaagggtggattgtggaagttaacacacataaatggatggcttcttcattgaatggattgatcaaatgggagaggaaactcacagttcctaccatggagaacattcctgttgacagagggaaccatcagttgtctcagagcttcataagctcaagagaacctgaagaaaatacgaataatgggatcacaaaggcagattttctgtcagattctagtttatgtgatgcaaattgcataacacagtcagcacatagagtattggttgcattaagggaatctgtaatgctgcggactaaaatgaacacactctttcagggtactctggatagatctgaggacggagagtcagccccaatagcagtcctcttctccggtggcttagactccatgctacttgcagcactgctagaccagtgcattgattccaaatgatttctgcaatagctggactgaaggagcttcagaggatatctccgtgccggagatggcgtcttattgagattgacactgctttgacagacttgaacggggaaagtgaacatgtgatgtcactcatacacccttcaaatacctttatggatttgaacattggtattgcactctggttggctgctggtggtgatggttgggtggatggaagtatatgtcgtatgcaagatggttctcgctataagtacaggtcgagatctagagtccttatagtgggttctggggctgatgagcagtgtgctggttatggtagacatcggactaaatataggcttggagggtggaacgcattggatcaggagatgagactagatgtgcagagaatatggaaaaggaatatgggaagagatgataggtgcatctctgatcatggcaaggaggcccgtttcccatttcttgacgagaacgtgataaaaactttgttggaaattccgttatgggaaattgctaagcttgatgaacctgttggaaggggtgacaagaagatcttgagagaggttgcaaggctgctgggcctacaagaagctgctcttcagccaaagcgcgcgatccagttcggttcaaggatagcgagggagtcgaaccgcaagaacttcggcagcaacagagccgcgaaccaggcatcagcaggcagcgtgcagattcaccagagtccagcttctccagtggcgtcggccacacgccagccatttcttaccaacaatcagccatgaacacgcttagctgtgacaagtgccgcatggtttggttgatggagcatcattatcagttgttacggttcatcacaaattttcaaacgattcattgtcagctggatggagcatccatcatttgttatgtatactagccctgaatcctgatcatgtaacagcaacttggacgtggttgaaacctaaaagtggccggctgctttgtgtcaggctgatgtggcgcctgcgttgggccggtttagacgagtaggtccaacctggatctgaccccacatgtcagtgactcaactgcaggggatctttctccggtctggacctgaccaaacaatgctggatgtaaagcagtcgtcggtgtcaatattttttaaaaaatcctatatttctttagaatcagctcgtacttctataatctcttatctactactataataaaaatatttatataaaaaataagtatataaaaataagtatttaaacattgatggttggctccatatttatacacttaatcaatagaaaatatatattttgtgttaatgttataccccggagtcgagtggcgagtccaatctcagactagccacgtgtacggcgtgcagtccttgctacgcgcacccctcctaccgcacacgcgaatccagccagcccacccaccgccgccgcctgctcgtccgcctctataagatgagacctgcccaccgccatggcgccatcccctccgtctctgacccgcctacccatccccaccatttgccgcccaatccgccccgccgcgctccgccttgcctcgactcgaattcttaccaaccgtttgtggcttgaatttgaattccagctcgaatcactcaggcggccagccgggagcgagagcgagctggaggagctcgattcgatgcgttgctgagcgtgggtcaatcgattcgggtcgggcggtggcgcagtccgagagatctgaaccctagcggccgtctgcccgtccggatctgtgaccagccctgctcggtgcttcggcggcatgagtgcctggaaggcgtggggaggagaagcggcggagatatgagcggaggaggcagcggcagcggggacgagttcgggcgggcggtggcacgcgccgcggttgcgcaggcgctggaggccgcggggttcgactgcgcgcaccgctccgcggtggacgcggtcgtcgacgtcctcttgcgctacatcacccacctgggccggtccgccgccttcaacgccaacctcgccggccgcgcgctcgccaacgaactcgacgtcatccaggtgctcgaggaggtcggcgccgacacggacggcttcgcgggcgcggcggacacgggccgctgcctcgttggttccggcgtcgtcagggacctcatggcgttcgtcgactccaaggacgaggtgccgttcgcgcggccgctgcctaggttccccgtccagcgcgtgcagccgcagccctctgccagcccggctgcggcggcggcggggagggagactgggttgaagcacgtgccggagtggctgcctgcgttcccggatccgcacacctatgtgagcacggaggtgtgggatgagccttcggcgaccaaggacagggtggacaaggtggagcaggtgcggcaacggaggaaggccgagaaatccctgctcagcttgcagcgaaggctggctatggcaggcgcggatgggtttcatccagcggttgcattggcggaggatagcgcagagaaggggaaggagatacaggcagctgggacaaagagaaacccgtttcttgagccagcattgccgcctggggagaaggatgtatctgaggttggtatgcctccggaaaagaagaaactatctgtcctcgaggcatttgcgccagctatgcaatctagaaccatcgtcagggatgttgatgctggggcaggattggatgaaaaccaaaggagcattgttcccaaagagagggctccggtgcaccttaagattggatttggaaagaagccgttggcagcagctctgaattcaagaaccctggacctgagagaagatccatccttcttgaaagaggaagcaaaggatgacaagaagcggagagcaggcatgatattaagggcatcaatggagaacccacaagagcttcctcagctctaaagttgtttgcggaggaagtgccgtacccagagtggagttgcatcatggtgtaattgtggaacttcagtttccagaatcttgaggccatgttccctgatacaaccttctcaggatcaccatgccctgatacaacctgcaccggactctcctgcctccacctaccgttttcctaaaacaccatgcgctgatagattctgcagcactgtaactgaagttggaagttccaccatctcactgcgttgaagttggtggttgtgctggtatttcacctttaactgtaaggactaatttgggaacccaatttttccactggattttcattttcctaaggaaaattagttcattttcccttgagaaaataggaatcccttagaaaaatatagtttccaaactagccctaaaattaaaagtgggttgtggttcaaacggagctgatttttgtgaggccatgttcctcatccccagacatggcatccaaaagaaagtttagttcttgtagctgtactccctggtagaatgagagaggtttgtacaaaaggtaacctgattgttcttaccaagacttgtcatagaaaggattgatgtatctagtggctactcaagggacagcttcataatgccgtatgtgttggcacgcgcacgcaccccgccgttgtgtttgggacgaaaacacttcctagaattcctagataactgttgaaggacttttatgaggatttattgattgattcgagttcatgtccttaatgacttgatgtagtgcttcatagttggaggctggggttgtataacagtgtaccatatggttctttcgacttttgcccccatctaacttgagtatttaagattgaacttgtaaagattttattttaaaaggaagcatgttgaaatgtgtc

SEQ ID NO: 8587 - DNA, 5110 bp, Zea Mays
gcacactcagaccagaccgccgccgccgcgccggtgatcgagtctcgtcggcgctaccttcacgccacaagacaataagcatcgacagccaggttcggctccaccaaacgtccttgctgcaaaaacatcatcttttatacagtcattgtgcgcactggcccctttccactggcaagaagaccctgaagtcatcgatgtgcggtattgcccttgtcctcgccagtgaccgccttgtcatcgttccctgtgccactgcaactactgccgcattggagacccagcactcctgcaagaggaagggcgtgccagatgagctgaaggaggccctgcgccggcggggccctgatagcctaggctacagaagtcgctgccttcttgctgatggcacgttggtgatggttgcaatgatggagtagagggtaaaatcggtgtgagtgactctagtgttgctgatttgttcttcatcggagcaacactgcatcttaggggagctaagctggtttcgcagccgctggtggcccccagtggaagtgtctttctgtataatggtgagatatatggaggaattcaggttgcggatgatgaaaatgacacccaagctcttttcaactctctggaatcttgttgttcatgtgattgccatgctcttggtagagataaaacatgtacttgttgtggtactgggagtggtgccaaatcagttttgcaagttctttccacaatcaaaggtccatgggctttgatatactggcagatgaagtcaaatacgatttggtttggccgggatgcatttgggagaagaagcctcttggtacattggcccacagctgatgattctcacttcatattatcatcagtatcacccccttcatttgcaaagattcactctgatcaaacagtgtcagatcgtgacatgtctaaccatactaaagctagctactgggaagagcttccttgtgggatatacagcatgcatatgaaagacattggaaagcatggtgcatgcatgaaggaagggtggattgtggaagttaacacacataaatggatggcttcttcattgaatggattgatcaaatgggagaggaaactcacagttcctaccatggagaacattcctgttgacagagggaaccatcagttgtctcagagcttcataagctcaagagaacctgaagaaaatacgaataatgggatcacaaaggcagattttctgtcagattctagtttatgtgatgcaaattgcataacacagtcagcacatagagtattggttgcattaagggaatctgtaatgctgcggactaaaatgaacacactctttcagggtactctggatagatctgaggacggagagtcagccccaatagcagtcctcttctccggtggcttagactccatgctacttgcagcactgctagaccagtgcattgattccaaatggataattgatttgttaaatgtcagttttgatgggcaacttgcccctgataggatttctgcaatagctggactgaaggagcttcagaggatatctccgtgccggagatggcgtcttattgagattgacactgctttgacagacttgaacggggaaagtgaacatgtgatgtcactcatacacccttcaaatacctttatggtggaacgcattggatcaggagatgagactagatgtgcagagaatatggaaaaggaatatgggaagagatgataggtgcatctctgatcatggcaaggaggcccgtttcccatttcttgacgagaacgtgataaaaactttgttggaaattccgttatgggaaattgctaagcttgatgaacctgttggaaggggtgacaagaagatcttgagagaggttgcaaggctgctgggcctacaagaagctgctcttcagccaaagcgcgcgatccagttcggttcaaggatagcgagggagtcgaaccgcaagaacttcggcagcaacagagccgcgaaccaggcatcagcaggcagcgtgcagattcaccagagtccagcttctccagtggcgtcggccacacgccagccatttcttaccaacaatcagccatgaacacgcttagctgtgacaagtgccgcatggtttggttgatggagcatcattatcagttgttacggttcatcacaaattttcaaacgattcattgtcagctggatggagcatccatcatttgttatgtatactagccctgaatcctgatcatgtaacagcaacttggacgtggttgaaacctaaaagtggccggctgctttgtgtcaggctgatgtggcgcctgcgttgggccggtttagacgagtaggtccaacctggatctgaccccacatgtcagtgactcaactgcaggggatctttctccggtctggacctgaccaaacaatgctggatgtaaagcagtcgtcggtgtcaatattttttaaaaaatcctatatttctttagaatcagctcgtacttctataatctcttatctactactataataaaaatatttatataaaaaataagtatataaaaataagtatttaaacattgatggttggctccatatttatacacttaatcaatagaaaatatatattttgtgttaatgttataccccggagtcgagtggcgagtccaatctcagactagccacgtgtacggcgtgcagtccttgctacgcgcacccctcctaccgcacacgcgaatccagccagcccacccaccgccgccgcctgctcgtccgcctctataagatgagacctgcccaccgccatggcgccatcccctccgtctctgacccgcctacccatccccaccatttgccgcccaatccgccccgccgcgctccgccttgcctcgactcgaattcttaccaaccgtttgtggcttgaatttgaattccagctcgaatcactcaggcggccagccgggagcgagagcgagctggaggagctcgattcgatgcgttgctgagcgtgggtcaatcgattcgggtcgggcggtggcgcagtccgagagatctgaaccctagcggccgtctgcccgtccggatctgtgaccagccctgctcggtgcttcggcggcatgagtgcctggaaggcgtggggaggagaagcggcggagatatgagcggaggaggcagcggcagcggggacgagttcgggcgggcggtggcacgcgccgcggttgcgcaggcgctggaggccgcggggttcgactgcgcgcaccgctccgcggtggacgcggtcgtcgacgtcctcttgcgctacatcacccacctgggccggtccgccgccttcaacgccaacctcgccggccgcgcgctcgccaacgaactcgacgtcatccaggtgctcgaggaggtcggcgccgacacggacggcttcgcgggcgcggcggacacgggccgctgcctcgttggttccggcgtcgtcagggacctcatggcgttcgtcgactccaaggacgaggtgccgttcgcgcggccgctgcctaggttccccgtccagcgcgtgcagccgcagccctctgccagcccggctgcggcggcggcggggagggagactgggttgaagcacgtgccggagtggctgcctgcgttcccggatccgcacacctatgtgagcacggaggtgtgggatgagccttcggcgaccaaggacagggtggacaaggtggagcaggtgcggcaacggaggaaggccgagaaatccctgctcagcttgcagcgaaggctggctatggcaggcgcggatgggtttcatccagcggttgcattggcggaggatagcgcagagaaggggaaggagatacaggcagctgggacaaagagaaacccgtttcttgagccagcattgccgcctggggagaaggatgtatctgaggttggtatgcctccggaaaagaagaaactatctgtcctcgaggcatttgcgccagctatgcaatctagaaccatcgtcagggatgttgatgctggggcaggattggatgaaaaccaaaggagcattgttcccaaagagagggctccggtgcaccttaagattggatttggaaagaagccgttggcagcagctctgaattcaagaaccctggacctgagagaagatccatccttcttgaaagaggaagcaaaggatgacaagaagcggagagcaggcatgatattaagggcatcaatggagaacccacaagagcttcctcagctctaaagttgtttgcggaggaagtgccgtacccagagtggagttgcatcatggtgtaattgtggaacttcagtttccagaatcttgaggccatgttccctgatacaaccttctcaggatcaccatgccctgatacaacctgcaccggactctcctgcctccacctaccgttttcctaaaacaccatgcgctgatagattctgcagcactgtaactgaagttggaagttccaccatctcactgcgttgaagttggtggttgtgctggtatttcacctttaactgtaaggactaatttgggaacccaatttttccactggattttcattttcctaaggaaaattagttcattttcccttgagaaaataggaatcccttagaaaaatatagtttccaaactagccctaaaattaaaagtgggttgtggttcaaacggagctgatttttgtgaggccatgttcctcatccccagacatggcatccaaaagaaagtttagttcttgtagctgtactccctggtagaatgagagaggtttgtacaaaaggtaacctgattgttcttaccaagacttgtcatagaaaggattgatgtatctagtggctactcaagggacagcttcataatgccgtatgtgttggcacgcgcacgcaccccgccgttgtgtttgggacgaaaacacttcctagaattcctagataactgttgaaggacttttatgaggatttattgattgattcgagttcatgtccttaatgacttgatgtagtgcttcatagttggaggctggggttgtataacagtgtaccatatggttctttcgacttttgcccccatctaacttgagtatttaagattgaacttgtaaagattttattttaaaaggaagcatgttgaaatgtgtc

SEQ ID NO: 8588 - DNA, 5291 bp, Zea Mays
caagagtcgcacactcagaccagaccgccgccgccgcgccggtgatcgagtctcgtcggcgctaccttcacgccacaagacaataagcatcgacagccaggttcggctccaccaaacgtccttgctgcaaaaacatcatcttttatacagtcattgtgcgcactggcccctttccactggcaagaagaccctgaagtcatcgatgtgcggtattgcccttgtcctcgccagtgaccgccttgtcatcgttccctgtgccactgcaactactgccgcattggagacccagcactcctgcaagaggaagggcgtgccagatgagctgaaggaggccctgcgccggcggggccctgatagcctaggctacagaagtcgctgccttcttgctgatggcacggttgttgttggtgatggttgcaatgatggagtagagggtaaaatcggtgtgagtgactctagtgttgctgatttgttcttcatcggagcaacactgcatcttaggggagctaagctggtttcgcagccgctggtggcccccagtggaagtgtctttctgtataatggtgagatatatggaggaattcaggttgcggatgatgaaaatgacacccaagctcttttcaactctctggaatcttgttgttcatgtgattgccatgctcttggtagagataaaacatgtacttgttgtggtactgggagtggtgccaaatcagttttgcaagttctttccacaatcaaaggtccatgggctttgatatactggcagatgaagtcaaatacgatttggtttggccgggatgcatttgggagaagaagcctcttggtacattggcccacagctgatgattctcacttcatattatcatcagtatcacccccttcatttgcaaagattcactctgatcaaacagtgtcagatcgtgacatgtctaaccatactaaagctagctactgggaagagcttccttgtgggatatacagcatgcatatgaaagacattggaaagcatggtgcatgcatgaaggaagggtggattgtggaagttaacacacataaatggatggcttcttcattgaatggattgatcaaatgggagaggaaactcacagttcctaccatggagaacattcctgttgacagagggaaccatcagttgtctcagagcttcataagctcaagagaacctgaagaaaatacgaataatgggatcacaaaggcagattttctgtcagattctagtttatgtgatgcaaattgcataacacagtcagcacatagagtattggttgcattaagggaatctgtaatgctgcggactaaaatgaacacactctttcagggtactctggatagatctgaggacggagagtcagccccaatagcagtcctcttctccggtggcttagactccatgctacttgcagcactgctagaccagtgcattgattccaaatttttgatgggcaacttgcccctgataggatttctgcaatagctggactgaaggagcttcagaggatatctccgtgccggagatggcgtcttattgagattgacactgctttgacagacttgaacggggaaagtgaacatgtgatgtcactcatacacccttcaaatacctttatggatttgaacattggtattgcactctggttggctgctggtggtgatggttgggtggatggaagtatatgtcgtatgcaagatggttctcgctataagtacaggtcgagatctagagtccttatagtgggttctggggctgatgagcagtgtgctggttatggtagacatcggactaaatataggcttggagggtggaacgcattggatcaggagatgagactagatgtgcagagaatatggaaaaggaatatgggaagagatgataggtgcatctctgatcatggcaaggaggcccgtttcccatttcttgacgagaacgtgataaaaactttgttggaaattccgttatgggaaattgctaagcttgatgaacctgttggaaggggtgacaagaagatcttgagagaggttgcaaggctgctgggcctacaagaagctgctcttcagccaaagcgcgcgatccagttcggttcaaggatagcgagggagtcgaaccgcaagaacttcggcagcaacagagccgcgaaccaggcatcagcaggcagcgtgcagattcaccagagtccagcttctccagtggcgtcggccacacgccagccatttcttaccaacaatcagccatgaacacgcttagctgtgacaagtgccgcatggtttggttgatggagcatcattatcagttgttacggttcatcacaaattttcaaacgattcattgtcagctggatggagcatccatcatttgttatgtatactagccctgaatcctgatcatgtaacagcaacttggacgtggttgaaacctaaaagtggccggctgctttgtgtcaggctgatgtggcgcctgcgttgggccggtttagacgagtaggtccaacctggatctgaccccacatgtcagtgactcaactgcaggggatctttctccggtctggacctgaccaaacaatgctggatgtaaagcagtcgtcggtgtcaatattttttaaaaaatcctatatttctttagaatcagctcgtacttctataatctcttatctactactataataaaaatatttatataaaaaataagtatataaaaataagtatttaaacattgatggttggctccatatttatacacttaatcaatagaaaatatatattttgtgttaatgttataccccggagtcgagtggcgagtccaatctcagactagccacgtgtacggcgtgcagtccttgctacgcgcacccctcctaccgcacacgcgaatccagccagcccacccaccgccgccgcctgctcgtccgcctctataagatgagacctgcccaccgccatggcgccatcccctccgtctctgacccgcctacccatccccaccatttgccgcccaatccgccccgccgcgctccgccttgcctcgactcgaattcttaccaaccgtttgtggcttgaatttgaattccagctcgaatcactcaggcggccagccgggagcgagagcgagctggaggagctcgattcgatgcgttgctgagcgtgggtcaatcgattcgggtcgggcggtggcgcagtccgagagatctgaaccctagcggccgtctgcccgtccggatctgtgaccagccctgctcggtgcttcggcggcatgagtgcctggaaggcgtggggaggagaagcggcggagatatgagcggaggaggcagcggcagcggggacgagttcgggcgggcggtggcacgcgccgcggttgcgcaggcgctggaggccgcggggttcgactgcgcgcaccgctccgcggtggacgcggtcgtcgacgtcctcttgcgctacatcacccacctgggccggtccgccgccttcaacgccaacctcgccggccgcgcgctcgccaacgaactcgacgtcatccaggtgctcgaggaggtcggcgccgacacggacggcttcgcgggcgcggcggacacgggccgctgcctcgttggttccggcgtcgtcagggacctcatggcgttcgtcgactccaaggacgaggtgccgttcgcgcggccgctgcctaggttccccgtccagcgcgtgcagccgcagccctctgccagcccggctgcggcggcggcggggagggagactgggttgaagcacgtgccggagtggctgcctgcgttcccggatccgcacacctatgtgagcacggaggtgtgggatgagccttcggcgaccaaggacagggtggacaaggtggagcaggtgcggcaacggaggaaggccgagaaatccctgctcagcttgcagcgaaggctggctatggcaggcgcggatgggtttcatccagcggttgcattggcggaggatagcgcagagaaggggaaggagatacaggcagctgggacaaagagaaacccgtttcttgagccagcattgccgcctggggagaaggatgtatctgaggttggtatgcctccggaaaagaagaaactatctgtcctcgaggcatttgcgccagctatgcaatctagaaccatcgtcagggatgttgatgctggggcaggattggatgaaaaccaaaggagcattgttcccaaagagagggctccggtgcaccttaagattggatttggaaagaagccgttggcagcagctctgaattcaagaaccctggacctgagagaagatccatccttcttgaaagaggaagcaaaggatgacaagaagcggagagcaggcatgatattaagggcatcaatggagaacccacaagagcttcctcagctctaaagttgtttgcggaggaagtgccgtacccagagtggagttgcatcatggtgtaattgtggaacttcagtttccagaatcttgaggccatgttccctgatacaaccttctcaggatcaccatgccctgatacaacctgcaccggactctcctgcctccacctaccgttttcctaaaacaccatgcgctgatagattctgcagcactgtaactgaagttggaagttccaccatctcactgcgttgaagttggtggttgtgctggtatttcacctttaactgtaaggactaatttgggaacccaatttttccactggattttcattttcctaaggaaaattagttcattttcccttgagaaaataggaatcccttagaaaaatatagtttccaaactagccctaaaattaaaagtgggttgtggttcaaacggagctgatttttgtgaggccatgttcctcatccccagacatggcatccaaaagaaagtttagttcttgtagctgtactccctggtagaatgagagaggtttgtacaaaaggtaacctgattgttcttaccaagacttgtcatagaaaggattgatgtatctagtggctactcaagggacagcttcataatgccgtatgtgttggcacgcgcacgcaccccgccgttgtgtttgggacgaaaacacttcctagaattcctagataactgttgaaggacttttatgaggatttattgattgattcgagttcatgtccttaatgacttgatgtagtgcttcatagttggaggctggggttgtataacagtgtaccatatggttctttcgacttttgcccccatctaacttgagtatttaagattgaacttgtaaagattttattttaaaaggaagcatgttgaaatgtgtc

SEQ ID NO: 8589 - DNA, 5073 bp, Zea Mays
caagagtcgcacactcagaccagaccgccgccgccgcgccggtgatcgagtctcgtcggcgctaccttcacgccacaagacaataagcatcgacagccaggttcggctccaccaaacgtccttgctgcaaaaacatcatcttttatacagtcattgtgcgcactggcccctttccactggcaagaagaccctgaagtcatcgatgtgcggtattgcccttgtcctcgccagtgaccgccttgtcatcgttccctgtgccactgcaactactgccgcattggagacccagcactcctgcaagaggaagggcgtgccagatgagctgaaggaggccctgcgccggcggggccctgatagcctaggctacagaagtcgctgccttcttgctgatggcacggttgttgttggtgatggttgcaatgatggagtagagggtaaaatcggtgtgagtgactctagtgttgctgatttgttcttcatcggagcaacactgcatcttaggggagctaagctggtttcgcagccgctggtggcccccagtggaagtgtctttctgtataatggtgagatatatggaggaattcaggttgcggatgatgaaaatgacacccaagctcttttcaactctctggaatcttgttgttcatgtgattgccatgctcttggtagagataaaacatgtacttgttgtggtactgggagtggtgccaaatcagttttgcaagttctttccacaatcaaaggtccatgggctttgatatactggcagatgaagtcaaatacgatttggtttggccgggatgcatttgggagaagaagcctcttggtacattggcccacagctgatgattctcacttcatattatcatcagtatcacccccttcatttgcaaagattcactctgatcaaacagtgtcagatcgtgacatgtctaaccatactaaagctagctactgggaagagcttccttgtgggatatacagcatgcatatgaaagacattggaaagcatggtgcatgcatgaaggaagggtggattgtggaagttaacacacataaatggatggcttcttcattgaatggattgatcaaatgggagaggaaactcacagttcctaccatggagaacattcctgttgacagagggaaccatcagttgtctcagagcttcataagctcaagagaacctgaagaaaatacgaataatgggatcacaaaggcagattttctgtcagattctagtttatgtgatgcaaattgcataacacagtcagcacatagagtattggttgcattaagggaatctgtaatgctgcggactaaaatgaacacactctttcagggtactctggatagatctgaggacggagagtcagccccaatagcagtcctcttctccggtggcttagactccatgctacttgcagcactgctagaccagtgcattgattccaaatgatttctgcaatagctggactgaaggagcttcagaggatatctccgtgccggagatggcgtcttattgagattgacactgctttgacagacttgaacggggaaagtgaacatgtgatgtcactcatacacccttcaaatacctttatggtggaacgcattggatcaggagatgagactagatgtgcagagaatatggaaaaggaatatgggaagagatgataggtgcatctctgatcatggcaaggaggcccgtttcccatttcttgacgagaacgtgataaaaactttgttggaaattccgttatgggaaattgctaagcttgatgaacctgttggaaggggtgacaagaagatcttgagagaggttgcaaggctgctgggcctacaagaagctgctcttcagccaaagcgcgcgatccagttcggttcaaggatagcgagggagtcgaaccgcaagaacttcggcagcaacagagccgcgaaccaggcatcagcaggcagcgtgcagattcaccagagtccagcttctccagtggcgtcggccacacgccagccatttcttaccaacaatcagccatgaacacgcttagctgtgacaagtgccgcatggtttggttgatggagcatcattatcagttgttacggttcatcacaaattttcaaacgattcattgtcagctggatggagcatccatcatttgttatgtatactagccctgaatcctgatcatgtaacagcaacttggacgtggttgaaacctaaaagtggccggctgctttgtgtcaggctgatgtggcgcctgcgttgggccggtttagacgagtaggtccaacctggatctgaccccacatgtcagtgactcaactgcaggggatctttctccggtctggacctgaccaaacaatgctggatgtaaagcagtcgtcggtgtcaatattttttaaaaaatcctatatttctttagaatcagctcgtacttctataatctcttatctactactataataaaaatatttatataaaaaataagtatataaaaataagtatttaaacattgatggttggctccatatttatacacttaatcaatagaaaatatatattttgtgttaatgttataccccggagtcgagtggcgagtccaatctcagactagccacgtgtacggcgtgcagtccttgctacgcgcacccctcctaccgcacacgcgaatccagccagcccacccaccgccgccgcctgctcgtccgcctctataagatgagacctgcccaccgccatggcgccatcccctccgtctctgacccgcctacccatccccaccatttgccgcccaatccgccccgccgcgctccgccttgcctcgactcgaattcttaccaaccgtttgtggcttgaatttgaattccagctcgaatcactcaggcggccagccgggagcgagagcgagctggaggagctcgattcgatgcgttgctgagcgtgggtcaatcgattcgggtcgggcggtggcgcagtccgagagatctgaaccctagcggccgtctgcccgtccggatctgtgaccagccctgctcggtgcttcggcggcatgagtgcctggaaggcgtggggaggagaagcggcggagatatgagcggaggaggcagcggcagcggggacgagttcgggcgggcggtggcacgcgccgcggttgcgcaggcgctggaggccgcggggttcgactgcgcgcaccgctccgcggtggacgcggtcgtcgacgtcctcttgcgctacatcacccacctgggccggtccgccgccttcaacgccaacctcgccggccgcgcgctcgccaacgaactcgacgtcatccaggtgctcgaggaggtcggcgccgacacggacggcttcgcgggcgcggcggacacgggccgctgcctcgttggttccggcgtcgtcagggacctcatggcgttcgtcgactccaaggacgaggtgccgttcgcgcggccgctgcctaggttccccgtccagcgcgtgcagccgcagccctctgccagcccggctgcggcggcggcggggagggagactgggttgaagcacgtgccggagtggctgcctgcgttcccggatccgcacacctatgtgagcacggaggtgtgggatgagccttcggcgaccaaggacagggtggacaaggtggagcaggtgcggcaacggaggaaggccgagaaatccctgctcagcttgcagcgaaggctggctatggcaggcgcggatgggtttcatccagcggttgcattggcggaggatagcgcagagaaggggaaggagatacaggcagctgggacaaagagaaacccgtttcttgagccagcattgccgcctggggagaaggatgtatctgaggttggtatgcctccggaaaagaagaaactatctgtcctcgaggcatttgcgccagctatgcaatctagaaccatcgtcagggatgttgatgctggggcaggattggatgaaaaccaaaggagcattgttcccaaagagagggctccggtgcaccttaagattggatttggaaagaagccgttggcagcagctctgaattcaagaaccctggacctgagagaagatccatccttcttgaaagaggaagcaaaggatgacaagaagcggagagcaggcatgatattaagggcatcaatggagaacccacaagagcttcctcagctctaaagttgtttgcggaggaagtgccgtacccagagtggagttgcatcatggtgtaattgtggaacttcagtttccagaatcttgaggccatgttccctgatacaaccttctcaggatcaccatgccctgatacaacctgcaccggactctcctgcctccacctaccgttttcctaaaacaccatgcgctgatagattctgcagcactgtaactgaagttggaagttccaccatctcactgcgttgaagttggtggttgtgctggtatttcacctttaactgtaaggactaatttgggaacccaatttttccactggattttcattttcctaaggaaaattagttcattttcccttgagaaaataggaatcccttagaaaaatatagtttccaaactagccctaaaattaaaagtgggttgtggttcaaacggagctgatttttgtgaggccatgttcctcatccccagacatggcatccaaaagaaagtttagttcttgtagctgtactccctggtagaatgagagaggtttgtacaaaaggtaacctgattgttcttaccaagacttgtcatagaaaggattgatgtatctagtggctactcaagggacagcttcataatgccgtatgtgttggcacgcgcacgcaccccgccgttgtgtttgggacgaaaacacttcctagaattcctagataactgttgaaggacttttatgaggatttattgattgattcgagttcatgtccttaatgacttgatgtagtgcttcatagttggaggctggggttgtataacagtgtaccatatggttctttcgacttttgcccccatctaacttgagtatttaagattgaacttgtaaagattttattttaaaaggaagcatgttgaaatgtgtc

SEQ ID NO: 8590 - DNA, 5312 bp, Zea Mays
ctgagggagcaagagtcgcacactcagaccagaccgccgccgccgcgccggtgatcgagtctcgtcggcgctaccttcacgccacaagacaataagcatcgacagccaggtccttgctgcaaaaacatcatcttttatacagtcattgtgcgcactggcccctttccactggcaagaagaccctgaagtcatcgatgtgcggtattgcccttgtcctcgccagtgaccgccttgtcatcgttccctgtgccactgcaactactgccgcattggagacccagcactcctgcaagaggaagggcgtgccagatgagctgaaggaggccctgcgccggcggggccctgatagcctaggctacagaagtcgctgccttcttgctgatggcacggttgttgttggtgatggttgcaatgatggagtagagggtaaaatcggtgtgagtgactctagtgttgctgatttgttcttcatcggagcaacactgcatcttaggggagctaagctggtttcgcagccgctggtggcccccagtggaagtgtctttctgtataatggtgagatatatggaggaattcaggttgcggatgatgaaaatgacacccaagctcttttcaactctctggaatcttgttgttcatgtgattgccatgctcttggtagagataaaacatgtacttgttgtggtactgggagtggtgccaaatcagttttgcaagttctttccacaatcaaaggtccatgggctttgatatactggcaggcagatgaagtcaaatacgatttggtttggccgggatgcatttgggagaagaagcctcttggtacattggcccacagctgatgattctcacttcatattatcatcagtatcacccccttcatttgcaaagattcactctgatcaaacagtgtcagatcgtgacatgtctaaccatactaaagctagctactgggaagagcttccttgtgggatatacagcatgcatatgaaagacattggaaagcatggtgcatgcatgaaggaagggtggattgtggaagttaacacacataaatggatggcttcttcattgaatggattgatcaaatgggagaggaaactcacagttcctaccatggagaacattcctgttgacagagggaaccatcagttgtctcagagcttcataagctcaagagaacctgaagaaaatacgaataatgggatcacaaaggcagattttctgtcagattctagtttatgtgatgcaaattgcataacacagtcagcacatagagtattggttgcattaagggaatctgtaatgctgcggactaaaatgaacacactctttcagggtactctggatagatctgaggacggagagtcagccccaatagcagtcctcttctccggtggcttagactccatgctacttgcagcactgctagaccagtgcattgattccaaatggataattgatttgttaaatgtcagttttgatgggcaacttgcccctgataggatttctgcaatagctggactgaaggagcttcagaggatatctccgtgccggagatggcgtcttattgagattgacactgctttgacagacttgaacggggaaagtgaacatgtgatgtcactcatacacccttcaaatacctttatggatttgaacattggtattgcactctggttggctgctggtggtgatggttgggtggatggaagtatatgtcgtatgcaagatggttctcgctataagtacaggtcgagatctagagtccttatagtgggttctggggctgatgagcagtgtgctggttatggtagacatcggactaaatataggcttggagggtggaacgcattggatcaggagatgagactagatgtgcagagaatatggaaaaggaatatgggaagagatgataggtgcatctctgatcatggcaaggaggcccgtttcccatttcttgacgagaacgtgataaaaactttgttggaaattccgttatgggaaattgctaagcttgatgaacctgttggaaggggtgacaagaagatcttgagagaggttgcaaggctgctgggcctacaagaagctgctcttcagccaaagcgcgcgatccagttcggttcaaggatagcgagggagtcgaaccgcaagaacttcggcagcaacagagccgcgaaccaggcatcagcaggcagcgtgcagattcaccagagtccagcttctccagtggcgtcggccacacgccagccatttcttaccaacaatcagccatgaacacgcttagctgtgacaagtgccgcatggtttggttgatggagcatcattatcagttgttacggttcatcacaaattttcaaacgattcattgtcagctggatggagcatccatcatttgttatgtatactagccctgaatcctgatcatgtaacagcaacttggacgtggttgaaacctaaaagtggccggctgctttgtgtcaggctgatgtggcgcctgcgttgggccggtttagacgagtaggtccaacctggatctgaccccacatgtcagtgactcaactgcaggggatctttctccggtctggacctgaccaaacaatgctggatgtaaagcagtcgtcggtgtcaatattttttaaaaaatcctatatttctttagaatcagctcgtacttctataatctcttatctactactataataaaaatatttatataaaaaataagtatataaaaataagtatttaaacattgatggttggctccatatttatacacttaatcaatagaaaatatatattttgtgttaatgttataccccggagtcgagtggcgagtccaatctcagactagccacgtgtacggcgtgcagtccttgctacgcgcacccctcctaccgcacacgcgaatccagccagcccacccaccgccgccgcctgctcgtccgcctctataagatgagacctgcccaccgccatggcgccatcccctccgtctctgacccgcctacccatccccaccatttgccgcccaatccgccccgccgcgctccgccttgcctcgactcgaattcttaccaaccgtttgtggcttgaatttgaattccagctcgaatcactcaggcggccagccgggagcgagagcgagctggaggagctcgattcgatgcgttgctgagcgtgggtcaatcgattcgggtcgggcggtggcgcagtccgagagatctgaaccctagcggccgtctgcccgtccggatctgtgaccagccctgctcggtgcttcggcggcatgagtgcctggaaggcgtggggaggagaagcggcggagatatgagcggaggaggcagcggcagcggggacgagttcgggcgggcggtggcacgcgccgcggttgcgcaggcgctggaggccgcggggttcgactgcgcgcaccgctccgcggtggacgcggtcgtcgacgtcctcttgcgctacatcacccacctgggccggtccgccgccttcaacgccaacctcgccggccgcgcgctcgccaacgaactcgacgtcatccaggtgctcgaggaggtcggcgccgacacggacggcttcgcgggcgcggcggacacgggccgctgcctcgttggttccggcgtcgtcagggacctcatggcgttcgtcgactccaaggacgaggtgccgttcgcgcggccgctgcctaggttccccgtccagcgcgtgcagccgcagccctctgccagcccggctgcggcggcggcggggagggagactgggttgaagcacgtgccggagtggctgcctgcgttcccggatccgcacacctatgtgagcacggaggtgtgggatgagccttcggcgaccaaggacagggtggacaaggtggagcaggtgcggcaacggaggaaggccgagaaatccctgctcagcttgcagcgaaggctggctatggcaggcgcggatgggtttcatccagcggttgcattggcggaggatagcgcagagaaggggaaggagatacaggcagctgggacaaagagaaacccgtttcttgagccagcattgccgcctggggagaaggatgtatctgaggttggtatgcctccggaaaagaagaaactatctgtcctcgaggcatttgcgccagctatgcaatctagaaccatcgtcagggatgttgatgctggggcaggattggatgaaaaccaaaggagcattgttcccaaagagagggctccggtgcaccttaagattggatttggaaagaagccgttggcagcagctctgaattcaagaaccctggacctgagagaagatccatccttcttgaaagaggaagcaaaggatgacaagaagcggagagcaggcatgatattaagggcatcaatggagaacccacaagagcttcctcagctctaaagttgtttgcggaggaagtgccgtacccagagtggagttgcatcatggtgtaattgtggaacttcagtttccagaatcttgaggccatgttccctgatacaaccttctcaggatcaccatgccctgatacaacctgcaccggactctcctgcctccacctaccgttttcctaaaacaccatgcgctgatagattctgcagcactgtaactgaagttggaagttccaccatctcactgcgttgaagttggtggttgtgctggtatttcacctttaactgtaaggactaatttgggaacccaatttttccactggattttcattttcctaaggaaaattagttcattttcccttgagaaaataggaatcccttagaaaaatatagtttccaaactagccctaaaattaaaagtgggttgtggttcaaacggagctgatttttgtgaggccatgttcctcatccccagacatggcatccaaaagaaagtttagttcttgtagctgtactccctggtagaatgagagaggtttgtacaaaaggtaacctgattgttcttaccaagacttgtcatagaaaggattgatgtatctagtggctactcaagggacagcttcataatgccgtatgtgttggcacgcgcacgcaccccgccgttgtgtttgggacgaaaacacttcctagaattcctagataactgttgaaggacttttatgaggatttattgattgattcgagttcatgtccttaatgacttgatgtagtgcttcatagttggaggctggggttgtataacagtgtaccatatggttctttcgacttttgcccccatctaacttgagtatttaagattgaacttgtaaagattttattttaaaaggaagcatgttgaaatgtgtc

SEQ ID NO: 8591 - DNA, 5346 bp, Zea Mays
gaaagagaaaagaggtactgagggagcaagagtcgcacactcagaccagaccgccgccgccgcgccggtgatcgagtctcgtcggcgctaccttcacgccacaagacaataagcatcgacagccaggttcggctccaccaaacgtccttgctgcaaaaacatcatcttttatacagtcattgtgcgcactggcccctttccactggcaagaagaccctgaagtcatcgatgtgcggtattgcccttgtcctcgccagtgaccgccttgtcatcgttccctgtgccactgcaactactgccgcattggagacccagcactcctgcaagaggaagggcgtgccagatgagctgaaggaggccctgcgccggcggggccctgatagcctaggctacagaagtcgctgccttcttgctgatggcacggttgttgttggtgatggttgcaatgatggagtagagggtaaaatcggtgtgagtgactctagtgttgctgatttgttcttcatcggagcaacactgcatcttaggggagctaagctggtttcgcagccgctggtggcccccagtggaagtgtctttctgtataatggtgagatatatggaggaattcaggttgcggatgatgaaaatgacacccaagctcttttcaactctctggaatcttgttgttcatgtgattgccatgctcttggtagagataaaacatgtacttgttgtggtactgggagtggtgccaaatcagttttgcaagttctttccacaatcaaaggtccatgggctttgatatactggcaggcagatgaagtcaaatacgatttggtttggccgggatgcatttgggagaagaagcctcttggtacattggcccacagctgatgattctcacttcatattatcatcagtatcacccccttcatttgcaaagattcactctgatcaaacagtgtcagatcgtgacatgtctaaccatactaaagctagctactgggaagagcttccttgtgggatatacagcatgcatatgaaagacattggaaagcatggtgcatgcatgaaggaagggtggattgtggaagttaacacacataaatggatggcttcttcattgaatggattgatcaaatgggagaggaaactcacagttcctaccatggagaacattcctgttgacagagggaaccatcagttgtctcagagcttcataagctcaagagaacctgaagaaaatacgaataatgggatcacaaaggcagattttctgtcagattctagtttatgtgatgcaaattgcataacacagtcagcacatagagtattggttgcattaagggaatctgtaatgctgcggactaaaatgaacacactctttcagggtactctggatagatctgaggacggagagtcagccccaatagcagtcctcttctccggtggcttagactccatgctacttgcagcactgctagaccagtgcattgattccaaatggataattgatttgttaaatgtcagttttgatgggcaacttgcccctgataggatttctgcaatagctggactgaaggagcttcagaggatatctccgtgccggagatggcgtcttattgagattgacactgctttgacagacttgaacggggaaagtgaacatgtgatgtcactcatacacccttcaaatacctttatggatttgaacattggtattgcactctggttggctgctggtggtgatggttgggtggatggaagtatatgtcgtatgcaagatggttctcgctataagtacaggtcgagatctagagtccttatagtgggttctggggctgatgagcagtgtgctggttatggtagacatcggactaaatataggcttggagggtggaacgcattggatcaggagatgagactagatgtgcagagaatatggaaaaggaatatgggaagagatgataggtgcatctctgatcatggcaaggaggcccgtttcccatttcttgacgagaacgtgataaaaactttgttggaaattccgttatgggaaattgctaagcttgatgaacctgttggaaggggtgacaagaagatcttgagagaggttgcaaggctgctgggcctacaagaagctgctcttcagccaaagcgcgcgatccagttcggttcaaggatagcgagggagtcgaaccgcaagaacttcggcagcaacagagccgcgaaccaggcatcagcaggcagcgtgcagattcaccagagtccagcttctccagtggcgtcggccacacgccagccatttcttaccaacaatcagccatgaacacgcttagctgtgacaagtgccgcatggtttggttgatggagcatcattatcagttgttacggttcatcacaaattttcaaacgattcattgtcagctggatggagcatccatcatttgttatgtatactagccctgaatcctgatcatgtaacagcaacttggacgtggttgaaacctaaaagtggccggctgctttgtgtcaggctgatgtggcgcctgcgttgggccggtttagacgagtaggtccaacctggatctgaccccacatgtcagtgactcaactgcaggggatctttctccggtctggacctgaccaaacaatgctggatgtaaagcagtcgtcggtgtcaatattttttaaaaaatcctatatttctttagaatcagctcgtacttctataatctcttatctactactataataaaaatatttatataaaaaataagtatataaaaataagtatttaaacattgatggttggctccatatttatacacttaatcaatagaaaatatatattttgtgttaatgttataccccggagtcgagtggcgagtccaatctcagactagccacgtgtacggcgtgcagtccttgctacgcgcacccctcctaccgcacacgcgaatccagccagcccacccaccgccgccgcctgctcgtccgcctctataagatgagacctgcccaccgccatggcgccatcccctccgtctctgacccgcctacccatccccaccatttgccgcccaatccgccccgccgcgctccgccttgcctcgactcgaattcttaccaaccgtttgtggcttgaatttgaattccagctcgaatcactcaggcggccagccgggagcgagagcgagctggaggagctcgattcgatgcgttgctgagcgtgggtcaatcgattcgggtcgggcggtggcgcagtccgagagatctgaaccctagcggccgtctgcccgtccggatctgtgaccagccctgctcggtgcttcggcggcatgagtgcctggaaggcgtggggaggagaagcggcggagatatgagcggaggaggcagcggcagcggggacgagttcgggcgggcggtggcacgcgccgcggttgcgcaggcgctggaggccgcggggttcgactgcgcgcaccgctccgcggtggacgcggtcgtcgacgtcctcttgcgctacatcacccacctgggccggtccgccgccttcaacgccaacctcgccggccgcgcgctcgccaacgaactcgacgtcatccaggtgctcgaggaggtcggcgccgacacggacggcttcgcgggcgcggcggacacgggccgctgcctcgttggttccggcgtcgtcagggacctcatggcgttcgtcgactccaaggacgaggtgccgttcgcgcggccgctgcctaggttccccgtccagcgcgtgcagccgcagccctctgccagcccggctgcggcggcggcggggagggagactgggttgaagcacgtgccggagtggctgcctgcgttcccggatccgcacacctatgtgagcacggaggtgtgggatgagccttcggcgaccaaggacagggtggacaaggtggagcaggtgcggcaacggaggaaggccgagaaatccctgctcagcttgcagcgaaggctggctatggcaggcgcggatgggtttcatccagcggttgcattggcggaggatagcgcagagaaggggaaggagatacaggcagctgggacaaagagaaacccgtttcttgagccagcattgccgcctggggagaaggatgtatctgaggttggtatgcctccggaaaagaagaaactatctgtcctcgaggcatttgcgccagctatgcaatctagaaccatcgtcagggatgttgatgctggggcaggattggatgaaaaccaaaggagcattgttcccaaagagagggctccggtgcaccttaagattggatttggaaagaagccgttggcagcagctctgaattcaagaaccctggacctgagagaagatccatccttcttgaaagaggaagcaaaggatgacaagaagcggagagcaggcatgatattaagggcatcaatggagaacccacaagagcttcctcagctctaaagttgtttgcggaggaagtgccgtacccagagtggagttgcatcatggtgtaattgtggaacttcagtttccagaatcttgaggccatgttccctgatacaaccttctcaggatcaccatgccctgatacaacctgcaccggactctcctgcctccacctaccgttttcctaaaacaccatgcgctgatagattctgcagcactgtaactgaagttggaagttccaccatctcactgcgttgaagttggtggttgtgctggtatttcacctttaactgtaaggactaatttgggaacccaatttttccactggattttcattttcctaaggaaaattagttcattttcccttgagaaaataggaatcccttagaaaaatatagtttccaaactagccctaaaattaaaagtgggttgtggttcaaacggagctgatttttgtgaggccatgttcctcatccccagacatggcatccaaaagaaagtttagttcttgtagctgtactccctggtagaatgagagaggtttgtacaaaaggtaacctgattgttcttaccaagacttgtcatagaaaggattgatgtatctagtggctactcaagggacagcttcataatgccgtatgtgttggcacgcgcacgcaccccgccgttgtgtttgggacgaaaacacttcctagaattcctagataactgttgaaggacttttatgaggatttattgattgattcgagttcatgtccttaatgacttgatgtagtgcttcatagttggaggctggggttgtataacagtgtaccatatggttctttcgacttttgcccccatctaacttgagtatttaagattgaacttgtaaagattttattttaaaaggaagcatgttgaaatgtgtc

SEQ ID NO: 8592 - DNA, 5161 bp, Zea Mays
ctcgatgaaagagaaaagaggtactgagggagcaagagtcgcacactcagaccagaccgccgccgccgcgccggtgatcgagtctcgtcggcgctaccttcacgccacaagacaataagcatcgacagccaggttcggctccaccaaacgtccttgctgcaaaaacatcatcttttatacagtcattgtgcgcactggcccctttccactggcaagaagaccctgaagtcatcgatgtgcggtattgcccttgtcctcgccagtgaccgccttgtcatcgttccctgtgccactgcaactactgccgcattggagacccagcactcctgcaagaggaagggcgtgccagatgagctgaaggaggccctgcgccggcggggccctgatagcctaggctacagaagtcgctgccttcttgctgatggcacggttgttgttggtgatggttgcaatgatggagtagagggtaaaatcggtgtgagtgactctagtgttgctgatttgttcttcatcggagcaacactgcatcttaggggagctaagctggtttcgcagccgctggtggcccccagtggaagtgtctttctgtataatggtgagatatatggaggaattcaggttgcggatgatgaaaatgacacccaagctcttttcaactctctggaatcttgttgttcatgtgattgccatgctcttggtagagataaaacatgtacttgttgtggtactgggagtggtgccaaatcagttttgcaagttctttccacaatcaaaggtccatgggctttgatatactggcaggcagatgaagtcaaatacgatttggtttggccgggatgcatttgggagaagaagcctcttggtacattggcccacagctgatgattctcacttcatattatcatcagtatcacccccttcatttgcaaagattcactctgatcaaacagtgtcagatcgtgacatgtctaaccatactaaagctagctactgggaagagcttccttgtgggatatacagcatgcatatgaaagacattggaaagcatggtgcatgcatgaaggaagggtggattgtggaagttaacacacataaatggatggcttcttcattgaatggattgatcaaatgggagaggaaactcacagttcctaccatggagaacattcctgttgacagagggaaccatcagttgtctcagagcttcataagctcaagagaacctgaagaaaatacgaataatgggatcacaaaggcagattttctgtcagattctagtttatgtgatgcaaattgcataacacagtcagcacatagagtattggttgcattaagggaatctgtaatgctgcggactaaaatgaacacactctttcagggtactctggatagatctgaggacggagagtcagccccaatagcagtcctcttctccggtggcttagactccatgctacttgcagcactgctagaccagtgcattgattccaaatggataattgatttgttaaatgtcagttttgatgggcaacttgcccctgataggatttctgcaatagctggactgaaggagcttcagaggatatctccgtgccggagatggcgtcttattgagattgacactgctttgacagacttgaacggggaaagtgaacatgtgatgtcactcatacacccttcaaatacctttatggtggaacgcattggatcaggagatgagactagatgtgcagagaatatggaaaaggaatatgggaagagatgataggtgcatctctgatcatggcaaggaggcccgtttcccatttcttgacgagaacgtgataaaaactttgttggaaattccgttatgggaaattgctaagcttgatgaacctgttggaaggggtgacaagaagatcttgagagaggttgcaaggctgctgggcctacaagaagctgctcttcagccaaagcgcgcgatccagttcggttcaaggatagcgagggagtcgaaccgcaagaacttcggcagcaacagagccgcgaaccaggcatcagcaggcagcgtgcagattcaccagagtccagcttctccagtggcgtcggccacacgccagccatttcttaccaacaatcagccatgaacacgcttagctgtgacaagtgccgcatggtttggttgatggagcatcattatcagttgttacggttcatcacaaattttcaaacgattcattgtcagctggatggagcatccatcatttgttatgtatactagccctgaatcctgatcatgtaacagcaacttggacgtggttgaaacctaaaagtggccggctgctttgtgtcaggctgatgtggcgcctgcgttgggccggtttagacgagtaggtccaacctggatctgaccccacatgtcagtgactcaactgcaggggatctttctccggtctggacctgaccaaacaatgctggatgtaaagcagtcgtcggtgtcaatattttttaaaaaatcctatatttctttagaatcagctcgtacttctataatctcttatctactactataataaaaatatttatataaaaaataagtatataaaaataagtatttaaacattgatggttggctccatatttatacacttaatcaatagaaaatatatattttgtgttaatgttataccccggagtcgagtggcgagtccaatctcagactagccacgtgtacggcgtgcagtccttgctacgcgcacccctcctaccgcacacgcgaatccagccagcccacccaccgccgccgcctgctcgtccgcctctataagatgagacctgcccaccgccatggcgccatcccctccgtctctgacccgcctacccatccccaccatttgccgcccaatccgccccgccgcgctccgccttgcctcgactcgaattcttaccaaccgtttgtggcttgaatttgaattccagctcgaatcactcaggcggccagccgggagcgagagcgagctggaggagctcgattcgatgcgttgctgagcgtgggtcaatcgattcgggtcgggcggtggcgcagtccgagagatctgaaccctagcggccgtctgcccgtccggatctgtgaccagccctgctcggtgcttcggcggcatgagtgcctggaaggcgtggggaggagaagcggcggagatatgagcggaggaggcagcggcagcggggacgagttcgggcgggcggtggcacgcgccgcggttgcgcaggcgctggaggccgcggggttcgactgcgcgcaccgctccgcggtggacgcggtcgtcgacgtcctcttgcgctacatcacccacctgggccggtccgccgccttcaacgccaacctcgccggccgcgcgctcgccaacgaactcgacgtcatccaggtgctcgaggaggtcggcgccgacacggacggcttcgcgggcgcggcggacacgggccgctgcctcgttggttccggcgtcgtcagggacctcatggcgttcgtcgactccaaggacgaggtgccgttcgcgcggccgctgcctaggttccccgtccagcgcgtgcagccgcagccctctgccagcccggctgcggcggcggcggggagggagactgggttgaagcacgtgccggagtggctgcctgcgttcccggatccgcacacctatgtgagcacggaggtgtgggatgagccttcggcgaccaaggacagggtggacaaggtggagcaggtgcggcaacggaggaaggccgagaaatccctgctcagcttgcagcgaaggctggctatggcaggcgcggatgggtttcatccagcggttgcattggcggaggatagcgcagagaaggggaaggagatacaggcagctgggacaaagagaaacccgtttcttgagccagcattgccgcctggggagaaggatgtatctgaggttggtatgcctccggaaaagaagaaactatctgtcctcgaggcatttgcgccagctatgcaatctagaaccatcgtcagggatgttgatgctggggcaggattggatgaaaaccaaaggagcattgttcccaaagagagggctccggtgcaccttaagattggatttggaaagaagccgttggcagcagctctgaattcaagaaccctggacctgagagaagatccatccttcttgaaagaggaagcaaaggatgacaagaagcggagagcaggcatgatattaagggcatcaatggagaacccacaagagcttcctcagctctaaagttgtttgcggaggaagtgccgtacccagagtggagttgcatcatggtgtaattgtggaacttcagtttccagaatcttgaggccatgttccctgatacaaccttctcaggatcaccatgccctgatacaacctgcaccggactctcctgcctccacctaccgttttcctaaaacaccatgcgctgatagattctgcagcactgtaactgaagttggaagttccaccatctcactgcgttgaagttggtggttgtgctggtatttcacctttaactgtaaggactaatttgggaacccaatttttccactggattttcattttcctaaggaaaattagttcattttcccttgagaaaataggaatcccttagaaaaatatagtttccaaactagccctaaaattaaaagtgggttgtggttcaaacggagctgatttttgtgaggccatgttcctcatccccagacatggcatccaaaagaaagtttagttcttgtagctgtactccctggtagaatgagagaggtttgtacaaaaggtaacctgattgttcttaccaagacttgtcatagaaaggattgatgtatctagtggctactcaagggacagcttcataatgccgtatgtgttggcacgcgcacgcaccccgccgttgtgtttgggacgaaaacacttcctagaattcctagataactgttgaaggacttttatgaggatttattgattgattcgagttcatgtccttaatgacttgatgtagtgcttcatagttggaggctggggttgtataacagtgtaccatatggttctttcgacttttgcccccatctaacttgagtatttaagattgaacttgtaaagattttattttaaaaggaagcatgttgaaatgtgtc

SEQ ID NO: 8593 - DNA, 7369 bp, Zea Mays
aaataatccctcctctcgatgaaagagaaaagaggtactgagggagcaagagtcgcacactcagaccagaccgccgccgccgcgccggtgatcgagtctcgtcggcgctaccttcacgccacaagacaataagcatcgacagccaggttcggctccaccaaacgtaagcgctcacctcgtaagtcctaatcccctcctattattgtcgattccatcacactggattccatgaccttacttaaaatcctcgattccgttttcgtatatatgtatgtatgcatgcattactactgttgcacttccttttctttcgtttaactattcgattacatatatttcgatggattgtccatatgcctccgcacactagggtttcatttatctatttcaatcaaataggctgcttgcagtcttaacatccagatccatggaacacctaacctaagcttccatgtgcatatggacgggccaatagggtccagacctcactgtctcttttacttatctacttacaaacaaaacagaacaacgcttcagtgctcatcgtttttcatttatatatacgctagctcatgcaatgcaatacctgattatgattgtaagttttcgtcactgcaaagactaatcttgctagtagtatgaatgccaggcgagcatatgggttcattgtagtgtcatactgatgttcatcattcgatctgtgacaagtgataacattcttctgttttctggtttaaaactttcaggtttacttggtcaaaattcagatgtgtaatgccaattcaacagctttatgttccttgcctctgaacactatgcctgtgtttggcctttttgtttcttattctcctgtatctcttgtttggttgatgtggtaatatcatactgtggcctaccacaagttcttgactgtgaagcccagacaaattgtagtcattgagttaaccagggttaagcttgttttatgttcagatgggcaggtaacaatagagaaggtcttttgttccttacctccaaacatttggtggaccgcagactccatatgtgtgtgtggccacattgtctccatcatcaaatagttagggcgatacagaggaaacacacacacacacactagtagtctgaatagtgaatacatcttacagatcatcaaactggccactgcaggaggggaaatgtatgcaatggccggtgaagaagagagcagatacccttgtcttggcagagataacatggatgctgtcttccggcagcaaggaagtaggaagtggcagacatgaggattagcagtaggaagaaatgaagttcaggtcctggaggcacctaaacgaactgatcaactaattactgtcacaaagacatgagggtttacttttatgtgaacgaataaaagggaattgatggggagtttttttttctttttcttcccaatagtttataggaaggtccaaacaccagtctcaggactctattttgtaggtgtttttttggagatgttcttaggggaccagcataaaattctgtgaagtttttgtttggaaggatggcaatagctcttcagtactgtgtcaaatcctaaaatttgacagccccctctgcatcctccctgcattctcttctccccgtgctctctctctctctctctctctctctgtgtgtgtgtgtgtgtgtgtgtgtgtgtgtgtgtgtgtgtgtccccctctctcggtgacaattgggtgaccaccatcactgccctatgcaacctgctgagccaatgacaacaatgcattcacatgctcttgaggaacgctctttcctcaatctgcagagcggcattttctcatgatcctcacaacgacgaagggccaagtctagactccgtcctttatccaatttggccctttcccatatatatcctatatattatgtgtataaaagatctggtccatgagtcggggtgctcatttggcccttgggatttgacagacttgaagtcctaccaaacatggccttaaacactacttatgtttgatgtctaaaaaaatgtttccataattgtatacaaccaattgtttcaccaaaaaaaggactaatgtcttgttcttcaggtccttgctgcaaaaacatcatcttttatacagtcattgtgcgcactggcccctttccactggcaagaagaccctgaagtcatcgatgtgcggtattgcccttgtcctcgccagtgaccgccttgtcatcgttccctgtgccactgcaactactgccgcattggagacccagcactcctgcaagaggaagggcgtgccagatgagctgaaggaggccctgcgccggcggggccctgatagcctaggctacagaagtcgctgccttcttgctgatggcacggttgttgttggtgatggttgcaatgatggagtagagggtaaaatcggtgtgagtgactctagtgttgctgatttgttcttcatcggagcaacactgcatcttaggggagctaagctggtttcgcagccgctggtggcccccagtggaagtgtctttctgtataatggtgagatatatggaggaattcaggttgcggatgatgaaaatgacacccaagctcttttcaactctctggaatcttgttgttcatgtgattgccatgctcttggtagagataaaacatgtacttgttgtggtactgggagtggtgccaaatcagttttgcaagttctttccacaatcaaaggtccatgggctttgatatactggcaggcaggtaattttcatgaatgtgatctttgcaatctgttggagttcatctttctaacacccaagccatcttgaacttacagatgaagtcaaatacgatttggtttggccgggatgcatttgggagaagaagcctcttggtacattggcccacagctgatgattctcacttcatattatcatcagtatcacccccttcatttgcaaagattcactctgatcaaacagtgtcagatcgtgacatgtctaaccatactaaagctagctactgggaagagcttccttgtgggatatacagcatgcatatgaaagacattggaaagcatggtgcatgcatgaaggaagggtggattgtggaagttaacacacataaatggatggcttcttcattgaatggattgatcaaatgggagaggaaactcacagttcctaccatggagaacattcctgttgacagagggaaccatcagttgtctcagagcttcataagctcaagagaacctgaagaaaatacgaataatgggatcacaaaggcagattttctgtcagattctagtttatgtgatgcaaattgcataacacagtcagcacatagagtattggttgcattaagggaatctgtaatgctgcggactaaaatgaacacactctttcagggtactctggatagatctgaggacggagagtcagccccaatagcagtcctcttctccggtggcttagactccatgctacttgcagcactgctagaccagtgcattgattccaaatggataattgatttgttaaatgtcagttttgatgggcaacttgcccctgataggatttctgcaatagctggactgaaggagcttcagaggatatctccgtgccggagatggcgtcttattgagattgacactgctttgacagacttgaacggggaaagtgaacatgtgatgtcactcatacacccttcaaatacctttatggatttgaacattggtattgcactctggttggctgctggtggtgatggttgggtggatggaagtatatgtcgtatgcaagatggttctcgctataagtacaggtcgagatctagagtccttatagtgggttctggggctgatgagcagtgtgctggttatggtagacatcggactaaatataggcttggagggtggaacgcattggatcaggagatgagactagatgtgcagagaatatggaaaaggaatatgggaagagatgataggtgcatctctgatcatggcaaggaggcccgtttcccatttcttgacgagaacgtgataaaaactttgttggaaattccgttatgggaaattgctaagcttgatgaacctgttggaaggggtgacaagaagatcttgagagaggttgcaaggctgctgggcctacaagaagctgctcttcagccaaagcgcgcgatccagttcggttcaaggatagcgagggagtcgaaccgcaagaacttcggcagcaacagagccgcgaaccaggcatcagcaggcagcgtgcagattcaccagagtccagcttctccagtggcgtcggccacacgccagccatttcttaccaacaatcagccatgaacacgcttagctgtgacaagtgccgcatggtttggttgatggagcatcattatcagttgttacggttcatcacaaattttcaaacgattcattgtcagctggatggagcatccatcatttgttatgtatactagccctgaatcctgatcatgtaacagcaacttggacgtggttgaaacctaaaagtggccggctgctttgtgtcaggctgatgtggcgcctgcgttgggccggtttagacgagtaggtccaacctggatctgaccccacatgtcagtgactcaactgcaggggatctttctccggtctggacctgaccaaacaatgctggatgtaaagcagtcgtcggtgtcaatattttttaaaaaatcctatatttctttagaatcagctcgtacttctataatctcttatctactactataataaaaatatttatataaaaaataagtatataaaaataagtatttaaacattgatggttggctccatatttatacacttaatcaatagaaaatatatattttgtgttaatgttataccccggagtcgagtggcgagtccaatctcagactagccacgtgtacggcgtgcagtccttgctacgcgcacccctcctaccgcacacgcgaatccagccagcccacccaccgccgccgcctgctcgtccgcctctataagatgagacctgcccaccgccatggcgccatcccctccgtctctgacccgcctacccatccccaccatttgccgcccaatccgccccgccgcgctccgccttgcctcgactcgaattcttaccaaccgtttgtggcttgaatttgaattccagctcgaatcactcaggcggccagccgggagcgagagcgagctggaggagctcgattcgatgcgttgctgagcgtgggtcaatcgattcgggtcgggcggtggcgcagtccgagagatctgaaccctagcggccgtctgcccgtccggatctgtgaccagccctgctcggtgcttcggcggcatgagtgcctggaaggcgtggggaggagaagcggcggagatatgagcggaggaggcagcggcagcggggacgagttcgggcgggcggtggcacgcgccgcggttgcgcaggcgctggaggccgcggggttcgactgcgcgcaccgctccgcggtggacgcggtcgtcgacgtcctcttgcgctacatcacccacctgggccggtccgccgccttcaacgccaacctcgccggccgcgcgctcgccaacgaactcgacgtcatccaggtgctcgaggaggtcggcgccgacacggacggcttcgcgggcgcggcggacacgggccgctgcctcgttggttccggcgtcgtcagggacctcatggcgttcgtcgactccaaggacgaggtgccgttcgcgcggccgctgcctaggttccccgtccagcgcgtgcagccgcagccctctgccagcccggctgcggcggcggcggggagggagactgggttgaagcacgtgccggagtggctgcctgcgttcccggatccgcacacctatgtgagcacggaggtgtgggatgagccttcggcgaccaaggacagggtggacaaggtggagcaggtgcggcaacggaggaaggccgagaaatccctgctcagcttgcagcgaaggctggctatggcaggcgcggatgggtttcatccagcggttgcattggcggaggatagcgcagagaaggggaaggagatacaggcagctgggacaaagagaaacccgtttcttgagccagcattgccgcctggggagaaggatgtatctgaggttggtatgcctccggaaaagaagaaactatctgtcctcgaggcatttgcgccagctatgcaatctagaaccatcgtcagggatgttgatgctggggcaggattggatgaaaaccaaaggagcattgttcccaaagagagggctccggtgcaccttaagattggatttggaaagaagccgttggcagcagctctgaattcaagaaccctggacctgagagaagatccatccttcttgaaagaggaagcaaaggatgacaagaagcggagagcaggcatgatattaagggcatcaatggagaacccacaagagcttcctcagctctaaagttgtttgcggaggaagtgccgtacccagagtggagttgcatcatggtgtaattgtggaacttcagtttccagaatcttgaggccatgttccctgatacaaccttctcaggatcaccatgccctgatacaacctgcaccggactctcctgcctccacctaccgttttcctaaaacaccatgcgctgatagattctgcagcactgtaactgaagttggaagttccaccatctcactgcgttgaagttggtggttgtgctggtatttcacctttaactgtaaggactaatttgggaacccaatttttccactggattttcattttcctaaggaaaattagttcattttcccttgagaaaataggaatcccttagaaaaatatagtttccaaactagccctaaaattaaaagtgggttgtggttcaaacggagctgatttttgtgaggccatgttcctcatccccagacatggcatccaaaagaaagtttagttcttgtagctgtactccctggtagaatgagagaggtttgtacaaaaggtaacctgattgttcttaccaagacttgtcatagaaaggattgatgtatctagtggctactcaagggacagcttcataatgccgtatgtgttggcacgcgcacgcaccccgccgttgtgtttgggacgaaaacacttcctagaattcctagataactgttgaaggacttttatgaggatttattgattgattcgagttcatgtccttaatgacttgatgtagtgcttcatagttggaggctggggttgtataacagtgtaccatatggttctttcgacttttgcccccatctaacttgagtatttaagattgaacttgtaaagattttattttaaaaggaagcatgttgaaatgtgtc

SEQ ID NO: 8594 - DNA, 6385 bp, Zea Mays
cgcacactcagaccagaccgccgccgccgcgccggtgatcgagtctcgtcggcgctaccttcacgccacaagacaataagcatcgacagccaggttcggctccaccaaacgtaagcgctcacctcgtaagtcctaatcccctcctattattgtcgattccatcacactggattccatgaccttacttaaaatcctcgattccgttttcgtatatatgtatgtatgcatgcattactactgttgcacttccttttctttcgtttaactattcgattacatatatttcgatggattgtccatatgcctccgcacactagggtttcatttatctatttcaatcaaataggctgcttgcagtcttaacatccagatccatggaacacctaacctaagcttccatgtgcatatggacgggccaatagggtccagacctcactgtctcttttacttatctacttacaaacaaaacagaacaacgcttcagtgctcatcgtttttcatttatatatacgctagctcatgcaatgcaatacctgattatgattgtaagttttcgtcactgcaaagactaatcttgctagtagtatgaatgccaggcgagcatatgggttcattgtagtgtcatactgatgttcatcattcgatctgtgacaagtgataacattcttctgttttctggtttaaaactttcaggtttacttggtcaaaattcagatgtgtaatgccaattcaacagctttatgttccttgcctctgaacactatgcctgtgtttggcctttttgtttcttattctcctgtatctcttgtttggttgatgtggtaatatcatactgtggcctaccacaagttcttgactgtgaagcccagacaaattgtagtcattgagttaaccagggttaagcttgttttatgttcagatgggcaggtaacaatagagaaggtcttttgttccttacctccaaacatttggtggaccgcagactccatatgtgtgtgtggccacattgtctccatcatcaaatagttagggcgatacagaggaaacacacacacacacactagtagtctgaatagtgaatacatcttacagatcatcaaactggccactgcaggaggggaaatgtatgcaatggccggtgaagaagagagcagatacccttgtcttggcagagataacatggatgctgtcttccggcagcaaggaagtaggaagtggcagacatgaggattagcagtaggaagaaatgaagttcaggtcctggaggcacctaaacgaactgatcaactaattactgtcacaaagacatgagggtttacttttatgtgaacgaataaaagggaattgatggggagtttttttttctttttcttcccaatagtttataggaaggtccaaacaccagtctcaggactctattttgtaggtgtttttttggagatgttcttaggggaccagcataaaattctgtgaagtttttgtttggaaggatggcaatagctcttcagtactgtgtcaaatcctaaaatttgacagccccctctgcatcctccctgcattctcttctccccgtgctctctctctctctctctctctctctgtgtgtgtgtgtgtgtgtgtgtgtgtgtgtgtgtgtgtgtgtccccctctctcggtgacaattgggtgaccaccatcactgccctatgcaacctgctgagccaatgacaacaatgcattcacatgctcttgaggaacgctctttcctcaatctgcagagcggcattttctcatgatcctcacaacgacgaagggccaagtctagactccgtcctttatccaatttggccctttcccatatatatcctatatattatgtgtataaaagatctggtccatgagtcggggtgctcatttggcccttgggatttgacagacttgaagtcctaccaaacatggccttaaacactacttatgtttgatgtctaaaaaaatgtttccataattgtatacaaccaattgtttcaccaaaaaaaggactaatgtcttgttcttcaggtccttgctgcaaaaacatcatcttttatacagtcattgtgcgcactggcccctttccactggcaagaagaccctgaagtcatcgatgtgcggtattgcccttgtcctcgccagtgaccgccttgtcatcgttccctgtgccactgcaactactgccgcattggagacccagcactcctgcaagaggaagggcgtgccagatgagctgaaggaggccctgcgccggcggggccctgatagcctaggctacagaagtcgctgccttcttgctgatggcacggttgttgttggtgatggttgcaatgatggagtagagggtaaaatcggtgtgagtgactctagtgttgctgatttgttcttcatcggagcaacactgcatcttaggggagctaagctggtttcgcagccgctggtggcccccagtggaagtgtctttctgtataatggtgagatatatggaggaattcaggttgcggatgatgaaaatgacacccaagctcttttcaactctctggaatcttgttgttcatgtgattgccatgctcttggtagagataaaacatgtacttgttgtggtactgggagtggtgccaaatcagttttgcaagttctttccacaatcaaaggtccatgggctttgatatactggcaggcaggtaattttcatgaatgtgatctttgcaatctgttggagttcatctttctaacacccaagccatcttgaacttacagatgaagtcaaatacgatttggtttggccgggatgcatttgggagaagaagcctcttggtacattggcccacagctgatgattctcacttcatattatcatcagtatcacccccttcatttgcaaagattcactctgatcaaacagtgtcagatcgtgacatgtctaaccatactaaagctagctactgggaagagcttccttgtgggatatacagcatgcatatgaaagacattggaaagcatggtgcatgcatgaaggaagggtggattgtggaagttaacacacataaatggatggcttcttcattgaatggattgatcaaatgggagaggaaactcacagttcctaccatggagaacattcctgttgacagagggaaccatcagttgtctcagagcttcataagctcaagagaacctgaagaaaatacgaataatgggatcacaaaggcagattttctgtcagattctagtttatgtgatgcaaattgcataacacagtcagcacatagagtattggttgcattaagggaatctgtaatgctgcggactaaaatgaacacactctttcagggtactctggatagatctgaggacggagagtcagccccaatagcagtcctcttctccggtggcttagactccatgctacttgcagcactgctagaccagtgcattgattccaaatggataattgatttgttaaatgtcagttttgatgggcaacttgcccctgataggatttctgcaatagctggactgaaggagcttcagaggatatctccgtgccggagatggcgtcttattgagattgacactgctttgacagacttgaacggggaaagtgaacatgtgatgtcactcatacacccttcaaatacctttatggtggaacgcattggatcaggagatgagactagatgtgcagagaatatggaaaaggaatatgggaagagatgataggtgcatctctgatcatggcaaggaggcccgtttcccatttcttgacgagaacgtgataaaaactttgttggaaattccgttatgggaaattgctaagcttgatgaacctgttggaaggggtgacaagaagatcttgagagaggttgcaaggctgctgggcctacaagaagctgctcttcagccaaagcgcgcgatccagttcggttcaaggatagcgagggagtcgaaccgcaagaacttcggcagcaacagagccgcgaaccaggcatcagcaggcagcgtgcagattcaccagagtccagcttctccagtggcgtcggccacacgccagccatttcttaccaacaatcagccatgaacacgcttagctgtgacaagtgccgcatggtttggttgatggagcatcattatcagttgttacggttcatcacaaattttcaaacgattcattgtcagctggatggagcatccatcatttgttatgtatactagccctgaatcctgatcatgtaacagcaacttggacgtggttgaaacctaaaagtggccggctgctttgtgtcaggctgatgtggcgcctgcgttgggccggtttagacgagtaggtccaacctggatctgaccccacatgtcagtgactcaactgcaggggatctttctccggtctggacctgaccaaacaatgctggatgtaaagcagtcgtcggtgtcaatattttttaaaaaatcctatatttctttagaatcagctcgtacttctataatctcttatctactactataataaaaatatttatataaaaaataagtatataaaaataagtatttaaacattgatggttggctccatatttatacacttaatcaatagaaaatatatattttgtgttaatgttataccccggagtcgagtggcgagtccaatctcagactagccacgtgtacggcgtgcagtccttgctacgcgcacccctcctaccgcacacgcgaatccagccagcccacccaccgccgccgcctgctcgtccgcctctataagatgagacctgcccaccgccatggcgccatcccctccgtctctgacccgcctacccatccccaccatttgccgcccaatccgccccgccgcgctccgccttgcctcgactcgaattcttaccaaccgtttgtggcttgaatttgaattccagctcgaatcactcaggcggccagccgggagcgagagcgagctggaggagctcgattcgatgcgttgctgagcgtgggtcaatcgattcgggtcgggcggtggcgcagtccgagagatctgaaccctagcggccgtctgcccgtccggatctgtgaccagccctgctcggtgcttcggcggcatgagtgcctggaaggcgtggggaggagaagcggcggagatatgagcggaggaggcagcggcagcggggacgagttcgggcgggcggtggcacgcgccgcggttgcgcaggcgctggaggccgcggggttcgactgcgcgcaccgctccgcggtggacgcggtcgtcgacgtcctcttgcgctacatcacccacctgggccggtccgccgccttcaacgccaacctcgccggccgcgcgctcgccaacgaactcgacgtcatccaggtgctcgaggaggtcggcgccgacacggacggcttcgcgggcgcggcggacacgggccgctgcctcgttggttccggcgtcgtcagggacctcatggcgttcgtcgactccaaggacgaggtgccgttcgcgcggccgctgcctaggttccccgtccagcgcgtgcagccgcagccctctgccagcccggctgcggcggcggcggggagggagactgggttgaagcacgtgccggagtggctgcctgcgttcccggatccgcacacctatgtgagcacggaggtgtgggatgagccttcggcgaccaaggacagggtggacaaggtggagcaggtgcggcaacggaggaaggccgagaaatccctgctcagcttgcagcgaaggctggctatggcaggcgcggatgggtttcatccagcggttgcattggcggaggatagcgcagagaaggggaaggagatacaggcagctgggacaaagagaaacccgtttcttgagccagcattgccgcctggggagaaggatgtatctgaggttggtatgcctccggaaaagaagaaactatctgtcctcgaggcatttgcgccagctatgcaatctagaaccatcgtcagggatgttgatgctggggcaggattggatgaaaaccaaaggagcattgttcccaaagagagggctccggtgcaccttaagattggatttggaaagaagccgttggcagcagctctgaattcaagaaccctggacctgagagaagatccatccttcttgaaagaggaagcaaaggatgacaagaagcggagagcaggcatgatattaagggcatcaatggagaacccacaagagcttcctcagctctaaagttgtttgcggaggaagtgccgtacccagagtggagttgcatcatggtgtaattgtggaacttcagtttccagaatcttgaggttttaatatgaattatttattccttaatgagtcatcaaggcattgacaaattgagaagtggattcctttgga

SEQ ID NO: 8595 - DNA, 652 bp, Zea Mays
gtctccccagtcatcttatgtgcagtcatctccaaattagaccgcgttgtcgactgtagaccgcatcgttgcctcgcaacatttggacaccttgtcgtcactcgatcacgtgttcgctctttaccacgccattttcagcatcacggttctgtaagactccacgcactcgtcgacacccggctgtcgatctccaccatgcagcaccacttcagacctctagcctcgtcctactctgctccagcttgcgtctaagaatagggtcgagtttgtacgccacctgctcggtaaaataaagtgaaccgcgctctatatcgaaggagggaattagatgaagaagaaagcgaagccgcacgacactcgtcacatattcgacgacaagctcgagccaggatttatcagcattctcgcgagtattgagtcacgtttgattatgttgatcacgtgatgtgaaggacaagaactggattaatctcaaggtgatgccgatgatgaacctgaagatggataatctgaatgagtgccaagacaaaggatggtcgtcaagtggtcgccacctaacaaacactatcgtagtgtttattccaggcaagccccggtgcattatccctttccttgtgttttaaaatctttatcaccttgtttgatgcattag

SEQ ID NO: 8596 - DNA, 798 bp, Zea Mays
acgcgccactctttctggcagccgccgccaggatgcctccactctttctccctcttctctcctccccttgctcttctctggccgccgccacttgccaggacttcctgcagcagagcgcccctgcagctccttgcacctgcatcctacgcgcgctccagccgaccacgcccaggaaccagtgcagcgctccatcatcagtaggtgactgacggcacatgcgccaccatgccaatcatccatatgatccgtctcccacatgcctgcccgccgtaggctgcaaacgggcagggtcgttgtgtctacgctgcggctgcggctaccgacggcgtcctgattggactattggagaggagaggaagccgtcgtgccgcgtgacaacaatgctgcggctggacggacgtgtcggcgagcagtccagcttgccgctgcgtgtccaaccccaaggtgatgaggaacaagtttgctaccgaggatgagtaagacaatgaagaatattgtgcttctgaagatgaggaattagatgatgaggatgatcaaatatttcattagatgcaaggtgcaaactcaccaaaatctacaaggcactttgctgaagcttcacactctaaacatgatgatctagctagctatctgtaaatgatctagttgtgaatgatattataattgtgatgcttttgtgaatatataattgtgttgcttttgtgtttatgtgatggatctatgactatggtataccgattaactgtgtgtctttatgatttgtgtataaaaaattgtgatttgtggtgcttaattaaa

SEQ ID NO: 8597 - DNA, 618 bp, Zea Mays
acgcgccactctttctggcagccgccgccaggatgcctccactctttctccctcttctctcctccccttgctcttctctggccgccgccacttgccaggacttcctgcagcagagcgcccctgcagctccttgcacctgcatcctacgcgcgctccagccgaccacgcccaggaaccagtgcagcgctccatcatcagtaggtgactgacggcacatgcgccaccatgccaatcatccatatgatccgtctcccacatgcctgcgtgatgaggaacaagtttgctaccgaggatgagtaagacaatgaagaatattgtgcttctgaagatgaggaattagatgatgaggatgatcaaatatttcattagatgcaaggtgcaaactcaccaaaatctacaaggcactttgctgaagcttcacactctaaacatgatgatctagctagctatctgtaaatgatctagttgtgaatgatattataattgtgatgcttttgtgaatatataattgtgttgcttttgtgtttatgtgatggatctatgactatggtataccgattaactgtgtgtctttatgatttgtgtataaaaaattgtgatttgtggtgcttaattaaa

SEQ ID NO: 8598 - DNA, 1077 bp, Zea Mays
acgcgccactctttctggcagccgccgccaggatgcctccactctttctccctcttctctcctccccttgctcttctctggccgccgccacttgccaggacttcctgcagcagagcgcccctgcagctccttgcacctgcatcctacgcgcgctccagccgaccacgcccaggaaccagtgcagcgctccatcatcagtaggtgactgacggcacatgcgccaccatgccaatcatccatatgatccgtctcccacatgcctgcgctgcaaacgggcagggtcgttgtgtctacgctgcggctgcggctaccgacggcgtcctgattggactattggagaggagaggaagccgtcgtgccgcgtgacaacaatgctgcggctggacggacgtgtcggcgagcagtccagcttgccgctgcgtgtccaaccccaaggtcaaggccggccgaggctccacaacctctcaactccataacagccagctgctcctcgtgacatgcgtgcacatgtgctgttagttgcactgcattatatgttgcatgtacgcacacaagccattgctgccattcctatcaataatctgcggttgttggatggagggtcgtctcctggggttattctatcgtttagccgtcctcttggcgagttcagatgaagccatggaatgtatatcggaagatgccagctgaatgtctccatgcttatttggatttccctctaaagtgatgaggaacaagtttgctaccgaggatgagtaagacaatgaagaatattgtgcttctgaagatgaggaattagatgatgaggatgatcaaatatttcattagatgcaaggtgcaaactcaccaaaatctacaaggcactttgctgaagcttcacactctaaacatgatgatctagctagctatctgtaaatgatctagttgtgaatgatattataattgtgatgcttttgtgaatatataattgtgttgcttttgtgtttatgtgatggatctatgactatggtataccgattaactgtgtgtctttatgatttgtgtataaaaaattgtgatttgtggtgcttaattaaa

SEQ ID NO: 8599 - DNA, 896 bp, Zea Mays
acgcgccactctttctggcagccgccgccaggatgcctccactctttctccctcttctctcctccccttgctcttctctggccgccgccacttgccaggacttcctgcagcagagcgcccctgcagctccttgcacctgcatcctacgcgcgctccagccgaccacgcccaggaaccagtgcagcgctccatcatcagtaggtgactgacggcacatgcgccaccatgccaatcatccatatgatccgtctcccacatgcctgcgctgcaaacgggcagggtcgttgtgtctacgctgcggctgcggctaccgacggcgtcctgattggactattggagaggagaggaagccgtcgtgccgcgtgacaacaatgctgcggctggacggacgtgtcggcgagcagtccagcttgccgctgcgtgtccaaccccaaggtcaaggccggccgaggctccacaacctctcaactccataacagccagctgctcctcgtgacatgcgtgcacatgtgctgttagttgcactgcattatatgttgcatgtgatgaggaacaagtttgctaccgaggatgagtaagacaatgaagaatattgtgcttctgaagatgaggaattagatgatgaggatgatcaaatatttcattagatgcaaggtgcaaactcaccaaaatctacaaggcactttgctgaagcttcacactctaaacatgatgatctagctagctatctgtaaatgatctagttgtgaatgatattataattgtgatgcttttgtgaatatataattgtgttgcttttgtgtttatgtgatggatctatgactatggtataccgattaactgtgtgtctttatgatttgtgtataaaaaattgtgatttgtggtgcttaattaaa

SEQ ID NO: 8600 - DNA, 1122 bp, Zea Mays
gtaatcgatcagctccacccctgtccttttgtattttgaaaatgtcttcatatgtgtcattttgtactcgaccagccccagtcctgttcgttgttttttctctcactttgtaatcgatcagctgcaatgaagtgggtagagtgggtagccgctgtcgaggatcgccatcgagagggcgacggccgcgctctcgacgggccagagcagcaactgggtggtcgtcgagttcaggcatccgaacccctccaacgacgactgggtcggcgtcttctctccctcgggtttcaggtactcgacggactatggcatgtttaggctctgcatagcgaacacggaggaggactgggggccgggaacggagcagtacaagttcatcgatcgaagcagccctggctcgtcttcctcgcgcaccgtgttctcggctactcgtcgggtggctggtacgagacaatgatgggctcgtacggggagccgatgggccgggacgggcttcaagacctctggcagaggtacgatatagcggtcttcggccacatccacggatacgagcgcacgtgccccgtctaccaggcaaagccggtgagtccaagatgatatggatcattacggcgggcggggcggttcaacgcgacgacccatgtcaccgttggctgcggcggcggcgcgagcctgtctacgttcagagacagtgtgccgtactggagcttcttcagggacgccgacacttgatgttcggcaagctcacggccatcaacagctcgttcctcttgtttgagtacaagaagagccgcgacggccatgtgtatgaccgtttcagtctcgcacgactaccgtcacctggtggcctgctccgtcgacagttgcccccgaagcaccttggccgtctgatcgagctccggactctggagacatgtgttgatagatacactgtttgatatactttcagcattgtttttagttaccattggttctgaatgcactgaaccttctacctcgacactacatgctacatatcaaaagggcaatggtgtagaacaaatcatgtgcttctcactttcatctggttctggtttccagcgcagattctggctggatctttagcatgttcatatgaatgtcctt

SEQ ID NO: 8601 - DNA, 1153 bp, Zea Mays
gtaatcgatcagctccacccctgtccttttgtattttgaaaatgtcttcatatgtgtcattttgtactcgaccagccccagtcctgttcgttgttttttctctcactttgtaatcgatcagctgcaatgaagtgggtagagtgggtagccgctgtcgaggatcgccatcgagagggcgacggccgcgctctcgacgggccagagcagcaactgggtggtcgtcgagttcaggcatccgaacccctccaacgacgactgggtcggcgtcttctctccctcgggtttcaggtactcgacggactatggcatgtttaggctctgcatagcgaacacggaggaggactgggggccgggaacggagcagtacaagttcatcgatcgaagcagccctggctcgtcttcctcgcgcaccgtgttctcggctactcgtcgggtggctggtacgagacaatgatgggctcgtacggggagccgatgggccgggacgggcttcaagacctctggcagaggtacgatatagcggtcttcggccacatccacggatacgagcgcacgtgccccgtctaccaggcaaaggcaagactgagcttgcatctctgcatcagagccggtgagtccaagatgatatggatcattacggcgggcggggcggttcaacgcgacgacccatgtcaccgttggctgcggcggcggcgcgagcctgtctacgttcagagacagtgtgccgtactggagcttcttcagggacgccgacacttgatgttcggcaagctcacggccatcaacagctcgttcctcttgtttgagtacaagaagagccgcgacggccatgtgtatgaccgtttcagtctcgcacgactaccgtcacctggtggcctgctccgtcgacagttgcccccgaagcaccttggccgtctgatcgagctccggactctggagacatgtgttgatagatacactgtttgatatactttcagcattgtttttagttaccattggttctgaatgcactgaaccttctacctcgacactacatgctacatatcaaaagggcaatggtgtagaacaaatcatgtgcttctcactttcatctggttctggtttccagcgcagattctggctggatctttagcatgttcatatgaatgtcctt

SEQ ID NO: 8602 - DNA, 1197 bp, Zea Mays
gtaatcgatcagctccacccctgtccttttgtattttgaaaatgtcttcatatgtgtcattttgtactcgaccagccccagtcctgttcgttgttttttctctcactttgtaatcgatcagctgcaatgaagtgggtagagtgggtagccgctgtcgaggatcgccatcgagagggcgacggccgcgctctcgacggttcggccagcatcagtgctcaccccacggttcttggcctcaagggccagagcagcaactgggtggtcgtcgagttcaggcatccgaacccctccaacgacgactgggtcggcgtcttctctccctcgggtttcaggtactcgacggactatggcatgtttaggctctgcatagcgaacacggaggaggactgggggccgggaacggagcagtacaagttcatcgatcgaagcagccctggctcgtcttcctcgcgcaccgtgttctcggctactcgtcgggtggctggtacgagacaatgatgggctcgtacggggagccgatgggccgggacgggcttcaagacctctggcagaggtacgatatagcggtcttcggccacatccacggatacgagcgcacgtgccccgtctaccaggcaaaggcaagactgagcttgcatctctgcatcagagccggtgagtccaagatgatatggatcattacggcgggcggggcggttcaacgcgacgacccatgtcaccgttggctgcggcggcggcgcgagcctgtctacgttcagagacagtgtgccgtactggagcttcttcagggacgccgacacttgatgttcggcaagctcacggccatcaacagctcgttcctcttgtttgagtacaagaagagccgcgacggccatgtgtatgaccgtttcagtctcgcacgactaccgtcacctggtggcctgctccgtcgacagttgcccccgaagcaccttggccgtctgatcgagctccggactctggagacatgtgttgatagatacactgtttgatatactttcagcattgtttttagttaccattggttctgaatgcactgaaccttctacctcgacactacatgctacatatcaaaagggcaatggtgtagaacaaatcatgtgcttctcactttcatctggttctggtttccagcgcagattctggctggatctttagcatgttcatatgaatgtcctt

SEQ ID NO: 8603 - DNA, 2711 bp, Zea Mays
cctctccccgggtgtcctgatctcggacacacaagatgcttcatcctagctgggtcggtgtctcggcacacgtctcggagtattggtctgtgataatcgccactgttgttttcgcatttgttggcgcggtgacaatttactatacagtcaatcagttgaacaagaacatcagcttgagcctgataagggctatcaaggccagggccaagaggtacaagaaatcgaaggacaaggtgcccgctgcatcccacatctggaggaaagaagttgtctcccgcagcaaaggcctgaaatgctgcgtgtgcttgaagtccgtttcacctcctcagtactctggggggaccatccatcagtgcgatatctgcggggccgctgcgcatccgagctgctcggggaatgcacacaaggattgcaagtgtgtatctatggctggtttgggccatgtgcttcaccagtgggctgtacaatggattgacagcgcggatcactctgaagaagactctttctgttgccactgtgatgaatcttgcaatggagctttccttgcaggctcaccagtttggtactgtatgtggtgtcagcgactggtgcatgttgattgtcacagcagcttggccaaggaaactggtgatatctgtgacttgggaccattgaaacgattgatattatcacctctttgtgttaaggagcttcattggacaggtgctgggattttgagttctatcacaaatggggctaatgaattggcttccagtgtccgagagacaattcggattcgtagtaaaaggtacaaaaggggtagcgcttctgctgattcagatagctctggggctattgagctaccatctgatgctgaaggagattcacaagaagtaaacagcaaagcaaaggtgagggatgatcatgccaattgcaaactcaatgaggtacaccaaagctctgaatcagagaaagataagcaacttgtaccagataacgcagcaacaaccaatatgtcagatgtacaacgtgaaaattctcatgtacagaacaatcagaagtacgaaattatcaatgtgccttctgattctaggccacttctagttttcattaacaagagaagtggggcacagagtggtgattcactgagacagcgtctgcaaattcttcttaatcctgtgcaggttttcgagttgagcaaacagcaaggtccagatgttggtttagctttatttcggaaggtaacccatttcagagttcttgtatgtggtggagatggcactgctggttgggttttggatgccattgagaaacagaagtttgaaaccccgcctcctgtagccatccttccagctggtactggtaatgatcttgcgagggttttatgttggggtggtggccttggtgttattgagaagcggggaggtctattctcagttttgcaagatgtagagcatgctgcagtcactgttcttgacagatggaagatcacaataaaggacaaccaagggaaacttatgagaccaccaaaatttatgaacaactactttggggttggctgtgatgcaaaggttgccttagatatacacaacctgagggaagagaaccctgaacggttttatagccaggatacaactatttttgtagtttatgaacaaggtgctgtatgcaagagagggagcaaagaacataatggataacacatttgattgttttccttgggatgtcaagcttgagatagatggatccaaaattgatattcctcaggactccgaaggtatccttgttgccaatatcaggagttacatgggaggggttgacctttggaagaacgaggatgatgtctctgacacttacctccctcagtccatgcatgacaagaagctggaagttgttagcttcacaggaatgctgcatctcgggaaactgcaggttgggctttctcgtgcaaaaagattagcccaaggccatcatataaaggttgaagtcagtactacaatgccgatccaagttgatggagagccatggtcccaggagccgggaaccatagaggtttctcatcatagccaggccttcatgcttaagagagtctccgaagaaccgctgggtcatgccgcttcggtaatggccgacatcttggaaaacgctgagagcagtggcattatctcagccttgcagaagaggactttgctccaggagatagcgtctaggcttttgtaggacacagttctaacgccagtagttgtgtgtagctcaccctatagctctctcacgtcttcagcagccagaggcttgcttctgggctactagagaattgcgcctggtcgttgtacatacaccatcatggtattttaccctgattcggattgtgttgtgtatgattctgtaaaattttgtacaccctattgggtgagcacacactgacactgttgcggtcggaaattctggtaccagttgtctggattgctgaaacttagacaacagtctttctgctttgtgagtttggtttttcatctcattatgtacttcgtacagtatgttttgtattcactattaaagacaaaaacaaaagagcccgtctagctcagtcggtagagcgcaaggctcttaaccttgtggtcgtgggttcgagccccacggtgggcgaagttttttacttatttttggatattctgtcattttgtatagttttttactttaacatttttatcattttgtactaaaacaaaaac

SEQ ID NO: 8604 - DNA, 2707 bp, Zea Mays
attcccgagccgcatcctctccccgggtgtcctgatctcggacacacaagatgcttcatcctagctgggtcggtgtctcggcacacgtctcggagtattggtctgtgataatcgccactgttgttttcgcatttgttggcgcggtgacaatttactatacagtcaatcagttgaacaagaacatcagcttgagcctgataagggctatcaaggccagggccaagaggtacaagaaatcgaaggacaaggtgcccgctgcatcccacatctggaggaaagaagttgtctcccgcagcaaaggcctgaaatgctgcgtgtgcttgaagtccgtttcacctcctcagtactctggggggaccatccatcagtgcgatatctgcggggccgctgcgcatccgagctgctcggggaatgcacacaaggattgcaagtgtgtatctatggctggtttgggccatgtgcttcaccagtgggctgtacaatggattgacagcgcggatcactctgaagaagactctttctgttgccactgtgatgaatcttgcaatggagctttccttgcaggctcaccagtttggtactgtatgtggtgtcagcgactggtgcatgttgattgtcacagcagcttggccaaggaaactggtgatatctgtgacttgggaccattgaaacgattgatattatcacctctttgtgttaaggagcttcattggacaggtgctgggattttgagttctatcacaaatggggctaatgaattggcttccagtgtccgagagacaattcggattcgtagtaaaaggtacaaaaggggtagcgcttctgctgattcagatagctctggggctattgagctaccatctgatgctgaaggagattcacaagaagtaaacagcaaagcaaaggtgagggatgatcatgccaattgcaaactcaatgaggtacaccaaagctctgaatcagagaaagataagcaacttgtaccagataacgcagcaacaaccaatatgtcagatgtacaacgtgaaaattctcatgtacagaacaatcagaagtacgaaattatcaatgtgccttctgattctaggccacttctagttttcattaacaagagaagtggggcacagagtggtgattcactgagacagcgtctgcaaattcttcttaatcctgtgcaggttttcgagttgagcaaacagcaaggtccagatgttggtttagctttatttcggaaggtaacccatttcagagttcttgtatgtggtggagatggcactgctggttgggttttggatgccattgagaaacagaagtttgaaaccccgcctcctgtagccatccttccagctggtactggtaatgatcttgcgagggttttatgttggggtggtggccttggtgttattgagaagcggggaggtctattctcagttttgcaagatgtagagcatgctgcagtcactgttcttgacagatggaagatcacaataaaggacaaccaagggaaacttatgagaccaccaaaatttatgaacaactactttggggttggctgtgatgcaaaggttgccttagatatacacaacctgagggaagagaaccctgaacggttttatagccagtttatgaacaaggtgctgtatgcaagagagggagcaaagaacataatggataacacatttgattgttttccttgggatgtcaagcttgagatagatggatccaaaattgatattcctcaggactccgaaggtatccttgttgccaatatcaggagttacatgggaggggttgacctttggaagaacgaggatgatgtctctgacacttacctccctcagtccatgcatgacaagaagctggaagttgttagcttcacaggaatgctgcatctcgggaaactgcaggttgggctttctcgtgcaaaaagattagcccaaggccatcatataaaggttgaagtcagtactacaatgccgatccaagttgatggagagccatggtcccaggagccgggaaccatagaggtttctcatcatagccaggccttcatgcttaagagagtctccgaagaaccgctgggtcatgccgcttcggtaatggccgacatcttggaaaacgctgagagcagtggcattatctcagccttgcagaagaggactttgctccaggagatagcgtctaggcttttgtaggacacagttctaacgccagtagttgtgtgtagctcaccctatagctctctcacgtcttcagcagccagaggcttgcttctgggctactagagaattgcgcctggtcgttgtacatacaccatcatggtattttaccctgattcggattgtgttgtgtatgattctgtaaaattttgtacaccctattgggtgagcacacactgacactgttgcggtcggaaattctggtaccagttgtctggattgctgaaacttagacaacagtctttctgctttgtgagtttggtttttcatctcattatgtacttcgtacagtatgttttgtattcactattaaagacaaaaacaaaagagcccgtctagctcagtcggtagagcgcaaggctcttaaccttgtggtcgtgggttcgagccccacggtgggcgaagttttttacttatttttggatattctgtcattttgtatagttttttactttaacatttttatcattttgtactaaaacaaaaac

SEQ ID NO: 8605 - DNA, 2688 bp, Zea Mays
caggctccgtggcttttgcctgtcctgtggcagcgaatcggagagcggaggggaggggaaagcgcagcaacgccggcgagcgagcgggccgttcgaggatcgcaatgtgagcacgagcagggacacacaagatgcttcatcctagctgggtcggtgtctcggcacacgtctcggagtattggtctgtgataatcgccactgttgttttcgcatttgttggcgcggtgacaatttactatacagtcaatcagttgaacaagaacatcagcttgagcctgataagggctatcaaggccagggccaagaggtacaagaaatcgaaggacaaggtgcccgctgcatcccacatctggaggaaagaagttgtctcccgcagcaaaggcctgaaatgctgcgtgtgcttgaagtccgtttcacctcctcagtactctggggggaccatccatcagtgcgatatctgcggggccgctgcgcatccgagctgctcggggaatgcacacaaggattgcaagtgtgtatctatggctggtttgggccatgtgcttcaccagtgggctgtacaatggattgacagcgcggatcactctgaagaagactctttctgttgccactgtgatgaatcttgcaatggagctttccttgcaggctcaccagtttggtactgtatgtggtgtcagcgactggtgcatgttgattgtcacagcagcttggccaaggaaactggtgatatctgtgacttgggaccattgaaacgattgatattatcacctctttgtgttaaggagcttcattggacaggtgctgggattttgagttctatcacaaatggggctaatgaattggcttccagtgtccgagagacaattcggattcgtagtaaaaggtacaaaaggggtagcgcttctgctgattcagatagctctggggctattgagctaccatctgatgctgaaggagattcacaagaagtaaacagcaaagcaaaggtgagggatgatcatgccaattgcaaactcaatgaggtacaccaaagctctgaatcagagaaagataagcaacttgtaccagataacgcagcaacaaccaatatgtcagatgtacaacgtgaaaattctcatgtacagaacaatcagaagtacgaaattatcaatgtgccttctgattctaggccacttctagttttcattaacaagagaagtggggcacagagtggtgattcactgagacagcgtctgcaaattcttcttaatcctgtgcaggttttcgagttgagcaaacagcaaggtccagatgttggtttagctttatttcggaagccatccttccagctggtactggtaatgatcttgcgagggttttatgttggggtggtggccttggtgttattgagaagcggggaggtctattctcagttttgcaagatgtagagcatgctgcagtcactgttcttgacagatggaagatcacaataaaggacaaccaagggaaacttatgagaccaccaaaatttatgaacaactactttggggttggctgtgatgcaaaggttgccttagatatacacaacctgagggaagagaaccctgaacggttttatagccagtttatgaacaaggtgctgtatgcaagagagggagcaaagaacataatggataacacatttgattgttttccttgggatgtcaagcttgagatagatggatccaaaattgatattcctcaggactccgaaggtatccttgttgccaatatcaggagttacatgggaggggttgacctttggaagaacgaggatgatgtctctgacacttacctccctcagtccatgcatgacaagaagctggaagttgttagcttcacaggaatgctgcatctcgggaaactgcaggttgggctttctcgtgcaaaaagattagcccaaggccatcatataaaggttgaagtcagtactacaatgccgatccaagttgatggagagccatggtcccaggagccgggaaccatagaggtttctcatcatagccaggccttcatgcttaagagagtctccgaagaaccgctgggtcatgccgcttcggtaatggccgacatcttggaaaacgctgagagcagtggcattatctcagccttgcagaagaggactttgctccaggagatagcgtctaggcttttgtaggacacagttctaacgccagtagttgtgtgtagctcaccctatagctctctcacgtcttcagcagccagaggcttgcttctgggctactagagaattgcgcctggtcgttgtacatacaccatcatggtattttaccctgattcggattgtgttgtgtatgattctgtaaaattttgtacaccctattgggtgagcacacactgacactgttgcggtcggaaattctggtaccagttgtctggattgctgaaacttagacaacagtctttctgctttgtgagtttggtttttcatctcattatgtacttcgtacagtatgttttgtattcactattaaagacaaaaacaaaagagcccgtctagctcagtcggtagagcgcaaggctcttaaccttgtggtcgtgggttcgagccccacggtgggcgaagttttttacttatttttggatattctgtcattttgtatagttttttactttaacatttttatcattttgtactaaaacaaaaac

SEQ ID NO: 8606 - DNA, 2797 bp, Zea Mays
attttaattttctattaattattattactacaggctccgtggcttttgcctgtcctgtggcagcgaatcggagagcggaggggaggggaaagcgcagcaacgccggcgagcgagcgggccgttcgaggatcgcaatgtgagcacgagcagggacacacaagatgcttcatcctagctgggtcggtgtctcggcacacgtctcggagtattggtctgtgataatcgccactgttgttttcgcatttgttggcgcggtgacaatttactatacagtcaatcagttgaacaagaacatcagcttgagcctgataagggctatcaaggccagggccaagaggtacaagaaatcgaaggacaaggtgcccgctgcatcccacatctggaggaaagaagttgtctcccgcagcaaaggcctgaaatgctgcgtgtgcttgaagtccgtttcacctcctcagtactctggggggaccatccatcagtgcgatatctgcggggccgctgcgcatccgagctgctcggggaatgcacacaaggattgcaagtgtgtatctatggctggtttgggccatgtgcttcaccagtgggctgtacaatggattgacagcgcggatcactctgaagaagactctttctgttgccactgtgatgaatcttgcaatggagctttccttgcaggctcaccagtttggtactgtatgtggtgtcagcgactggtgcatgttgattgtcacagcagcttggccaaggaaactggtgatatctgtgacttgggaccattgaaacgattgatattatcacctctttgtgttaaggagcttcattggacaggtgctgggattttgagttctatcacaaatggggctaatgaattggcttccagtgtccgagagacaattcggattcgtagtaaaaggtacaaaaggggtagcgcttctgctgattcagatagctctggggctattgagctaccatctgatgctgaaggagattcacaagaagtaaacagcaaagcaaaggtgagggatgatcatgccaattgcaaactcaatgaggtacaccaaagctctgaatcagagaaagataagcaacttgtaccagataacgcagcaacaaccaatatgtcagatgtacaacgtgaaaattctcatgtacagaacaatcagaagtacgaaattatcaatgtgccttctgattctaggccacttctagttttcattaacaagagaagtggggcacagagtggtgattcactgagacagcgtctgcaaattcttcttaatcctgtgcagcaaggtccagatgttggtttagctttatttcggaaggtaacccatttcagagttcttgtatgtggtggagatggcactgctggttgggttttggatgccattgagaaacagaagtttgaaaccccgcctcctgtagccatccttccagctggtactggtaatgatcttgcgagggttttatgttggggtggtggccttggtgttattgagaagcggggaggtctattctcagttttgcaagatgtagagcatgctgcagtcactgttcttgacagatggaagatcacaataaaggacaaccaagggaaacttatgagaccaccaaaatttatgaacaactactttggggttggctgtgatgcaaaggttgccttagatatacacaacctgagggaagagaaccctgaacggttttatagccagtttatgaacaaggtgctgtatgcaagagagggagcaaagaacataatggataacacatttgattgttttccttgggatgtcaagcttgagatagatggatccaaaattgatattcctcaggactccgaaggtatccttgttgccaatatcaggagttacatgggaggggttgacctttggaagaacgaggatgatgtctctgacacttacctccctcagtccatgcatgacaagaagctggaagttgttagcttcacaggaatgctgcatctcgggaaactgcaggttgggctttctcgtgcaaaaagattagcccaaggccatcatataaaggttgaagtcagtactacaatgccgatccaagttgatggagagccatggtcccaggagccgggaaccatagaggtttctcatcatagccaggccttcatgcttaagagagtctccgaagaaccgctgggtcatgccgcttcggtaatggccgacatcttggaaaacgctgagagcagtggcattatctcagccttgcagaagaggactttgctccaggagatagcgtctaggcttttgtaggacacagttctaacgccagtagttgtgtgtagctcaccctatagctctctcacgtcttcagcagccagaggcttgcttctgggctactagagaattgcgcctggtcgttgtacatacaccatcatggtattttaccctgattcggattgtgttgtgtatgattctgtaaaattttgtacaccctattgggtgagcacacactgacactgttgcggtcggaaattctggtaccagttgtctggattgctgaaacttagacaacagtctttctgctttgtgagtttggtttttcatctcattatgtacttcgtacagtatgttttgtattcactattaaagacaaaaacaaaagagcccgtctagctcagtcggtagagcgcaaggctcttaaccttgtggtcgtgggttcgagccccacggtgggcgaagttttttacttatttttggatattctgtcattttgtatagttttttactttaacatttttatcattttgtactaaaacaaaaac

SEQ ID NO: 8607 - DNA, 2650 bp, Zea Mays
agcattttcattttaattttctattaattattattactacaggctccgtggcttttgcctgtcctgtggcagcgaatcggagagcggaggggaggggaaagcgcagcaacgccggcgagcgagcgggccgttcgaggatcgcaatgtgagcacgagcagggacacacaagatgcttcatcctagctgggtcggtgtctcggcacacgtctcggagtattggtctgtgataatcgccactgttgttttcgcatttgttggcgcggtgacaatttactatacagtcaatcagttgaacaagaacatcagcttgagcctgataagggctatcaaggccagggccaagaggtacaagaaatcgaaggacaaggtgcccgctgcatcccacatctggaggaaagaagttgtctcccgcagcaaaggcctgaaatgctgcgtgtgcttgaagtccgtttcacctcctcagtactctggggggaccatccatcagtgcgatatctgcggggccgctgcgcatccgagctgctcggggaatgcacacaaggattgcaagtgtgtatctatggctggtttgggccatgtgcttcaccagtgggctgtacaatggattgacagcgcggatcactctgaagaagactctttctgttgccactgtgatgaatcttgcaatggagctttccttgcaggctcaccagtttggtactgtatgtggtgtcagcgactggtgcatgttgattgtcacagcagcttggccaaggaaactggtgatatctgtgacttgggaccattgaaacgattgatattatcacctctttgtgttaaggagcttcattggacaggtgctgggattttgagttctatcacaaatggggctaatgaattggcttccagtgtccgagagacaattcggattcgtagtaaaaggtacaaaaggggtagcgcttctgctgattcagatagctctggggctattgagctaccatctgatgctgaaggagattcacaagaagtaaacagcaaagcaaaggtgagggatgatcatgccaattgcaaactcaatgaggtacaccaaagctctgaatcagagaaagataagcaacttgtaccagataacgcagcaacaaccaatatgtcagatgtacaacgtgaaaattctcatgtacagaacaatcagaagtacgaaattatcaatgtgccttctgattctaggccacttctagttttcattaacaagagaagtggggcacagagtggtgattcactgagacagcgtctgcaaattcttcttaatcctgtgcaggttttcgagttgagcaaacagcaaggtccagatgttggtttagctttatttcggaagcggggaggtctattctcagttttgcaagatgtagagcatgctgcagtcactgttcttgacagatggaagatcacaataaaggacaaccaagggaaacttatgagaccaccaaaatttatgaacaactactttggggttggctgtgatgcaaaggttgccttagatatacacaacctgagggaagagaaccctgaacggttttatagccagtttatgaacaaggtgctgtatgcaagagagggagcaaagaacataatggataacacatttgattgttttccttgggatgtcaagcttgagatagatggatccaaaattgatattcctcaggactccgaaggtatccttgttgccaatatcaggagttacatgggaggggttgacctttggaagaacgaggatgatgtctctgacacttacctccctcagtccatgcatgacaagaagctggaagttgttagcttcacaggaatgctgcatctcgggaaactgcaggttgggctttctcgtgcaaaaagattagcccaaggccatcatataaaggttgaagtcagtactacaatgccgatccaagttgatggagagccatggtcccaggagccgggaaccatagaggtttctcatcatagccaggccttcatgcttaagagagtctccgaagaaccgctgggtcatgccgcttcggtaatggccgacatcttggaaaacgctgagagcagtggcattatctcagccttgcagaagaggactttgctccaggagatagcgtctaggcttttgtaggacacagttctaacgccagtagttgtgtgtagctcaccctatagctctctcacgtcttcagcagccagaggcttgcttctgggctactagagaattgcgcctggtcgttgtacatacaccatcatggtattttaccctgattcggattgtgttgtgtatgattctgtaaaattttgtacaccctattgggtgagcacacactgacactgttgcggtcggaaattctggtaccagttgtctggattgctgaaacttagacaacagtctttctgctttgtgagtttggtttttcatctcattatgtacttcgtacagtatgttttgtattcactattaaagacaaaaacaaaagagcccgtctagctcagtcggtagagcgcaaggctcttaaccttgtggtcgtgggttcgagccccacggtgggcgaagttttttacttatttttggatattctgtcattttgtatagttttttactttaacatttttatcattttgtactaaaacaaaaac

SEQ ID NO: 8608 - DNA, 3018 bp, Zea Mays
cccctccccacgcgtgatccccaaatctcctccgtccgttcctccctcaacggtcgtggtcgcgcatcgtgacgtggctcgggacatgcgtgcccacgacgtggttcgggggagtcggggacatgcgagcccacacatcggcgcaattacctcgctaaccccccacaaatttagcattttcattttaattttctattaattattattactacaggctccgtggcttttgcctgtcctgtggcagcgaatcggagagcggaggggaggggaaagcgcagcaacgccggcgagcgagcgggccgttcgaggatcgcaatgtgagcacgagcagggacacacaagatgcttcatcctagctgggtcggtgtctcggcacacgtctcggagtattggtctgtgataatcgccactgttgttttcgcatttgttggcgcggtgacaatttactatacagtcaatcagttgaacaagaacatcagcttgagcctgataagggctatcaaggccagggccaagaggtacaagaaatcgaaggacaaggtgcccgctgcatcccacatctggaggaaagaagttgtctcccgcagcaaaggcctgaaatgctgcgtgtgcttgaagtccgtttcacctcctcagtactctggggggaccatccatcagtgcgatatctgcggggccgctgcgcatccgagctgctcggggaatgcacacaaggattgcaagtgtgtatctatggctggtttgggccatgtgcttcaccagtgggctgtacaatggattgacagcgcggatcactctgaagaagactctttctgttgccactgtgatgaatcttgcaatggagctttccttgcaggctcaccagtttggtactgtatgtggtgtcagcgactggtgcatgttgattgtcacagcagcttggccaaggaaactggtgatatctgtgacttgggaccattgaaacgattgatattatcacctctttgtgttaaggagcttcattggacaggtgctgggattttgagttctatcacaaatggggctaatgaattggcttccagtgtccgagagacaattcggattcgtagtaaaaggtacaaaaggggtagcgcttctgctgattcagatagctctggggctattgagctaccatctgatgctgaaggagattcacaagaagtaaacagcaaagcaaaggtgagggatgatcatgccaattgcaaactcaatgaggtacaccaaagctctgaatcagagaaagataagcaacttgtaccagataacgcagcaacaaccaatatgtcagatgtacaacgtgaaaattctcatgtacagaacaatcagaagtacgaaattatcaatgtgccttctgattctaggccacttctagttttcattaacaagagaagtggggcacagagtggtgattcactgagacagcgtctgcaaattcttcttaatcctgtgcaggttttcgagttgagcaaacagcaaggtccagatgttggtttagctttatttcggaaggtaacccatttcagagttcttgtatgtggtggagatggcactgctggttgggttttggatgccattgagaaacagaagtttgaaaccccgcctcctgtagccatccttccagctggtactggtaatgatcttgcgagggttttatgttggggtggtggccttggtgttattgagaagcggggaggtctattctcagttttgcaagatgtagagcatgctgcagtcactgttcttgacagatggaagatcacaataaaggacaaccaagggaaacttatgagaccaccaaaatttatgaacaactactttggggttggctgtgatgcaaaggttgccttagatatacacaacctgagggaagagaaccctgaacggttttatagccaggatacaactatttttgtagtttatgaacaaggtgctgtatgcaagagagggagcaaagaacataatggataacacatttgattgttttccttgggatgtcaagcttgagatagatggatccaaaattgatattcctcaggactccgaaggtatccttgttgccaatatcaggagttacatgggaggggttgacctttggaagaacgaggatgatgtctctgacacttacctccctcagtccatgcatgacaagaagctggaagttgttagcttcacaggaatgctgcatctcgggaaactgcaggttgggctttctcgtgcaaaaagattagcccaaggccatcatataaaggttgaagtcagtactacaatgccgatccaagttgatggagagccatggtcccaggagccgggaaccatagaggtttctcatcatagccaggccttcatgcttaagagagtctccgaagaaccgctgggtcatgccgcttcggtaatggccgacatcttggaaaacgctgagagcagtggcattatctcagccttgcagaagaggactttgctccaggagatagcgtctaggcttttgtaggacacagttctaacgccagtagttgtgtgtagctcaccctatagctctctcacgtcttcagcagccagaggcttgcttctgggctactagagaattgcgcctggtcgttgtacatacaccatcatggtattttaccctgattcggattgtgttgtgtatgattctgtaaaattttgtacaccctattgggtgagcacacactgacactgttgcggtcggaaattctggtaccagttgtctggattgctgaaacttagacaacagtctttctgctttgtgagtttggtttttcatctcattatgtacttcgtacagtatgttttgtattcactattaaagacaaaaacaaaagagcccgtctagctcagtcggtagagcgcaaggctcttaaccttgtggtcgtgggttcgagccccacggtgggcgaagttttttacttatttttggatattctgtcattttgtatagttttttactttaacatttttatcattttgtactaaaacaaaaac

SEQ ID NO: 8609 - DNA, 2110 bp, Zea Mays
ccccgcccccgccagtccgtcaccatcgcgcggcgccaccaactacgcccgagcccccgcctccacaccccgtccccacgcgcggcgcagcggagctatcagcgcccttccccaggccggcttcaacgctgatggagccatcctcgcctcgaatcctcgctgcagttttcgttccaaagttctcgccccgaatcctcgcccttccccaccgcaccttcggtgtctccaccacaatcaccgcggtggcttcaccgtgtccccgcaatcaccgtggcggccagatccactacctcgccttcctgccgggcgacgtcctcttcatcgcgcaccacctcgccacgctcttcgtcttcctgacctgctgccacctcgtccgccacagcgcctacgctctcctcgtcctcgccgaggtcaccagcctgctgcagaacgctggacgctcgccgggatctagcgggaccagtcccccgccgcggcccgcgtctacagcgccctctcgccgtccttctacgcgctctacacgctcgtcaggggcgtcgccggcccgctcttcctcctcaagatggccgccttctacctgtccagccaggccgtcgacgccatcccgtggtgggtgcggatctcctggatcctggttgtcggcaccgccattgcggtcagcaacctgtggatttggaacctctggaaggagctcatcagggaatggaagcagcaggcccctcccaagtcaaagaaagacacataggccgccacctccaagccgagtgccgagaagtagaaggacaagatctacatcctcatgccggtcatggccagttgcccaccccggcgcctacgctcgagaagccacccatcttggccgcttcggtgcgaggaggcgctaccgtcctcttcctccgatccacctctcctgccaacccgccaggttgccgctgccgagagcgagcggaggcctccctccgccgacgggggaggaagatgctcaccaagttcgaaaccaagagcaaccgggtcaagggcctcaccttccactcgctcagcccatggatcctgtctagcctccacagcggcgtatccagatgtgggactaccgcgtgggcaccctcctcatccgcttcgaggagcacaacgggcccgtcaggggcatccagttctaggtcacgtagctgctcttcgtgtccagagagaatttgggtcatacggttttggtgatcaaggacgctgatgtattgattttctgtttgatggatgtgctggtattggattgggcagtttagggggcagtcgttatgcgtctgtagtgtcagtgatcagcttggcctccatcttttgtgtcgtgctgtcggcagttgttctgaatggtttatgatttggattatattggatgtgtctcttcatctagaattgctggttgctgagaatttgaaggcgacaaacttaaatgggacatctgatccgtatgcattgatcacttgtggtgcagaggagagtttcaggttggggacctcagggattctcccacgcgattccgacggcctccttcctctcgcgcggctgcaggcctcctccccccacctccacctgaatccacaacacgtgagaaaaagcgacgatgacgaagaacaacgtggttgacatcgggcggcctctcgattggtggtcgtgctcggatccgcacctcgatggggccaccctatccctcaccgccccatcgcgtcggattgagttcccttggacgggcgacagtgttatggcctgtaaataaactacattgtcatgttagttagagggaagtgggtctacatactgcttagctagattaattgtgatagtaaggtgtattttgctgctttgtcaacaatttcaatttagacacttgttttttgggatgagctgctaaaaacgagctgaaggctgctactgcagaaagtgttgtggtcatgcttgtacaaagaatatttgtaaacaatgcttccgataccgtttccttagatggagcgcataaacctgctcctgtatggctgagtacattggttgttgtctaaactgtaattcttactgaagtactgtataatcttcttttgaatgtattaagtgtactgggagccag

SEQ ID NO: 8610 - DNA, 4446 bp, Zea Mays
ctcccaaaacattacaacatggtgaaccaccactgccgctgccaccttttcctccagtaacaccaccaccagaattaccagtgccaactatatgcagtgatagtggatcagttccactggtacactcaaatccatcttcagattgtccatataaagaagcagcaatgctaccagaacacaaatctgctgttccacctactctcgaaggacatgaagcaagtgaagttcaattgctgcaatctgatattactgttgaattatcttcatcaaaacattctgagtatacagttcagcatgtgtttggaagcactgaagatacaatttcaaatatctcatcctctatacctgcagcacctccgtacccaatatttcatattgtaacatataattcctcaggttcaatatctgcagagcaagtaaattgcgagcaggctttagatcaaacagcattacccattcatttgaggccattcaaggtggagatatcacaaagtgagacaaccaatggactcttggcctctaaaaccgatgataaagaacatggaggccttccaatcccatcattgccacaaaatttgccccagcctagagaacatatgaaacctccatctccacctcctcctccaccacgaccaccaccttgtcatgcaacacttgtaccttctttgtgtttatcttcaaatccaccttctctaagagaactttatgaaaatcaaccttctacttcccctccaccttttcctagagaatcatttgttgctctacctccacctccagctccacaccctaatcatctatctcttcctggaaaacatattaagccatctccacctcctccacctcctccacctagagaaaatgaagcattttgtccttcgactctactttcacctacaagacatgttatacctcctccaccaactttacatcatattgcacccacatctccatgcttgtatcaaccttctttccctattgatatagaaatccaacctaccttttcagaggatattgtaatagtttcaccttcacattcaacggaggttaatatagttccattgccaccaccacctcctcgtagaatgagtgaaattttgtctcaacctcttgagggtggacaatcagcactgccagcttctcttcttgaagttactaaagaaatcccacctcctcctccccttccccctaaagtacaaaggagatctccattgtctactctttgtggtggaattgtgaatattccattacctccacctccacctccacctccacttcctggaggacatggagaagttccactatcaactcctaaaggatctggggccatcccacctccaccaccctttactaaagggctaggaggaattacattggcaattcaatttcatagtggagacttttcactcctcgaacctaccagagaatcagaaagtacttcacgcttgccaccaccaccactatcttccaatggacatataggagatccaccaccgccgccgccaccaccaccaactatgagtgtatttgtagaggcttccatcccgctgccacctcaaacaggatgcagagaggctccaccaccaccgccaccatctcctggaggacatgtagagtttccaccgccacctccaggggaatgtgcattagctctgccacatcccaaagcaagtgtaggggctccaccaccaccgcctcctcctggaggacatgtagagtctccaccaccaccgccacctccaggggaatgtgcattagctctgccacatcccaaagcaagtgtaggggctccaccaccaccgcctcctcctggaggacatgtagagtctccaccaccaccgccacctccaggggaatgtgcattagctctgccacatcccagagcaagtgtaggggctccaccaccaccgcctcctcctggaggacatgtagagtctccaccgccaccgccacctccaggggaatgtgcattagctctgccacatcccaaagcaagtgtaggggctccaccaccaccgcctcctcctggaggacatgtagagtctccaccgccacctccacctccaggggaatgtgcattagctctgccacatcccaaagcaagtgtaggggctccaccaccaccgccacctcccggaggatatgtaggagctccaccgccaccgccacctccaggggaatgtgcattagctctgccacatcccaaagcaagtgtaggggctccaccaccaccgccacctcccggaggatatgtaggagctccatcgccaccgccacctcctggaggatacataggagctccaccaccgcttccatatggaggaattggaggtgttcctcctcctccaccaccctttggaggactaggaggaactccaccgcctccacctccagcagggtttcgaggtggagctccagcacctcctcctcctcctggaggtcatggaggtccgccacctcctcctcctagaggacatggaggagtaggtggtccccctccccctcctggtgcaccatctcctccaatgcctcctggaatgcctggtggccctcctcctcctccaggtggaagaggaatgcctgctccacctggcggaagaggacatggccttgctcgctcgttaggcccgacattacaaagtgcagtacgaagatcatctctaaaaccactacattgggtcaaagtaacaagggcaatgcaaggaagcttgtgggcagagctacaaaaacaagtggacgctaatagtcgtgctgaattcgatgtaaatgaattggaatctctatttaccattgctccaaagacaaaagctggccccaaatcagaaggccgtggaaaatctcttgggacaaaatctgataaagttcaactgattgatctaagacgggccaataacacagagatcatgttgacaaaaatcaaaatgccgctccctgatatgatgagtgctgctctagctttggatgattcagttctggatgctgatcaaattgaaaatctcattaaattttgcccaacaaaagaggagatggaacttctaaagaactacagtggggacaaggaagctcttggaaagtgtgagcatttctttctagagttgatgaaggtgccgagggttgaatctaagcttcagatattcgctttcaagattcagtttcagtctcagattagagatgttagaaagaatttgcagactgtgtcatctgcttgtgaggagctcagaagctctgagaagttgaaggttatcatgaagaacattttgttaattgggaatacattaaatcaaggcacaccaagaggccaagctgttggttttcgcttggacagcctcctaaaacttatagacacccgtgccactagtggcagaatgacattaatgcactttctatgtaagtcccttgcagagaagtcaccggaagtaatggattttcatgaggaacttgtcaacttggaagcttcttcaaagttgcaactgaaagcattggcggacgagcagctggcagtcgtaaaggggctggagaaagttgaacaggagctaactgcttcagaaagtgatggtccagtttctgatgttttccgtaagactttaaaggagttcattgattgttccagtgctgatgtacgctccctatcagcattctattctgaagtaggtaaaagcgcagatggacttgctgtttattttggagaagaccctgcaaaatttccttttgagcaagttgctacaacccttctgacctttgtggggttgttccggaaagctcatgacgagaacctcaagcaaattgaggctgaaaagaagaaagcccagaaagaagctgaaaaggaggcaaaccaggacaaaactcctgtaaaatcaaaaaatgggaatgcagataaatcgccaagatcaccatcaaccttctaatgatgtacggcagaacttcacatggtcatcatttcttcctcaacgaatgcccgcctttgctggcctgggcacaatttcgcaagcatgaacagtatacaaatccataaattccttgtggacaaatgcttacaagacaaggttacttggagttaaaccaattgaatatctcactgttgggggcctgcttcgtcgtcgaaggtcccataagaagaaacaccttcggaagattgacacaaagccgaagctatcaatcagagagcttcggagtacatttccaaatgcaccgacttaaagatgaaatgaccaatcgacccatgataacttgtattatgattgtaaacctttgtaaagggcatgaatgtaatttctcacaggctgcgtcctgtgcctataaatagatgaacagtacccctgtactgttcacgctatcttgtattcgctcgtgtgcaacacttggatttttgccttctgtcaagccgaaggtataaatgtaattaaataccatatttaaatatccaagtttatataatgaagacatatggat

SEQ ID NO: 8611 - DNA, 1570 bp, Zea Mays
atggcctggtcctggacgcggtcctttctcacatgggctacagtgccgctgtgtatgggtgaggcagccaggcaggggttcaagggttttctcgatttgtgtgagttctttctagagttgatgaaggtgccgagggttgaatctaagcttcagatattcgctttcaagattcagtttcagtctcagattagagatgttagaaagaatttgcagactgtgtcatctgcttgtgaggagctcagaagctctgagaagttgaaggttatcatgaagaacattttgttaattgggaatacattaaatcaaggcacaccaagaggccaagctgttggttttcgcttggacagcctcctaaaacttatagacacccgtgccactagtggcagaatgacattaatgcactttctatgtaagagaagtcaccggaagtaatggattttcatgaggaacttgtcaacttggaagcttcttcaaagttgcaactgaaagcattggcggacgagcagctggcagtcgtaaaggggctggagaaagttgaacaggagctaactgcttcagaaagtgatggtccagtttctgatgttttccgtaagactttaaaggagttcattgattgttccagtgctgatgtacgctccctatcagcattctattctgaagtaggtaaaagcgcagatggacttgctgtttattttggagaagaccctgcaaaatttccttttgagcaagttgctacaacccttctgacctttgtggggttgttccggaaagctcatgacgagaacctcaagcaaattgaggctgaaaagaagaaagcccagaaagaagctgaaaaggaggcaaaccaggacaaaactcctgtaaaatcaaaaaatgggaatgcagataaatcgccaagatcaccatcaaccttctaatgatgtacggcagaacttcacatggtcatcatttcttcctcaacgaatgcccgcctttgctggcctgggcacaatttcgcaagcatgaacagtatacaaatccataaattccttgtggacaaatgcttacaagacaagatggttttggttcaacatctatgcatgtatctcatgacactgtacaaagctcacaccccacacaaaaaactaggttcttctgtacaaaatccatactagatccccccccttctgtctatactagcagcaggagtaggtcaatgtttgtaaagtacaaataggagtgtaggtagtgatcagtagcaggtcagaagcaggattagtgctaccacaggcaggttcctaagcagataaagatgagtatcatagccatgtcctttgactccttgactagagcaattgtgagcttcagtgtttcgcctcattattgtcaagagaaaaaagtggccacctgttgcttatttgcattgtgttgcattctcctccaacaatcgatgtggtttttcatggcacaagtttctggcgtagaaaatttgaaaactgttccactaggactgcaaccatgtgactccatacatggggatcatctcaacatctgatgatgcttagaatcagaaatggaaaggaagagaggg

SEQ ID NO: 8612 - DNA, 4545 bp, Zea Mays
ctcccaaaacattacaacatggtgaaccaccactgccgctgccaccttttcctccagtaacaccaccaccagaattaccagtgccaactatatgcagtgatagtggatcagttccactggtacactcaaatccatcttcagattgtccatataaagaagcagcaatgctaccagaacacaaatctgctgttccacctactctcgaaggacatgaagcaagtgaagttcaattgctgcaatctgatattactgttgaattatcttcatcaaaacattctgagtatacagttcagcatgtgtttggaagcactgaagatacaatttcaaatatctcatcctctatacctgcagcacctccgtacccaatatttcatattgtaacatataattcctcaggttcaatatctgcagagcaagtaaattgcgagcaggctttagatcaaacagcattacccattcatttgaggccattcaaggtggagatatcacaaagtgagacaaccaatggactcttggcctctaaaaccgatgataaagaacatggaggccttccaatcccatcattgccacaaaatttgccccagcctagagaacatatgaaacctccatctccacctcctcctccaccacgaccaccaccttgtcatgcaacacttgtaccttctttgtgtttatcttcaaatccaccttctctaagagaactttatgaaaatcaaccttctacttcccctccaccttttcctagagaatcatttgttgctctacctccacctccagctccacaccctaatcatctatctcttcctggaaaacatattaagccatctccacctcctccacctcctccacctagagaaaatgaagcattttgtccttcgactctactttcacctacaagacatgttatacctcctccaccaactttacatcatattgcacccacatctccatgcttgtatcaaccttctttccctattgatatagaaatccaacctaccttttcagaggatattgtaatagtttcaccttcacattcaacggaggttaatatagttccattgccaccaccacctcctcgtagaatgagtgaaattttgtctcaacctcttgagggtggacaatcagcactgccagcttctcttcttgaagttactaaagaaatcccacctcctcctccccttccccctaaagtacaaaggagatctccattgtctactctttgtggtggaattgtgaatattccattacctccacctccacctccacctccacttcctggaggacatggagaagttccactatcaactcctaaaggatctggggccatcccacctccaccaccctttactaaagggctaggaggaattacattggcaattcaatttcatagtggagacttttcactcctcgaacctaccagagaatcagaaagtacttcacgcttgccaccaccaccactatcttccaatggacatataggagatccaccaccgccgccgccaccaccaccaactatgagtgtatttgtagaggcttccatcccgctgccacctcaaacaggatgcagagaggctccaccaccaccgccaccatctcctggaggacatgtagagtttccaccgccacctccaggggaatgtgcattagctctgccacatcccaaagcaagtgtaggggctccaccaccaccgcctcctcctggaggacatgtagagtctccaccaccaccgccacctccaggggaatgtgcattagctctgccacatcccaaagcaagtgtaggggctccaccaccaccgcctcctcctggaggacatgtagagtctccaccaccaccgccacctccaggggaatgtgcattagctctgccacatcccagagcaagtgtaggggctccaccaccaccgcctcctcctggaggacatgtagagtctccaccgccaccgccacctccaggggaatgtgcattagctctgccacatcccaaagcaagtgtaggggctccaccaccaccgcctcctcctggaggacatgtagagtctccaccgccacctccacctccaggggaatgtgcattagctctgccacatcccaaagcaagtgtaggggctccaccaccaccgccacctcccggaggatatgtaggagctccaccgccaccgccacctccaggggaatgtgcattagctctgccacatcccaaagcaagtgtaggggctccaccaccaccgccacctcccggaggatatgtaggagctccatcgccaccgccacctcctggaggatacataggagctccaccaccgcttccatatggaggaattggaggtgttcctcctcctccaccaccctttggaggactaggaggaactccaccgcctccacctccagcagggtttcgaggtggagctccagcacctcctcctcctcctggaggtcatggaggtccgccacctcctcctcctagaggacatggaggagtaggtggtccccctccccctcctggtgcaccatctcctccaatgcctcctggaatgcctggtggccctcctcctcctccaggtggaagaggaatgcctgctccacctggcggaagaggacatggccttgctcgctcgttaggcccgacattacaaagtgcagtacgaagatcatctctaaaaccactacattgggtcaaagtaacaagggcaatgcaaggaagcttgtgggcagagctacaaaaacaagtggacgctaatagtcgtgctgaattcgatgtaaatgaattggaatctctatttaccattgctccaaagacaaaagctggccccaaatcagaaggccgtggaaaatctcttgggacaaaatctgataaagttcaactgattgatctaagacgggccaataacacagagatcatgttgacaaaaatcaaaatgccgctccctgatatgatgagtgctgctctagctttggatgattcagttctggatgctgatcaaattgaaaatctcattaaattttgcccaacaaaagaggagatggaacttctaaagaactacagtggggacaaggaagctcttggaaagtgtgagcatttctttctagagttgatgaaggtgccgagggttgaatctaagcttcagatattcgctttcaagattcagtttcagtctcagagatgttagaaagaatttgcagactgtgtcatctgcttgtgaggagaagctctgagaagttgaaggttatcatgaagaacattttgttaattgggaatacattaaatcaaggcacaccaagaggccaagctgttggttttcgcttggacagcctcctaaaacttatagacacccgtgccactagtggcagaatgacattaatgcactttctatgtaagtcccttgcagagaagtcaccggaagtaatggattttcatgaggaacttgtcaacttggaagcttcttcaaagttgcaactgaaagcattggcggacgagcagctggcagtcgtaaaggggctggagaaagttgaacaggagctaactgcttcagaaagtgatggtccagtttctgatgttttccgtaagactttaaaggagttcattgattgttccagtgctgatgtacgctccctatcagcattctattctgaagtaggtaaaagcgcagatggacttgctgtttattttggagaagaccctgcaaaatttccttttgagcaagttgctacaacccttctgacctttgtggggttgttccggaaagctcatgacgagaacctcaagcaaattgaggctgaaaagaagaaagcccagaaagaagctgaaaaggaggcaaaccaggacaaaactcctgtaaaatcaaaaaatgggaatgcagataaatcgccaagatcaccatcaaccttctaatgatgtacggcagaacttcacatggtcatcatttcttcctcaacgaatgcccgcctttgctggcctgggcacaatttcgcaagcatgaacagtatacaaatccataaattccttgtggacaaatgcttacaagacaagatggttttggttcaacatctatgcatgtatctcatgacactgtacaaagctcacaccccacacaaaaaactaggttcttctgtacaaaatccatactagatccccccccttctgtctatactagcagcaggagtaggtcaatgtttgtaaagtacaaataggagtgtaggtagtgatcagtagcaggtcagaagcaggattagtgctaccacaggcaggttcctaagcagataaagatgagtatcatagccatgtcctttgactccttgactagagcaattgtgagcttcagtgtttcgcctcattattgtcaagagaaaaaagtggccacctgttgcttatttgcattgtgttgcattctcctccaacaatcgatgtggtttttcatggcacaagtttctggcgtagaaaatttgaaaactgttccactaggactgcaaccatgtgactccatacatggggatcatctcaacatctgatgatgcttagaatcagaaatggaaaggaagagaggg

SEQ ID NO: 8613 - DNA, 4555 bp, Zea Mays
ctcccaaaacattacaacatggtgaaccaccactgccgctgccaccttttcctccagtaacaccaccaccagaattaccagtgccaactatatgcagtgatagtggatcagttccactggtacactcaaatccatcttcagattgtccatataaagaagcagcaatgctaccagaacacaaatctgctgttccacctactctcgaaggacatgaagcaagtgaagttcaattgctgcaatctgatattactgttgaattatcttcatcaaaacattctgagtatacagttcagcatgtgtttggaagcactgaagatacaatttcaaatatctcatcctctatacctgcagcacctccgtacccaatatttcatattgtaacatataattcctcaggttcaatatctgcagagcaagtaaattgcgagcaggctttagatcaaacagcattacccattcatttgaggccattcaaggtggagatatcacaaagtgagacaaccaatggactcttggcctctaaaaccgatgataaagaacatggaggccttccaatcccatcattgccacaaaatttgccccagcctagagaacatatgaaacctccatctccacctcctcctccaccacgaccaccaccttgtcatgcaacacttgtaccttctttgtgtttatcttcaaatccaccttctctaagagaactttatgaaaatcaaccttctacttcccctccaccttttcctagagaatcatttgttgctctacctccacctccagctccacaccctaatcatctatctcttcctggaaaacatattaagccatctccacctcctccacctcctccacctagagaaaatgaagcattttgtccttcgactctactttcacctacaagacatgttatacctcctccaccaactttacatcatattgcacccacatctccatgcttgtatcaaccttctttccctattgatatagaaatccaacctaccttttcagaggatattgtaatagtttcaccttcacattcaacggaggttaatatagttccattgccaccaccacctcctcgtagaatgagtgaaattttgtctcaacctcttgagggtggacaatcagcactgccagcttctcttcttgaagttactaaagaaatcccacctcctcctccccttccccctaaagtacaaaggagatctccattgtctactctttgtggtggaattgtgaatattccattacctccacctccacctccacctccacttcctggaggacatggagaagttccactatcaactcctaaaggatctggggccatcccacctccaccaccctttactaaagggctaggaggaattacattggcaattcaatttcatagtggagacttttcactcctcgaacctaccagagaatcagaaagtacttcacgcttgccaccaccaccactatcttccaatggacatataggagatccaccaccgccgccgccaccaccaccaactatgagtgtatttgtagaggcttccatcccgctgccacctcaaacaggatgcagagaggctccaccaccaccgccaccatctcctggaggacatgtagagtttccaccgccacctccaggggaatgtgcattagctctgccacatcccaaagcaagtgtaggggctccaccaccaccgcctcctcctggaggacatgtagagtctccaccaccaccgccacctccaggggaatgtgcattagctctgccacatcccaaagcaagtgtaggggctccaccaccaccgcctcctcctggaggacatgtagagtctccaccaccaccgccacctccaggggaatgtgcattagctctgccacatcccagagcaagtgtaggggctccaccaccaccgcctcctcctggaggacatgtagagtctccaccgccaccgccacctccaggggaatgtgcattagctctgccacatcccaaagcaagtgtaggggctccaccaccaccgcctcctcctggaggacatgtagagtctccaccgccacctccacctccaggggaatgtgcattagctctgccacatcccaaagcaagtgtaggggctccaccaccaccgccacctcccggaggatatgtaggagctccaccgccaccgccacctccaggggaatgtgcattagctctgccacatcccaaagcaagtgtaggggctccaccaccaccgccacctcccggaggatatgtaggagctccatcgccaccgccacctcctggaggatacataggagctccaccaccgcttccatatggaggaattggaggtgttcctcctcctccaccaccctttggaggactaggaggaactccaccgcctccacctccagcagggtttcgaggtggagctccagcacctcctcctcctcctggaggtcatggaggtccgccacctcctcctcctagaggacatggaggagtaggtggtccccctccccctcctggtgcaccatctcctccaatgcctcctggaatgcctggtggccctcctcctcctccaggtggaagaggaatgcctgctccacctggcggaagaggacatggccttgctcgctcgttaggcccgacattacaaagtgcagtacgaagatcatctctaaaaccactacattgggtcaaagtaacaagggcaatgcaaggaagcttgtgggcagagctacaaaaacaagtggacgctaatagtcgtgctgaattcgatgtaaatgaattggaatctctatttaccattgctccaaagacaaaagctggccccaaatcagaaggccgtggaaaatctcttgggacaaaatctgataaagttcaactgattgatctaagacgggccaataacacagagatcatgttgacaaaaatcaaaatgccgctccctgatatgatgagtgctgctctagctttggatgattcagttctggatgctgatcaaattgaaaatctcattaaattttgcccaacaaaagaggagatggaacttctaaagaactacagtggggacaaggaagctcttggaaagtgtgagcatttctttctagagttgatgaaggtgccgagggttgaatctaagcttcagatattcgctttcaagattcagtttcagtctcagattagagatgttagaaagaatttgcagactgtgtcatctgcttgtgaggagctcagaagctctgagaagttgaaggttatcatgaagaacattttgttaattgggaatacattaaatcaaggcacaccaagaggccaagctgttggttttcgcttggacagcctcctaaaacttatagacacccgtgccactagtggcagaatgacattaatgcactttctatgtaagtcccttgcagagaagtcaccggaagtaatggattttcatgaggaacttgtcaacttggaagcttcttcaaagttgcaactgaaagcattggcggacgagcagctggcagtcgtaaaggggctggagaaagttgaacaggagctaactgcttcagaaagtgatggtccagtttctgatgttttccgtaagactttaaaggagttcattgattgttccagtgctgatgtacgctccctatcagcattctattctgaagtaggtaaaagcgcagatggacttgctgtttattttggagaagaccctgcaaaatttccttttgagcaagttgctacaacccttctgacctttgtggggttgttccggaaagctcatgacgagaacctcaagcaaattgaggctgaaaagaagaaagcccagaaagaagctgaaaaggaggcaaaccaggacaaaactcctgtaaaatcaaaaaatgggaatgcagataaatcgccaagatcaccatcaaccttctaatgatgtacggcagaacttcacatggtcatcatttcttcctcaacgaatgcccgcctttgctggcctgggcacaatttcgcaagcatgaacagtatacaaatccataaattccttgtggacaaatgcttacaagacaagatggttttggttcaacatctatgcatgtatctcatgacactgtacaaagctcacaccccacacaaaaaactaggttcttctgtacaaaatccatactagatccccccccttctgtctatactagcagcaggagtaggtcaatgtttgtaaagtacaaataggagtgtaggtagtgatcagtagcaggtcagaagcaggattagtgctaccacaggcaggttcctaagcagataaagatgagtatcatagccatgtcctttgactccttgactagagcaattgtgagcttcagtgtttcgcctcattattgtcaagagaaaaaagtggccacctgttgcttatttgcattgtgttgcattctcctccaacaatcgatgtggtttttcatggcacaagtttctggcgtagaaaatttgaaaactgttccactaggactgcaaccatgtgactccatacatggggatcatctcaacatctgatgatgcttagaatcagaaatggaaaggaagagaggg

SEQ ID NO: 8614 - DNA, 4537 bp, Zea Mays
ctcccaaaacattacaacatggtgaaccaccactgccgctgccaccttttcctccagtaacaccaccaccagaattaccagtgccaactatatgcagtgatagtggatcagttccactggtacactcaaatccatcttcagattgtccatataaagaagcagcaatgctaccagaacacaaatctgctgttccacctactctcgaaggacatgaagcaagtgaagttcaattgctgcaatctgatattactgttgaattatcttcatcaaaacattctgagtatacagttcagcatgtgtttggaagcactgaagatacaatttcaaatatctcatcctctatacctgcagcacctccgtacccaatatttcatattgtaacatataattcctcaggttcaatatctgcagagcaagtaaattgcgagcaggctttagatcaaacagcattacccattcatttgaggccattcaaggtggagatatcacaaagtgagacaaccaatggactcttggcctctaaaaccgatgataaagaacatggaggccttccaatcccatcattgccacaaaatttgccccagcctagagaacatatgaaacctccatctccacctcctcctccaccacgaccaccaccttgtcatgcaacacttgtaccttctttgtgtttatcttcaaatccaccttctctaagagaactttatgaaaatcaaccttctacttcccctccaccttttcctagagaatcatttgttgctctacctccacctccagctccacaccctaatcatctatctcttcctggaaaacatattaagccatctccacctcctccacctcctccacctagagaaaatgaagcattttgtccttcgactctactttcacctacaagacatgttatacctcctccaccaactttacatcatattgcacccacatctccatgcttgtatcaaccttctttccctattgatatagaaatccaacctaccttttcagaggatattgtaatagtttcaccttcacattcaacggaggttaatatagttccattgccaccaccacctcctcgtagaatgagtgaaattttgtctcaacctcttgagggtggacaatcagcactgccagcttctcttcttgaagttactaaagaaatcccacctcctcctccccttccccctaaagtacaaaggagatctccattgtctactctttgtggtggaattgtgaatattccattacctccacctccacctccacctccacttcctggaggacatggagaagttccactatcaactcctaaaggatctggggccatcccacctccaccaccctttactaaagggctaggaggaattacattggcaattcaatttcatagtggagacttttcactcctcgaacctaccagagaatcagaaagtacttcacgcttgccaccaccaccactatcttccaatggacatataggagatccaccaccgccgccgccaccaccaccaactatgagtgtatttgtagaggcttccatcccgctgccacctcaaacaggatgcagagaggctccaccaccaccgccaccatctcctggaggacatgtagagtttccaccgccacctccaggggaatgtgcattagctctgccacatcccaaagcaagtgtaggggctccaccaccaccgcctcctcctggaggacatgtagagtctccaccaccaccgccacctccaggggaatgtgcattagctctgccacatcccaaagcaagtgtaggggctccaccaccaccgcctcctcctggaggacatgtagagtctccaccaccaccgccacctccaggggaatgtgcattagctctgccacatcccagagcaagtgtaggggctccaccaccaccgcctcctcctggaggacatgtagagtctccaccgccaccgccacctccaggggaatgtgcattagctctgccacatcccaaagcaagtgtaggggctccaccaccaccgcctcctcctggaggacatgtagagtctccaccgccacctccacctccaggggaatgtgcattagctctgccacatcccaaagcaagtgtaggggctccaccaccaccgccacctcccggaggatatgtaggagctccaccgccaccgccacctccaggggaatgtgcattagctctgccacatcccaaagcaagtgtaggggctccaccaccaccgccacctcccggaggatatgtaggagctccatcgccaccgccacctcctggaggatacataggagctccaccaccgcttccatatggaggaattggaggtgttcctcctcctccaccaccctttggaggactaggaggaactccaccgcctccacctccagcagggtttcgaggtggagctccagcacctcctcctcctcctggaggtcatggaggtccgccacctcctcctcctagaggacatggaggagtaggtggtccccctccccctcctggtgcaccatctcctccaatgcctcctggaatgcctggtggccctcctcctcctccaggtggaagaggaatgcctgctccacctggcggaagaggacatggccttgctcgctcgttaggcccgacattacaaagtgcagtacgaagatcatctctaaaaccactacattgggtcaaagtaacaagggcaatgcaaggaagcttgtgggcagagctacaaaaacaagtggacgctaatagtcgtgctgaattcgatgtaaatgaattggaatctctatttaccattgctccaaagacaaaagctggccccaaatcagaaggccgtggaaaatctcttgggacaaaatctgataaagttcaactgattgatctaagacgggccaataacacagagatcatgttgacaaaaatcaaaatgccgctccctgatatgatgagtgctgctctagctttggatgattcagttctggatgctgatcaaattgaaaatctcattaaattttgcccaacaaaagaggagatggaacttctaaagtggggacaaggaagctcttggaaagtgtgagcatttctttctagagttgatgaaggtgccgagggttgaatctaagcttcagatattcgctttcaagattcagtttcagtctcagagatgttagaaagaatttgcagactgtgtcatctgcttgtgaggagaagctctgagaagttgaaggttatcatgaagaacattttgttaattgggaatacattaaatcaaggcacaccaagaggccaagctgttggttttcgcttggacagcctcctaaaacttatagacacccgtgccactagtggcagaatgacattaatgcactttctatgtaagtcccttgcagagaagtcaccggaagtaatggattttcatgaggaacttgtcaacttggaagcttcttcaaagttgcaactgaaagcattggcggacgagcagctggcagtcgtaaaggggctggagaaagttgaacaggagctaactgcttcagaaagtgatggtccagtttctgatgttttccgtaagactttaaaggagttcattgattgttccagtgctgatgtacgctccctatcagcattctattctgaagtaggtaaaagcgcagatggacttgctgtttattttggagaagaccctgcaaaatttccttttgagcaagttgctacaacccttctgacctttgtggggttgttccggaaagctcatgacgagaacctcaagcaaattgaggctgaaaagaagaaagcccagaaagaagctgaaaaggaggcaaaccaggacaaaactcctgtaaaatcaaaaaatgggaatgcagataaatcgccaagatcaccatcaaccttctaatgatgtacggcagaacttcacatggtcatcatttcttcctcaacgaatgcccgcctttgctggcctgggcacaatttcgcaagcatgaacagtatacaaatccataaattccttgtggacaaatgcttacaagacaagatggttttggttcaacatctatgcatgtatctcatgacactgtacaaagctcacaccccacacaaaaaactaggttcttctgtacaaaatccatactagatccccccccttctgtctatactagcagcaggagtaggtcaatgtttgtaaagtacaaataggagtgtaggtagtgatcagtagcaggtcagaagcaggattagtgctaccacaggcaggttcctaagcagataaagatgagtatcatagccatgtcctttgactccttgactagagcaattgtgagcttcagtgtttcgcctcattattgtcaagagaaaaaagtggccacctgttgcttatttgcattgtgttgcattctcctccaacaatcgatgtggtttttcatggcacaagtttctggcgtagaaaatttgaaaactgttccactaggactgcaaccatgtgactccatacatggggatcatctcaacatctgatgatgcttagaatcagaaatggaaaggaagagaggg

SEQ ID NO: 8615 - DNA, 4542 bp, Zea Mays
ctcccaaaacattacaacatggtgaaccaccactgccgctgccaccttttcctccagtaacaccaccaccagaattaccagtgccaactatatgcagtgatagtggatcagttccactggtacactcaaatccatcttcagattgtccatataaagaagcagcaatgctaccagaacacaaatctgctgttccacctactctcgaaggacatgaagcaagtgaagttcaattgctgcaatctgatattactgttgaattatcttcatcaaaacattctgagtatacagttcagcatgtgtttggaagcactgaagatacaatttcaaatatctcatcctctatacctgcagcacctccgtacccaatatttcatattgtaacatataattcctcaggttcaatatctgcagagcaagtaaattgcgagcaggctttagatcaaacagcattacccattcatttgaggccattcaaggtggagatatcacaaagtgagacaaccaatggactcttggcctctaaaaccgatgataaagaacatggaggccttccaatcccatcattgccacaaaatttgccccagcctagagaacatatgaaacctccatctccacctcctcctccaccacgaccaccaccttgtcatgcaacacttgtaccttctttgtgtttatcttcaaatccaccttctctaagagaactttatgaaaatcaaccttctacttcccctccaccttttcctagagaatcatttgttgctctacctccacctccagctccacaccctaatcatctatctcttcctggaaaacatattaagccatctccacctcctccacctcctccacctagagaaaatgaagcattttgtccttcgactctactttcacctacaagacatgttatacctcctccaccaactttacatcatattgcacccacatctccatgcttgtatcaaccttctttccctattgatatagaaatccaacctaccttttcagaggatattgtaatagtttcaccttcacattcaacggaggttaatatagttccattgccaccaccacctcctcgtagaatgagtgaaattttgtctcaacctcttgagggtggacaatcagcactgccagcttctcttcttgaagttactaaagaaatcccacctcctcctccccttccccctaaagtacaaaggagatctccattgtctactctttgtggtggaattgtgaatattccattacctccacctccacctccacctccacttcctggaggacatggagaagttccactatcaactcctaaaggatctggggccatcccacctccaccaccctttactaaagggctaggaggaattacattggcaattcaatttcatagtggagacttttcactcctcgaacctaccagagaatcagaaagtacttcacgcttgccaccaccaccactatcttccaatggacatataggagatccaccaccgccgccgccaccaccaccaactatgagtgtatttgtagaggcttccatcccgctgccacctcaaacaggatgcagagaggctccaccaccaccgccaccatctcctggaggacatgtagagtttccaccgccacctccaggggaatgtgcattagctctgccacatcccaaagcaagtgtaggggctccaccaccaccgcctcctcctggaggacatgtagagtctccaccaccaccgccacctccaggggaatgtgcattagctctgccacatcccaaagcaagtgtaggggctccaccaccaccgcctcctcctggaggacatgtagagtctccaccaccaccgccacctccaggggaatgtgcattagctctgccacatcccagagcaagtgtaggggctccaccaccaccgcctcctcctggaggacatgtagagtctccaccgccaccgccacctccaggggaatgtgcattagctctgccacatcccaaagcaagtgtaggggctccaccaccaccgcctcctcctggaggacatgtagagtctccaccgccacctccacctccaggggaatgtgcattagctctgccacatcccaaagcaagtgtaggggctccaccaccaccgccacctcccggaggatatgtaggagctccaccgccaccgccacctccaggggaatgtgcattagctctgccacatcccaaagcaagtgtaggggctccaccaccaccgccacctcccggaggatatgtaggagctccatcgccaccgccacctcctggaggatacataggagctccaccaccgcttccatatggaggaattggaggtgttcctcctcctccaccaccctttggaggactaggaggaactccaccgcctccacctccagcagggtttcgaggtggagctccagcacctcctcctcctcctggaggtcatggaggtccgccacctcctcctcctagaggacatggaggagtaggtggtccccctccccctcctggtgcaccatctcctccaatgcctcctggaatgcctggtggccctcctcctcctccaggtggaagaggaatgcctgctccacctggcggaagaggacatggccttgctcgctcgttaggcccgacattacaaagtgcagtacgaagatcatctctaaaaccactacattgggtcaaagtaacaagggcaatgcaaggaagcttgtgggcagagctacaaaaacaagtggacgctaatagtcgtgctgaattcgatgtaaatgaattggaatctctatttaccattgctccaaagacaaaagctggccccaaatcagaaggccgtggaaaatctcttgggacaaaatctgataaagttcaactgattgatctaagacgggccaataacacagagatcatgttgacaaaaatcaaaatgccgctccctgatatgatgagtgctgctctagctttggatgattcagttctggatgctgatcaaattgaaaatctcattaaattttgcccaacaaaagaggagatggaacttctaaagtggggacaaggaagctcttggaaagtgtgagcatttctttctagagttgatgaaggtgccgagggttgaatctaagcttcagatattcgctttcaagattcagtttcagtctcagattagagatgttagaaagaatttgcagactgtgtcatctgcttgtgaggagaagctctgagaagttgaaggttatcatgaagaacattttgttaattgggaatacattaaatcaaggcacaccaagaggccaagctgttggttttcgcttggacagcctcctaaaacttatagacacccgtgccactagtggcagaatgacattaatgcactttctatgtaagtcccttgcagagaagtcaccggaagtaatggattttcatgaggaacttgtcaacttggaagcttcttcaaagttgcaactgaaagcattggcggacgagcagctggcagtcgtaaaggggctggagaaagttgaacaggagctaactgcttcagaaagtgatggtccagtttctgatgttttccgtaagactttaaaggagttcattgattgttccagtgctgatgtacgctccctatcagcattctattctgaagtaggtaaaagcgcagatggacttgctgtttattttggagaagaccctgcaaaatttccttttgagcaagttgctacaacccttctgacctttgtggggttgttccggaaagctcatgacgagaacctcaagcaaattgaggctgaaaagaagaaagcccagaaagaagctgaaaaggaggcaaaccaggacaaaactcctgtaaaatcaaaaaatgggaatgcagataaatcgccaagatcaccatcaaccttctaatgatgtacggcagaacttcacatggtcatcatttcttcctcaacgaatgcccgcctttgctggcctgggcacaatttcgcaagcatgaacagtatacaaatccataaattccttgtggacaaatgcttacaagacaagatggttttggttcaacatctatgcatgtatctcatgacactgtacaaagctcacaccccacacaaaaaactaggttcttctgtacaaaatccatactagatccccccccttctgtctatactagcagcaggagtaggtcaatgtttgtaaagtacaaataggagtgtaggtagtgatcagtagcaggtcagaagcaggattagtgctaccacaggcaggttcctaagcagataaagatgagtatcatagccatgtcctttgactccttgactagagcaattgtgagcttcagtgtttcgcctcattattgtcaagagaaaaaagtggccacctgttgcttatttgcattgtgttgcattctcctccaacaatcgatgtggtttttcatggcacaagtttctggcgtagaaaatttgaaaactgttccactaggactgcaaccatgtgactccatacatggggatcatctcaacatctgatgatgcttagaatcagaaatggaaaggaagagaggg

SEQ ID NO: 8616 - DNA, 4550 bp, Zea Mays
ctcccaaaacattacaacatggtgaaccaccactgccgctgccaccttttcctccagtaacaccaccaccagaattaccagtgccaactatatgcagtgatagtggatcagttccactggtacactcaaatccatcttcagattgtccatataaagaagcagcaatgctaccagaacacaaatctgctgttccacctactctcgaaggacatgaagcaagtgaagttcaattgctgcaatctgatattactgttgaattatcttcatcaaaacattctgagtatacagttcagcatgtgtttggaagcactgaagatacaatttcaaatatctcatcctctatacctgcagcacctccgtacccaatatttcatattgtaacatataattcctcaggttcaatatctgcagagcaagtaaattgcgagcaggctttagatcaaacagcattacccattcatttgaggccattcaaggtggagatatcacaaagtgagacaaccaatggactcttggcctctaaaaccgatgataaagaacatggaggccttccaatcccatcattgccacaaaatttgccccagcctagagaacatatgaaacctccatctccacctcctcctccaccacgaccaccaccttgtcatgcaacacttgtaccttctttgtgtttatcttcaaatccaccttctctaagagaactttatgaaaatcaaccttctacttcccctccaccttttcctagagaatcatttgttgctctacctccacctccagctccacaccctaatcatctatctcttcctggaaaacatattaagccatctccacctcctccacctcctccacctagagaaaatgaagcattttgtccttcgactctactttcacctacaagacatgttatacctcctccaccaactttacatcatattgcacccacatctccatgcttgtatcaaccttctttccctattgatatagaaatccaacctaccttttcagaggatattgtaatagtttcaccttcacattcaacggaggttaatatagttccattgccaccaccacctcctcgtagaatgagtgaaattttgtctcaacctcttgagggtggacaatcagcactgccagcttctcttcttgaagttactaaagaaatcccacctcctcctccccttccccctaaagtacaaaggagatctccattgtctactctttgtggtggaattgtgaatattccattacctccacctccacctccacctccacttcctggaggacatggagaagttccactatcaactcctaaaggatctggggccatcccacctccaccaccctttactaaagggctaggaggaattacattggcaattcaatttcatagtggagacttttcactcctcgaacctaccagagaatcagaaagtacttcacgcttgccaccaccaccactatcttccaatggacatataggagatccaccaccgccgccgccaccaccaccaactatgagtgtatttgtagaggcttccatcccgctgccacctcaaacaggatgcagagaggctccaccaccaccgccaccatctcctggaggacatgtagagtttccaccgccacctccaggggaatgtgcattagctctgccacatcccaaagcaagtgtaggggctccaccaccaccgcctcctcctggaggacatgtagagtctccaccaccaccgccacctccaggggaatgtgcattagctctgccacatcccaaagcaagtgtaggggctccaccaccaccgcctcctcctggaggacatgtagagtctccaccaccaccgccacctccaggggaatgtgcattagctctgccacatcccagagcaagtgtaggggctccaccaccaccgcctcctcctggaggacatgtagagtctccaccgccaccgccacctccaggggaatgtgcattagctctgccacatcccaaagcaagtgtaggggctccaccaccaccgcctcctcctggaggacatgtagagtctccaccgccacctccacctccaggggaatgtgcattagctctgccacatcccaaagcaagtgtaggggctccaccaccaccgccacctcccggaggatatgtaggagctccaccgccaccgccacctccaggggaatgtgcattagctctgccacatcccaaagcaagtgtaggggctccaccaccaccgccacctcccggaggatatgtaggagctccatcgccaccgccacctcctggaggatacataggagctccaccaccgcttccatatggaggaattggaggtgttcctcctcctccaccaccctttggaggactaggaggaactccaccgcctccacctccagcagggtttcgaggtggagctccagcacctcctcctcctcctggaggtcatggaggtccgccacctcctcctcctagaggacatggaggagtaggtggtccccctccccctcctggtgcaccatctcctccaatgcctcctggaatgcctggtggccctcctcctcctccaggtggaagaggaatgcctgctccacctggcggaagaggacatggccttgctcgctcgttaggcccgacattacaaagtgcagtacgaagatcatctctaaaaccactacattgggtcaaagtaacaagggcaatgcaaggaagcttgtgggcagagctacaaaaacaagtggacgctaatagtcgtgctgaattcgatgtaaatgaattggaatctctatttaccattgctccaaagacaaaagctggccccaaatcagaaggccgtggaaaatctcttgggacaaaatctgataaagttcaactgattgatctaagacgggccaataacacagagatcatgttgacaaaaatcaaaatgccgctccctgatatgatgagtgctgctctagctttggatgattcagttctggatgctgatcaaattgaaaatctcattaaattttgcccaacaaaagaggagatggaacttctaaagaactacagtggggacaaggaagctcttggaaagtgtgagcatttctttctagagttgatgaaggtgccgagggttgaatctaagcttcagatattcgctttcaagattcagtttcagtctcagattagagatgttagaaagaatttgcagactgtgtcatctgcttgtgaggagaagctctgagaagttgaaggttatcatgaagaacattttgttaattgggaatacattaaatcaaggcacaccaagaggccaagctgttggttttcgcttggacagcctcctaaaacttatagacacccgtgccactagtggcagaatgacattaatgcactttctatgtaagtcccttgcagagaagtcaccggaagtaatggattttcatgaggaacttgtcaacttggaagcttcttcaaagttgcaactgaaagcattggcggacgagcagctggcagtcgtaaaggggctggagaaagttgaacaggagctaactgcttcagaaagtgatggtccagtttctgatgttttccgtaagactttaaaggagttcattgattgttccagtgctgatgtacgctccctatcagcattctattctgaagtaggtaaaagcgcagatggacttgctgtttattttggagaagaccctgcaaaatttccttttgagcaagttgctacaacccttctgacctttgtggggttgttccggaaagctcatgacgagaacctcaagcaaattgaggctgaaaagaagaaagcccagaaagaagctgaaaaggaggcaaaccaggacaaaactcctgtaaaatcaaaaaatgggaatgcagataaatcgccaagatcaccatcaaccttctaatgatgtacggcagaacttcacatggtcatcatttcttcctcaacgaatgcccgcctttgctggcctgggcacaatttcgcaagcatgaacagtatacaaatccataaattccttgtggacaaatgcttacaagacaagatggttttggttcaacatctatgcatgtatctcatgacactgtacaaagctcacaccccacacaaaaaactaggttcttctgtacaaaatccatactagatccccccccttctgtctatactagcagcaggagtaggtcaatgtttgtaaagtacaaataggagtgtaggtagtgatcagtagcaggtcagaagcaggattagtgctaccacaggcaggttcctaagcagataaagatgagtatcatagccatgtcctttgactccttgactagagcaattgtgagcttcagtgtttcgcctcattattgtcaagagaaaaaagtggccacctgttgcttatttgcattgtgttgcattctcctccaacaatcgatgtggtttttcatggcacaagtttctggcgtagaaaatttgaaaactgttccactaggactgcaaccatgtgactccatacatggggatcatctcaacatctgatgatgcttagaatcagaaatggaaaggaagagaggg

SEQ ID NO: 8617 - DNA, 4547 bp, Zea Mays
ctcccaaaacattacaacatggtgaaccaccactgccgctgccaccttttcctccagtaacaccaccaccagaattaccagtgccaactatatgcagtgatagtggatcagttccactggtacactcaaatccatcttcagattgtccatataaagaagcagcaatgctaccagaacacaaatctgctgttccacctactctcgaaggacatgaagcaagtgaagttcaattgctgcaatctgatattactgttgaattatcttcatcaaaacattctgagtatacagttcagcatgtgtttggaagcactgaagatacaatttcaaatatctcatcctctatacctgcagcacctccgtacccaatatttcatattgtaacatataattcctcaggttcaatatctgcagagcaagtaaattgcgagcaggctttagatcaaacagcattacccattcatttgaggccattcaaggtggagatatcacaaagtgagacaaccaatggactcttggcctctaaaaccgatgataaagaacatggaggccttccaatcccatcattgccacaaaatttgccccagcctagagaacatatgaaacctccatctccacctcctcctccaccacgaccaccaccttgtcatgcaacacttgtaccttctttgtgtttatcttcaaatccaccttctctaagagaactttatgaaaatcaaccttctacttcccctccaccttttcctagagaatcatttgttgctctacctccacctccagctccacaccctaatcatctatctcttcctggaaaacatattaagccatctccacctcctccacctcctccacctagagaaaatgaagcattttgtccttcgactctactttcacctacaagacatgttatacctcctccaccaactttacatcatattgcacccacatctccatgcttgtatcaaccttctttccctattgatatagaaatccaacctaccttttcagaggatattgtaatagtttcaccttcacattcaacggaggttaatatagttccattgccaccaccacctcctcgtagaatgagtgaaattttgtctcaacctcttgagggtggacaatcagcactgccagcttctcttcttgaagttactaaagaaatcccacctcctcctccccttccccctaaagtacaaaggagatctccattgtctactctttgtggtggaattgtgaatattccattacctccacctccacctccacctccacttcctggaggacatggagaagttccactatcaactcctaaaggatctggggccatcccacctccaccaccctttactaaagggctaggaggaattacattggcaattcaatttcatagtggagacttttcactcctcgaacctaccagagaatcagaaagtacttcacgcttgccaccaccaccactatcttccaatggacatataggagatccaccaccgccgccgccaccaccaccaactatgagtgtatttgtagaggcttccatcccgctgccacctcaaacaggatgcagagaggctccaccaccaccgccaccatctcctggaggacatgtagagtttccaccgccacctccaggggaatgtgcattagctctgccacatcccaaagcaagtgtaggggctccaccaccaccgcctcctcctggaggacatgtagagtctccaccaccaccgccacctccaggggaatgtgcattagctctgccacatcccaaagcaagtgtaggggctccaccaccaccgcctcctcctggaggacatgtagagtctccaccaccaccgccacctccaggggaatgtgcattagctctgccacatcccagagcaagtgtaggggctccaccaccaccgcctcctcctggaggacatgtagagtctccaccgccaccgccacctccaggggaatgtgcattagctctgccacatcccaaagcaagtgtaggggctccaccaccaccgcctcctcctggaggacatgtagagtctccaccgccacctccacctccaggggaatgtgcattagctctgccacatcccaaagcaagtgtaggggctccaccaccaccgccacctcccggaggatatgtaggagctccaccgccaccgccacctccaggggaatgtgcattagctctgccacatcccaaagcaagtgtaggggctccaccaccaccgccacctcccggaggatatgtaggagctccatcgccaccgccacctcctggaggatacataggagctccaccaccgcttccatatggaggaattggaggtgttcctcctcctccaccaccctttggaggactaggaggaactccaccgcctccacctccagcagggtttcgaggtggagctccagcacctcctcctcctcctggaggtcatggaggtccgccacctcctcctcctagaggacatggaggagtaggtggtccccctccccctcctggtgcaccatctcctccaatgcctcctggaatgcctggtggccctcctcctcctccaggtggaagaggaatgcctgctccacctggcggaagaggacatggccttgctcgctcgttaggcccgacattacaaagtgcagtacgaagatcatctctaaaaccactacattgggtcaaagtaacaagggcaatgcaaggaagcttgtgggcagagctacaaaaacaagtggacgctaatagtcgtgctgaattcgatgtaaatgaattggaatctctatttaccattgctccaaagacaaaagctggccccaaatcagaaggccgtggaaaatctcttgggacaaaatctgataaagttcaactgattgatctaagacgggccaataacacagagatcatgttgacaaaaatcaaaatgccgctccctgatatgatgagtgctgctctagctttggatgattcagttctggatgctgatcaaattgaaaatctcattaaattttgcccaacaaaagaggagatggaacttctaaagtggggacaaggaagctcttggaaagtgtgagcatttctttctagagttgatgaaggtgccgagggttgaatctaagcttcagatattcgctttcaagattcagtttcagtctcagattagagatgttagaaagaatttgcagactgtgtcatctgcttgtgaggagctcagaagctctgagaagttgaaggttatcatgaagaacattttgttaattgggaatacattaaatcaaggcacaccaagaggccaagctgttggttttcgcttggacagcctcctaaaacttatagacacccgtgccactagtggcagaatgacattaatgcactttctatgtaagtcccttgcagagaagtcaccggaagtaatggattttcatgaggaacttgtcaacttggaagcttcttcaaagttgcaactgaaagcattggcggacgagcagctggcagtcgtaaaggggctggagaaagttgaacaggagctaactgcttcagaaagtgatggtccagtttctgatgttttccgtaagactttaaaggagttcattgattgttccagtgctgatgtacgctccctatcagcattctattctgaagtaggtaaaagcgcagatggacttgctgtttattttggagaagaccctgcaaaatttccttttgagcaagttgctacaacccttctgacctttgtggggttgttccggaaagctcatgacgagaacctcaagcaaattgaggctgaaaagaagaaagcccagaaagaagctgaaaaggaggcaaaccaggacaaaactcctgtaaaatcaaaaaatgggaatgcagataaatcgccaagatcaccatcaaccttctaatgatgtacggcagaacttcacatggtcatcatttcttcctcaacgaatgcccgcctttgctggcctgggcacaatttcgcaagcatgaacagtatacaaatccataaattccttgtggacaaatgcttacaagacaagatggttttggttcaacatctatgcatgtatctcatgacactgtacaaagctcacaccccacacaaaaaactaggttcttctgtacaaaatccatactagatccccccccttctgtctatactagcagcaggagtaggtcaatgtttgtaaagtacaaataggagtgtaggtagtgatcagtagcaggtcagaagcaggattagtgctaccacaggcaggttcctaagcagataaagatgagtatcatagccatgtcctttgactccttgactagagcaattgtgagcttcagtgtttcgcctcattattgtcaagagaaaaaagtggccacctgttgcttatttgcattgtgttgcattctcctccaacaatcgatgtggtttttcatggcacaagtttctggcgtagaaaatttgaaaactgttccactaggactgcaaccatgtgactccatacatggggatcatctcaacatctgatgatgcttagaatcagaaatggaaaggaagagaggg

SEQ ID NO: 8618 - DNA, 3516 bp, Zea Mays
cggaagcgcaaggggatggcgctgttccggaggctcttctaccggaagccgccggatcggctcctcgagatcgccgaccgcgtctacgtattcgattgttgcttctcgacagaaaccatggaccaatacagatacaagaattatctggacagcattattttgcagctccgtgaacagtttgcagattcttcattgatggtactcaactttagagatgaaggaaaaagtcttatttcaggcattttctccaagtacaatattacagtcaaagactacccttgcaagtatctaggatgcccattacttcctttggatatcattctccacttcctggggctgagtgaaaggtggcttatgcttgaagggcagcaaaatattctgctaatgcactgtgagaaagatggatggccagtgttggcttttatgcttgcaggtcttcttctgtacaggaaacaatataatggggagcaaagaactctagatatggtgtataagcaagcccctaaggagcttcttcagatgctaaccacattgaatccacaaccgtcacatcttcgatatcttgggtacatatgcagaatggatgatgacatagggtggcctacacaacctattcctttcaccttggattgtgtaattcttagagaaattccaaatgttgatggagtcggtggctgtcggccaattgttcgagtatatgggcaggatattccaacaactgacagaaatcatggtgttgtttcaccaccatcaaaggccaagaaaaatattaggcgttacagacaggcagataatgcgccactgaagttaaatgttggatccttcgtccaaggtgatgttgtccttgaatgtctgcatgtagatgatggccgaggaaatgaaaggttaatgtttagggtgatgttcaatacctttttcatccagtctcacattttactgttgaactttgaggacatcgatgtcccttgggatgccgatcaccagttcacaaagaacttcaaagcagagcatctacagattatacttcaactccaagcgccgaacgttggagaaactcaccgttttccaactttgagccgaatattggcattgatggatcacgagacaataaagtcgataacttgggcttgttagaaacagtaaacgatggaaagacatgcacatccactgaagccaatactatgctcaacaatgaaactgcagttgttaagtcaactttggcagctacaatagatggagacgcagatagtggtatttcaaagtctacttataaagtggatgattacatgtttgaaaagggtagttccaagcaggatacaaggatgggttccaatcaagatttgggtcagattgataatgtgttggttaaggaggtgattatattagaaactaatagtcctaaggacatacagatgatcaaagaggtcatcatatctgaagttacaactctcaaacaggtagtagacgggagtatgatggaaactgaattagatgagacagtccatgattcagaaagcattgcattggcagaaactgaggatacaaaacaacttaatattttttgcaaacaggatgagggacacagtgtgcaagatgaatatgctgcttatgacaatggcatagtgattgaacaagaagaaagcagcaacgaagaaaaccttaccatcagagacacaaattcagaagtgactgagcccacagatgagaataatggtcgtgctgaattcgatgtaaatgaattggaatctctatttaccattgctccaaagacaaaagctggccccaaatcagaaggccgtggaaaatctcttgggacaaaatctgataaagttcaactgattgatctaagacgggccaataacacagagatcatgttgacaaaaatcaaaatgccgctccctgatatgatgagtgctgctctagctttggatgattcagttctggatgctgatcaaattgaaaatctcattaaattttgcccaacaaaagaggagatggaacttctaaagaactacagtggggacaaggaagctcttggaaagtgtgagcatttctttctagagttgatgaaggtgccgagggttgaatctaagcttcagatattcgctttcaagattcagtttcagtctcagattagagatgttagaaagaatttgcagactgtgtcatctgcttgtgaggagctcagaagctctgagaagttgaaggttatcatgaagaacattttgttaattgggaatacattaaatcaaggcacaccaagaggccaagctgttggttttcgcttggacagcctcctaaaacttatagacacccgtgccactagtggcagaatgacattaatgcactttctatgtaagagaagtcaccggaagtaatggattttcatgaggaacttgtcaacttggaagcttcttcaaagttgcaactgaaagcattggcggacgagcagctggcagtcgtaaaggggctggagaaagttgaacaggagctaactgcttcagaaagtgatggtccagtttctgatgttttccgtaagactttaaaggagttcattgattgttccagtgctgatgtacgctccctatcagcattctattctgaagtaggtaaaagcgcagatggacttgctgtttattttggagaagaccctgcaaaatttccttttgagcaagttgctacaacccttctgacctttgtggggttgttccggaaagctcatgacgagaacctcaagcaaattgaggctgaaaagaagaaagcccagaaagaagctgaaaaggaggcaaaccaggacaaaactcctgtaaaatcaaaaaatgggaatgcagataaatcgccaagatcaccatcaaccttctaatgatgtacggcagaacttcacatggtcatcatttcttcctcaacgaatgcccgcctttgctggcctgggcacaatttcgcaagcatgaacagtatacaaatccataaattccttgtggacaaatgcttacaagacaagatggttttggttcaacatctatgcatgtatctcatgacactgtacaaagctcacaccccacacaaaaaactaggttcttctgtacaaaatccatactagatccccccccttctgtctatactagcagcaggagtaggtcaatgtttgtaaagtacaaataggagtgtaggtagtgatcagtagcaggtcagaagcaggattagtgctaccacaggcaggttcctaagcagataaagatgagtatcatagccatgtcctttgactccttgactagagcaattgtgagcttcagtgtttcgcctcattattgtcaagagaaaaaagtggccacctgttgcttatttgcattgtgttgcattctcctccaacaatcgatgtggtttttcatggcacaagtttctggcgtagaaaatttgaaaactgttccactaggactgcaaccatgtgactccatacatggggatcatctcaacatctgatgatgcttagaatcagaaatggaaaggaagagaggg

SEQ ID NO: 8619 - DNA, 2361 bp, Zea Mays
agtggacccgggggcaggccgccggagacggcggcgacggcgacggcggacggaagcgcaaggggatggcgctgttccggaggctcttctaccggaagccgccggatcggctcctcgagatcgccgaccgcgtctacgtattcgattgttgcttctcgacagaaaccatggaccaatacagatacaagaattatctggacagcattattttgcagctccgtgaacagtttgcagattcttcattgatggtactcaactttagagatgaaggaaaaagtcttatttcaggcattttctccaagtacaatattacagtcaaagactacccttgcaagtatctaggatgcccattacttcctttggatatcattctccacttcctggggctgagtgaaaggtggcttatgcttgaagggcagcaaaatattctgctaatgcactgtgagaaagatggatggccagtgttggcttttatgcttgcaggtcttcttctgtacaggaaacaatataatggggagcaaagaactctagatatggtgtataagcaagcccctaaggagcttcttcagatgctaaccacattgaatccacaaccgtcacatcttcgatatcttgggtacatatgcagaatggatgatgacatagggtggcctacacaacctattcctttcaccttggattgtgtaattcttagagaaattccaaatgttgatggagtcggtggctgtcggccaattgttcgagtatatgggcaggatattccaacaactgacagaaatcatggtgttgtttcaccaccatcaaaggccaagaaaaatattaggcgttacagacaggcagataatgcgccactgaagttaaatgttggatccttcgtccaaggtgatgttgtccttgaatgtctgcatgtagatgatggccgaggaaatgaaaggttaatgtttagggtgatgttcaatacctttttcatccagtctcacattttactgttgaactttgaggacatcgatgtcccttgggatgccgatcaccagttcacaaagaacttcaaagcagaggtactcttttcagagttggatgctgagtctgatgcatccactgaagtagcacctgattatgattatgatgatgatgatgatatggatgttgcctctgctgatgagttctttgaagcagaagaactcttcagtaatgctgattcccaagaaggaaataaggatgctgatactctttctatagcatctacagattatacttcaactccaagcgccgaacgttggagaaactcaccgttttccaactttgagccgaatattggcattgatggatcacgagacaataaagtcgataacttgggcttgttagaaacagtaaacgatggaaagacatgcacatccactgaagccaatactatgctcaacaatgaaactgcagttgttaagtcaactttggcagctacaatagatggagacgcagatagtggtatttcaaagtctacttataaagtggatgattacatgtttgaaaagggtagttccaagcaggatacaaggatgggttccaatcaagatttgggtcagattgataatgtgttggttaaggaggtgattatattagaaactaatagtcctaaggacatacagatgatcaaagaggtcatcatatctgaagttacaactctcaaacaggtagtagacgggagtatgatggaaactgaattagatgagacagtccatgattcagaaagcattgcattggcagaaactgaggatacaaaacaacttaatattttttgcaaacaggatgagggacacagtgtgcaagatgaatatgctgcttatgacaatggcatagtgattgaacaagaagaaagcagcaacgaagaaaaccttaccatcagagacacaaattcagaagaataccatatcttcactgttcaagcacttcttcggggctaagttctgccaagaaaaatatcgatcagcttcatgcttgcagtagtaatggcactgcagaacaaggggcgggaattgactccaggagccactcttctaatatgtcttgtgtgaacattctaccagaagaatctagcttgacaataaaccatgcttcaacttccatgaatgcaaatacagatacaacagattcatctcgattggtgctaaagaaaaaaccttttcaaccattgttgacatctagtctttttgctccatcatctcccaggcgcaatctgcttcgtggtgcatccacagatttgtcgtttttttctccatcacaaacagaatctaaacagaactctgttacttctacaagtggaagggatgatccagctatatcttctgtgcttccaccatctcatct

SEQ ID NO: 8620 - DNA, 2888 bp, Zea Mays
ccttcgttgctatctttaggctagccgctgctcggattgcttgttgtggacgcagggggaggagactgatcgcccggggaggcagaacagaacaagacagaacggaggaggaggaggaggaggagagagaggagaccgaccctccccctccctcccctgtgttcttgctcctcctctgtttccagtcccccgccgcctccgtggagccataagcaggtgcttggcccgccggtcggcggcgagggcggcagacatgggttgcgcggtgtcgaggcccggggtggtgtcctcgccgtcgtacgaggacgacgtgtcgtcgtgctcctacaatatgtcccgcagcgcgtcggcgtcggcggacctgggctcggcgtcggcgtcggcgtcggcgatgtcgatatggagccggccggtgcggctggaggcgttcaaagacgacgacgaggacgagcggcggcggcggcggtcggggagggaggctgcggtagcggcggcagcgcggctggggagcgtccggccgtgcgtggagggcgagcaggcggcagccgggtggccggcgtggctgagcgcggtggccgccgaggccgtgcacgggtgggtgccgctccgcgccgacggcttcgagaagctggagaaggtggggcagggcacgtacagcagcgtgttccgcgcgcgggagctggccacgggccgcctggtggcgctcaagaaggtgcgcttcgacagcgtggagcccgagagcgtgcggttcatggcgcgggagatcctcatcctccgccgcctccaaggccaccccaacgtcgtcggactcgagggcctcgtcacctcccgctcctccccctccatctacctcgtcttcgagtacctcgagcatgacctcgccggactcagctcctcccccgacatcaccttcaccgagtcgcagatcaagtgctacatgcggcagctgctcgaggggctggcgcactgccacgcgcgcggggtgatgcaccgggacatcaagtgcgccaacctgctggtgagcgacggcggcgagctcaaggtggcggacttcgggctggcgaacctcttcgcgccggcgccggcggcgccgctgaccagccgggtggtcacgctctggtaccgcccgccggagctgctcctgggcgccacggcgtacgagccctccgtcgacctctggagcgccggctgcgtcttcgccgagatgcacgcgcgccgccccgtcctgcagggccgcaccgaggtcgagcagatccacaagatcttcaagctctgcggctcgccgcccgatcacttctggcgccgctcgggcctgtcccacgccgccgtcttccgcccgcagcaaccttacccgagccgactccgggacaccttcgccgcgtccatgcccgaccacgcgttccgactcctcgccatgctcctctccctcgaccctgccgcccgcggcaccgccgccgccgccctcgacgccgagtacttcacgacggcaccgtacgcatgcgaccccgggagcctgcccaagtacgcgcccaacaaggagatggacgccaagttccgggaagaatctagaaggaggagcaacctccggagccaaggcggcgagggggcgaagcggctgtcctgggggcacaagagcatgcagctgcaggacacgaaccagagccacgtgcacgccgaggaatcgctgcccgttgtggccaaaagcggcgcggcggtggcaaggaacgacggcgactcgcggctgctcgtcgacctggagcccgtgccggcgatcagattcagcaagcggcacggcgacgacggcgccggcgaccacgcgccgccgtacgccaagaccttgtccagcagcttcaaggagccggcccgtgtcgcggaccgccgccctctctccggccccgggcagctcgccgcgtccaccggtttcgcctgggccaagaagccccggtccgtcgccaggtcttcgacggcggcagccgccgtcacgaagcggagctactccaagggttcagggaccaagaacaacagcagcggaggaggtgacagagcaagaaccacctccgccgccaccgccactgaagcggcggcaccatacgaggtggagaagcaggaggtgatcaagcagtgggcacaggccgctgacgcattcagcgcctctgaagcttacagcagcaggttcaggcagacacttgctgccaggcagctcaagaatggaaagatgtacaaggggaaggtgagcagggtggaccactcagggccgctgctgtcacagccccggcgcatcgacgaattcctgctgcacagccacgagcagcaggcagcaagaaggagcagcacagatggcagaggcacggcatgatcacattgaaacggcgtgatcaaaacaggagatgctgcgagcagatgaaagggatggaacgagttgggccatgagctctcctgatgagcaggtgtttttttcagggctggacagacagacagccccatgccatcagggaaagctgagatggaagtggaagctgttgtagtggggttttcaggtttcatgcaaccagattttgctctacctgaactagacaacaatgttgttgctgctgctgttgtacaagatctttttttgtgctcgcttgtgatgataatatgcatggcaagctccaaaatgtggtttccaatttatgtatagcaaggggttacaaaagttggtaatcataatgcttgtgccctgtagtatcatactattaccacgccaacttaatttcttgttttacccctgctggcgcctccaaaaccaaaacccagaatcgtattagcacatttgaaagtgtaggcttaccgcactttgtccacgtgaatcggttaacgccaaactgcagcttgctaatggtttcttt

SEQ ID NO: 8621 - DNA, 2885 bp, Zea Mays
cgtttctttatgtgcatttttgtgatgaggtcacttctaagtgcattttcctttgctgcaaaaggtgctgaataaactgtctgcacaagtcagtggtccttgaactacagggacctgatctgcagattcttccattgggtactgtttcatatttgaccactttgtaaattatatgggaataaaagttgagggtgagacctatattccaggatactttgacatggaagattctagtgtaaattataatggcaatgtgctgccgtatcacaaggagaacaaaccaagtgtgtttcttactgagaagttcacaataatagcttcaaatggacgagtacattacgacaaggaaatgataaagcggacaatgcttgtacatgaagctacattccggaaacaggtatatgaacttcaccagctttacaaaattcagaaggaactaatggcacggttccaaatagaagagatcaatggttgtcctagttatgctggtttattgcagccaagatcctctccatcacaggcactgcttgatgatgttaaaggaatgcgaaaaactgtgaatcctatttctggacatgatcctaagcagtcatgcatcgatttgataaatgaaagtagttcacaatatagtgtgagtggaactcctttgaggcataacaatgttaggcctcaaaagaaaatgattgacctgcaggttccagcagatgtatacactgacaatgatgatgatgtggagatattagaagtgaggccttccaaaagattgcctggggctaatgggtctgttcttttaggaaatgtcaacctcagccttcaaaatagtgagggctattcacatatgaagagttggagtactgatatacaagcacatcacagctcaactgcgcatatactgaataaaccagttgaagattcatctagtatgaatagatctaattttcttggtgtgggaatatctgctctgcagaaccatcattatgcatcacagggagtaaacttgaaccccataagcttggaagcaaaactaaaggaacaatgtgctggtaaagcatctggttcaaggttctttggaacaaatgaggaaataaggaacaacaatccatttcaacacagaaaggatgactccaactctagcatggcattgtacaaacaaaattgcattggttcctcaatggggaattacgctcccaatgctagcaccttcaatcactccattctttctccgcttggcttcaaccatgcactgaatcttccatggcaaagcaacaacacgagctacttgactaagagtcattgtggtgctgctgaaacattcattcctaaggatgccctttccaatggtatctcagtggattctactccaaaggcgccctatcatcattcactaaagattcacggaggtgccggatatcaaaaacctcctgcactacatgataacctgaaggatatagatctgaatgacacaccagttgatgtcgctgccacttgggaacagggaagcgagaaatcagtggttgatatctcttggctcagcaagaaaccagtaagcctgatggaatcacaagtcccatcaagttatgcaaaggaccactcccagattttgccaagccccacattatattcagaaagtagaactcccacaagagttcctgccttccctttcagtgttggtgctgaaaaagattctcggtgctcacccactctactatatgacctaaacaatggaccatcgattaagcatgaaactgacatggaaattcagtccctgtgcaaggaaagtgacacagatactaggaatctcattgacctgaatgaaaccttgccaataatcgacgatccagaaatagagtctcatgaatcaggtgaaattgttcctcatgaacccaatggcccttcacaggattctatcgctatagcagcagcagcagagacgttggtagaaatgtggaataatagtgatcggcctgcatatcaaccggacattttgcattggtttgctgacctagctatatccaaagataacacattgttggacaaggacagcgatgacgactttgaggctgcaacactgaagctgcgagaaacaaagagcaacgagtaccattcaacaccaagaaccacccaggaggataacactaactttggtcattgctctgcagcttcacttgtctcaaaacctcagagaggtagagggcgaggacgccgacagaggaaacactttcagagggacatcttgccaggccttgcgtcattgccaaagcacgaggtatcagaggatcttcgtgcgctcggaaggtccaagctagtcaccccgacgaaacgtggccgtaacaggcagcaaccgagagggaggcgtcgggcaagaagcgtggctgtcgccatggaggtagaggaaagcgaggtcagcccaccactgcaggcatcaccatctcctgtccctgctgacttggacgcagatgcattggcaataacaaggtggggaaggaccaccagacgttgtcgaaggccgagatgcccgccggtgaacaatgcatcgctgcgtgtagcttgagagagttttaggcatcttagctgatgagaattggtcagaattcagaaattcttttttttccatgactagttggagggaaaactcgaagtagtagattaaaagtaaccagtcacaattgtatatgcatctcagcattaatttggctccctgggacctggatcgaatcaaaacagtttgtacatctctttgaaatgaactctaatcctagagaaatgcacagaattagcatttctacgagtttgctagaattcagtttctcgtagtgcatcttattgttgatcaggccgacatgccactgatatcatgctcagtagccatgttggaccaacgggtt

SEQ ID NO: 8622 - DNA, 3309 bp, Zea Mays
ggattatctcctgttcttggctgcttccctctgttctattctggcctggccgccattgtttcagcggatgagttcggggtcggaagtcttgttcttggagtgtgcttgtgatgttgcgatttttcagaaagctctgatttttagcgcttcattatttggaatccttctggctctgtagtttgctgtggtttgtgatctcgtcttcaatattttttgtcgcttgcatttatggcccttcacgccttctttttcttcccattccctgacgtcctacaaatgacaaattacaggtctcttgttgctgacactacctggacttttcttctgcttatgacaaagacgaactgataagctggcattcgtagatcggtttcttgggagatacacatacagaagctttagggtcggctcgtagaatctctcagacaccgtcgttttgcatccgagaacttggtcacttctaagtgcattttcctttgctgcaaaaggtgctgaataaactgtctgcacaagtcagtggtccttgaactacagggacctgatctgcagattcttccattgggtactgtttcatatttgaccactttgtaaattatatgggaataaaagttgagggtgagacctatattccaggatactttgacatggaagattctagtgtaaattataatggcaatgtgctgccgtatcacaaggagaacaaaccaagtgtgtttcttactgagaagttcacaataatagcttcaaatggacgagtacattacgacaaggaaatgataaagcggacaatgcttgtacatgaagctacattccggaaacaggtatatgaacttcaccagctttacaaaattcagaaggaactaatggcacggttccaaatagaagagatcaatggttgtcctagttatgctggtttattgcagccaagatcctctccatcacaggcactgcttgatgatgttaaaggaatgcgaaaaactgtgaatcctatttctggacatgatcctaagcagtcatgcatcgatttgataaatgaaagtagttcacaatatagtgtgagtggaactcctttgaggcataacaatgttaggcctcaaaagaaaatgattgacctgcaggttccagcagatgtatacactgacaatgatgatgatgtggagatattagaagtgaggccttccaaaagattgcctggggctaatgggtctgttcttttaggaaatgtcaacctcagccttcaaaatagtgagggctattcacatatgaagagttggagtactgatatacaagcacatcacagctcaactgcgcatatactgaataaaccagttgaagattcatctagtatgaatagatctaattttcttggtgtgggaatatctgctctgcagaaccatcattatgcatcacagggagtaaacttgaaccccataagcttggaagcaaaactaaaggaacaatgtgctggtaaagcatctggttcaaggttctttggaacaaatgaggaaataaggaacaacaatccatttcaacacagaaaggatgactccaactctagcatggcattgtacaaacaaaattgcattggttcctcaatggggaattacgctcccaatgctagcaccttcaatcactccattctttctccgcttggcttcaaccatgcactgaatcttccatggcaaagcaacaacacgagctacttgactaagagtcattgtggtgctgctgaaacattcattcctaaggatgccctttccaatggtatctcagtggattctactccaaaggcgccctatcatcattcactaaagattcacggaggtgccggatatcaaaaacctcctgcactacatgataacctgaaggatatagatctgaatgacacaccagttgatgtcgctgccacttgggaacagggaagcgagaaatcagtggttgatatctcttggctcagcaagaaaccagtaagcctgatggaatcacaagtcccatcaagttatgcaaaggaccactcccagattttgccaagccccacattatattcagaaagtagaactcccacaagagttcctgccttccctttcagtgttggtgctgaaaaagattctcggtgctcacccactctactatatgacctaaacaatggaccatcgattaagcatgaaactgacatggaaattcagtccctgtgcaaggaaagtgacacagatactaggaatctcattgacctgaatgaaaccttgccaataatcgacgatccagaaatagagtctcatgaatcaggtgaaattgttcctcatgaacccaatggcccttcacaggattctatcgctatagcagcagcagcagagacgttggtagaaatgtggaataatagtgatcggcctgcatatcaaccggacattttgcattggtttgctgacctagctatatccaaagataacacattgttggacaaggacagcgatgacgactttgaggctgcaacactgaagctgcgagaaacaaagagcaacgagtaccattcaacaccaagaaccacccaggaggataacactaactttggtcattgctctgcagcttcacttgtctcaaaacctcagagaggtagagggcgaggacgccgacagaggaaacactttcagagggacatcttgccaggccttgcgtcattgccaaagcacgaggtatcagaggatcttcgtgcgctcggaaggtccaagctagtcaccccgacgaaacgtggccgtaacaggcagcaaccgagagggaggcgtcgggcaagaagcgtggctgtcgccatggaggtagaggaaagcgaggtcagcccaccactgcaggcatcaccatctcctgtccctgctgacttggacgcagatgcattggcaataacaaggtggggaaggaccaccagacgttgtcgaaggccgagatgcccgccggtgaacaatgcatcgctgcgtgtagcttgagagagttttaggcatcttagctgatgagaattggtcagaattcagaaattcttttttttccatgactagttggagggaaaactcgaagtagtagattaaaagtaaccagtcacaattgtatatgcatctcagcattaatttggctccctgggacctggatcgaatcaaaacagtttgtacatctctttgaaatgaactctaatcctagagaaatgcacagaattagcatttctacgagtttgctagaattcagtttctcgtagtgcatcttattgttgatcaggccgacatgccactgatatcatgctcagtagccatgttggaccaacgggtt

SEQ ID NO: 8623 - DNA, 3125 bp, Zea Mays
ggggacggattatctcctgttcttggctgcttccctctgttctattctggcctggccgccattgtttcagcggatgagttcggggtcggaagtcttgttcttggaggtctcttgttgctgacactacctggacttttcttctgcttatgacaaagacgaactgataagctggcattcgtagatcggtttcttgggagatacacatacagaagctttagggtcggctcgtagaatctctcagacaccgtcgttttgcatccgagaacttggtcacttctaagtgcattttcctttgctgcaaaaggtgctgaataaactgtctgcacaagtcagtggtccttgaactacagggacctgatctgcagattcttccattgggtactgtttcatatttgaccactttgtaaattatatgggaataaaagttgagggtgagacctatattccaggatactttgacatggaagattctagtgtaaattataatggcaatgtgctgccgtatcacaaggagaacaaaccaagtgtgtttcttactgagaagttcacaataatagcttcaaatggacgagtacattacgacaaggaaatgataaagcggacaatgcttgtacatgaagctacattccggaaacaggtatatgaacttcaccagctttacaaaattcagaaggaactaatggcacggttccaaatagaagagatcaatggttgtcctagttatgctggtttattgcagccaagatcctctccatcacaggcactgcttgatgatgttaaaggaatgcgaaaaactgtgaatcctatttctggacatgatcctaagcagtcatgcatcgatttgataaatgaaagtagttcacaatatagtgtgagtggaactcctttgaggcataacaatgttaggcctcaaaagaaaatgattgacctgcaggttccagcagatgtatacactgacaatgatgatgatgtggagatattagaagtgaggccttccaaaagattgcctggggctaatgggtctgttcttttaggaaatgtcaacctcagccttcaaaatagtgagggctattcacatatgaagagttggagtactgatatacaagcacatcacagctcaactgcgcatatactgaataaaccagttgaagattcatctagtatgaatagatctaattttcttggtgtgggaatatctgctctgcagaaccatcattatgcatcacagggagtaaacttgaaccccataagcttggaagcaaaactaaaggaacaatgtgctggtaaagcatctggttcaaggttctttggaacaaatgaggaaataaggaacaacaatccatttcaacacagaaaggatgactccaactctagcatggcattgtacaaacaaaattgcattggttcctcaatggggaattacgctcccaatgctagcaccttcaatcactccattctttctccgcttggcttcaaccatgcactgaatcttccatggcaaagcaacaacacgagctacttgactaagagtcattgtggtgctgctgaaacattcattcctaaggatgccctttccaatggtatctcagtggattctactccaaaggcgccctatcatcattcactaaagattcacggaggtgccggatatcaaaaacctcctgcactacatgataacctgaaggatatagatctgaatgacacaccagttgatgtcgctgccacttgggaacagggaagcgagaaatcagtggttgatatctcttggctcagcaagaaaccagtaagcctgatggaatcacaagtcccatcaagttatgcaaaggaccactcccagattttgccaagccccacattatattcagaaagtagaactcccacaagagttcctgccttccctttcagtgttggtgctgaaaaagattctcggtgctcacccactctactatatgacctaaacaatggaccatcgattaagcatgaaactgacatggaaattcagtccctgtgcaaggaaagtgacacagatactaggaatctcattgacctgaatgaaaccttgccaataatcgacgatccagaaatagagtctcatgaatcaggtgaaattgttcctcatgaacccaatggcccttcacaggattctatcgctatagcagcagcagcagagacgttggtagaaatgtggaataatagtgatcggcctgcatatcaaccggacattttgcattggtttgctgacctagctatatccaaagataacacattgttggacaaggacagcgatgacgactttgaggctgcaacactgaagctgcgagaaacaaagagcaacgagtaccattcaacaccaagaaccacccaggaggataacactaactttggtcattgctctgcagcttcacttgtctcaaaacctcagagaggtagagggcgaggacgccgacagaggaaacactttcagagggacatcttgccaggccttgcgtcattgccaaagcacgaggtatcagaggatcttcgtgcgctcggaaggtccaagctagtcaccccgacgaaacgtggccgtaacaggcagcaaccgagagggaggcgtcgggcaagaagcgtggctgtcgccatggaggtagaggaaagcgaggtcagcccaccactgcaggcatcaccatctcctgtccctgctgacttggacgcagatgcattggcaataacaaggtggggaaggaccaccagacgttgtcgaaggccgagatgcccgccggtgaacaatgcatcgctgcgtgtagcttgagagagttttaggcatcttagctgatgagaattggtcagaattcagaaattcttttttttccatgactagttggagggaaaactcgaagtagtagattaaaagtaaccagtcacaattgtatatgcatctcagcattaatttggctccctgggacctggatcgaatcaaaacagtttgtacatctctttgaaatgaactctaatcctagagaaatgcacagaattagcatttctacgagtttgctagaattcagtttctcgtagtgcatcttattgttgatcaggccgacatgccactgatatcatgctcagtagccatgttggaccaacgggtt

SEQ ID NO: 8624 - DNA, 3031 bp, Zea Mays
ggcagttccaatgcggccggtgggcttcgcccccccgtgacatggtctcttgttgctgacactacctggacttttcttctgcttatgacaaagacgaactgataagctggcattcgtagatcggtttcttgggagatacacatacagaagctttagggtcggctcgtagaatctctcagacaccgtcgttttgcatccgagaacttggtcacttctaagtgcattttcctttgctgcaaaaggtgctgaataaactgtctgcacaagtcagtggtccttgaactacagggacctgatctgcagattcttccattggatatgggaataaaagttgagggtgagacctatattccaggatactttgacatggaagattctagtgtaaattataatggcaatgtgctgccgtatcacaaggagaacaaaccaagtgtgtttcttactgagaagttcacaataatagcttcaaatggacgagtacattacgacaaggaaatgataaagcggacaatgcttgtacatgaagctacattccggaaacaggtatatgaacttcaccagctttacaaaattcagaaggaactaatggcacggttccaaatagaagagatcaatggttgtcctagttatgctggtttattgcagccaagatcctctccatcacaggcactgcttgatgatgttaaaggaatgcgaaaaactgtgaatcctatttctggacatgatcctaagcagtcatgcatcgatttgataaatgaaagtagttcacaatatagtgtgagtggaactcctttgaggcataacaatgttaggcctcaaaagaaaatgattgacctgcaggttccagcagatgtatacactgacaatgatgatgatgtggagatattagaagtgaggccttccaaaagattgcctggggctaatgggtctgttcttttaggaaatgtcaacctcagccttcaaaatagtgagggctattcacatatgaagagttggagtactgatatacaagcacatcacagctcaactgcgcatatactgaataaaccagttgaagattcatctagtatgaatagatctaattttcttggtgtgggaatatctgctctgcagaaccatcattatgcatcacagggagtaaacttgaaccccataagcttggaagcaaaactaaaggaacaatgtgctggtaaagcatctggttcaaggttctttggaacaaatgaggaaataaggaacaacaatccatttcaacacagaaaggatgactccaactctagcatggcattgtacaaacaaaattgcattggttcctcaatggggaattacgctcccaatgctagcaccttcaatcactccattctttctccgcttggcttcaaccatgcactgaatcttccatggcaaagcaacaacacgagctacttgactaagagtcattgtggtgctgctgaaacattcattcctaaggatgccctttccaatggtatctcagtggattctactccaaaggcgccctatcatcattcactaaagattcacggaggtgccggatatcaaaaacctcctgcactacatgataacctgaaggatatagatctgaatgacacaccagttgatgtcgctgccacttgggaacagggaagcgagaaatcagtggttgatatctcttggctcagcaagaaaccagtaagcctgatggaatcacaagtcccatcaagttatgcaaaggaccactcccagattttgccaagccccacattatattcagaaagtagaactcccacaagagttcctgccttccctttcagtgttggtgctgaaaaagattctcggtgctcacccactctactatatgacctaaacaatggaccatcgattaagcatgaaactgacatggaaattcagtccctgtgcaaggaaagtgacacagatactaggaatctcattgacctgaatgaaaccttgccaataatcgacgatccagaaatagagtctcatgaatcaggtgaaattgttcctcatgaacccaatggcccttcacaggattctatcgctatagcagcagcagcagagacgttggtagaaatgtggaataatagtgatcggcctgcatatcaaccggacattttgcattggtttgctgacctagctatatccaaagataacacattgttggacaaggacagcgatgacgactttgaggctgcaacactgaagctgcgagaaacaaagagcaacgagtaccattcaacaccaagaaccacccaggaggataacactaactttggtcattgctctgcagcttcacttgtctcaaaacctcagagaggtagagggcgaggacgccgacagaggaaacactttcagagggacatcttgccaggccttgcgtcattgccaaagcacgaggtatcagaggatcttcgtgcgctcggaaggtccaagctagtcaccccgacgaaacgtggccgtaacaggcagcaaccgagagggaggcgtcgggcaagaagcgtggctgtcgccatggaggtagaggaaagcgaggtcagcccaccactgcaggcatcaccatctcctgtccctgctgacttggacgcagatgcattggcaataacaaggtggggaaggaccaccagacgttgtcgaaggccgagatgcccgccggtgaacaatgcatcgctgcgtgtagcttgagagagttttaggcatcttagctgatgagaattggtcagaattcagaaattcttttttttccatgactagttggagggaaaactcgaagtagtagattaaaagtaaccagtcacaattgtatatgcatctcagcattaatttggctccctgggacctggatcgaatcaaaacagtttgtacatctctttgaaatgaactctaatcctagagaaatgcacagaattagcatttctacgagtttgctagaattcagtttctcgtagtgcatcttattgttgatcaggccgacatgccactgatatcatgctcagtagccatgttggaccaacgggtt

SEQ ID NO: 8625 - DNA, 3113 bp, Zea Mays
gtctccttgtttgaggaagtggggagaggcggaatcttttgttggatcatggcagttccaatgcggccggtgggcttcgcccccccgtgacatggtctcttgttgctgacactacctggacttttcttctgcttatgacaaagacgaactgataagctggcattcgtagatcggtttcttgggagatacacatacagaagctttagggtcggctcgtagaatctctcagacaccgtcgttttgcatccgagaacttggtcacttctaagtgcattttcctttgctgcaaaaggtgctgaataaactgtctgcacaagtcagtggtccttgaactacagggacctgatctgcagattcttccattgggtactgtttcatatttgaccactttgtaaattatatgggaataaaagttgagggtgagacctatattccaggatactttgacatggaagattctagtgtaaattataatggcaatgtgctgccgtatcacaaggagaacaaaccaagtgtgtttcttactgagaagttcacaataatagcttcaaatggacgagtacattacgacaaggaaatgataaagcggacaatgcttgtacatgaagctacattccggaaacaggtatatgaacttcaccagctttacaaaattcagaaggaactaatggcacggttccaaatagaagagatcaatggttgtcctagttatgctggtttattgcagccaagatcctctccatcacaggcactgcttgatgatgttaaaggaatgcgaaaaactgtgaatcctatttctggacatgatcctaagcagtcatgcatcgatttgataaatgaaagtagttcacaatatagtgtgagtggaactcctttgaggcataacaatgttaggcctcaaaagaaaatgattgacctgcaggttccagcagatgtatacactgacaatgatgatgatgtggagatattagaagtgaggccttccaaaagattgcctggggctaatgggtctgttcttttaggaaatgtcaacctcagccttcaaaatagtgagggctattcacatatgaagagttggagtactgatatacaagcacatcacagctcaactgcgcatatactgaataaaccagttgaagattcatctagtatgaatagatctaattttcttggtgtgggaatatctgctctgcagaaccatcattatgcatcacagggagtaaacttgaaccccataagcttggaagcaaaactaaaggaacaatgtgctggtaaagcatctggttcaaggttctttggaacaaatgaggaaataaggaacaacaatccatttcaacacagaaaggatgactccaactctagcatggcattgtacaaacaaaattgcattggttcctcaatggggaattacgctcccaatgctagcaccttcaatcactccattctttctccgcttggcttcaaccatgcactgaatcttccatggcaaagcaacaacacgagctacttgactaagagtcattgtggtgctgctgaaacattcattcctaaggatgccctttccaatggtatctcagtggattctactccaaaggcgccctatcatcattcactaaagattcacggaggtgccggatatcaaaaacctcctgcactacatgataacctgaaggatatagatctgaatgacacaccagttgatgtcgctgccacttgggaacagggaagcgagaaatcagtggttgatatctcttggctcagcaagaaaccagtaagcctgatggaatcacaagtcccatcaagttatgcaaaggaccactcccagattttgccaagccccacattatattcagaaagtagaactcccacaagagttcctgccttccctttcagtgttggtgctgaaaaagattctcggtgctcacccactctactatatgacctaaacaatggaccatcgattaagcatgaaactgacatggaaattcagtccctgtgcaaggaaagtgacacagatactaggaatctcattgacctgaatgaaaccttgccaataatcgacgatccagaaatagagtctcatgaatcaggtgaaattgttcctcatgaacccaatggcccttcacaggattctatcgctatagcagcagcagcagagacgttggtagaaatgtggaataatagtgatcggcctgcatatcaaccggacattttgcattggtttgctgacctagctatatccaaagataacacattgttggacaaggacagcgatgacgactttgaggctgcaacactgaagctgcgagaaacaaagagcaacgagtaccattcaacaccaagaaccacccaggaggataacactaactttggtcattgctctgcagcttcacttgtctcaaaacctcagagaggtagagggcgaggacgccgacagaggaaacactttcagagggacatcttgccaggccttgcgtcattgccaaagcacgaggtatcagaggatcttcgtgcgctcggaaggtccaagctagtcaccccgacgaaacgtggccgtaacaggcagcaaccgagagggaggcgtcgggcaagaagcgtggctgtcgccatggaggtagaggaaagcgaggtcagcccaccactgcaggcatcaccatctcctgtccctgctgacttggacgcagatgcattggcaataacaaggtggggaaggaccaccagacgttgtcgaaggccgagatgcccgccggtgaacaatgcatcgctgcgtgtagcttgagagagttttaggcatcttagctgatgagaattggtcagaattcagaaattcttttttttccatgactagttggagggaaaactcgaagtagtagattaaaagtaaccagtcacaattgtatatgcatctcagcattaatttggctccctgggacctggatcgaatcaaaacagtttgtacatctctttgaaatgaactctaatcctagagaaatgcacagaattagcatttctacgagtttgctagaattcagtttctcgtagtgcatcttattgttgatcaggccgacatgccactgatatcatgctcagtagccatgttggaccaacgggtt

SEQ ID NO: 8626 - DNA, 3267 bp, Zea Mays
ctcctatccaccaccaaaccttggtagagtgagaacaatatactccgccagggcgtcctacaagagaagaggagccggcagagaataagaagaccagaagttgacaaacttttcctgttcttcgagaagcccattttctctcttcttctccactagatagagaaaggggagagagagggagccgaggaggagaagatccctctcaccgtcatctgctggccaatctaatctccgtcgtctgcatctgggtctcttgttgctgacactacctggacttttcttctgcttatgacaaagacgaactgataagctggcattcgtagatcggtttcttgggagatacacatacagaagctttagggtcggctcgtagaatctctcagacaccgtcgttttgcatccgagaacttggtcacttctaagtgcattttcctttgctgcaaaaggtgctgaataaactgtctgcacaagtcagtggtccttgaactacagggacctgatctgcagattcttccattgggtactgtttcatatttgaccactttgtaaattatatgggaataaaagttgagggtgagacctatattccaggatactttgacatggaagattctagtgtaaattataatggcaatgtgctgccgtatcacaaggagaacaaaccaagtgtgtttcttactgagaagttcacaataatagcttcaaatggacgagtacattacgacaaggaaatgataaagcggacaatgcttgtacatgaagctacattccggaaacaggtatatgaacttcaccagctttacaaaattcagaaggaactaatggcacggttccaaatagaagagatcaatggttgtcctagttatgctggtttattgcagccaagatcctctccatcacaggcactgcttgatgatgttaaaggaatgcgaaaaactgtgaatcctatttctggacatgatcctaagcagtcatgcatcgatttgataaatgaaagtagttcacaatatagtgtgagtggaactcctttgaggcataacaatgttaggcctcaaaagaaaatgattgacctgcaggttccagcagatgtatacactgacaatgatgatgatgtggagatattagaagtgaggccttccaaaagattgcctggggctaatgggtctgttcttttaggaaatgtcaacctcagccttcaaaatagtgagggctattcacatatgaagagttggagtactgatatacaagcacatcacagctcaactgcgcatatactgaataaaccagttgaagattcatctagtatgaatagatctaattttcttggtgtgggaatatctgctctgcagaaccatcattatgcatcacagggagtaaacttgaaccccataagcttggaagcaaaactaaaggaacaatgtgctggtaaagcatctggttcaaggttctttggaacaaatgaggaaataaggaacaacaatccatttcaacacagaaaggatgactccaactctagcatggcattgtacaaacaaaattgcattggttcctcaatggggaattacgctcccaatgctagcaccttcaatcactccattctttctccgcttggcttcaaccatgcactgaatcttccatggcaaagcaacaacacgagctacttgactaagagtcattgtggtgctgctgaaacattcattcctaaggatgccctttccaatggtatctcagtggattctactccaaaggcgccctatcatcattcactaaagattcacggaggtgccggatatcaaaaacctcctgcactacatgataacctgaaggatatagatctgaatgacacaccagttgatgtcgctgccacttgggaacagggaagcgagaaatcagtggttgatatctcttggctcagcaagaaaccagtaagcctgatggaatcacaagtcccatcaagttatgcaaaggaccactcccagattttgccaagccccacattatattcagaaagtagaactcccacaagagttcctgccttccctttcagtgttggtgctgaaaaagattctcggtgctcacccactctactatatgacctaaacaatggaccatcgattaagcatgaaactgacatggaaattcagtccctgtgcaaggaaagtgacacagatactaggaatctcattgacctgaatgaaaccttgccaataatcgacgatccagaaatagagtctcatgaatcaggtgaaattgttcctcatgaacccaatggcccttcacaggattctatcgctatagcagcagcagcagagacgttggtagaaatgtggaataatagtgatcggcctgcatatcaaccggacattttgcattggtttgctgacctagctatatccaaagataacacattgttggacaaggacagcgatgacgactttgaggctgcaacactgaagctgcgagaaacaaagagcaacgagtaccattcaacaccaagaaccacccaggaggataacactaactttggtcattgctctgcagcttcacttgtctcaaaacctcagagaggtagagggcgaggacgccgacagaggaaacactttcagagggacatcttgccaggccttgcgtcattgccaaagcacgaggtatcagaggatcttcgtgcgctcggaaggtccaagctagtcaccccgacgaaacgtggccgtaacaggcagcaaccgagagggaggcgtcgggcaagaagcgtggctgtcgccatggaggtagaggaaagcgaggtcagcccaccactgcaggcatcaccatctcctgtccctgctgacttggacgcagatgcattggcaataacaaggtggggaaggaccaccagacgttgtcgaaggccgagatgcccgccggtgaacaatgcatcgctgcgtgtagcttgagagagttttaggcatcttagctgatgagaattggtcagaattcagaaattcttttttttccatgactagttggagggaaaactcgaagtagtagattaaaagtaaccagtcacaattgtatatgcatctcagcattaatttggctccctgggacctggatcgaatcaaaacagtttgtacatctctttgaaatgaactctaatcctagagaaatgcacagaattagcatttctacgagtttgctagaattcagtttctcgtagtgcatcttattgttgatcaggccgacatgccactgatatcatgctcagtagccatgttggaccaacgggtt

SEQ ID NO: 8627 - DNA, 2525 bp, Zea Mays
cacagtccacacccgccgaggccacccccgtcctcccccacgcgccgctcgcgtgatgctcgaatctacgctcgcgatggttatgccccgccgctcgctgccccagccccctcccctgcgtgcgtgcataaaaagggagagcgacgatggaaatattccgagcatggcttgaacacctggtcaatgctagatgatctgttggttgaaagactagcaagctgtccaagtggaactacgacggatcgagcaccggccaaatcccagctgacacgactgaagagactgctttgatatctgatgttgttgcaaattcaccacaacaaggttttcatagtgggcattgctggagtgatctcatctgagatggtaatatgataggccattagtatcagtgctttatatcttatctttttgttctttgtgagaatgttttagcttatgttcctaacaagtgataaataagaaagtaataagcatgtcgtgggaaaataagattatattgactcatgttgctcttatttaatttattagatttcttagacattcaagtagttaaatatgaattaactatggatttgcattagctcctacaagtccaacaatcagaagcccactttgttcaatgctagattttggcataactcctaaaagaggaggcgcttctgctcatgctaagaaagcaagctttgaccgtgaaacctaatggcagaaaaggtcagcaatagataaaggttttagataaatttgttaagtcctctgaacctactgccttccacagttccactcatctttctaccgtccttgattgcagtccttcctcccccaagtccctagagcctagacgaatggcgctgcagctcactgttccttcttcagttcactcatgtagtcctattcatgtatgaggtttttcccttttaaattcatatgcagaacatggtttgagcctcccatcactcagtccacactgtagttgacagacatcaactgtatttgtggttttaatagtttgtatcaggagagtgcatcttgatttactaaagttaatgtagtctcaagtttatgtataatcagttctaatcttgttttttattgaacaatatgtgtttctaggtccattaaccagactaaagtagtgcatattttaaattgaatatttttcttcttttcggtgagaagtgaaaagtggaagacatttcagttctgcacttgtaagtaaagtatttctcttatactcttgttccaatcactctgttattgattgtttaataaatcattcaatatgagcagagcccttttcttattcctggatacctgtgaggagtcttatatcattttgtgtttagtctatttatttatgattaaaatatttttttcataatggcaaagctaagttcgattaccatgaagccacaaaattacaagtgttaggtttgagacaatggtgatgcagagaaacggtagcaaaagccgtcacctttgaacagcaaaagccggcaagacaaattcccaaactaacaagcttaaatctagttacaactgaatacaaaggaccacaacagttgataaattccacagtccagaaacactagttacaagcccactgctaacaccacccacaacttgaaaaaacacatcatttttatatttgatctccaaatattgctatcatctattcagatttctggctaggcgaagacacagagcaatattgactctagagtgtgcacaagatatagaaatttgtaataaagctcccattgctttacttcccttttcattgtatcattcttgtgttgtatgcaacagcctgttctggcaccatcctcttttatgtcttattggcttatgggaattatgaaaagccttttgtttggactaaagaccacttggccaagctttattgaaagcataggaggagttactggagcaagccagtttacaagcaaaaaatgaaagaaaaacataactcaaactctgctacatgttgtccctctgttctatttagttatccacggtgtctattattcttatttccactaatgactagactaatgattatttgctcttgttaccatcctcacagtgtggttgaaattacctactatgcagtgtagttgaagttatcttcctgattggaagataaggaaggtttgaggagctcatttctgaagttgtagctggaagggagaagagctcatgttaatggtattttgactgctccaaaacactttcgacttgtgatattctttaacctatatgcgttgaagaatttttggagacaaagcatgcaagcacagagtctgctctggtggtaagataagtgaggtgacttctgaagaagcctacagagaatgtaaaaataagtgtgttattttcactgctttgacacagtctcaattgtgcaatgatttattatcacattgtaatttgacatatgctacatgatcctaaattatgttgtaatgaatgttctactccctatgtgtatttgttagatagcttgtccatgttcttaactattt

SEQ ID NO: 8628 - DNA, 877 bp, Zea Mays
cacagtccacacccgccgaggccacccccgtcctcccccacgcgccgctcgcgtgatgctcgaatctacgctcgcgatggttatgccccgccgctcgctgccccagccccctcccctgcgtgcgtgcataaaaagggagagcgacgatggaaatattccgagcatggcttgaacacctggtcaatgctagatgatctgttggttgaaagactagcaagctgtccaagtggaactacgacggatcgagcaccggccaaatcccagctgacacgactgaagagactgctttgatatctgatgttgttgcaaattcaccacaacaaggttttcatagtgggcattgctggagtgatctcatctgagatggtccattaaccagactaaagtagtgcatattttaaattgaatatttttcttcttttcggtgagaagtgaaaagtggaagacatttcagttctgcactttgtagttgaagttatcttcctgattggaagataaggaaggtttgaggagctcatttctgaagttgtagctggaagggagaagagctcatgttaatggtattttgactgctccaaaacactttcgacttgtgatattctttaacctatatgcgttgaagaatttttggagacaaagcatgcaagcacagagtctgctctggtggtaagataagtgaggtgacttctgaagaagcctacagagaatgtaaaaataagtgtgttattttcactgctttgacacagtctcaattgtgcaatgatttattatcacattgtaatttgacatatgctacatgatcctaaattatgttgtaatgaatgttctactccctatgtgtatttgttagatagcttgtccatgttcttaactattt

SEQ ID NO: 8629 - DNA, 2221 bp, Zea Mays
cacagtccacacccgccgaggccacccccgtcctcccccacgcgccgctcgcgtgatgctcgaatctacgctcgcgatggttatgccccgccgctcgctgccccagccccctcccctgcgtgcgtgcataaaaagggagagcgacgatggaaatattccgagcatggcttgaacacctggtcaatgctagatgatctgttggttgaaagactagcaagctgtccaagtggaactacgacggatcgagcaccggccaaatcccagctgacacggtgtggacacgagttctgcgctactcctgtggtcattgtttggagaagttttcctaaagcttctttatgtatattcttagtctttttttagaacaatgtcataacctactaatagttgtttatcactatattcttttgttcctactattccttgatatgccagatctcaacttttgtgctaatatacatctctaggcatgttgtatgtgcatcatttcaaaaaaaacacttaccaaaagagtggtctgtaccaaacattttgccttcaagacttcaactcataaccttgtatagtctgaaatccttaggattggttctgaacctcagtttgatggaggtgttacaaaacttagaagggatactaaatttctctttgtagtatgagtgaacagaagtaggatttgtcacaatctcactattttaccaagctaaccaaataacaaatttggccagtatgtatgtgcatcatttcaaaaaaaactgttaccaaaagggtggtatgtaccaaacattttgccttcaaggcttcaacccataaccttgtacagtctggaatccttaggatttgtactgaacctcagtaggtgttacagaacttagaagagatactggatttctctttgtagtaggagtgaacaaaagtaggatttgtcacaatctcacacttttaccaagctaactaaataccaaaattcggccagttacagacagtcagacactgatcttaacttgctcgaacagtcttaaacctttttgtatcaaaggctcatagcatatcaaacgcttctaatgaaaccttaacacaccgcaagaaaacaccaagcatcgaatttgttcagtgtgtgtgaagtagtagtgtatgatcatgccatacatatttttctacacatctcaaattctagatttaatttggttacatgttatacatgtatcttagatttttgataactggtcacagagcggttcaaattgaatttgacatggagttcagatgtcctttcatattctgttactgaggttatttccaaatagtgattcagatctaatgattttatgatgcaatttattctacaacatttaaatgccagaacgctcattagaggctgaacatttaatggttataggattaggcctaaaacggcgttttgcagcgattaaacgctacattttttgtgtttaaacgctttaagctagaaatgctgttgattttgtgtattatatttagagtatgacatttttccaagatctatgttttaaatgcaaggatattgagattttttagatattttattttaaatgctaattcatatatttttttccttgccgaatgtaacccctaagaagactgaagagactgctttgatatctgatgttgttgcaaattcaccacaacaaggttttcatagtgggcattgctggagtgatctcatctgagatggtccattaaccagactaaagtagtgcatattttaaattgaatatttttcttcttttcggtgagaagtgaaaagtggaagacatttcagttctgcactttgtagttgaagttatcttcctgattggaagataaggaaggtttgaggagctcatttctgaagttgtagctggaagggagaagagctcatgttaatggtattttgactgctccaaaacactttcgacttgtgatattctttaacctatatgcgttgaagaatttttggagacaaagcatgcaagcacagagtctgctctggtggtaagataagtgaggtgacttctgaagaagcctacagagaatgtaaaaataagtgtgttattttcactgctttgacacagtctcaattgtgcaatgatttattatcacattgtaatttgacatatgctacatgatcctaaattatgttgtaatgaatgttctactccctatgtgtatttgttagatagcttgtccatgttcttaactattt

SEQ ID NO: 8630 - DNA, 2394 bp, Zea Mays
cacagtccacacccgccgaggccacccccgtcctcccccacgcgccgctcgcgtgatgctcgaatctacgctcgcgatggttatgccccgccgctcgctgccccagccccctcccctgcgtgcgtgcataaaaagggagagcgacgatggaaatattccgagcatggcttgaacacctggtcaatgctagatgatctgttggttgaaagactagcaagctgtccaagtggaactacgacggatcgagcaccggccaaatcccagctgacacggtgtggacacgagttctgcgctactcctgtggtcattgtttggagaagttttcctaaagcttctttatgtatattcttagtctttttttagaacaatgtcataacctactaatagttgtttatcactatattcttttgttcctactattccttgatatgccagatctcaacttttgtgctaatatacatctctaggcatgttgtatgtgcatcatttcaaaaaaaacacttaccaaaagagtggtctgtaccaaacattttgccttcaagacttcaactcataaccttgtatagtctgaaatccttaggattggttctgaacctcagtttgatggaggtgttacaaaacttagaagggatactaaatttctctttgtagtatgagtgaacagaagtaggatttgtcacaatctcactattttaccaagctaaccaaataacaaatttggccagtatgtatgtgcatcatttcaaaaaaaactgttaccaaaagggtggtatgtaccaaacattttgccttcaaggcttcaacccataaccttgtacagtctggaatccttaggatttgtactgaacctcagtaggtgttacagaacttagaagagatactggatttctctttgtagtaggagtgaacaaaagtaggatttgtcacaatctcacacttttaccaagctaactaaataccaaaattcggccagttacagacagtcagacactgatcttaacttgctcgaacagtcttaaacctttttgtatcaaaggctcatagcatatcaaacgcttctaatgaaaccttaacacaccgcaagaaaacaccaagcatcgaatttgttcagtgtgtgtgaagtagtagtgtatgatcatgccatacatatttttctacacatctcaaattctagatttaatttggttacatgttatacatgtatcttagatttttgataactggtcacagagcggttcaaattgaatttgacatggagttcagatgtcctttcatattctgttactgaggttatttccaaatagtgattcagatctaatgattttatgatgcaatttattctacaacatttaaatgccagaacgctcattagaggctgaacatttaatggttataggattaggcctaaaacggcgttttgcagcgattaaacgctacattttttgtgtttaaacgctttaagctagaaatgctgttgattttgtgtattatatttagagtatgacatttttccaagatctatgttttaaatgcaaggatattgagattttttagatattttattttaaatgctaattcatatatttttttccttgccgaatgtaacccctaagaagactgaagagactgctttgatatctgatgttgttgcaaattcaccacaacaaggttttcatagtgggcattgctggagtgatctcatctgagatgattttggcataactcctaaaagaggaggcgcttctgctcatgctaagaaagcaagctttgaccgtgaaacctaatggcagaaaagtccttcctcccccaagtccctagagcctagacgaatggcgctgcagctcactgttccttcttcagttcactcatgtagtcctattcatgtccattaaccagactaaagtagtgcatattttaaattgaatatttttcttcttttcggtgagaagtgaaaagtggaagacatttcagttctgcactttgtagttgaagttatcttcctgattggaagataaggaaggtttgaggagctcatttctgaagttgtagctggaagggagaagagctcatgttaatggtattttgactgctccaaaacactttcgacttgtgatattctttaacctatatgcgttgaagaatttttggagacaaagcatgcaagcacagagtctgctctggtggtaagataagtgaggtgacttctgaagaagcctacagagaatgtaaaaataagtgtgttattttcactgctttgacacagtctcaattgtgcaatgatttattatcacattgtaatttgacatatgctacatgatcctaaattatgttgtaatgaatgttctactccctatgtgtatttgttagatagcttgtccatgttcttaactattt

SEQ ID NO: 8631 - DNA, 2123 bp, Zea Mays
cacagtccacacccgccgaggccacccccgtcctcccccacgcgccgctcgcgtgatgctcgaatctacgctcgcgatggttatgccccgccgctcgctgccccagccccctcccctgcgtgcgtgcataaaaagggagagcgacgatggaaatattccgagcatggcttgaacacctggtcaatgctagatgatctgttggttgaaagactagcaagctgtccaagtggaactacgacggatcgagcaccggccaaatcccagctgacacggtgtggacacgagttctgcgctactcctgtggtcattgtttggagaagttttcctaaagcttctttatgtatattcttagtctttttttagaacaatgtcataacctactaatagttgtttatcactatattcttttgttcctactattccttgatatgccagatctcaacttttgtgctaatatacatctctaggcatgttgtatgtgcatcatttcaaaaaaaacacttaccaaaagagtggtctgtaccaaacattttgccttcaagacttcaactcataaccttgtatagtctgaaatccttaggattggttctgaacctcagtttgatggaggtgttacaaaacttagaagggatactaaatttctctttgtagtatgagtgaacagaagtaggatttgtcacaatctcactattttaccaagctaaccaaataacaaatttggccagtatgtatgtgcatcatttcaaaaaaaactgttaccaaaagggtggtatgtaccaaacattttgccttcaaggcttcaacccataaccttgtacagtctggaatccttaggatttgtactgaacctcagtaggtgttacagaacttagaagagatactggatttctctttgtagtaggagtgaacaaaagtaggatttgtcacaatctcacacttttaccaagctaactaaataccaaaattcggccagttacagacagtcagacactgatcttaacttgctcgaacagtcttaaacctttttgtatcaaaggctcatagcatatcaaacgcttctaatgaaaccttaacacaccgcaagaaaacaccaagcatcgaatttgttcagtgtgtgtgaagtagtagtgtatgatcatgccatacatatttttctacacatctcaaattctagatttaatttggttacatgttatacatgtatcttagatttttgataactggtcacagagcggttcaaattgaatttgacatggagttcagatgtcctttcatattctgttactgaggttatttccaaatagtgattcagatctaatgattttatgatgcaatttattctacaacatttaaatgccagaacgctcattagaggctgaacatttaatggttataggattaggcctaaaacggcgttttgcagcgattaaacgctacattttttgtgtttaaacgctttaagctagaaatgctgttgattttgtgtattatatttagagtatgacatttttccaagatctatgttttaaatgcaaggatattgagattttttagatattttattttaaatgctaattcatatatttttttccttgccgaatgtaacccctaagaagactgaagagactgctttgatatctgatgttgttgcaaattcaccacaacaaggttttcatagtgggcattgctggagtgatctcatctgagatgtgtagttgaagttatcttcctgattggaagataaggaaggtttgaggagctcatttctgaagttgtagctggaagggagaagagctcatgttaatggtattttgactgctccaaaacactttcgacttgtgatattctttaacctatatgcgttgaagaatttttggagacaaagcatgcaagcacagagtctgctctggtggtaagataagtgaggtgacttctgaagaagcctacagagaatgtaaaaataagtgtgttattttcactgctttgacacagtctcaattgtgcaatgatttattatcacattgtaatttgacatatgctacatgatcctaaattatgttgtaatgaatgttctactccctatgtgtatttgttagatagcttgtccatgttcttaactattt

SEQ ID NO: 8632 - DNA, 2216 bp, Zea Mays
cacagtccacacccgccgaggccacccccgtcctcccccacgcgccgctcgcgtgatgctcgaatctacgctcgcgatggttatgccccgccgctcgctgccccagccccctcccctgcgtgcgtgcataaaaagggagagcgacgatggaaatattccgagcatggcttgaacacctggtcaatgctagatgatctgttggttgaaagactagcaagctgtccaagtggaactacgacggatcgagcaccggccaaatcccagctgacacggtgtggacacgagttctgcgctactcctgtggtcattgtttggagaagttttcctaaagcttctttatgtatattcttagtctttttttagaacaatgtcataacctactaatagttgtttatcactatattcttttgttcctactattccttgatatgccagatctcaacttttgtgctaatatacatctctaggcatgttgtatgtgcatcatttcaaaaaaaacacttaccaaaagagtggtctgtaccaaacattttgccttcaagacttcaactcataaccttgtatagtctgaaatccttaggattggttctgaacctcagtttgatggaggtgttacaaaacttagaagggatactaaatttctctttgtagtatgagtgaacagaagtaggatttgtcacaatctcactattttaccaagctaaccaaataacaaatttggccagtatgtatgtgcatcatttcaaaaaaaactgttaccaaaagggtggtatgtaccaaacattttgccttcaaggcttcaacccataaccttgtacagtctggaatccttaggatttgtactgaacctcagtaggtgttacagaacttagaagagatactggatttctctttgtagtaggagtgaacaaaagtaggatttgtcacaatctcacacttttaccaagctaactaaataccaaaattcggccagttacagacagtcagacactgatcttaacttgctcgaacagtcttaaacctttttgtatcaaaggctcatagcatatcaaacgcttctaatgaaaccttaacacaccgcaagaaaacaccaagcatcgaatttgttcagtgtgtgtgaagtagtagtgtatgatcatgccatacatatttttctacacatctcaaattctagatttaatttggttacatgttatacatgtatcttagatttttgataactggtcacagagcggttcaaattgaatttgacatggagttcagatgtcctttcatattctgttactgaggttatttccaaatagtgattcagatctaatgattttatgatgcaatttattctacaacatttaaatgccagaacgctcattagaggctgaacatttaatggttataggattaggcctaaaacggcgttttgcagcgattaaacgctacattttttgtgtttaaacgctttaagctagaaatgctgttgattttgtgtattatatttagagtatgacatttttccaagatctatgttttaaatgcaaggatattgagattttttagatattttattttaaatgctaattcatatatttttttccttgccgaatgtaacccctaagaagactgaagagactgctttgatatctgatgttgttgcaaattcaccacaacaaggttttcatagtgggcattgctggagtgatctcatctgagatggtccattaaccagactaaagtagtgcatattttaaattgaatatttttcttcttttcggtgagaagtgaaaagtggaagacatttcagttctgcacttttgaagttatcttcctgattggaagataaggaaggtttgaggagctcatttctgaagttgtagctggaagggagaagagctcatgttaatggtattttgactgctccaaaacactttcgacttgtgatattctttaacctatatgcgttgaagaatttttggagacaaagcatgcaagcacagagtctgctctggtggtaagataagtgaggtgacttctgaagaagcctacagagaatgtaaaaataagtgtgttattttcactgctttgacacagtctcaattgtgcaatgatttattatcacattgtaatttgacatatgctacatgatcctaaattatgttgtaatgaatgttctactccctatgtgtatttgttagatagcttgtccatgttcttaactattt

SEQ ID NO: 8633 - DNA, 4415 bp, Zea Mays
cccactacttgttgtacttaattaggagctgcgaagctttctttcggcaaggaagggcgggagtagcttggaagggagagactacatatagtacaaagcgaagcggcaaccaccgccgatcgagatttcttcaataatcttcagtcccttccccccgcaccccacttgttatatccacgagcgcgagctgcgcgcgatcataagagccacgccgcgtctgattccagctgacggggacctgggacttcggcgaaagactcgaacttttcttgacttgccctgccgcctgcattgcgacgagaggaggtcctgttcttggagcatctgagccgactcgcgggcgtttctcggctcgttgcggtagttcaggttctggaagcatgaggttatggtgtatcttcctcttgcctctgctgtgtcagcttgcaggggttcgatcagaggattactcggatgtaactgtcattgttcgcggctctgagacgattgcttcgactagtggcgagtttgtttgcgccaccattgattggtggcctccagagaagtgtaactacgaccagtgcccatggggaagggcttctgtcttaaatttggacttaactaatcctttgttggctaaagctatccaagcctttagtccactacgaatcagagttggaggctccttacaagatcaagtgttatatggcacaccaaatttaggactgccgtgcgacccatttacaaaagtttcgagtggcctctttgagttttctcaaggatgcataaccttggaaagatgggatgatattaatgatctcttcctgaatactggtgcagttgttacatttggtctcaacgcgctccaaggacgacatcagataaggaaaggtgtttggggtggtccctggaattctagcaatgctcgagaattcattgaatacactgcttcgaagaactatcctatagattcttgggaatttggtaatgaactgagtggaagtggagttggtgcaagtgtggcagctgaacaatatggaaaagacctagtcgtacttcaaaccatcgtcaacgagctatacggagattccagcaaaccactggttgtagccccaggaggattctatgaccaaaagtggtttgctcagcttctcgaggcctctgggccaaacgttctcaatgcagtgacccatcatatctacaatcttggtgctggtgatgatccccaagttccaaacaggattttgagcccgcagtatctgagccggacttctgatatattcagaggtctccagctcaccatacagcgccatggaccgtggtctgctccgtgggttggcgaatctggcggtgcatacaacagcggcagccgacttgtatccaatacttttctcaatagcttctggtatctcgatcagctgggtcagtcagcgaagtatgacaccaaagtctattgtagacagacgctgattggcggcaattacggtcttcttgacaccgacacttttgtacccaacccagattactacagtgccttgctgtggcatcggctcatgggaacaggagttctttccttagacatcagtggttctccgtacttgcgtccctatgcgcattgtgcaaagcaaaagggtggcattgctcttgtcttgctgaacctgcaccggaccatgggcttcatggtttcagtcaggaacgacataaatgtcaatctcgcagaagggcaagggatcagaagggacaacgccttcgtccatggcctgaaaaggacggtttcttgggtcgggagcaaagcctctgatggcttttctaagagggaagagtaccatctctcggcgcaagatgggaacccttttgcccggaccatgctgctgaatggagtccctcttgagctcactgaagatggtgacatccctccactgtatccagtggaggtttcagctaactcaccgatctatgttgctcctctgaccattgcgtttgtcgtcttccctgacttcgaggctgaagcttgtggccgttgatcaacttttgttttgacacgaagttttctgatatatgtagtagagatttctaaagaacaaggtcactgtaaagatgtgttcgttttctgatttgtgccccaattgggcctacattttcccaacgaatagtctcctggttcatagttagtagtctcctgatcaatgcctcgtccattgcgtcaaatgcttagcatcaatcaaattccagggaaaactgtgctatcgaacttgctgatgtgcgagtccattacgttttgttcagagcactattgatctttctgctggctaaaattagttaaatcggtgtttttcttctgtaaaatcaatgttggttcaaatgaaatcacacatacaatgtaaaaagtatacaaggtttgctttgcataatcaaaatccatgcttttcacatggtgaaatgtgtatgctcttcatcaattacaataacgatgggactaccatcaacccaacttatattgctccataaaatacaaaagaaccatcctaagcaatatcttaatttcatgagctatgatacaaatggaataaattaaaggaaaagggccctacagtaaatggggaaaaaataacatttcctttctgttcattgaatattctccacagcgcatgtaaccatgttaagggattactgagctccccagttgcacttgataaactccctgctgttgatttccaaaataacgaatttaatttcacttactatatgcttttatatatattgtcaagacaatctaaactgaggctccattatatgacagtttcttatgaattcatttgagtagttcacatattttgtccaaaatggctgaagatgtttaaaaccaatctccagccacggtttactttgcccgttataatgtataactgctgcttgttcaacgctactgacatctgtcttttcctgataacccaagcctaacagatgccatgatggatcaattgggtgaacatggcctttaaaggcaataaggcctggtggcaatgttccaagcctccaaagtgtgaagtttgacttcaagttctgcatgaagagtgagagacaatgaattggcagaaaatatgatataggcaaggatgtccacagtaaaggaaacaatcctacacaagcacaggaatatgaaacaatcctacacaatcctatcagggagatccttgcctattgagaccaactaaccaaacaagaagcaggcgcacaaggcaacaagcctgtgctgtcgtgccacctaaactgcctaaaatagcacacgctaacaaagaggaacaagaatggaagctcatcaatttgtactttcaaatgtaatataggttagactgcagatagtttcaataatcaactgaactagaaagtattcctgataaaatttctcaaatatgcttttgtggtcacttttaagcaaatcagaagacatgtattgatttttttttctttatttggtgtcttttagaactatgctacaggtaaaaagttttttgcaatgaaaagatcttacctccttgacccaatgatgatactgatctttgattgttgtcttcctccatgctttcaggtcaaaaatattcataccatatgcccaagcacactctgaagggtcaaagttttttgcaatgaggggatgagaaaagttgaaataattcctgaacctcttagacatcacccgactgtctccacctatgcaagtctcaacagcaccattaaccttcccagctagatcgatatcccaaagtggtgataggtcatgctggacaacaacatcatcatcaagaaatacgaccttgttgaggcttgggaacaactgcatccaccgattgcagattaaatcagtgtaactttcagcaaaaaaaaaaggatgcaggtcaacaaatataaccacattttgaacaagtttgtaccatatacaattatatatagactacatgcagagaaagctccagatatctcaagaagagggcagcatcacttactccttgatcccagcaggaccagcaaactagaacaggttcacagtgaatagttctacagagcaaaagtctaaaatgctttcaattcttttgcagttttcattgtttcaaaccatccttctatctatataagcacgatacttgtttcacccaacaaaaatggtactaggaaagtaagagatgagaataatagtcaagaaaattctaatacctcaggcaagtatattcgaatatgattgagtacattagtgtatgttggacttcctgcctgcagcttggccgcaaaaacccttgggttatcactagcactggttcttggacggtgacttccatggtaacgatctctagcagtgcgctgagtttctatagcttcaagtacaggaacattttcttttgttaaccaatcaaattggtgaacacctttcacctcaacaa

SEQ ID NO: 8634 - DNA, 4901 bp, Zea Mays
cgatggagctgctaccgggtagagtactagagttcttatagcagagttgaatttgttagagtggagcccgtatcaaacacccacctgctttagaaataacgaaattaatatggagtataaacctatttaacctaccactacaactggttatgtagaaaaatggttctttcttagtgtgacacggacacacttgctcgtccacatcccttcctccagccaccgacctcccaaggatgcgctcttgccgccggcctcccaaggatgcgctcttgccgcccctcttctcgcgccgccgctgccatcgccatgtcgaagcgcgctacgtctcatacattttctgggatccagaaatttcggacattgtgatcttctcggccccccaggacttcaggtgctatttctagcctccctagggattggaggattggagggaactaattccaccttaatcccctccaattccgaagaggatttgagtttcgttaatatctttagatccaaagtctgatcgacatgattttagttgggttagttgcgtaattttatctagtttaatctgttaaaatctcaagtcaattgaagttactgattttgatcagtattgttttttttttctagcaaaacagagttctgtctaaatttatcaaactgaattaaatcggttttacagttggaaggaggtgatataattatttttaagcttccgtgatattcacctctctgattgtttatccttgtacttagcaactttgatatcctaggtatcgtattgaccttttgttcccattttgagaagacaaagaaagtgtcaaagttacatgaaatggatcaattccaacttgtacacactgacaaaacactatatgacagtagagtttgaaatattcacaccggtggacagcaacaggccaaccggccgtcaaccaggatagtcgggtcctcctggcagatttatttggagattcgtacctggactagtatgcttcctttttcccactggtggacagcaaccagtaggccggcctgctttgaaatattctaagaaacaacttacctacctaccttctacaaagccatccttgccaggggcggacctaggataaaattagagtgagggcattcttacaagatcaaggattaaaatgtaagagcaggggcatctcagttaaatcaaggaggggactccatggtaaaaatctatactatatcataatatcatagaaatgagcaggggcctaggccctcactcaccataacgtaggtccgcccctgatccttgctaccttcccatgcattcatatgtgtgccaaggaaaataaacaattaagcagcacctgactctgtcccaatggccgctgcaagctcactagtcgctctagtgctactgccggccattttcttggtctcagcactatctcctgcttgtgctgctgcttcttccactctaattcctaacggcagagacaccgacctcgccgtgctgctggctttcaaagcccagctctctgatcctcttggcgtcctcgccagcagctggaaaaccaacgtatcattctgccactaggttggtgttttgtgcagccgtcgtcgacagcgcgtcactgctctagttctatcggacacacctctccaaggggagctcaccccacacatcggtaacctctctttcctctctgggctggaccttatgaacgcaagccttaccagctccatccccgccgaaattggcactctgcgacggcttaaatatctctttcttgctgagaatcgcctagctaattccattcctgactctataggaaaccttacaagcctcaagtctctctacttgagctccaacatgctctcgggcagattccaccacagatgctacagaatctgcgcaaccttgaaaacatttcgctggccaacaatgagctgagtggccatataccgccttatctgttcaataccacgccttctctgattcatatccactttggaagtaaccacctgtcaggtccaataccgcacactttgggatccctgcccagacttgactacttagtcatcaatgataatgagctccttggcacaatacccgccaccatgttcaacatgtctagggtgcaggtattctcactggaacttaacaatcttactggagaagtcccttacaatcaaagtttcaacctgccaatgctttggtggttttctatcagtgggaacaacattcaaggccgaattccactgggatttgcagcatgccagcgcctgcaagttctttacttaggcggacttcctcaccttactggacctatcccagctattcttggcaacctcacccgtattactgatatagacgtctctttctgcgacctgactgggcacattccaccagaaataggcctgttgcaagacctaaagaatctacgtctaggaaacaaccggctaacaggtccagttccagcttctctaggaaatttgtctgcattgtctttgctgagtgtggaatcaaatctattgtctggttctgtacctagaacaattggaaacatcccaggtctgacccagtttagattctcatggaacaatttcaacggaggtctcgactttctgtcctccctttccaactgcaggcaactcgagctccttgacatatataataattccttcaccgggccactcccagaccaggtggggaacctgtcaacatatctaattgaatttagagcaaatgcaaacaagctatccggtgagcttccgtcgtcattgtcaaacttaagcagccttgttagtatctattttcacgacaacctactcacaggagccataccagaatccatcacacgtttacaaaatctcatcctgtttgatgtcgccagcaaccaaatgtcaggtcgtctcccaacacaaattggcaagctcaagagcctacaacaattctacaccaatggaaacaaattctatggccccatacctgacagcatcggcaaccttacgtcgatagaatacatctacttgtctgataatcagttaaattcaacagtaccatctagcttgttccagcttcccaaacttatctatctggatctttctcataattccctcactggttcactaccggtcgacgttagtgggctaaaacaagtggattttgttgacttatcttccaattatttgtttggaagcatcccagagtcatttggaacacttaagatgctcacttacctagatctatcattcaactcattggagggctcaatcccaggtttgtttcaggagctagaaagcttggcatcattgaacctctcctccaactctctctctggtacaattcctcagttccttgccaatttcacctacttgacagacttgaatctgtctttcaatcgactagaaggaaaggtaccagagggaggtgttttctcccgcatcacctcgcaatctttacttgggaatcctgcgctgtgtggtgctccccgtctaggtttcttgccatgtcccgacaagtctcattcacataccaatagacacttaattacaattttaatccctgtcgtcaccatagcattttcttcttttgttctttgtgtgtactacctacttaccacaaggaaacatagtgacatttctgatccatgcgatgtcgtggcccataacttagtctcctaccatgagcttgttcgcgccacacaaagatttagcgataacaacctgctggggactgggagctttggcaaagtattcaagggtcaactagacaacggtttggtggtcgcaataaaagtgctagacatgcatcacgaaaaagccattggaagctttgacgccgagtgtcgtgtgcttcgcatggctcgccaccggaacctgataaggatactgaacacctgctccagccttgattttcgagccctggtgcttgagtacatgtccaatggaagcttggagatgctcttgcactctgaagacagaagtcacatggggttccaattccatacaaggatggacaccatgctagacgtgtctatggcaatggaatatctgcaccatgagcatcacgaggtggttctgcactgtgacttgaagccaagcaatgtgctgttcgatgatgatatgacagcacacgtagcagactttggcatcgcaaagttgctactgggtgatgacaactccatggtcgtttccaccatgcctggaacacttggatacatggcaccagagtatggatctcttggaaaggcatcgcgcaagagtgatgtgttcagctttggaatcatgctttttgaagtcttcactgggaagaggcccacagatacgatgtttgagggagaactgagcattaggcagtgggttcaacaagcatttccatctcagcttgacactgtcgtggacagccagctgctgcaggatgccatttcttcttcagccaacctgaacgaggttttgcccctaatatttgagctcggtttgctctgcacgactgattcacctaaccaaaggatgtcaatgagtgatgtagtagtgaccctgaagaagatcaaaatgaactacaccaaatttggcatcagcaaggacacaatgtccttccctgcaattgatcacgcttaattctacatgtctagtttcttcggttctgcagtggaacaactgcatcagctaccttttactgtatttttttttttacaaaagttgtttcttggataactcttagtaatatatgggcatattactattgtcaggtgtgaaataagtttctgtaatttaaattaaaagaaaaggttgcgtgacattcatgtgcctgaacagagatgtcataattttatagtttgatcttttgtggtccattacgacccttaaacgttaagggattgttttgttcttacatgttcctattttgtaaaattatttgtggcacactg

SEQ ID NO: 8635 - DNA, 2465 bp, Zea Mays
gacggccagtcggggtcagtgaggcattgtacgccaaggcggtgagcccctttctgttgccagggaatcgatggggacggttgatatgtgtggggacggagtgcccctgcatgtcgtgtgtttaggtttaccttgcaaggataaaaactcgattcgaatcgtctgcttctcgcagctaatgagactgcttgatccatgctgctacattgagtaataagtggaaatgaggtgaccgacaaaagatgttggttgataaaaatgtttgataccatgtatgattagctaggtacacatctagttaaaaaggatcatactaaaacttgaaatgctaaaacatgattttagactcagctagtgcttttggcaaaccaaacccctcagccaaacagctgcatgtctagaggtagaggagtagactcctcacaccgggtaagtctagctgagtattagtatactcagccttgcttgtggcacaatttttgcaggtactccttaggatgattggttgctggtgtgacttggccttcatccctgccaccgggatatatggtcgagagggttattgcttccgcaggagaggaccaggaggagtagcgtggccaggcttcgccatgttactcggttttctccgttagttatttccgctgcattaaaatttatggttatcatttctgaaactccgataatgtaatcactaattatacgtattaaatttgtggtattatgttttattgtatttctctgtgcctcaccttcgagtgagctagtggtattcgatcctggtaagtggctttatcggactagatccgagggactgacgagttattcttatttaagtgtgtttctgcccttaagggtgcgacttgagcacttaagctggaataattcgggcggttccgccacataacatgctctcgaaaataaataatttatttgtccaacatatggttattggattaacatatttaatttgagttaatctaggattttaatttggatcatctactggtatatgattctgtggtaacttaggttgaaggttgagttagttatatcttttctcacataattgattttaatcatcataatatatagtttattggttaatcacttagaacctagtaaaaccatagcttcttagccataactctgattttagtgcttctcggacccacgatctcgtagcaacacgtagattattattattcagtttgtgcttatgattgatgtgatgttaattttgcctataccatgtttgtctgtattgctacatttagcggtgaggtcacgagtcacatgaagagcaagttggtacctggaatctccactcccatgcaagttgtgcccttaatcacttctttttacccagtcatgttcttattaatcataatgatctgcataggttaatattgatgggacccaataggttaccctagtttggctatctttataccttgtttttaccactgaatttttaggttgtacctgctattgctttatgtggttttgggtatggagttatacattattcgtgatcacacttttattatcagtttattgtttattgttcatgataagatcattatgttaattggaacatggagaaccacctgggaaaacagtgctaccacaagggtggtatgggacacccttggctgactagttaggaaagctagtggaggactaccttaccgaaaggggcaagggcagtaggggactggtcagtgtagggaggtccttgggtttattctgctgcgatggcgaataggtgagggatccctgcattggagcttcctagaaattgtagcgggttttctgaagctagtgggactttgtaaaggcctcgtagtgttaccctgcctcgcctcctctgtagagatgtatgggaagtcacgatcccttagcagatgggtaacatgacttgtgggtaaagatgcgcaaactctgtagagtgtaaaactggtatactagccgtgttcacggtcatgagtagctcggacactcacatgattaatttatggaactaaattcaatttgtcatatgcatagcatcgcatgtgttgttatcacttttgttctactacttaattgggttggtatttacttatacttagtaattgctagtaaatttttgaccaactttaaaagcaatgctcagctctaaccatcctctttggtaaaccttacacttcacatgagctcccacctttggggagttcatgcacattattccccacaacttgttgagcgatgaacgtaagtgagctcactcttgctgtctcacacccccacaggtcaagaacaggtaccgcaggatgaggcacatggaggatgctatgatgcgctcgtgagaagtctaggccatcgtatcccagtaaactttgggttgctagatcattatctccatatgatgtaattatttatttattttgtacagaactcctattatatagtaaaaatgtgac

SEQ ID NO: 8636 - DNA, 1119 bp, Zea Mays
tcagactgagccagtcgcggacggtccggtcgtgcaccccggacggtccgcgaggccccctataattcatttttccgaacccgttacctttgggtttttcggtttcttaccgaccggacggtccgcgcctgaggccggacggtccgcgcgagggctcggacggtcttagcttttcctccggacagtccgtagtggaaacttgtatttttgcattggttctgtccgagagacatccttgtgtcgcggacggtccgccgcaagggcccggacggtccgcgcttggcctgtttttccaaaaagcttctcctgtccggaataatctacggtattccggacagtcgatttagtatagttatagatgaacctttggcacctgtataacatataatctagagcaaactagttagtccaattgtttgtgttgggtgattcaaccaccaaaattaattagggactaggtgtaagcctaattccctttcaatctcccccattttggtgattgatgccaacacaaaccaaagcaaatatggaagtgcataattgaactagtttgcataatgtatgtgcaaaggttgcttggaattgagccaatataaatacttacaagatatgcatggattgtttcttacttataacattttggaccacgcttgcaccacatgttttgtttttgcaaattcttttgtaaatccttttcaaagttcttttgcaaatagtcaaaggcaaatgaataagattttgagaagcattttcaagatttgaaattttctccccctgtttcaaatgcttttcctttaactaaacaaaactccccctaaatgagatcctcctcttagtgttcaagagggttttgatatatttttgaaatactactttctcccccttttgaacacagtaggaaaaccaattgataatattcttggaaacacgaagtttttgaaattggtggtggtgcggtccgtttgctttgggctcttactttctccccctttggcatgaatcgccaaaaacggaatcattagagccctcgaagtgctaccaaagacgaagtccttttgcttggtgctcatgttttctcccccaagaatggagagtgacttggagtgacggcgaggtatg

SEQ ID NO: 8637 - DNA, 1589 bp, Zea Mays
caggacgatttattttcgaatcatgcgcgaggagttatttccgagcaaattcaaaccaaactctcgaccaagttaatcgcgtagtcgcccgttcgtccgaactctgtttcactctgttccgcgcacagacgaattccgcacgagcatttttattccggaaaatatttagcgcaactcgatttcgcgttttgggccaaatccagcccagcccaataggcccatttgaaaccctaaccctagggtttctctataaatacggaccccttcccttgcacatggcaattttgcactcccacccctctaaatttttcagccgccactctcttcctccttctccctcgcgcaggtctgctccagccgacgccctgtcttcttcctcacggtggtcagcagggagctcggccagcagccatggcctcctccacttcttccccatggaagccggctccttctccatgctccctccctagccgagcacctccagcagccatggccgagcttcttttctcccctgctgtcccctgcgcgcagggagcaccaaggccagcgtccccttctccctggtttcccttgcgcagtggcagaagaatccatggacgtcgcctccccatgctcctatgcgtgcagggagctgcgcccttttcttctcgacagcgctcggctccctcctccctgcgcattccctgccccactgccagcaggaggccagcggccctcatcctccagctcccgccatggtcgagctcagcagcgcagggcgcgccctatttccttgctccatggccggcgcccaacagcagtcctgcgcagcgccgctgctccatcccctccacagcgcaggccctcttcctccccacacagccagcgtcggggacattcttccccatggaggccgagcccctctcccaaccagcgccctccctgttcccctggacgacgctgtcctttcccatgccgctgctccaccacgcgcactacctgcttgacagaatgtccgatctatgcacagcccttcttcctcctctcccatggtgctgctcgtcgagccctccatttttttggatgccggcaagaaaaatcggcgcagcagccctccagttcattctccacttccccgtcgcgagtcatcgctctcgcgcttgctgcgcagcgaacagcacgtcggggtgcccgccgggtgtttgctgtttttttgcgcagccccgtggtcgtcgtcgttcaccccggtgagactgcgacgctccttgttcgattccgcatcgacattattttcctatgattaattatgtatgtgtgctgctttgttttatttttgtggaggagagaaccccgtattttgcgaggagaaggcaagtcgttcaacgctcgtcgatggcgaagctatgcacaaatcggaatcaccgtcgtccttacaaacgccgtttgagtttgtttatggaccgagagatgatgatcgggctagtgatgtggtgccaaccacaagatgcagtcggtggacgacccaaggaaggatggacttaaccagtggatgctcgccaagcgagtacctcccccagcaaacactacttaagtgttaaattaaaggcaag

SEQ ID NO: 8638 - DNA, 346 bp, Zea Mays
ataaaacatattccccaagtgccataccttgcagctttgtcaacattttcttttatttctttactgcggtactctgaattgaagtcaccaaataataccaaagcctgcaacactgaggatgtacattcaaccgttctgccaatagatgaattgagtgacttaattagtttgcaaggcaaatcgacatggcagcatgaaattcagatttagaagagtggccgttgttcttacgggtaatcggcgacaatatttcgaaaactctccgcaggattcagaatctaggatgccaaatcaaacaaagtcagtctacatggatctatagtatctacatatataaattactcgt

SEQ ID NO: 8639 - DNA, 338 bp, Zea Mays
cagttactcacctgtctttcgcaggaacgatagctctctgcccagccaccagttttgagttgtattgagagcaaaaattcacatgctttccgaatgcaaatattgttctcataatttctcccagcagcaactaagccatttatcgcatggagggtcccatagataaaacatattccccaagtgccataccttgcagatttagaagagtggccgttgttcttacgggtaatcggcgacaatatttcgaaaactctccgcaggattcagaatctaggatgccaaatcaaacaaagtcagtctacatggatctatagtatctacatatataaattactcgt

SEQ ID NO: 8640 - DNA, 2171 bp, Zea Mays
ctctgagctgtgatggagcaagatgttggtggtcagaacagtcattcgcagttcatcaacaatgatctgaggattgtgcccgctgatgaggatgggccatctcagtccattaacaatggtagtagtgctgcccctattaacttagaggagggtactgctaccaacaatggtactggagatgcaaatacttcagaaaatgttgatggtaagaatcataaaagaatttgcacatctaaagtgttgcaggattttgaaccactataccacactttagacggcaagaggatcaggtatggtggtaagtgtcactggtgcaaatgtacattgactgctgtgtctactagtggtactggtcatttgcttaggcatcaacgtgattgcaaagttaagctttctaagcagggcaagcagtcagtccttaagtttaaccctgatggttctgtgcgtaactgggattactgtcctgatcgtgctagaactcagatgtgtaggttgattgctaggcttgatcttccacttaattttgctgagtcacctgcttttgaggagtatattagactatctcataatcctgtctttaagaaagtatctcatcaaactactgctagggactttgtcaagttctttaatgatcgtcgtaagatagttgttgagtgcttgcaatctgtttcttctattgcaattacatttgatatttggagtggtaatgctaaggaagactatcttagtgtggttgttcattatgtttctaaggactaggcattagaaaagagggtcattggccttagactaattgaaacagctcacactggtgagaacattgctgagagggttatgactgtgcttgaagattatggtgttgttaataaagttttttctgtaaccttggataatgcctcctccaattctaaagctatggagaagcttagtccatccttagctgcatatgttggtactttattcttgcatcaacgttgtgcttgccatattatcaatttgattgtgaaatgcggcttgaaaagactgcaaccttaccttgattcatttagaactacaattgtcttcttgaatgcttctaatcagcgtattgctgcatttaagggttattgtgttgttatgaatgtacaacctcgtaaatttggcattgacatgcccgtgagatggaattctacatatcttatgcttaagcatttaattccttacaagggaacctttggtgtgttcatggacactaactatcctagaaaaccaggtgaacctaatctattgacaaattcgcattggtatgtggctgaaaagttgctttagtttcttgaactgttttatgatgctactgtgaccctttctggggtttactatcctacatctccacttattatgcataatattcttgacattatccagcatttaaatcagtatgaaaatgatgcattgcttagacatgttgttgctcctatgaaatctaagttccttaagtactggagggatatacctatgctctatgcatttgcttttatacttgatcctagagccaaactaaggggttttaagcaatatcttaagaattttatctggtctatctggtactaactactcactttattttacttgtgtgaaaagtgaattgtttaccatgtttaataaatatgatgttaagtttggtgcagttaggcaacaagtgcctcctcctcctcctgtcacaggtaaaaggaaacaaaactggggattgatttatggatctgattctaattctgagttttcatatcctggttctagtactcctaaccttgcagctggaacatcagcatctgctttgcttcaacaagcacactctagtgctggccttagttcacttgacacagaactgtcctcctacctggacagtgacactttgcagaagtttgatgaggacttcaatatcctaaactggtggcatgaacataagttgtcctatcctattctctctatcttagctagagatattatttctgttcctgtctcaacaatttcctcagaatctgcatttagcctttgtggtagaataattgaggaacggcgacgtcgcctagcactagaaatggtagagatgctactttgcatgaaagattgggaactaggagaagctagaggccaacactctacacaggacgaagaccttgaagaagcatttg

SEQ ID NO: 8641 - DNA, 1670 bp, Zea Mays
catgcagatcccatcacatcaacccaccactctctcgaccctgacaggtggctctaccatccatcacgccaccatcggacccaccgtcagcgacgcggccagaagaaccagcgccgccgtcgccgtcgccgcccacccgccgcagccccgcgccgctccgctctgcaaaaagatggggcccgcaggccagtcaaaagtgcatttataaccacgcagttgaacgcacaagccgacgaacgaacgaagcaaagcaacaggggcagggggcagtacacggcggaaattattggtgcgcctacgtacagtaggcgcggccgtacccagaatcccagacccacgccccgcgaacggctacttctcctccaccagggcccggcccacgaagcatcgagtaggagtgctgtccgcacgggtacgcgtgcgcggggcccgcagctcgaccgggttcgccggccagcctcccgtgctttgacccgacacgcatgcctgcctctcgctgacgcgcggggtcccgcgcgtcagcagcgcgagtgcctcggtctccgcgcccgctggccggtgcctgactcactgactgcctgcatgcttgcctgtgcgactgtgcccgcctgcccggtagtggtggtgggatcaaatgcgcctgggttcggaatacccgacggctgcggtcccaacacgtgtgcaatgcaagcgtagtgcggctagcctgccccggctgctctgctctagctactacagtacgtggtacggagagaggtggagcgcagtgccagtgggtcacgtaccatcatgtcggcggtggaggggccagggccgggggcgaggcccacgccggtgccggtgccggtggccggggacgcggccgcgagcggtgctggcgcgtgcttcttcttcgtcggcgtcggcttcttgctgggcgcgggcgcgggcgccgcgaggacgggcgccggggccggaggggacgacgacggcgcgggggcgagcgtcggcgctgggaccggcggggaggacgcggcgggcggaggggcgctcgcgcccacgggcgccggcgccggcgccgcggccgggggcggcaatgcgggcggcggcgaggagctggtgggggctggggtgggcggagacggcggtggcgtcggtggggtcggggagtgggtgggcgcgggggaggcggccggggaggtgagcttggcgccggcgtgggacgaggacggggacgcggcgggcgaggtggagatgtgggtgtccttggagggcggcggggaggaggaggatgaggggcttggggcggcggcggcggtagaggagggtgaggtggatggcgcggcggctggtgactgggtctgggaccgggcggtggtcatggcggcggcgaggagcagtagaagctggaggaggcggtgaggggccatggggaggggaggggaggacactagggctctgggctctgtagtgtgactgtgtgactatgagtgatgagcgagggagaagtgtgagggggaagagcagagagagcaagctgggctggtttctactggccttggctttgaggggagcagagcagcggtggtaaaggctgtgcgtcgtgggcatgtgaaaggacctgcctctgcgtctgcgtgtggtgctgtctctcgtctcgtggtcatgactgaacaaaggctgatgatgca

SEQ ID NO: 8642 - DNA, 1157 bp, Zea Mays
agctggggtggagctgtaacagttcgccacggctaggctcctctcccctctcagctctcagctgcccctcctgcatgccgatcgcctccaagctcgtctacttccagcgccgccccgcgccggcgccgcctgacgacccgggtcccgagcctcccgacccccgccgcccccgccgccgccgccgcagcggctccctctcctcctctcaccagaagccgggcaccaaagggatcacgctgctgcagccaagcctccggggccagtcggaaaggcagcagggcttcttcacacggcctccagcgcagggcttcaccaccgcagcacgtcggggtcggaccacggccggcttcccgacgccgtgcagcaggccagggaacggctccttcagaggctcggcagcgtggacctggtcctggcggcgggacgaaggcacaagacatggccgctgcagacactctgggctggagctggaggactcgctcgccccgtcgttgacgcctcttcgggcggcggtcaaaccagctgcttccagttccagttccagcccggtgaacgtgaacccatccctgtgttccccaaaccggcggcctccgcggtacaggaagcagaagacgggcgagccgcgcccgcggacgcagcttctgactgctccatatgcctggagaggtgcggcgccggcggcgggctcacgcagctgcgctgcgggcacgtcttccactccgcctgcctgcagcgctggctgcggtcccgcgccgactgcccctactgccgggccaccgtgcgagctcgctcctaacagcaggaaggaaggaaggatggatgaatgaatggaaagtgtggaactggatgacgatggttttattaaccgtgtgtcgctgctcacctcttgttgtaaccactccactagtatgggttttttttcttttcttcttcctttgcccgttgaggtagactggtagtactgagctttgcggcttcagcgattcagtgtgatatatgtgtgtatgttgtgtctaatctaatgtacgcaggaaaattagatctgtatcgttaaaaagatctcaactttagaagaagatagataacactgaaagagtcagctttctgtgaactagatatttaattttgcaaacagaagttgagtgttagggggtgtt

SEQ ID NO: 8643 - DNA, 1778 bp, Zea Mays
ttgagagctgagagaaaagaaagcagctggggtggagctgtaacagttcgccacggctaggctcctctcccctctcagctctcagctgcccctcctgcatgccgatcgcctccaagctcgtctacttccagcgccgccccgcgccggcgccgcctgacgacccgggtcccgagcctcccgacccccgccgcccccgccgccgccgccgcagcggctccctctcctcctctcaccagaagccgaaaccggagggttttcttcttgattccaaaactccggtcttccagcagactgcagatcgtatccgtaacggagaaaaaaggttggtgttttcttggtggagcagagctgccgatggatgcagatgtctagtgtactgtactgtacacccttatggttgaggagtccatcagtaattcggtttcgatgaaggcctaggcctagcctcctcgttcttcaggagcatcgaggagtccaccagcgtcctggaatattcggcaccgcttgaatgagaagttagctcatagtccatctcgaactaggcagagtattattgtagcgaacctagcaggcaaaaaaaaaaaacagaggatatcctaagttagaaagcatggatgaatccctggcatggatgattgcagcctctcaaaatattagtcaaaagaaaagagagtgtaaaaacgatgtgggcttgtacaattggtataaacttgaatgggcaaatttgtgttatcatgtgtgtgtgttgatgtgttcccttcaattcatctacatttgcgaacaaagcttggcagtagtttagctactgaatctagctgcacaggagcatgatgttccagggcaccaaagggatcacgctgctgcagccaagcctccggggccagtcggaaaggcagcagggcttcttcacacggcctccagcgcagggcttcaccaccgcagcacgtcggggtcggaccacggccggcttcccgacgccgtgcagcaggccagggaacggctccttcagaggctcggcagcgtggacctggtcctggcggcgggacgaaggcacaagacatggccgctgcagacactctgggctggagctggaggactcgctcgccccgtcgttgacgcctcttcgggcggcggtcaaaccagctgcttccagttccagttccagcccggtgaacgtgaacccatccctgtgttccccaaaccggcggcctccgcggtacaggaagcagaagacgggcgagccgcgcccgcggacgcagcttctgactgctccatatgcctggagaggtgcggcgccggcggcgggctcacgcagctgcgctgcgggcacgtcttccactccgcctgcctgcagcgctggctgcggtcccgcgccgactgcccctactgccgggccaccgtgcgagctcgctcctaacagcaggaaggaaggaaggatggatgaatgaatggaaagtgtggaactggatgacgatggttttattaaccgtgtgtcgctgctcacctcttgttgtaaccactccactagtatgggttttttttcttttcttcttcctttgcccgttgaggtagactggtagtactgagctttgcggcttcagcgattcagtgtgatatatgtgtgtatgttgtgtctaatctaatgtacgcaggaaaattagatctgtatcgttaaaaagatctcaactttagaagaagatagataacactgaaagagtcagctttctgtgaactagatatttaattttgcaaacagaagttgagtgttagggggtgtt

SEQ ID NO: 8644 - DNA, 1205 bp, Zea Mays
ttgagagctgagagaaaagaaagcagctggggtggagctgtaacagttcgccacggctaggctcctctcccctctcagctctcagctgcccctcctgcatgccgatcgcctccaagctcgtctacttccagcgccgccccgcgccggcgccgcctgacgacccgggtcccgagcctcccgacccccgccgcccccgccgccgccgccgcagcggctccctctcctcctctcaccagaagccgctgcacaggagcatgatgttccagggcaccaaagggatcacgctgctgcagccaagcctccggggccagtcggaaaggcagcagggcttcttcacacggcctccagcgcagggcttcaccaccgcagcacgtcggggtcggaccacggccggcttcccgacgccgtgcagcaggccagggaacggctccttcagaggctcggcagcgtggacctggtcctggcggcgggacgaaggcacaagacatggccgctgcagacactctgggctggagctggaggactcgctcgccccgtcgttgacgcctcttcgggcggcggtcaaaccagctgcttccagttccagttccagcccggtgaacgtgaacccatccctgtgttccccaaaccggcggcctccgcggtacaggaagcagaagacgggcgagccgcgcccgcggacgcagcttctgactgctccatatgcctggagaggtgcggcgccggcggcgggctcacgcagctgcgctgcgggcacgtcttccactccgcctgcctgcagcgctggctgcggtcccgcgccgactgcccctactgccgggccaccgtgcgagctcgctcctaacagcaggaaggaaggaaggatggatgaatgaatggaaagtgtggaactggatgacgatggttttattaaccgtgtgtcgctgctcacctcttgttgtaaccactccactagtatgggttttttttcttttcttcttcctttgcccgttgaggtagactggtagtactgagctttgcggcttcagcgattcagtgtgatatatgtgtgtatgttgtgtctaatctaatgtacgcaggaaaattagatctgtatcgttaaaaagatctcaactttagaagaagatagataacactgaaagagtcagctttctgtgaactagatatttaattttgcaaacagaagttgagtgttagggggtgtt

SEQ ID NO: 8645 - DNA, 769 bp, Zea Mays
tctcactcctcctacgctaatgacgcatagacccgaggccactatagatcttcctatcaccgggagcgcgctggcgacggaccggccctggccgaaatcctcgtgggggccagctggcgacgcaaccaccatcccacctcggctacaaaagcggacacccctgccgctcctgcagatgatccccttccgccgtcgcactaagagcccaaaagacatcgccgccgagcgccattaatagaggaaagctgccgccggtgaatctcatctatgccaacgcccccgtcttcgacgcaccgccaagcagaatcacctgggcataggaaagccgtccgtgcccttagggtgaatcaggagtcttcgggacgcgtggaattccatgtcagttggccgggaagatcaccgccgcgtgcatcgtggcgggcagctccaccctcaccgacatagcgagagaagaacaggtagcccaggaggaggtctagtacaaggagtacgagcttgtctttgtggcgtctcgcagtcagcttgatggcgccaaggaataattatttgttttctttattgttatcatttatttttgtaagacacttccactatgtaataatggttgtgacatttatcgctatacacttggtcattatatgtgttgttcttctttggcgtacatatgagacgcacacggctttatcccttaaatctgggtgtgacaatgtaagaatggctaagtgttgctagagttcaaataagagtcccatttacaaaggggttgtcc

SEQ ID NO: 8646 - DNA, 517 bp, Zea Mays
atttacttatacttagtaactgctaataaaatttgaccaacttattaaaagcaatgctcaactttaaccattatttgttgatcagccttacacttcacatgagctcccacctttggtgagttcatgcacattattccccacaacttgttgagctatgatattttgtgagctcacccttgcaatatataaatccccccacaggagaagaacaggtagcccaggaggaggtctagtacaaggagtacgagcttgtctttgtggcgtctcgcagtcagcttgatggcgccaaggaataattatttgttttctttattgttatcatttatttttgtaagacacttccactatgtaataatggttgtgacatttatcgctatacacttggtcattatatgtgttgttcttctttggcgtacatatgagacgcacacggctttatcccttaaatctgggtgtgacaatgtaagaatggctaagtgttgctagagttcaaataagagtcccatttacaaagggg

SEQ ID NO: 8647 - DNA, 2298 bp, Zea Mays
ggaaaagaaaaaaaaactggtcccctccgccctccgccgtaccaccgcgcctccgcatttcgcatcaagccagagcgggggcagaggcgcctctcccgccggagacccgagcgagaaccgccgcttccccctccttctcctcattttgaaatcgcgttttggcggcctatctcctccgcaccgcgcaccatctctcctccgctgcaacgctacttaaccgcctcgatttgctccccatttccccgtccagcctagatagacctgagccgaaaccctaggaccccgcgcctccgcttccgcttccccctctcccgcagctgacgaggccgacgatgggggacaaggagaacgcacctcccttgggggcccggggcgcggcggcgccccggctcacgcgggccgcggccaagcgagctgcggcggcggcggcggcggcggagggtccgggcgacgccaagcggcggcgggtggcgctcggggagctcccggcgctcgccaacaacgccggcctccgcgcgccgtcctgccccgtcaagccctcgaagcctgcgtccaggcccgggaggcacgcgaggaatgttgcgccggaggcccgcgggccctcctccgcccacgaggccgagcgctgcgcgtcctccccgccgcgcaccgccgacgccgacgccgagtctaactccgtctccaaccccgcgccgcgcgccaccgcctacgccgactcctgcgcttcctcctcgccgccgcgcgccgccgccgccggggcgcccgccgacccccagctctgcgggtcctacgcctccgacatctacacctacctccgctccctggaggtggagccgcagcggcggtccagacccgattacatcgaggcggtgcaggcggacgttacggcgcacatgcgcggcatcctcgtcgactggctggtcgaggtcgccgaggagtataagctcgtcgccgacaccctgtacctcgccatctcctatgtggatcgcttcctctccgtcaatgcgctcggccgcgacaagctgcagctccttggcgtcgcctccatgctcattgctgcgaagtatgaggagatcagcccgccgcacccggaggacttttgctacatcacagacaacacctacaccaaagaggagctcctcaagatggagagcgatatactcaagcttctcaagttcgagttgggcaatcctaccattaagaccttcctgaggcggttcacaagatctgcccatgaagacaagaaggttgctaacccattcttatttatgcgctccatcttgttaatggaattcttggggagctacctggctgagttgagtctactggattatggctgtctccgattcttgccatcagtagttgctgcttcagttatgttcgttgctaggctgaccattgatccaaatgccaatccttggaacatgaagctgcagaagacgacaggctacaaagtttctgaactcaaggattgcatcgtagccatacgtgacttgcagctcaacaggaaatttccatcattaacggcaattcgagacaagtacaagcaacacaagttcaaatgtgtgtcaacgcttcttccccctgttgtggtccctacttcatactttgaagacttagctgagtagctgctcttggactgcaccactgtgaggctaacaatctgagctctccttgagctcttagggacgggagaataactgtgttatgagcttcttctcagttaagtagggttccaaaagctatttaagtgaggttctttaggaatcgcagctgagttactagtagtgaggccaggcattctcttgttttgtgaattgtattctttgtatgatatcctagtcacatcttgccttggtctgttgcccacaatgtaatgtttgatacgttagacctttccgtctgattgatctcagtaacaaattctgttactccatccatccaaaaaagaatgcaattctagcatagtaccaagttaaagtatcttgagtttcactaattatatatataaaaaatatcaatattcattagatttgccgtggtatatatttccatagcatacctatttggtgccataaacattttttcaactatatatagtacatatttggtcaaactttaggtactttaacaaagaatgtgcctagaattgcattcgatttgggggcggaggtagtagtacctgtcaagtgtgtgatatacctaaagggacttgtacaactagaacaatttcagtattatgcttattttggacagtggtaaaatataatatatggttgcctatttgttgcaactatt

SEQ ID NO: 8648 - DNA, 2140 bp, Zea Mays
tgacacgctagatctggggggagagagaagagaaccgacgtgtagggggaccgcatgcaaggggagggggagaggcagcggtaaccgctgcgcacagccttaccccatgttttcccgcttattttgctgcccgccgatgctagagctgtgtcttgttccgatcccgaatcgtttgtgacgaagagttcttcgcgctgacgtcaatatatagagagagctaaatacagtttccagctacaggaacacttggttgcagcgccatcaaacaattctaacagcgactcaaacaacaacgccagcagcatcaacaatatgtccaaaattcagtaccaccacatggtttctcatctgacggtgagctgaacctgatcgcatctccagaccagtttattcagcagatgaacatgaacctcgacgaaggccctgttccaatgtcgcgagataaactttagcagctattttttagctacttttagccatttataggccccatttcaatctcacgggataaagtttagcaggaagctaaagtttagctcatgagattgaaacggggccgaactcacgcactcgatctcgaaccaaccagaccacaccagcgtatcaccatcagagcctgaggtccaagtcgatcttactcggctgaatcggctcacacgcttgctcatactccgagtgcggcgctctcagcctgaagctcccaggccaggccgagctcggcgcctcctcgcacgggaccgttgcccaggccgccgccgccacgccgccctcgaggaacctcgccgccgtcctgaccgccggcgccggcgccgggttggctcggagggagcgcatgagggcggcgtgcgcgtgcagcggcaggccgcccacgaccacccgctgcgcgtggtacgaggatcgcttggcggcgctgcgctcccgcttgtgcgcgttctggtgcccgcccagcgcctgcgagctgaagaacttgcgcaggcagaagttgcaggagaacaccttgtgcgggggcggcttggcggcggacccggacccggacccggactcggagtccgcggagcagctcgcggcgtccggggacggagacggcgacggcgattcgctcgcgcccagcgtcaggttcagccacgccgcgccgtcgccgtgctgctccctggcttgcagcccctggatggctggatggtgcatcagaagcagcttgcagtttgttgctttataaaggaggacgagatgcgctgtggccacatgctgttctttctgctaacttccgcatcaggtggtctttctttctttctttcatggcgagatgggacgggagccgagttcttgctcgcctttgcttgtgcaagccgtgacggcgatgacgtcggaacccgaatgtgctgctttggggctggtgggatggatagggataccgagtcaacttgatcaagatagaaaaggagagacgcctaggggttcctcctccttccaggctcccacgtatactttacaatatctgcagacatgtgtcattttcggtcagatatgcagatctaggtgcatattttcaagcacaaattcagttgaacacatattgacactcaaaagtgttgttgcctagaactttagcttgcactgttggtaaagtaacgaggaggagtatgttggggccttcgtctttcgaaggtgctcaaaaacacacttaattattggttgtcagcatgttcacaagtgttgtaggaacttcggtattgaataccttcggaataggatgaagataaagacgaagttgttaagctttgtcacaacaacacatagagacgaaggagaacattgccgggagaaggcgtccacggttccgtgtccaagctgttagaggcagaagtcaatattgccctcgcatcgttttgtaaattatatgtacaagtcttgtgggcatatttgttattccatacaaagttgtacgatcccctataaataggtgaacattgacctgcataaagtaccttttggagggctaaagagtgattcgtgtagtcccttcctaatgcaccttcgctctaattcattctattgagccgaaggtacgattgtaaatttatgatacaaaagaggagaaatggaatgttgaaatatcaaggatgagttaacgtgtttcaac

SEQ ID NO: 8649 - DNA, 2147 bp, Zea Mays
tgacacgctagatctggggggagagagaagagaaccgacgtgtagggggaccgcatgcaaggggagggggagaggcagcggtaaccgctgcgcacagccttaccccatgttttcccgcttattttgctgcccgccgatgctagagctgtgtcttgttccgatcccgaatcgtttgtgacgaagagttcttcgcgctgacgtcaatatatagagagagctaaatacagtttccagctacaggaacacttggttgcagcgccatcaaacaattctaacagcgactcaaacaacaacgccagcagcatcaacaatatgtccaaaattcagtaccaccacatggtttctcatctgacggtgagctgaacctgatcgcatctccagaccagtttattcagcagatgaacatgaacctcgacgaaggccctgttccaatgtcgcgagataaactttagcagctattttttagctacttttagccatttataggccccatttcaatctcacgggataaagtttagcaggaagctaaagtttagctcatgagattgaaacggggccgaactcacgcactcgatctcgaaccaaccagaccacaccagcgtatcaccatcagagcctgaggtccaagtcgatcttactcggctgaatcggctcacacgcttgctcatactccgagtgcggcgctctcagcctgaagctcccaggccaggccgagctcggcgcctcctcgcacgggaccgttgcccaggccgccgccgccacgccgccctcgaggaacctcgccgccgtcctgaccgccggcgccggcgccgggttggctcggagggagcgcatgagggcggcgtgcgcgtgcagcggcaggccgcccacgaccacccgctgcgcgtggtacgaggatcgcttggcggcgctgcgctcccgcttgtgcgcgttctggtgcccgcccagcgcctgcgagctgaagaacttgcgcaggcagaagttgcaggagaacaccttgtgcgggggcggcttggcggcggacccggacccggacccggactcggagtccgcggagcagctcgcggcgtccggggacggagacggcgacggcgattcgctcgcgcccagcgtcaggttcagccacgccgcgccgtcgccgtgctgctccctggttgcaggcttgcagcccctggatggctggatggtgcatcagaagcagcttgcagtttgttgctttataaaggaggacgagatgcgctgtggccacatgctgttctttctgctaacttccgcatcaggtggtctttctttctttctttcatggcgagatgggacgggagccgagttcttgctcgcctttgcttgtgcaagccgtgacggcgatgacgtcggaacccgaatgtgctgctttggggctggtgggatggatagggataccgagtcaacttgatcaagatagaaaaggagagacgcctaggggttcctcctccttccaggctcccacgtatactttacaatatctgcagacatgtgtcattttcggtcagatatgcagatctaggtgcatattttcaagcacaaattcagttgaacacatattgacactcaaaagtgttgttgcctagaactttagcttgcactgttggtaaagtaacgaggaggagtatgttggggccttcgtctttcgaaggtgctcaaaaacacacttaattattggttgtcagcatgttcacaagtgttgtaggaacttcggtattgaataccttcggaataggatgaagataaagacgaagttgttaagctttgtcacaacaacacatagagacgaaggagaacattgccgggagaaggcgtccacggttccgtgtccaagctgttagaggcagaagtcaatattgccctcgcatcgttttgtaaattatatgtacaagtcttgtgggcatatttgttattccatacaaagttgtacgatcccctataaataggtgaacattgacctgcataaagtaccttttggagggctaaagagtgattcgtgtagtcccttcctaatgcaccttcgctctaattcattctattgagccgaaggtacgattgtaaatttatgatacaaaagaggagaaatggaatgttgaaatatcaaggatgagttaacgtgtttcaac

SEQ ID NO: 8650 - DNA, 2984 bp, Zea Mays
tgacacgctagatctggggggagagagaagagaaccgacgtgtagggggaccgcatgcaaggggagggggagaggcagcggtaaccgctgcgcacagccttaccccatgttttcccgcttattttgctgcccgccgatgctagagctgtgtcttgttccgatcccgaatcgtttgtgacgaagagttcttcgcgctgacgtcaatatatagagagagctaaatacagtttccagctacaggaacacttggttgcagcgccatcaaacaattctaacagcgactcaaacaacaacgccagcagcatcaacaatatgtccaaaattcagtaccaccacatggtttctcatctgacggtgagctgaacctgatcgcatctccagaccagtttattcagcagatgaacatgaacctcgacgaaggccctgttccaatgtcgcgagataaactttagcagctattttttagctacttttagccatttataggccccatttcaatctcacgggataaagtttagcaggaagctaaagtttagctcatgagattgaaacggggccgaactcacgcactcgatctcgaaccaaccagaccacaccagcgtatcaccatcagagcctgaggtccaagtcgatcttactcggctgaatcggctcacacgcttgctcatactccgagtgcggcgctctcagcctgaagctcccaggccaggccgagctcggcgcctcctcgcacgggaccgttgcccaggccgccgccgccacgccgccctcgaggaacctcgccgccgtcctgaccgccggcgccggcgccgggttggctcggagggagcgcatgagggcggcgtgcgcgtgcagcggcaggccgcccacgaccacccgctgcgcgtggtacgaggatcgcttggcggcgctgcgctcccgcttgtgcgcgttctggtgcccgcccagcgcctgcgagctgaagaacttgcgcaggcagaagttgcaggagaacaccttgtgcgggggcggcttggcggcggacccggacccggacccggactcggagtccgcggagcagctcgcggcgtccggggacggagacggcgacggcgattcgctcgcgcccagcgtcaggttcagccacgccgcgccgtcgccgtgctgctccctggttgcaggcttgcagcccctggatggctggatggtgcatcagaagcagcttgcagtttgttgctttataaaggaggacgaggtacgactagcatcattgaatttttttggggggaagggggtaataattgagggcttgtctctgtgaggaatctggaggtgaagaactttgtctggagttttcagtggatatctatcaagttgcttatctatctcccatccctgggctctggcccatgcatatataaatgataaatcttttatcactccacttgccatggacgacccccatggcgatggcgatttgatttcctggatcacccgccccatctcacttctcgacgtgcgcgcgccgctgttcctcttcctttttttcccaaaagaaaacggagtgacaatacagctcatggcaaaggtttttatgctctccatccatccatgcaggtgccatccggccaccctgcaggggatgctatagtagctaccgaaagcgacctgccattgacaagagtcatgagccttgttgggattattatgaggaacgccggcagcttcagactctaggggcgactgttaggtcaggccacaacagggaatccctcctgcgacaggcaccttgtcctgtcttgtgcgccactgttgcttcattgcttgggcatttgtgcggtgtgcactgctgatgacacacacagtccagcacaagcctttttcatcaattccagtggcagcgtgcctagcttctctggaaaccaattgcttgcttgcttgcttgcactgaaaggatgctggttaatggttaggtcaggactcacgatgatccggatcaacaggcgacagcagcaatgggtgacgagagaagtagtaacagctatctctttctttgggatccaaataattgagttgtttttttgtactgcagatgcgctgtggccacatgctgttctttctgctaacttccgcatcaggtggtctttctttctttctttcatggcgagatgggacgggagccgagttcttgctcgcctttgcttgtgcaagccgtgacggcgatgacgtcggaacccgaatgtgctgctttggggctggtgggatggatagggataccgagtcaacttgatcaagatagaaaaggagagacgcctaggggttcctcctccttccaggctcccacgtatactttacaatatctgcagacatgtgtcattttcggtcagatatgcagatctaggtgcatattttcaagcacaaattcagttgaacacatattgacactcaaaagtgttgttgcctagaactttagcttgcactgttggtaaagtaacgaggaggagtatgttggggccttcgtctttcgaaggtgctcaaaaacacacttaattattggttgtcagcatgttcacaagtgttgtaggaacttcggtattgaataccttcggaataggatgaagataaagacgaagttgttaagctttgtcacaacaacacatagagacgaaggagaacattgccgggagaaggcgtccacggttccgtgtccaagctgttagaggcagaagtcaatattgccctcgcatcgttttgtaaattatatgtacaagtcttgtgggcatatttgttattccatacaaagttgtacgatcccctataaataggtgaacattgacctgcataaagtaccttttggagggctaaagagtgattcgtgtagtcccttcctaatgcaccttcgctctaattcattctattgagccgaaggtacgattgtaaatttatgatacaaaagaggagaaatggaatgttgaaatatcaaggatgagttaacgtgtttcaac

SEQ ID NO: 8651 - DNA, 1308 bp, Zea Mays
gtgaatactgctcagtgcgggcacagacacgacggcgctgacaatggagtgggcaatggcgcagctgctgatgcaccgggacgcaatgcagaaggcgagagccgagatagacgccaacgtcggcacatcccggctggtagacgagtcggacacgactcacctcccgtacctgcaatgcgtggtgaaagagaccctgcggctctgccccgtcggcccagtcatcccggcgcacgaggccatggaggactgcgccgtgggcgggttccgcgtccggcgcggcaccatggtcctggtgaacgcctggctcatccaccgggaccccaggctgtgggaggcccccgaggagttcaggccggagcggttcctggacgccactgccacggtcgccgcccccttgctgccgttcgggcttggacggaggcgctgccctggggaagggatggccttgcgtctcctcagcttgactctggcggctctcctgcagtgcttcgactgggaggtcggtgggtgtgttgacatggccgaaggcgttgggctgtccatgcccatggccaagccgttggcggcagtctgtcggccccgggagttcgtccagaccgtgttgtctgcttcaacatgagtagccggatgcggttcttttccctgatacatgaatccagaaggggattgaagaggtttaaatccccttctagttatttttgactaggaggaggtttaaatccccttctaattatttttgactaggaggagatttaatcccctctatctctttctggattgttgtaaccaaacatgcccccgaagaataaataaggattgggtgaagcagaactgaagctattcagtcacgcagaactgaagctattcagttcgtccagaccctgttgtctgcttgaacatgatcgatgcatttgttctttgtcaacagtgggtgttgagtccttgtttccatgtcgtgcggcaggttgtttctgctgctgtattgtttgtttgattgatgttctttaggttcggtttcaacggtctgggattttttttctcttcattttgggcctgtagtgctgtacatgtaccttacctgttgtctcttgaaataatgggcgtgttcggctggctgcaagccgacactgttgcagctgtttggactgctgcagctgcaatccatagagagaaaaatactgtagaagccgcagccgcagtcggattgcagccgcagcaagccgcagcgaacaagctgataacacggcaaatctcctgccgtattttccagaaaatagaaatcatccagcggttttcatagaacatacc

SEQ ID NO: 8652 - DNA, 401 bp, Zea Mays
ctatctgtagcagctcctcattgtcggacatcctcctgtagccctgcaccatccgcacccatatggtgtttgacaaaatgcccaagtggagtgtcgtgtcatggacaaccctattagcgtcgtcggatgtttgatgttttgcgtagcccatccacgaaaccgccaaccctcggtgagatttcgttcttgcttcgtcgtttcatcgatcgccgtctatttgctaatgtgaagtgtgtatatgtgcctatgtgtgttgaggagcgaaatccgtggaatctaggtgaaaaagaaacatagcacgtctgttgcttactagctgctgggtgaaaggattgaatcggctgtcgtggtcgtttagtgccgatcgagtcaactttagttgtggtacgttaattaatcac

SEQ ID NO: 8653 - DNA, 1179 bp, Zea Mays
atggattagtgcaaagtacaaggaaaaaactgccctatactaaattgtcatgatcctgacctagaaagtatatttctgacagtagtaacccaaaatctactttacaaaaatccgctcatgattacttcagtgtgaattatagtattttttcttatgggaatggaaatgaaaaacacgagatactttttttagaaatatggacgaatggaagtttaactcctaaagaagcactttatgaagcttctcgtaatttgattgatttatttcttccttttctacacacagaggaagagggcactagtttcgaagaaaataaaaacaggttaactccaccccttttaacctttcaaaaaagattcactaatctaaagaaaaacaaaaaaggaattccattgaattgtatttgtattgatcaattagaattgccttctagaacgtataattgtctcaaaagggccaatatacatacactattggaccttttgagtaagactgaagaagatcttatgcaaattaatagttttcgtatggaagatggaaaattgatatgggacactctagacaagcatctcccaattgatttacctaagaacaagttctcgctttaaatcattgcaattttttcctcttcttcattttttagttagaataaaaagaaaaaaagaaagcaatttggcatctttggcataatctatattttcgcgaaatggatcataataaaatagattttaggtatctagggaagattcacttggaacttggaagtaactatttcctagatacccatgcaggggacttcgcggtggaatgaatcaactcgaaaaatccctaaactaaaaagacctaaagttaaggatttatcaatgggtattgggtaatgttgctccaatacctaaccaaagagctattgcagtaccgattaaaaaaaagatcgtagctactgggcgacgaaatggattttggaatttattgacattctctagaaagggtactgtcaataagcccgttggcacagaaaccattgagagaacacccaataacttattgggtactgtacggagtatttgaaatacgggaaagaagtaccactcgggtaatatttccaaaggagttgcaaacagatccgcaggttcaccaatcaatgaccgctctagaaccgctaaacctacattacacgca

SEQ ID NO: 8654 - DNA, 4152 bp, Zea Mays
tctgcaaacgttaaaaaaattaactctcttctcgggagagcccaactagactcgcagtcgcgtccatggcgatcttggtaggcctcgtcgccgtcctctccgccctcttcgccgccgcgcttcggcgcctcctaatctcttgtcgccaccccgcatacgccgccggtttcttccacccgtacaccaacgacggcggcggaggcgagcgcgtgctctggtgtgcggtgcgcgccgtgcaggagctttgcccggacctcccctgcgctgtctacaccggcgatgccgatgcggcgcccgaggccctcgccgcacgcgctctcgaccggttcggtgtccgtctcctccgcccgccgcaggttgttcacttgaataagagaaagtggatcgaagcaagcacgtatccccacttcacaatgatcgggcaaagtcttggctctgtttatcttgcatgggaagcccttactaaatttaccccgcagttttactttgatacaagtggctatgcttttgcgtatccactagctcggctatttggttgcaaagtcatctgctatactcattaccctacaatcagttctgatatggttgaacgtgttaagcaccgcagttctatgtataataacaattctcttatcgcagggagcatttggctatcccgatgtaaaatcctctactataccatattcagttggttatatggtctggtgggttcatgtgcgcatcttgtaatggttaattcctcatggacaagatcccacatcacaaatatttggaagatcccagagcgtactaagagggtgtaccctccatgcgatacttctgctcttcagatgcttcccctggaaagaccaacaacacctcctgttcttatttcagttgcacagttccgcccagaaaagatagaaaagctctatagaagaccaaatacaaaaaaacctccttacggaggccagtagcaggcatacacaaagagatccatcagaaaacaaaccaaactaccaaaaagccaccctaaagatctgctaagggtgcagccaaatgagagaggccctttgcaccagatatttcccattttcttctttcctcatcagcagttctgagactcagagaaacacttggattccctccatcaaagacacatttattccgatacttccataaagttcaagctcctaatatgtgaagagagtcaagtccttttttggtaagaccaaagactgctccttctacctcttcccaccagcccaggaaggaatctgcatccggctgtggtgcaagcgaatagagaccaaatttcctcaataaaagataccaaaattctcttgagaaggagcatttcacaagaagatggtacaaagtttcttcctcttgttcacataagggacacttctccgggtgattcaagcctcgttttgccaacctatcagctgtccaacatctcttctgggcaaccaaccatatgaaaaaacgacattttggcaaggcccatgttttccatattcatttataatgaccaaaactcacagatcctaggaacaagccctcatatgaagatttggctgagtatgtgccgtctagagcaacactgaaaatatgcttatcctcaacctcaggctgcagctctaatcctgaaatcaaatcccaaagtcaagatttaaatataaaagcttaacttccattcacccacttcagagtaacatttatctatcttgctcttccaccaggcccatggccttcagctggaggcatttgcacttgctcttcaaaagctagaccctgactttcctaagccaaagattcaatttgtcggtagttgccggaataaagaggatctggacagactacaaaagcttaaggacaggtccactgaactacacatagatgagcttgtggagttccacaaggatatttcttacagggacctggtacaatttcttgggggtgccattgctgggctccattcgatgacagatgaacatttcggaataagtgttgttgagtatatggcagctggagctattccaattgcacataaatcggcaggaccgatgatggacatcgtgctagatgaggatgggcatcaaacaggatttctagcctccgagaaggaggaattcactgaagcgattatcaaggtcttgaggatgccagagtcggggaggcaagaaatggcagctgcggctaggaaacgtgcacaaagattttcagatcagagattccaccaagatttcactgagaccgtccgccctattttgtcagcaagggaaggctgactgacaagctgcagtttccacctaacaatctgaattctctgtcaagtttcacacggtacagtgaaagacttgcaaggggcactgaattggcagattattgctgctcccttttcccagactgcttgtgtattgtgctgcatcgtgtaacgctactgtgcagaaatagatcacagaaagaaaactttcgtcagcgatatagaattcaaaatggtgatcgtggtgcacggttttgaatctttcttgcggcactctagtaccaagttcatctttgtactgagcaaaagcttctgcttgaattgtgccactgactggcggacccatggactttttatactaattcaatctgtcttccactctagaatttccatgatggagacgcaaatattgatgaactataatttactaggaattccttagataaaacaaatgggtaagcacgttatcaccagggctttctgatcttagtgatctgccatgcacgtaacgaagtacacgaataacaaactcaaccaatctctaagctgatcaaccatgtctcattcaacagatgggagccaagtccagggagctccacagcagcacgtcgccgtcactgtcaccatggctcgcctcagacgacgaacttgtcgcctccggggcgccgtcaccgggtgaacgctcctcacgaggcggcttgacatcctctgctgtatccattgatggttcctgctcgtgctgctgctgaactatctctcgctgcttcttccggcacgcctccctcagcccggagagctgatcacgcacggcgtggccaccggcagcggcgccgaggcgcatcttgatgcactccgagacgccgctgagcgcgtagagcgacgccgagatcttcctctcgtagtccatcctgctcatcatcagctcctgaacggccgtggccggctcgccaccgccggcctccaccgcgccgccgagctctgccgccaccacctcgaacggcgagcagagcccgccctcgcaccccgcgcccggcgacgcggtctgctggtccatgaactggaagtccagctcctcctcctcctcctcttcctcctcttcttcctcgtcctctatttcttgtgagctgttctcgtcgctgccgcagtcgtagctcaagaagtcgtcgacttggaaggcgcactcctcgccgccgccgtacggttccgcgcacagcggcccctgcagcagcgccgccgccgcggcctcctgctgccgagctggggtggcgttgaggaggagctgctgctggttgttgcgggccctgagccgcaggagcaggaggttggtgaccttggacggaagagccggcggctgcgttggagaccccatcagccccggcagcggcggcggcgtcggaggaggcggcgcgggatgcgcggcggcggctactgcgacggaggaagccggcgaggggcgcggccagaagttggtgcgcgtgttggcgccgcggaggaggcacgcggcctcgtcgtaggcgcgggcggcttcctcggccgtgtcgaaggtgcctagccacacgcggatcttctggatggtgtcctttatctccgccacccaccgccccgacggccgctgccgcacacccacgaaccgcttccttccccgccgctgctgctgcgccgccgccgcctcagccaccgcggccatgctagtaccgcccgacgatgcccatgcacacgcgtctgttgaagccagagccagcggtggtggcagcgagtggacgccgtcgatacccgcggcggagtcggaggccttgcgcttcctcgccatggatgtagtagcccgatcgagctcagcgcggtggagggaggagatgatgaacaagcgcactccactgcaatatatagtgggagaggagggagtg

SEQ ID NO: 8655 - DNA, 3105 bp, Zea Mays
tctgcaaacgttaaaaaaattaactctcttctcgggagagcccaactagactcgcagtcgcgtccatggcgatcttggtaggcctcgtcgccgtcctctccgccctcttcgccgccgcgcttcggcgcctcctaatctcttgtcgccaccccgcatacgccgccggtttcttccacccgtacaccaacgacggcggcggaggcgagcgcgtgctctggtgtgcggtgcgcgccgtgcaggagctttgcccggacctcccctgcgctgtctacaccggcgatgccgatgcggcgcccgaggccctcgccgcacgcgctctcgaccggttcggtgtccgtctcctccgcccgccgcaggttgttcacttgaataagagaaagtggatcgaagcaagcacgtatccccacttcacaatgatcggcatttggctatcccgatgtaaaatcctctactataccatattcagttggttatatggtctggtgggttcatgtgcgcatcttgtaatggttaattcctcatggacaagatcccacatcacaaatatttggaagatcccagagcgtactaagagggtgtaccctccatgcgatacttctgctcttcagatgcttcccctggaaagaccaacaacacctcctgttcttatttcagttgcacagttccgcccagaaaaggcccatggccttcagctggaggcatttgcacttgctcttcaaaagctagaccctgactttcctaagccaaagattcaatttgtcggtagttgccggaataaagaggatctggacagactacaaaagcttaaggacaggtccactgaactacacatagatgagcttgtggagttccacaaggatatttcttacagggacctggtacaatttcttgggggtgccattgctgggctccattcgatgacagatgaacatttcggaataagtgttgttgagtatatggcagctggagctattccaattgcacataaatcggcaggaccgatgatggacatcgtgctagatgaggatgggcatcaaacaggatttctagcctccgagaaggaggaattcactgaagcgattatcaaggtcttgaggatgccagagtcggggaggcaagaaatggcagctgcggctaggaaacgtgcacaaagattttcagatcagagattccaccaagatttcactgagaccgtccgccctattttgtcagcaagggaaggctgactgacaagctgcagtttccacctaacaatctgaattctctgtcaagtttcacacggtacagtgaaagacttgcaaggggcactgaattggcagattattgctgctcccttttcccagactgcttgtgtattgtgctgcatcgtgtaacgctactgtgcagaaatagatcacagaaagaaaactttcgtcagcgatatagaattcaaaatggtgatcgtggtgcacggttttgaatctttcttgcggcactctagtaccaagttcatctttgtactgagcaaaagcttctgcttgaattgtgccactgactggcggacccatggactttttatactaattcaatctgtcttccactctagaatttccatgatggagacgcaaatattgatgaactataatttactaggaattccttagataaaacaaatgggtaagcacgttatcaccagggctttctgatcttagtgatctgccatgcacgtaacgaagtacacgaataacaaactcaaccaatctctaagctgatcaaccatgtctcattcaacagatgggagccaagtccagggagctccacagcagcacgtcgccgtcactgtcaccatggctcgcctcagacgacgaacttgtcgcctccggggcgccgtcaccgggtgaacgctcctcacgaggcggcttgacatcctctgctgtatccattgatggttcctgctcgtgctgctgctgaactatctctcgctgcttcttccggcacgcctccctcagcccggagagctgatcacgcacggcgtggccaccggcagcggcgccgaggcgcatcttgatgcactccgagacgccgctgagcgcgtagagcgacgccgagatcttcctctcgtagtccatcctgctcatcatcagctcctgaacggccgtggccggctcgccaccgccggcctccaccgcgccgccgagctctgccgccaccacctcgaacggcgagcagagcccgccctcgcaccccgcgcccggcgacgcggtctgctggtccatgaactggaagtccagctcctcctcctcctcctcttcctcctcttcttcctcgtcctctatttcttgtgagctgttctcgtcgctgccgcagtcgtagctcaagaagtcgtcgacttggaaggcgcactcctcgccgccgccgtacggttccgcgcacagcggcccctgcagcagcgccgccgccgcggcctcctgctgccgagctggggtggcgttgaggaggagctgctgctggttgttgcgggccctgagccgcaggagcaggaggttggtgaccttggacggaagagccggcggctgcgttggagaccccatcagccccggcagcggcggcggcgtcggaggaggcggcgcgggatgcgcggcggcggctactgcgacggaggaagccggcgaggggcgcggccagaagttggtgcgcgtgttggcgccgcggaggaggcacgcggcctcgtcgtaggcgcgggcggcttcctcggccgtgtcgaaggtgcctagccacacgcggatcttctggatggtgtcctttatctccgccacccaccgccccgacggccgctgccgcacacccacgaaccgcttccttccccgccgctgctgctgcgccgccgccgcctcagccaccgcggccatgctagtaccgcccgacgatgcccatgcacacgcgtctgttgaagccagagccagcggtggtggcagcgagtggacgccgtcgatacccgcggcggagtcggaggccttgcgcttcctcgccatggatgtagtagcccgatcgagctcagcgcggtggagggaggagatgatgaacaagcgcactccactgcaatatatagtgggagaggagggagtg

SEQ ID NO: 8656 - DNA, 3552 bp, Zea Mays
tctgcaaacgttaaaaaaattaactctcttctcgggagagcccaactagactcgcagtcgcgtccatggcgatcttggtaggcctcgtcgccgtcctctccgccctcttcgccgccgcgcttcggcgcctcctaatctcttgtcgccaccccgcatacgccgccggtttcttccacccgtacaccaacgacggcggcggaggcgagcgcgtgctctggtgtgcggtgcgcgccgtgcaggagctttgcccggacctcccctgcgctgtctacaccggcgatgccgatgcggcgcccgaggccctcgccgcacgcgctctcgaccggttcggtgtccgtctcctccgcccgccgcaggttgttcacttgaataagagaaagtggatcgaagcaagcacgtatccccacttcacaatgatcgggcaaagtcttggctctgtttatcttgcatgggaagcccttactaaatttaccccgcagttttactttgatacaagtggctatgcttttgcgtatccactagctcggctatttggttgcaaagtcatctgctatactcattaccctacaatcagttctgatatggttgaacgtgttaagcaccgcagttctatgtataataacaattctcttatcgcagggaggtatgcactgctcagagtgattagtttcaactcttcttatcgtgcactagtatattaatacaggaaaaaacaagaggcattactgtatctgagaaaaaaattgcaaaacatgataaaatcaccataatgtgctagctaaccatgcatgtttgtcctcagtgctgtcttaatctatcctacgctctttattaacacatgctttgtccttcttaagatgtcacatttagattaataggatcaagtaatgttcaactagtaattattttgccactcattggtttttgcaatctagatgtcttttgctgtttccgtagctattaattatctttgtttctcaatatgtatcaatcattatatctttctgttcttatgtaacaataatgaccatgaaaactaattgggcactcattctactgtagcatttggctatcccgatgtaaaatcctctactataccatattcagttggttatatggtctggtgggttcatgtgcgcatcttgtaatggttaattcctcatggacaagatcccacatcacaaatatttggaagatcccagagcgtactaagagggtgtaccctccatgcgatacttctgctcttcagatgcttcccctggaaagaccaacaacacctcctgttcttatttcagttgcacagttccgcccagaaaagggacctggtacaatttcttgggggtgccattgctgggctccattcgatgacagatgaacatttcggaataagtgttgttgagtatatggcagctggagctattccaattgcacataaatcggcaggaccgatgatggacatcgtgctagatgaggatgggcatcaaacaggatttctagcctccgagaaggaggaattcactgaagcgattatcaaggtcttgaggatgccagagtcggggaggcaagaaatggcagctgcggctaggaaacgtgcacaaagattttcagatcagagattccaccaagatttcactgagaccgtccgccctattttgtcagcaagggaaggctgactgacaagctgcagtttccacctaacaatctgaattctctgtcaagtttcacacggtacagtgaaagacttgcaaggggcactgaattggcagattattgctgctcccttttcccagactgcttgtgtattgtgctgcatcgtgtaacgctactgtgcagaaatagatcacagaaagaaaactttcgtcagcgatatagaattcaaaatggtgatcgtggtgcacggttttgaatctttcttgcggcactctagtaccaagttcatctttgtactgagcaaaagcttctgcttgaattgtgccactgactggcggacccatggactttttatactaattcaatctgtcttccactctagaatttccatgatggagacgcaaatattgatgaactataatttactaggaattccttagataaaacaaatgggtaagcacgttatcaccagggctttctgatcttagtgatctgccatgcacgtaacgaagtacacgaataacaaactcaaccaatctctaagctgatcaaccatgtctcattcaacagatgggagccaagtccagggagctccacagcagcacgtcgccgtcactgtcaccatggctcgcctcagacgacgaacttgtcgcctccggggcgccgtcaccgggtgaacgctcctcacgaggcggcttgacatcctctgctgtatccattgatggttcctgctcgtgctgctgctgaactatctctcgctgcttcttccggcacgcctccctcagcccggagagctgatcacgcacggcgtggccaccggcagcggcgccgaggcgcatcttgatgcactccgagacgccgctgagcgcgtagagcgacgccgagatcttcctctcgtagtccatcctgctcatcatcagctcctgaacggccgtggccggctcgccaccgccggcctccaccgcgccgccgagctctgccgccaccacctcgaacggcgagcagagcccgccctcgcaccccgcgcccggcgacgcggtctgctggtccatgaactggaagtccagctcctcctcctcctcctcttcctcctcttcttcctcgtcctctatttcttgtgagctgttctcgtcgctgccgcagtcgtagctcaagaagtcgtcgacttggaaggcgcactcctcgccgccgccgtacggttccgcgcacagcggcccctgcagcagcgccgccgccgcggcctcctgctgccgagctggggtggcgttgaggaggagctgctgctggttgttgcgggccctgagccgcaggagcaggaggttggtgaccttggacggaagagccggcggctgcgttggagaccccatcagccccggcagcggcggcggcgtcggaggaggcggcgcgggatgcgcggcggcggctactgcgacggaggaagccggcgaggggcgcggccagaagttggtgcgcgtgttggcgccgcggaggaggcacgcggcctcgtcgtaggcgcgggcggcttcctcggccgtgtcgaaggtgcctagccacacgcggatcttctggatggtgtcctttatctccgccacccaccgccccgacggccgctgccgcacacccacgaaccgcttccttccccgccgctgctgctgcgccgccgccgcctcagccaccgcggccatgctagtaccgcccgacgatgcccatgcacacgcgtctgttgaagccagagccagcggtggtggcagcgagtggacgccgtcgatacccgcggcggagtcggaggccttgcgcttcctcgccatggatgtagtagcccgatcgagctcagcgcggtggagggaggagatgatgaacaagcgcactccactgcaatatatagtgggagaggagggagtg

SEQ ID NO: 8657 - DNA, 4489 bp, Zea Mays
tctgcaaacgttaaaaaaattaactctcttctcgggagagcccaactagactcgcagtcgcgtccatggcgatcttggtaggcctcgtcgccgtcctctccgccctcttcgccgccgcgcttcggcgcctcctaatctcttgtcgccaccccgcatacgccgccggtttcttccacccgtacaccaacgacggcggcggaggcgagcgcgtgctctggtgtgcggtgcgcgccgtgcaggagctttgcccggacctcccctgcgctgtctacaccggcgatgccgatgcggcgcccgaggccctcgccgcacgcgctctcgaccggttcggtgtccgtctcctccgcccgccgcaggttgttcacttgaataagagaaagtggatcgaagcaagcacttttactttgatacaagtggctatgcttttgcgtatccactagctcggctatttggttgcaaagtcatctgctatactcattaccctacaatcagttctgatatggttgaacgtgttaagcaccgcagttctatgtataataacaattctcttatcgcagggaggtatgcactgctcagagtgattagtttcaactcttcttatcgtgcactagtatattaatacaggaaaaaacaagaggcattactgtatctgagaaaaaaattgcaaaacatgataaaatcaccataatgtgctagctaaccatgcatgtttgtcctcagtgctgtcttaatctatcctacgctctttattaacacatgctttgtccttcttaagatgtcacatttagattaataggatcaagtaatgttcaactagtaattattttgccactcattggtttttgcaatctagatgtcttttgctgtttccgtagctattaattatctttgtttctcaatatgtatcaatcattatatctttctgttcttatgtaacaataatgaccatgaaaactaattgggcactcattctactgtagcatttggctatcccgatgtaaaatcctctactataccatattcagttggttatatggtctggtgggttcatgtgcgcatcttgtaatggttaattcctcatggacaagatcccacatcacaaatatttggaagatcccagagcgtactaagagggtgtaccctccatgcgatacttctgctcttcagatgcttcccctggaaagaccaacaacacctcctgttcttatttcagttgcacagttccgcccagaaaagatagaaaagctctatagaagaccaaatacaaaaaaacctccttacggaggccagtagcaggcatacacaaagagatccatcagaaaacaaaccaaactaccaaaaagccaccctaaagatctgctaagggtgcagccaaatgagagaggccctttgcaccagatatttcccattttcttctttcctcatcagcagttctgagactcagagaaacacttggattccctccatcaaagacacatttattccgatacttccataaagttcaagctcctaatatgtgaagagagtcaagtccttttttggtaagaccaaagactgctccttctacctcttcccaccagcccaggaaggaatctgcatccggctgtggtgcaagcgaatagagaccaaatttcctcaataaaagataccaaaattctcttgagaaggagcatttcacaagaagatggtacaaagtttcttcctcttgttcacataagggacacttctccgggtgattcaagcctcgttttgccaacctatcagctgtccaacatctcttctgggcaaccaaccatatgaaaaaacgacattttggcaaggcccatgttttccatattcatttataatgaccaaaactcacagatcctaggaacaagccctcatatgaagatttggctgagtatgtgccgtctagagcaacactgaaaatatgcttatcctcaacctcaggctgcagctctaatcctgaaatcaaatcccaaagtcaagatttaaatataaaagcttaacttccattcacccacttcagagtaacatttatctatcttgctcttccaccaggcccatggccttcagctggaggcatttgcacttgctcttcaaaagctagaccctgactttcctaagccaaagattcaatttgtcggtagttgccggaataaagaggatctggacagactacaaaagcttaaggacaggtccactgaactacacatagatgagcttgtggagttccacaaggatatttcttacagggacctggtacaatttcttgggggtgccattgctgggctccattcgatgacagatgaacatttcggaataagtgttgttgagtatatggcagctggagctattccaattgcacataaatcggcaggaccgatgatggacatcgtgctagatgaggatgggcatcaaacaggatttctagcctccgagaaggaggaattcactgaagcgattatcaaggtcttgaggatgccagagtcggggaggcaagaaatggcagctgcggctaggaaacgtgcacaaagattttcagatcagagattccaccaagatttcactgagaccgtccgccctattttgtcagcaagggaaggctgactgacaagctgcagtttccacctaacaatctgaattctctgtcaagtttcacacggtacagtgaaagacttgcaaggggcactgaattggcagattattgctgctcccttttcccagactgcttgtgtattgtgctgcatcgtgtaacgctactgtgcagaaatagatcacagaaagaaaactttcgtcagcgatatagaattcaaaatggtgatcgtggtgcacggttttgaatctttcttgcggcactctagtaccaagttcatctttgtactgagcaaaagcttctgcttgaattgtgccactgactggcggacccatggactttttatactaattcaatctgtcttccactctagaatttccatgatggagacgcaaatattgatgaactataatttactaggaattccttagataaaacaaatgggtaagcacgttatcaccagggctttctgatcttagtgatctgccatgcacgtaacgaagtacacgaataacaaactcaaccaatctctaagctgatcaaccatgtctcattcaacagatgggagccaagtccagggagctccacagcagcacgtcgccgtcactgtcaccatggctcgcctcagacgacgaacttgtcgcctccggggcgccgtcaccgggtgaacgctcctcacgaggcggcttgacatcctctgctgtatccattgatggttcctgctcgtgctgctgctgaactatctctcgctgcttcttccggcacgcctccctcagcccggagagctgatcacgcacggcgtggccaccggcagcggcgccgaggcgcatcttgatgcactccgagacgccgctgagcgcgtagagcgacgccgagatcttcctctcgtagtccatcctgctcatcatcagctcctgaacggccgtggccggctcgccaccgccggcctccaccgcgccgccgagctctgccgccaccacctcgaacggcgagcagagcccgccctcgcaccccgcgcccggcgacgcggtctgctggtccatgaactggaagtccagctcctcctcctcctcctcttcctcctcttcttcctcgtcctctatttcttgtgagctgttctcgtcgctgccgcagtcgtagctcaagaagtcgtcgacttggaaggcgcactcctcgccgccgccgtacggttccgcgcacagcggcccctgcagcagcgccgccgccgcggcctcctgctgccgagctggggtggcgttgaggaggagctgctgctggttgttgcgggccctgagccgcaggagcaggaggttggtgaccttggacggaagagccggcggctgcgttggagaccccatcagccccggcagcggcggcggcgtcggaggaggcggcgcgggatgcgcggcggcggctactgcgacggaggaagccggcgaggggcgcggccagaagttggtgcgcgtgttggcgccgcggaggaggcacgcggcctcgtcgtaggcgcgggcggcttcctcggccgtgtcgaaggtgcctagccacacgcggatcttctggatggtgtcctttatctccgccacccaccgccccgacggccgctgccgcacacccacgaaccgcttccttccccgccgctgctgctgcgccgccgccgcctcagccaccgcggccatgctagtaccgcccgacgatgcccatgcacacgcgtctgttgaagccagagccagcggtggtggcagcgagtggacgccgtcgatacccgcggcggagtcggaggccttgcgcttcctcgccatggatgtagtagcccgatcgagctcagcgcggtggagggaggagatgatgaacaagcgcactccactgcaatatatagtgggagaggagggagtg

SEQ ID NO: 8658 - DNA, 2122 bp, Zea Mays
gcaaaacttagatctgaaccttcagactttccctcttctgtccaagagctcccgcctacaaacgctggtggcctcgacaagcgaggagggcagcgacgaggtggacatctccgacatcccgggcggcccggcggcgttcgaggtctgtgccaagttctgctacggcatggtggtgacgctcaacgcctacaacgtgctggccgcccggtgcgcggcggagtacctggagatgtcggagacggtggagaaggggaacctggtgtacaagatcgacgtgttcctgtcggccagcatcttccgggcctggaaggactccatcatcgtgctgcagtcgacgaggccgctgcagcggtggacggacagcctcaaggtggtcaaccactgcgtcgacgccatcgcctcccgggcgtccacggacccgtcggaggtcgactggtcgtacacgtacagccggaggaagctcccgtcggagaccgacggcgacgcgcgcggctggaacggcgtcaggaagcggcaggcggtgccgagggactggtgggtggaggatctctgcgacctcgaggtgtgcctgtacaggaaggtgatcctggcgatcaaggccaaggggaggacgggcggcgccgtcgtcggcgaggcgctgcgggcctacgcgtgccgccggctgttcgggtccctggaccacgccgtcagcgacgggctcgattgcaccaagcaccgcgcggctcttgaagccgtcgccgacctgctgccggccgagaaggggtcggtctcctgtggcctccttctcaagctgctcagggcctcgtgcctactggagtccggtcaggcctaccgcggcgagctgatcaggaggatcggcgcgcagctggaacgggcttcggtcccggaccttctgatacctgcggactccggcgacggcgacggcgacgcgacgtacaatgttggcatggtggctgcgatgctggaggagttcttgctgcatcacaaggtaaatggggccgaggcggagaagcgggaagatggcgaggacgacgtggatgttgccgctgacgacccggtcacttcttcgaagctggccgctgtcgcaaagctggtcgatggatacctctccgagatcgccaaggacccgtgccttcctctggagacgttcgtcgccctcgccgaatcgatgccgcccctgtctcgcccggtgcacgacgcgctctaccgcgccatcgacgtttacctcaaggtatgcacgcgcaagattatgctctgaaagcaattctgcatcatatctgtctgcaatttcagtttcagaaatgcgcaaaaatctgcgatttcagtagctaaaaagaatgcgcaaaaatctttgtacgattgtgcgctgtcgaatctctctctgctgtgcacacgcgcgcaggagcatccgggcttgtcgaagggcgagaagaagcggctgtgcgcgctgatggactgcaggaagctgacggcggacgcgagcgagcacgccgtgcagaacgagcggctgcccctgcgcgtggtggtacaggtcctcttcttcgagcaggtccggcagtcggcggcggcggcggcagcctccgccgcccccgcgcgctcgctcatcctgcccagggacgacggcgcgtcgtacggcagctcgaggtcggcgaccacgacggcgacggaggacgagcagtggggcagcggcgccgtggtgggcgcgcctgtgacgacgtcgacgtcgggcggcgccggcgacgccggctcgctccggtccatgagccagctgtcggccaacgagaacgggagaagcggcggcggcggcgacaggaagaaggccaagggcggtgcggtggcgccggcgccggtgaagagagtgctggggaagctgtggtccggcaaggcgagcagcggcgggtccgacgacacgtcggccagccccgttgggtccctcaacctggaggagaccaagtcaatgtcgtcacagatcacgaggcattctgtgtcatagttactatattactgtatatgttctctttttttttgggtgatggttttgttggattggatttgacttacataattatggagggtgtttggtaattggtacatgtggtaatggagaatttctcgtcacgaa

SEQ ID NO: 8659 - DNA, 2343 bp, Zea Mays
cgctcatcttctcctgttcaatcacattgccgtgccgcttgctctgcctccgatccaacccaacccaaggcagcagcagcagcgggtacgttcttctcggccatgcatggaatggaacgaagaccgcccaccgccggcgccgcctagatctctgcatccggtggccgccattggcggttcttggctccgattcggtgctgcctggtgacgagtaaaagcgaaggaaaaaaaaagaaggaagggacggcgattcaggcctcactcttggcctgtgagcctgtcgtcgacatgaagtacatgaagcttggatccaagccggacgcctttcagacggaggggaacagtatcaggtctgttgcaactgagctggcagtggatattgtcgtcactgtaggggatgtcaagttctaccttcacaagttccctcttctgtccaagagctcccgcctacaaacgctggtggcctcgacaagcgaggagggcagcgacgaggtggacatctccgacatcccgggcggcccggcggcgttcgaggtctgtgccaagttctgctacggcatggtggtgacgctcaacgcctacaacgtgctggccgcccggtgcgcggcggagtacctggagatgtcggagacggtggagaaggggaacctggtgtacaagatcgacgtgttcctgtcggccagcatcttccgggcctggaaggactccatcatcgtgctgcagtcgacgaggccgctgcagcggtggacggacagcctcaaggtggtcaaccactgcgtcgacgccatcgcctcccgggcgtccacggacccgtcggaggtcgactggtcgtacacgtacagccggaggaagctcccgtcggagaccgacggcgacgcgcgcggctggaacggcgtcaggaagcggcaggcggtgccgagggactggtgggtggaggatctctgcgacctcgaggtgtgcctgtacaggaaggtgatcctggcgatcaaggccaaggggaggacgggcggcgccgtcgtcggcgaggcgctgcgggcctacgcgtgccgccggctgttcgggtccctggaccacgccgtcagcgacgggctcgattgcaccaagcaccgcgcggctcttgaagccgtcgccgacctgctgccggccgagaaggggtcggtctcctgtggcctccttctcaagctgctcagggcctcgtgcctactggagtccggtcaggcctaccgcggcgagctgatcaggaggatcggcgcgcagctggaacgggcttcggtcccggaccttctgatacctgcggactccggcgacggcgacggcgacgcgacgtacaatgttggcatggtggctgcgatgctggaggagttcttgctgcatcacaaggtaaatggggccgaggcggagaagcgggaagatggcgaggacgacgtggatgttgccgctgacgacccggtcacttcttcgaagctggccgctgtcgcaaagctggtcgatggatacctctccgagatcgccaaggacccgtgccttcctctggagacgttcgtcgccctcgccgaatcgatgccgcccctgtctcgcccggtgcacgacgcgctctaccgcgccatcgacgtttacctcaaggagcatccgggcttgtcgaagggcgagaagaagcggctgtgcgcgctgatggactgcaggaagctgacggcggacgcgagcgagcacgccgtgcagaacgagcggctgcccctgcgcgtggtggtacaggtcctcttcttcgagcaggtccggcagtcggcggcggcggcggcagcctccgccgcccccgcgcgctcgctcatcctgcccagggacgacggcgcgtcgtacggcagctcgaggtcggcgaccacgacggcgacggaggacgagcagtggggcagcggcgccgtggtgggcgcgcctgtgacgacgtcgacgtcgggcggcgccggcgacgccggctcgctccggtccatgagccagctgtcggccaacgagaacgggagaagcggcggcggcggcgacaggaagaaggccaagggcggtgcggtggcgccggcgccggtgaagagagtgctggggaagctgtggtccggcaaggcgagcagcggcgggtccgacgacacgtcggccagccccgttgggtccctcaacctggaggagaccaagtcaatgtcgtcacagatcacgaggcattctgtgtcatagttactatattactgtatatgttctctttttttttgggtgatggttttgttggattggatttgacttacataattatggagggtgtttggtaattggtacatgtggtaatggagaatttctcgtcacgaa

SEQ ID NO: 8660 - DNA, 2338 bp, Zea Mays
gcctttgactgaagccatcaaccctagtgccgcttgctctgcctccgatccaacccaacccaaggcagcagcagcagcgggtacgttcttctcggccatgcatggaatggaacgaagaccgcccaccgccggcgccgcctagatctctgcatccggtggccgccattggcggttcttggctccgattcggtgctgcctggtgacgagtaaaagcgaaggaaaaaaaaagaaggaagggacggcgattcaggcctcactcttggcctgtgagcctgtcgtcgacatgaagtacatgaagcttggatccaagccggacgcctttcagacggaggggaacagtatcaggtctgttgcaactgagctggcagtggatattgtcgtcactgtaggggatgtcaagttctaccttcacaagttccctcttctgtccaagagctcccgcctacaaacgctggtggcctcgacaagcgaggagggcagcgacgaggtggacatctccgacatcccgggcggcccggcggcgttcgaggtctgtgccaagttctgctacggcatggtggtgacgctcaacgcctacaacgtgctggccgcccggtgcgcggcggagtacctggagatgtcggagacggtggagaaggggaacctggtgtacaagatcgacgtgttcctgtcggccagcatcttccgggcctggaaggactccatcatcgtgctgcagtcgacgaggccgctgcagcggtggacggacagcctcaaggtggtcaaccactgcgtcgacgccatcgcctcccgggcgtccacggacccgtcggaggtcgactggtcgtacacgtacagccggaggaagctcccgtcggagaccgacggcgacgcgcgcggctggaacggcgtcaggaagcggcaggcggtgccgagggactggtgggtggaggatctctgcgacctcgaggtgtgcctgtacaggaaggtgatcctggcgatcaaggccaaggggaggacgggcggcgccgtcgtcggcgaggcgctgcgggcctacgcgtgccgccggctgttcgggtccctggaccacgccgtcagcgacgggctcgattgcaccaagcaccgcgcggctcttgaagccgtcgccgacctgctgccggccgagaaggggtcggtctcctgtggcctccttctcaagctgctcagggcctcgtgcctactggagtccggtcaggcctaccgcggcgagctgatcaggaggatcggcgcgcagctggaacgggcttcggtcccggaccttctgatacctgcggactccggcgacggcgacggcgacgcgacgtacaatgttggcatggtggctgcgatgctggaggagttcttgctgcatcacaaggtaaatggggccgaggcggagaagcgggaagatggcgaggacgacgtggatgttgccgctgacgacccggtcacttcttcgaagctggccgctgtcgcaaagctggtcgatggatacctctccgagatcgccaaggacccgtgccttcctctggagacgttcgtcgccctcgccgaatcgatgccgcccctgtctcgcccggtgcacgacgcgctctaccgcgccatcgacgtttacctcaaggagcatccgggcttgtcgaagggcgagaagaagcggctgtgcgcgctgatggactgcaggaagctgacggcggacgcgagcgagcacgccgtgcagaacgagcggctgcccctgcgcgtggtggtacaggtcctcttcttcgagcaggtccggcagtcggcggcggcggcggcagcctccgccgcccccgcgcgctcgctcatcctgcccagggacgacggcgcgtcgtacggcagctcgaggtcggcgaccacgacggcgacggaggacgagcagtggggcagcggcgccgtggtgggcgcgcctgtgacgacgtcgacgtcgggcggcgccggcgacgccggctcgctccggtccatgagccagctgtcggccaacgagaacgggagaagcggcggcggcggcgacaggaagaaggccaagggcggtgcggtggcgccggcgccggtgaagagagtgctggggaagctgtggtccggcaaggcgagcagcggcgggtccgacgacacgtcggccagccccgttgggtccctcaacctggaggagaccaagtcaatgtcgtcacagatcacgaggcattctgtgtcatagttactatattactgtatatgttctctttttttttgggtgatggttttgttggattggatttgacttacataattatggagggtgtttggtaattggtacatgtggtaatggagaatttctcgtcacgaa

SEQ ID NO: 8661 - DNA, 1091 bp, Zea Mays
cggcccgccaccagtagctcgctcggctccagatcccgcgccacaccacatagcatggcagaagatacagcgtagcaaggtccggacgttcaccagagggcagtggggatggggatggggccggcccgcgtgcgctctccgtgcgggaggcctcggcggcggtgccgctcccgcacccatcggcggcggctgcgctcgaccttaggcggcggggcggccaggctggcgctgtgacctgaaacggtggcgggatggggaggaggaaggagcacctagagagagtccgagtggaggcgtactgctgggacgtgttcaagccagtggagatggtggagatcgacagcatggagaagcttgacgacgcgttcaggggaagcactcggagatgaagctgaagcagagcaaacgtgagacgcaccgtgggcattctctatccaaggggaaggttgctggaacatgatctggattcaaaatggttggctattgttgatatatcttgttctccccacaattttatgttctacatgagtggagagatcatatagctcatgagaaagatgagggtactggttagtggttgtatactgccaaataaagcttgaatcgagataggtgttgttgtttttttctttatatcctgttataatggtgcaaaattggatctacaactttgctagctcccccccccccccccccaaaaaaataaagcagatacctacagatgttggacattgtaaaagaattgtaaaatcaaaatatccatatgttgagaacaatgttgtcgtaatcgcttaccttacactgttcgtactgcaattgattattcttatgcctttaaagaagtagctgaagaactaaagaaggaacggttaggacatgtttgttaggatgaacttatgttgagttcattccactctttgaaatcttaagaaatgtgctaagtctagcaccattgcttgcttaagctcttggtgcacgttactttaatgctaaatttgatctgatactcatgtactcatgtctctgtaacgactactctgcatatacacatgttcatgatacaatatcaagttatacatgcttataacaag

SEQ ID NO: 8662 - DNA, 1656 bp, Zea Mays
tctgaaccctagggccacggcccgccaccagtagctcgctcggctccagatcccgcgccacaccacatagcatggcagaagatacagcgtagcaaggtccggacgttcaccagagggcagtggggatggggatggggccggcccgcgtgcgctctccgtgcgggaggcctcggcggcggtgccgctcccgcacccatcggcggcggctgcgctcgaccttaggcggcggggcggccaggctggcgctgtgacctgaaacggtggcgggatggggaggaggaaggagcacctagagagagtccgagtggaggcgtactgctgggacgtgttcaagccagtggagatggtggagatcgacagcatggagaagcttgacgacgcgttcaggatggcaagttggtgtcagaaatgcatctacctaatgcccagaatggagaagatagcaggacaatatcctgggtggtcgcagcgatctgtgattgtttatgcccaaagcgtagggttacccgtcttgttagcgctaccttagtgccgcttttttgaaccctagacatctcagaagaggtaccagctgtactttcacgggctttaacaaattatttagaaagccatatcggggtgatctctctggtctggtgacctgatctgagttttttttgccttcattcaggggaagcactcggagatgaagctgaagcagagcaaacgtgagacgcaccgtgggcattctctatccaaggggaaggttgctggaacatgatctggattcaaaatggttggctattgttgatgtaagaatatactttatgtaccctcaagatcattctgcattcaatatatctagaacctaatgaggctcattctgcattcaatatatctagaacctaatgaggcatttccttggcttttagataccaaaccttgctactgtttgttcatatatatatatatatatatatatatatatatatatatatatatatatatatatatatatatatatatatatatatattcatgttaagacatcttattgtatccaatttcttatctcagatatcttgttctccccacaattttatgttctacatgagtggagagatcatatagctcatgagaaagatgagggtactggttagtggttgtatactgccaaataaagcttgaatcgagataggtgttgttgtttttttctttatatcctgttataatggtgcaaaattggatctacaactttgctagctcccccccccccccccccaaaaaaataaagcagatacctacagatgttggacattgtaaaagaattgtaaaatcaaaatatccatatgttgagaacaatgttgtcgtaatcgcttaccttacactgttcgtactgcaattgattattcttatgcctttaaagaagtagctgaagaactaaagaaggaacggttaggacatgtttgttaggatgaacttatgttgagttcattccactctttgaaatcttaagaaatgtgctaagtctagcaccattgcttgcttaagctcttggtgcacgttactttaatgctaaatttgatctgatactcatgtactcatgtctctgtaacgactactctgcatatacacatgttcatgatacaatatcaagttatacatgcttataacaag

SEQ ID NO: 8663 - DNA, 1445 bp, Zea Mays
tctgaaccctagggccacggcccgccaccagtagctcgctcggctccagatcccgcgccacaccacatagcatggcagaagatacagcgtagcaaggtccggacgttcaccagagggcagtggggatggggatggggccggcccgcgtgcgctctccgtgcgggaggcctcggcggcggtgccgctcccgcacccatcggcggcggctgcgctcgaccttaggcggcggggcggccaggctggcgctgtgacctgaaacggtggcgggatggggaggaggaaggagcacctagagagagtccgagtggaggcgtactgctgggacgtgttcaagccagtggagatggtggagatcgacagcatggagaagcttgacgacgcgttcaggatggcaagttggtgtcagaaatgcatctacctaatgcccagaatggagaagatagcaggacaatatcctgggggaagcactcggagatgaagctgaagcagagcaaacgtgagacgcaccgtgggcattctctatccaaggggaaggttgctggaacatgatctggattcaaaatggttggctattgttgatgtaagaatatactttatgtaccctcaagatcattctgcattcaatatatctagaacctaatgaggctcattctgcattcaatatatctagaacctaatgaggcatttccttggcttttagataccaaaccttgctactgtttgttcatatatatatatatatatatatatatatatatatatatatatatatatatatatatatatatatatatatatatatattcatgttaagacatcttattgtatccaatttcttatctcagatatcttgttctccccacaattttatgttctacatgagtggagagatcatatagctcatgagaaagatgagggtactggttagtggttgtatactgccaaataaagcttgaatcgagataggtgttgttgtttttttctttatatcctgttataatggtgcaaaattggatctacaactttgctagctcccccccccccccccccaaaaaaataaagcagatacctacagatgttggacattgtaaaagaattgtaaaatcaaaatatccatatgttgagaacaatgttgtcgtaatcgcttaccttacactgttcgtactgcaattgattattcttatgcctttaaagaagtagctgaagaactaaagaaggaacggttaggacatgtttgttaggatgaacttatgttgagttcattccactctttgaaatcttaagaaatgtgctaagtctagcaccattgcttgcttaagctcttggtgcacgttactttaatgctaaatttgatctgatactcatgtactcatgtctctgtaacgactactctgcatatacacatgttcatgatacaatatcaagttatacatgcttataacaag

SEQ ID NO: 8664 - DNA, 3230 bp, Zea Mays
ctccgcgtcatctgaaccctagggccacggcccgccaccagtagctcgctcggctccagatcccgcgccacaccacatagcatggcagaagatacagcgtagcaaggtccggacgttcaccagagggcagtggggatggggatggggccggcccgcgtgcgctctccgtgcgggaggcctcggcggcggtgccgctcccgcacccatcggcggcggctgcgctcgaccttaggcggcggggcggccaggctggcgctgtgacctgaaacggtggcgggatggggaggaggaaggagcacctagagagagtccgagtggaggcgtactgctgggacgtgttcaagccagtggagatggtggagatcgacagcatggagaagcttgacgacgcgttcaggatggcaagttggtgtcagaaatgcatctacctaatgcccagaatggagaagatagcaggacaatatcctggcgatctgtgattgtttatgcccaaagcgtagggttacccgtcttgttagcgctaccttagtgccgcttttttgaaccctagacatctcagaagaggggaagcactcggagatgaagctgaagcagagcaaacgtgagacgcaccgtgggcattctctatccaaggggaaggtgtgacctcaggcctcttctgtgcgatgcattactcttaatccgtgtttgcgttggttgctttgaattaattgtcatgtgcttatttgttagcagccaaacaaaaaatcgctcaagttatgataacccgactattccttgacctattatacctgtttccttataacttcttatgattgcacatcataattacttgagaacatatatttgtgaattgctttggtgtccccaacaaactattgtatgttccataacactatagacgtacaaatagtaattggaattgtttctgtacagagtaataatgaacatgcattggataaacagtaggaaacaaaagaagggcaacatcattactctgatcctcgacttacatttctatttgtttttccttcgtacagtacattccctgtcatttgtttgaatgatatgtcaagctttgaattctccaaatcatgcacaatcataagaaacacgtgcagcttattaggccacaattttccatgctttttgatcagtactgaaccccataaatggagactacattgtgtttgacaaaaaacatgcatctttaagtgtcgtgataattttttccacaaatcaacaaccataacccaaaataatgtatcactaatatttaaagctgctacttctagttttctctagaaacctttatgcgtattttgtggacttgctcctactaaggttttgctatttgcaaatttatatagatcagtctcaccattcaaaaagtgcttggatgaaagggaaaaagttaccattcaaaaagtgcttggatgaaagggaaaaagtttggatgaaggcattggtctataaatttttagaaagtccaatatgtgctaaatcctatgtattcgacattgtgtgtcctaatctccccttatcaaaaatagcatagagaaaaaaagaataagtgcaacacaaatgcacaaaaaacagtcaatgtttcggtaaaaatatgctttacactttgacagaaaaaagaggaatatagaataagtagcataaacaagatacatcaaaaataataatgagagtacaataaaaaatgtaggtatcaagatatggatcccaccttgtgaccaaacttacttttattttggctttacagtttgatctatggaatgctaagttcttttgcttgccaactttgctcactcaagcaacttctttctttaaagttatcctattattcatgatttttatttggatgttttggaccttttcttcaaacattagcgagatgcagtgctagtgttgttaatatacctacttgcaggttgctcttttcttatattatttccctatgtgtcgtgctacattataaatatcaagtaattttaatggtacttcttttctgtaagtatacacattaatccttgcaaaagttaaatctacatgtgcatttatttatatatctatatacgcagtgaactttatgtactcaatctaaagatcgttctatattcaatatatctagaatccaatgtggcattttattagcttttagataccaaaccttgctattgactgttcatacatatgtttctaatcactggtagacttcataacttttagacatttttgacctttgtaaattcatattacatattgtattcagtttcttatctcaaatattatagaactatattattataggttgctggaacatgatctggattcaaaatggttggctattgttgatgtaagaatatactttatgtaccctcaagatcattctgcattcaatatatctagaacctaatgaggctcattctgcattcaatatatctagaacctaatgaggcatttccttggcttttagataccaaaccttgctactgtttgttcatatatatatatatatatatatatatatatatatatatatatatatatatatatatatatatatatatatatatatattcatgttaagacatcttattgtatccaatttcttatctcagatatcttgttctccccacaattttatgttctacatgagtggagagatcatatagctcatgagaaagatgagggtactggttagtggttgtatactgccaaataaagcttgaatcgagataggtgttgttgtttttttctttatatcctgttataatggtgcaaaattggatctacaactttgctagctcccccccccccccccccaaaaaaataaagcagatacctacagatgttggacattgtaaaagaattgtaaaatcaaaatatccatatgttgagaacaatgttgtcgtaatcgcttaccttacactgttcgtactgcaattgattattcttatgcctttaaagaagtagctgaagaactaaagaaggaacggttaggacatgtttgttaggatgaacttatgttgagttcattccactctttgaaatcttaagaaatgtgctaagtctagcaccattgcttgcttaagctcttggtgcacgttactttaatgctaaatttgatctgatactcatgtactcatgtctctgtaacgactactctgcatatacacatgttcatgatacaatatcaagttatacatgcttataacaag

SEQ ID NO: 8665 - DNA, 3154 bp, Zea Mays
ggatccgaaatctgtgaccctccgcgtcatctgaaccctagggccacggcccgccaccagtagctcgctcggctccagatcccgcgccacaccacatagcatggcagaagatacagcgtagcaaggtccggacgttcaccagagggcagtggggatggggatggggccggcccgcgtgcgctctccgtgcgggaggcctcggcggcggtgccgctcccgcacccatcggcggcggctgcgctcgaccttaggcggcggggcggccaggctggcgctgtgacctgaaacggtggcgggatggggaggaggaaggagcacctagagagagtccgagtggaggcgtactgctgggacgtgttcaagccagtggagatggtggagatcgacagcatggagaagcttgacgacgcgttcaggatggcaagttggtgtcagaaatgcatctacctaatgcccagaatggagaagatagcaggacaatatcctgggggaagcactcggagatgaagctgaagcagagcaaacgtgagacgcaccgtgggcattctctatccaaggggaaggtgtgacctcaggcctcttctgtgcgatgcattactcttaatccgtgtttgcgttggttgctttgaattaattgtcatgtgcttatttgttagcagccaaacaaaaaatcgctcaagttatgataacccgactattccttgacctattatacctgtttccttataacttcttatgattgcacatcataattacttgagaacatatatttgtgaattgctttggtgtccccaacaaactattgtatgttccataacactatagacgtacaaatagtaattggaattgtttctgtacagagtaataatgaacatgcattggataaacagtaggaaacaaaagaagggcaacatcattactctgatcctcgacttacatttctatttgtttttccttcgtacagtacattccctgtcatttgtttgaatgatatgtcaagctttgaattctccaaatcatgcacaatcataagaaacacgtgcagcttattaggccacaattttccatgctttttgatcagtactgaaccccataaatggagactacattgtgtttgacaaaaaacatgcatctttaagtgtcgtgataattttttccacaaatcaacaaccataacccaaaataatgtatcactaatatttaaagctgctacttctagttttctctagaaacctttatgcgtattttgtggacttgctcctactaaggttttgctatttgcaaatttatatagatcagtctcaccattcaaaaagtgcttggatgaaagggaaaaagttaccattcaaaaagtgcttggatgaaagggaaaaagtttggatgaaggcattggtctataaatttttagaaagtccaatatgtgctaaatcctatgtattcgacattgtgtgtcctaatctccccttatcaaaaatagcatagagaaaaaaagaataagtgcaacacaaatgcacaaaaaacagtcaatgtttcggtaaaaatatgctttacactttgacagaaaaaagaggaatatagaataagtagcataaacaagatacatcaaaaataataatgagagtacaataaaaaatgtaggtatcaagatatggatcccaccttgtgaccaaacttacttttattttggctttacagtttgatctatggaatgctaagttcttttgcttgccaactttgctcactcaagcaacttctttctttaaagttatcctattattcatgatttttatttggatgttttggaccttttcttcaaacattagcgagatgcagtgctagtgttgttaatatacctacttgcaggttgctcttttcttatattatttccctatgtgtcgtgctacattataaatatcaagtaattttaatggtacttcttttctgtaagtatacacattaatccttgcaaaagttaaatctacatgtgcatttatttatatatctatatacgcagtgaactttatgtactcaatctaaagatcgttctatattcaatatatctagaatccaatgtggcattttattagcttttagataccaaaccttgctattgactgttcatacatatgtttctaatcactggtagacttcataacttttagacatttttgacctttgtaaattcatattacatattgtattcagtttcttatctcaaatattatagaactatattattataggttgctggaacatgatctggattcaaaatggttggctattgttgatgtaagaatatactttatgtaccctcaagatcattctgcattcaatatatctagaacctaatgaggctcattctgcattcaatatatctagaacctaatgaggcatttccttggcttttagataccaaaccttgctactgtttgttcatatatatatatatatatatatatatatatatatatatatatatatatatatatatatatatatatatatatatatattcatgttaagacatcttattgtatccaatttcttatctcagatatcttgttctccccacaattttatgttctacatgagtggagagatcatatagctcatgagaaagatgagggtactggttagtggttgtatactgccaaataaagcttgaatcgagataggtgttgttgtttttttctttatatcctgttataatggtgcaaaattggatctacaactttgctagctcccccccccccccccccaaaaaaataaagcagatacctacagatgttggacattgtaaaagaattgtaaaatcaaaatatccatatgttgagaacaatgttgtcgtaatcgcttaccttacactgttcgtactgcaattgattattcttatgcctttaaagaagtagctgaagaactaaagaaggaacggttaggacatgtttgttaggatgaacttatgttgagttcattccactctttgaaatcttaagaaatgtgctaagtctagcaccattgcttgcttaagctcttggtgcacgttactttaatgctaaatttgatctgatactcatgtactcatgtctctgtaacgactactctgcatatacacatgttcatgatacaatatcaagttatacatgcttataacaag

SEQ ID NO: 8666 - DNA, 2008 bp, Zea Mays
ggatccgaaatctgtgaccctccgcgtcatctgaaccctagggccacggcccgccaccagtagctcgctcggctccagatcccgcgccacaccacatagcatggcagaagatacagcgtagcaaggtccggacgttcaccagagggcagtggggatggggatggggccggcccgcgtgcgctctccgtgcgggaggcctcggcggcggtgccgctcccgcacccatcggcggcggctgcgctcgaccttaggcggcggggcggccaggctggcgctgtgacctgaaacggtggcgggatggggaggaggaaggagcacctagagagagtccgagtggaggcgtactgctgggacgtgttcaagccagtggagatggtggagatcgacagcatggagaagcttgacgacgcgttcaggatggcaagttggtgtcagaaatgcatctacctaatgcccagaatggagaagatagcaggacaatatcctgggttactcagaccttactcctgcccctctctcctgtttattctattatctggctccatttgtgcagcacaaaacttagcactttgtttcattttggaatattcttgcttttagtttctgatttaattgtagcttcttgctaagtgattgacattatctggttcttattcatttcaagttgttctttcaaaaaaattggaataaaagtcattttggaatcgtgtggttctattgctgctagcttagtaaggtaaaatagcctgacctcgtcaacaattagttctttttaggagaaaaagatgcaacaaatgaggattgatgcttcccgcaagagtacatgatgtacaatatatatctttagatggtttcattgttgtagctgatactaagaatgtagcttttttctttattcaaggtggtcgcagcgatctgtgattgtttatgcccaaagcgtagggttacccgtcttgttagcgctaccttagtgccgcttttttgaaccctagacatctcagaagaggggaagcactcggagatgaagctgaagcagagcaaacgtgagacgcaccgtgggcattctctatccaaggggaagaactatattattataggttgctggaacatgatctggattcaaaatggttggctattgttgatgtaagaatatactttatgtaccctcaagatcattctgcattcaatatatctagaacctaatgaggctcattctgcattcaatatatctagaacctaatgaggcatttccttggcttttagataccaaaccttgctactgtttgttcatatatatatatatatatatatatatatatatatatatatatatatatatatatatatatatatatatatatatatattcatgttaagacatcttattgtatccaatttcttatctcagatatcttgttctccccacaattttatgttctacatgagtggagagatcatatagctcatgagaaagatgagggtactggttagtggttgtatactgccaaataaagcttgaatcgagataggtgttgttgtttttttctttatatcctgttataatggtgcaaaattggatctacaactttgctagctcccccccccccccccccaaaaaaataaagcagatacctacagatgttggacattgtaaaagaattgtaaaatcaaaatatccatatgttgagaacaatgttgtcgtaatcgcttaccttacactgttcgtactgcaattgattattcttatgcctttaaagaagtagctgaagaactaaagaaggaacggttaggacatgtttgttaggatgaacttatgttgagttcattccactctttgaaatcttaagaaatgtgctaagtctagcaccattgcttgcttaagctcttggtgcacgttactttaatgctaaatttgatctgatactcatgtactcatgtctctgtaacgactactctgcatatacacatgttcatgatacaatatcaagttatacatgcttataacaag

SEQ ID NO: 8667 - DNA, 1681 bp, Zea Mays
ggatccgaaatctgtgaccctccgcgtcatctgaaccctagggccacggcccgccaccagtagctcgctcggctccagatcccgcgccacaccacatagcatggcagaagatacagcgtagcaaggtccggacgttcaccagagggcagtggggatggggatggggccggcccgcgtgcgctctccgtgcgggaggcctcggcggcggtgccgctcccgcacccatcggcggcggctgcgctcgaccttaggcggcggggcggccaggctggcgctgtgacctgaaacggtggcgggatggggaggaggaaggagcacctagagagagtccgagtggaggcgtactgctgggacgtgttcaagccagtggagatggtggagatcgacagcatggagaagcttgacgacgcgttcaggatggcaagttggtgtcagaaatgcatctacctaatgcccagaatggagaagatagcaggacaatatcctgggttactcagaccttactcctgcccctctctcctgtttattctattatctggctccatttgtgcagcacaaaacttagcactttgtttcattttggaatattcttgcttttagtttctgatttaattgtagcttcttgctaagtgattgacattatctggttcttattcatttcaagttgttctttcaaaaaaattggaataaaagtcattttggaatcgtgtggttctattgctgctagcttagtaaggtaaaatagcctgacctcgtcaacaattagttctttttaggagaaaaagatgcaacaaatgaggattgatgcttcccgcaagagtacatgatgtacaatatatatctttagatggtttcattgttgtagctgatactaagaatgtagcttttttctttattcaaggtggtcgcagcgatctgtgattgtttatgcccaaagcgtagggttacccgtcttgttagcgctaccttagtgccgcttttttgaaccctagacatctcagaagaggggaagcactcggagatgaagctgaagcagagcaaacgtgagacgcaccgtgggcattctctatccaaggggaagatatcttgttctccccacaattttatgttctacatgagtggagagatcatatagctcatgagaaagatgagggtactggttagtggttgtatactgccaaataaagcttgaatcgagataggtgttgttgtttttttctttatatcctgttataatggtgcaaaattggatctacaactttgctagctcccccccccccccccccaaaaaaataaagcagatacctacagatgttggacattgtaaaagaattgtaaaatcaaaatatccatatgttgagaacaatgttgtcgtaatcgcttaccttacactgttcgtactgcaattgattattcttatgcctttaaagaagtagctgaagaactaaagaaggaacggttaggacatgtttgttaggatgaacttatgttgagttcattccactctttgaaatcttaagaaatgtgctaagtctagcaccattgcttgcttaagctcttggtgcacgttactttaatgctaaatttgatctgatactcatgtactcatgtctctgtaacgactactctgcatatacacatgttcatgatacaatatcaagttatacatgcttataacaag

SEQ ID NO: 8668 - DNA, 2941 bp, Zea Mays
ggatccgaaatctgtgaccctccgcgtcatctgaaccctagggccacggcccgccaccagtagctcgctcggctccagatcccgcgccacaccacatagcatggcagaagatacagcgtagcaaggtccggacgttcaccagagggcagtggggatggggatggggccggcccgcgtgcgctctccgtgcgggaggcctcggcggcggtgccgctcccgcacccatcggcggcggctgcgctcgaccttaggcggcggggcggccaggctggcgctgtgacctgaaacggtggcgggatggggaggaggaaggagcacctagagagagtccgagtggaggcgtactgctgggacgtgttcaagccagtggagatggtggagatcgacagcatggagaagcttgacgacgcgttcaggatggcaagttggtgtcagaaatgcatctacctaatgcccagaatggagaagatagcaggacaatatcctgggttactcagaccttactcctgcccctctctcctgtttattctattatctggctccatttgtgcagcacaaaacttagcactttgtttcattttggaatattcttgcttttagtttctgatttaattgtagcttcttgctaagtgattgacattatctggttcttattcatttcaagttgttctttcaaaaaaattggaataaaagtcattttggaatcgtgtggttctattgctgctagcttagtaaggtaaaatagcctgacctcgtcaacaattagttctttttaggagaaaaagatgcaacaaatgaggattgatgcttcccgcaagagtacatgatgtacaatatatatctttagatggtttcattgttgtagctgatactaagaatgtagcttttttctttattcaaggtggtcgcagcgatctgtgattgtttatgcccaaagcgtagggttacccgtcttgttagcgctaccttagtgccgcttttttgaaccctagacatctcagaagaggggaagcactcggagatgaagctgaagcagagcaaacgtgagacgcaccgtgggcattctctatccaaggggaagatcagtctcaccattcaaaaagtgcttggatgaaagggaaaaagttaccattcaaaaagtgcttggatgaaagggaaaaagtttggatgaaggcattggtctataaatttttagaaagtccaatatgtgctaaatcctatgtattcgacattgtgtgtcctaatctccccttatcaaaaatagcatagagaaaaaaagaataagtgcaacacaaatgcacaaaaaacagtcaatgtttcggtaaaaatatgctttacactttgacagaaaaaagaggaatatagaataagtagcataaacaagatacatcaaaaataataatgagagtacaataaaaaatgtaggtatcaagatatggatcccaccttgtgaccaaacttacttttattttggctttacagtttgatctatggaatgctaagttcttttgcttgccaactttgctcactcaagcaacttctttctttaaagttatcctattattcatgatttttatttggatgttttggaccttttcttcaaacattagcgagatgcagtgctagtgttgttaatatacctacttgcaggttgctcttttcttatattatttccctatgtgtcgtgctacattataaatatcaagtaattttaatggtacttcttttctgtaagtatacacattaatccttgcaaaagttaaatctacatgtgcatttatttatatatctatatacgcagtgaactttatgtactcaatctaaagatcgttctatattcaatatatctagaatccaatgtggcattttattagcttttagataccaaaccttgctattgactgttcatacatatgtttctaatcactggtagacttcataacttttagacatttttgacctttgtaaattcatattacatattgtattcagtttcttatctcaaatattatagaactatattattataggttgctggaacatgatctggattcaaaatggttggctattgttgatgtaagaatatactttatgtaccctcaagatcattctgcattcaatatatctagaacctaatgaggctcattctgcattcaatatatctagaacctaatgaggcatttccttggcttttagataccaaaccttgctactgtttgttcatatatatatatatatatatatatatatatatatatatatatatatatatatatatatatatatatatatatatatattcatgttaagacatcttattgtatccaatttcttatctcagatatcttgttctccccacaattttatgttctacatgagtggagagatcatatagctcatgagaaagatgagggtactggttagtggttgtatactgccaaataaagcttgaatcgagataggtgttgttgtttttttctttatatcctgttataatggtgcaaaattggatctacaactttgctagctcccccccccccccccccaaaaaaataaagcagatacctacagatgttggacattgtaaaagaattgtaaaatcaaaatatccatatgttgagaacaatgttgtcgtaatcgcttaccttacactgttcgtactgcaattgattattcttatgcctttaaagaagtagctgaagaactaaagaaggaacggttaggacatgtttgttaggatgaacttatgttgagttcattccactctttgaaatcttaagaaatgtgctaagtctagcaccattgcttgcttaagctcttggtgcacgttactttaatgctaaatttgatctgatactcatgtactcatgtctctgtaacgactactctgcatatacacatgttcatgatacaatatcaagttatacatgcttataacaag

SEQ ID NO: 8669 - DNA, 2023 bp, Zea Mays
ggcgtagtctggttgcttctagaggatggcgggatccgaaatctgtgaccctccgcgtcatctgaaccctagggccacggcccgccaccagtagctcgctcggctccagatcccgcgccacaccacatagcatggcagaagatacagcgtagcaaggtccggacgttcaccagagggcagtggggatggggatggggccggcccgcgtgcgctctccgtgcgggaggcctcggcggcggtgccgctcccgcacccatcggcggcggctgcgctcgaccttaggcggcggggcggccaggctggcgctgtgacctgaaacggtggcgggatggggaggaggaaggagcacctagagagagtccgagtggaggcgtactgctgggacgtgttcaagccagtggagatggtggagatcgacagcatggagaagcttgacgacgcgttcaggatggcaagttggtgtcagaaatgcatctacctaatgcccagaatggagaagatagcaggacaatatcctgggttactcagaccttactcctgcccctctctcctgtttattctattatctggctccatttgtgcagcacaaaacttagcactttgtttcattttggaatattcttgcttttagtttctgatttaattgtagcttcttgctaagtgattgacattatctggttcttattcatttcaagttgttctttcaaaaaaattggaataaaagtcattttggaatcgtgtggttctattgctgctagcttagtaaggtaaaatagcctgacctcgtcaacaattagttctttttaggagaaaaagatgcaacaaatgaggattgatgcttcccgcaagagtacatgatgtacaatatatatctttagatggtttcattgttgtagctgatactaagaatgtagcttttttctttattcaaggtggtcgcagcgatctgtgattgtttatgcccaaagcgtagggttacccgtcttgttagcgctaccttagtgccgcttttttgaaccctagacatctcagaagaggggaagcactcggagatgaagctgaagcagagcaaacgtgagacgcaccgtgggcattctctatccaaggggaaggttgctggaacatgatctggattcaaaatggttggctattgttgatgtaagaatatactttatgtaccctcaagatcattctgcattcaatatatctagaacctaatgaggctcattctgcattcaatatatctagaacctaatgaggcatttccttggcttttagataccaaaccttgctactgtttgttcatatatatatatatatatatatatatatatatatatatatatatatatatatatatatatatatatatatatatatattcatgttaagacatcttattgtatccaatttcttatctcagatatcttgttctccccacaattttatgttctacatgagtggagagatcatatagctcatgagaaagatgagggtactggttagtggttgtatactgccaaataaagcttgaatcgagataggtgttgttgtttttttctttatatcctgttataatggtgcaaaattggatctacaactttgctagctcccccccccccccccccaaaaaaataaagcagatacctacagatgttggacattgtaaaagaattgtaaaatcaaaatatccatatgttgagaacaatgttgtcgtaatcgcttaccttacactgttcgtactgcaattgattattcttatgcctttaaagaagtagctgaagaactaaagaaggaacggttaggacatgtttgttaggatgaacttatgttgagttcattccactctttgaaatcttaagaaatgtgctaagtctagcaccattgcttgcttaagctcttggtgcacgttactttaatgctaaatttgatctgatactcatgtactcatgtctctgtaacgactactctgcatatacacatgttcatgatacaatatcaagttatacatgcttataacaag

SEQ ID NO: 8670 - DNA, 3100 bp, Zea Mays
cgacatttggcgtagtctggttgcttctagaggatggcgggatccgaaatctgtgaccctccgcgtcatctgaaccctagggccacggcccgccaccagtagctcgctcggctccagatcccgcgccacaccacatagcatggcagaagatacagcgtagcaaggtccggacgttcaccagagggcagtggggatggggatggggccggcccgcgtgcgctctccgtgcgggaggcctcggcggcggtgccgctcccgcacccatcggcggcggctgcgctcgaccttaggcggcggggcggccaggctggcgctgtgacctgaaacggtggcgggatggggaggaggaaggagcacctagagagagtccgagtggaggcgtactgctgggacgtgttcaagccagtggagatggtggagatcgacagcatggagaagcttgacgacgcgttcaggatggcaagttggtgtcagaaatgcatctacctaatgcccagaatggagaagatagcaggacaatatcctgggttactcagaccttactcctgcccctctctcctgtttattctattatctggctccatttgtgcagcacaaaacttagcactttgtttcattttggaatattcttgcttttagtttctgatttaattgtagcttcttgctaagtgattgacattatctggttcttattcatttcaagttgttctttcaaaaaaattggaataaaagtcattttggaatcgtgtggttctattgctgctagcttagtaaggtaaaatagcctgacctcgtcaacaattagttctttttaggagaaaaagatgcaacaaatgaggattgatgcttcccgcaagagtacatgatgtacaatatatatctttagatggtttcattgttgtagctgatactaagaatgtagcttttttctttattcaaggtggtcgcagcgatctgtgattgtttatgcccaaagcgtagggttacccgtcttgttagcgctaccttagtgccgcttttttgaaccctagacatctcagaagaggggaagcactcggagatgaagctgaagcagagcaaacgtgagacgcaccgtgggcattctctatccaaggggaaggtgtgacctcaggcctcttctgtgcgatgcattactcttaatccgtgtttgcgttggttgctttgaattaattgtcatgtgcttatttgttagcagccaaacaaaaaatcgctcaagttatgataacccgactattccttgacctattatacctgtttccttataacttcttatgattgcacatcataattacttgagaacatatatttgtgaattgctttggtgtccccaacaaactattgtatgttccataacactatagacgtacaaatagtaattggaattgtttctgtacagagtaataatgaacatgcattggataaacagtaggaaacaaaagaagggcaacatcattactctgatcctcgacttacatttctatttgtttttccttcgtacagtacattccctgtcatttgtttgaatgatatgtcaagctttgaattctccaaatcatgcacaatcataagaaacacgtgcagcttattaggccacaattttccatgctttttgatcagtactgaaccccataaatggagactacattgtgtttgacaaaaaacatgcatctttaagtgtcgtgataattttttccacaaatcaacaaccataacccaaaataatgtatcactaatatttaaagctgctacttctagttttctctagaaacctttatgcgtattttgtggacttgctcctactaaggttttgctatttgcaaatttatatagatcagtctcaccattcaaaaagtgcttggatgaaagggaaaaagttaccattcaaaaagtgcttggatgaaagggaaaaagtttggatgaaggcattggtctataaatttttagaaagtccaatatgtgctaaatcctatgtattcgacattgtgtgtcctaatctccccttatcaaaaatagcatagagaaaaaaagaataagtgcaacacaaatgcacaaaaaacagtcaatgtttcggtaaaaatatgctttacactttgacagaaaaaagaggaatatagaataagtagcataaacaagatacatcaaaaataataatgagagtacaataaaaaatgtaggtatcaagatatggatcccaccttgtgaccaaacttacttttattttggctttacagtttgatctatggaatgctaagttcttttgcttgccaactttgctcactcaagcaacttctttctttaaagttatcctattattcatgatttttatttggatgttttggaccttttcttcaaacattagcgagatgcagtgctagtgttgttaatatacctacttgcaggttgctcttttcttatattatttccctatgtgtcgtgctacattataaatatcaagtaattttaatggtacttcttttctatatcttgttctccccacaattttatgttctacatgagtggagagatcatatagctcatgagaaagatgagggtactggttagtggttgtatactgccaaataaagcttgaatcgagataggtgttgttgtttttttctttatatcctgttataatggtgcaaaattggatctacaactttgctagctcccccccccccccccccaaaaaaataaagcagatacctacagatgttggacattgtaaaagaattgtaaaatcaaaatatccatatgttgagaacaatgttgtcgtaatcgcttaccttacactgttcgtactgcaattgattattcttatgcctttaaagaagtagctgaagaactaaagaaggaacggttaggacatgtttgttaggatgaacttatgttgagttcattccactctttgaaatcttaagaaatgtgctaagtctagcaccattgcttgcttaagctcttggtgcacgttactttaatgctaaatttgatctgatactcatgtactcatgtctctgtaacgactactctgcatatacacatgttcatgatacaatatcaagttatacatgcttataacaag

SEQ ID NO: 8671 - DNA, 3376 bp, Zea Mays
atacgacatttggcgtagtctggttgcttctagaggatggcgggatccgaaatctgtgaccctccgcgtcatctgaaccctagggccacggcccgccaccagtagctcgctcggctccagatcccgcgccacaccacatagcatggcagaagatacagcgtagcaaggtccggacgttcaccagagggcagtggggatggggatggggccggcccgcgtgcgctctccgtgcgggaggcctcggcggcggtgccgctcccgcacccatcggcggcggctgcgctcgaccttaggcggcggggcggccaggctggcgctgtgacctgaaacggtggcgggatggggaggaggaaggagcacctagagagagtccgagtggaggcgtactgctgggacgtgttcaagccagtggagatggtggagatcgacagcatggagaagcttgacgacgcgttcaggatggcaagttggtgtcagaaatgcatctacctaatgcccagaatggagaagatagcaggacaatatcctgggttactcagaccttactcctgcccctctctcctgtttattctattatctggctccatttgtgcagcacaaaacttagcactttgtttcattttggaatattcttgcttttagtttctgatttaattgtagcttcttgctaagtgattgacattatctggttcttattcatttcaagttgttctttcaaaaaaattggaataaaagtcattttggaatcgtgtggttctattgctgctagcttagtaaggtaaaatagcctgacctcgtcaacaattagttctttttaggagaaaaagatgcaacaaatgaggattgatgcttcccgcaagagtacatgatgtggtcgcagcgatctgtgattgtttatgcccaaagcgtagggttacccgtcttgttagcgctaccttagtgccgcttttttgaaccctagacatctcagaagaggggaagcactcggagatgaagctgaagcagagcaaacgtgagacgcaccgtgggcattctctatccaaggggaaggtgtgacctcaggcctcttctgtgcgatgcattactcttaatccgtgtttgcgttggttgctttgaattaattgtcatgtgcttatttgttagcagccaaacaaaaaatcgctcaagttatgataacccgactattccttgacctattatacctgtttccttataacttcttatgattgcacatcataattacttgagaacatatatttgtgaattgctttggtgtccccaacaaactattgtatgttccataacactatagacgtacaaatagtaattggaattgtttctgtacagagtaataatgaacatgcattggataaacagtaggaaacaaaagaagggcaacatcattactctgatcctcgacttacatttctatttgtttttccttcgtacagtacattccctgtcatttgtttgaatgatatgtcaagctttgaattctccaaatcatgcacaatcataagaaacacgtgcagcttattaggccacaattttccatgctttttgatcagtactgaaccccataaatggagactacattgtgtttgacaaaaaacatgcatctttaagtgtcgtgataattttttccacaaatcaacaaccataacccaaaataatgtatcactaatatttaaagctgctacttctagttttctctagaaacctttatgcgtattttgtggacttgctcctactaaggttttgctatttgcaaatttatatagatcagtctcaccattcaaaaagtgcttggatgaaagggaaaaagttaccattcaaaaagtgcttggatgaaagggaaaaagtttggatgaaggcattggtctataaatttttagaaagtccaatatgtgctaaatcctatgtattcgacattgtgtgtcctaatctccccttatcaaaaatagcatagagaaaaaaagaataagtgcaacacaaatgcacaaaaaacagtcaatgtttcggtaaaaatatgctttacactttgacagaaaaaagaggaatatagaataagtagcataaacaagatacatcaaaaataataatgagagtacaataaaaaatgtaggtatcaagatatggatcccaccttgtgaccaaacttacttttattttggctttacagtttgatctatggaatgctaagttcttttgcttgccaactttgctcactcaagcaacttctttctttaaagttatcctattattcatgatttttatttggatgttttggaccttttcttcaaacattagcgagatgcagtgctagtgttgttaatatacctacttgcaggttgctcttttcttatattatttccctatgtgtcgtgctacattataaatatcaagtaattttaatggtacttcttttctgtaagtatacacattaatccttgcaaaagttaaatctacatgtgcatttatttatatatctatatacgcagtgaactttatgtactcaatctaaagatcgttctatattcaatatatctagaatccaatgtggcattttattagcttttagataccaaaccttgctattgactgttcatacatatgtttctaatcactggtagacttcataacttttagacatttttgacctttgtaaattcatattacatattgtattcagtttcttatctcaaatattatagaactatattattataggttgctggaacatgatctggattcaaaatggttggctattgttgatatatcttgttctccccacaattttatgttctacatgagtggagagatcatatagctcatgagaaagatgagggtactggttagtggttgtatactgccaaataaagcttgaatcgagataggtgttgttgtttttttctttatatcctgttataatggtgcaaaattggatctacaactttgctagctcccccccccccccccccaaaaaaataaagcagatacctacagatgttggacattgtaaaagaattgtaaaatcaaaatatccatatgttgagaacaatgttgtcgtaatcgcttaccttacactgttcgtactgcaattgattattcttatgcctttaaagaagtagctgaagaactaaagaaggaacggttaggacatgtttgttaggatgaacttatgttgagttcattccactctttgaaatcttaagaaatgtgctaagtctagcaccattgcttgcttaagctcttggtgcacgttactttaatgctaaatttgatctgatactcatgtactcatgtctctgtaacgactactctgcatatacacatgttcatgatacaatatcaagttatacatgcttataacaag

SEQ ID NO: 8672 - DNA, 1700 bp, Zea Mays
cacaatacgacatttggcgtagtctggttgcttctagaggatggcgggatccgaaatctgtgaccctccgcgtcatctgaaccctagggccacggcccgccaccagtagctcgctcggctccagatcccgcgccacaccacatagcatggcagaagatacagcgtagcaaggtccggacgttcaccagagggcagtggggatggggatggggccggcccgcgtgcgctctccgtgcgggaggcctcggcggcggtgccgctcccgcacccatcggcggcggctgcgctcgaccttaggcggcggggcggccaggctggcgctgtgacctgaaacggtggcgggatggggaggaggaaggagcacctagagagagtccgagtggaggcgtactgctgggacgtgttcaagccagtggagatggtggagatcgacagcatggagaagcttgacgacgcgttcaggatggcaagttggtgtcagaaatgcatctacctaatgcccagaatggagaagatagcaggacaatatcctgggttactcagaccttactcctgcccctctctcctgtttattctattatctggctccatttgtgcagcacaaaacttagcactttgtttcattttggaatattcttgcttttagtttctgatttaattgtagcttcttgctaagtgattgacattatctggttcttattcatttcaagttgttctttcaaaaaaattggaataaaagtcattttggaatcgtgtggttctattgctgctagcttagtaaggtaaaatagcctgacctcgtcaacaattagttctttttaggagaaaaagatgcaacaaatgaggattgatgcttcccgcaagagtacatgatgtggtcgcagcgatctgtgattgtttatgcccaaagcgtagggttacccgtcttgttagcgctaccttagtgccgcttttttgaaccctagacatctcagaagaggggaagcactcggagatgaagctgaagcagagcaaacgtgagacgcaccgtgggcattctctatccaaggggaaggttgctggaacatgatctggattcaaaatggttggctattgttgatatatcttgttctccccacaattttatgttctacatgagtggagagatcatatagctcatgagaaagatgagggtactggttagtggttgtatactgccaaataaagcttgaatcgagataggtgttgttgtttttttctttatatcctgttataatggtgcaaaattggatctacaactttgctagctcccccccccccccccccaaaaaaataaagcagatacctacagatgttggacattgtaaaagaattgtaaaatcaaaatatccatatgttgagaacaatgttgtcgtaatcgcttaccttacactgttcgtactgcaattgattattcttatgcctttaaagaagtagctgaagaactaaagaaggaacggttaggacatgtttgttaggatgaacttatgttgagttcattccactctttgaaatcttaagaaatgtgctaagtctagcaccattgcttgcttaagctcttggtgcacgttactttaatgctaaatttgatctgatactcatgtactcatgtctctgtaacgactactctgcatatacacatgttcatgatacaatatcaagttatacatgcttataacaag

SEQ ID NO: 8673 - DNA, 1255 bp, Zea Mays
cacaatacgacatttggcgtagtctggttgcttctagaggatggcgggatccgaaatctgtgaccctccgcgtcatctgaaccctagggccacggcccgccaccagtagctcgctcggctccagatcccgcgccacaccacatagcatggcagaagatacagcgtagcaaggtccggacgttcaccagagggcagtggggatggggatggggccggcccgcgtgcgctctccgtgcgggaggcctcggcggcggtgccgctcccgcacccatcggcggcggctgcgctcgaccttaggcggcggggcggccaggctggcgctgtgacctgaaacggtggcgggatggggaggaggaaggagcacctagagagagtccgagtggaggcgtactgctgggacgtgttcaagccagtggagatggtggagatcgacagcatggagaagcttgacgacgcgttcaggatggcaagttggtgtcagaaatgcatctacctaatgcccagaatggagaagatagcaggacaatatcctgggggaagcactcggagatgaagctgaagcagagcaaacgtgagacgcaccgtgggcattctctatccaaggggaaggttgctggaacatgatctggattcaaaatggttggctattgttgatatatcttgttctccccacaattttatgttctacatgagtggagagatcatatagctcatgagaaagatgagggtactggttagtggttgtatactgccaaataaagcttgaatcgagataggtgttgttgtttttttctttatatcctgttataatggtgcaaaattggatctacaactttgctagctcccccccccccccccccaaaaaaataaagcagatacctacagatgttggacattgtaaaagaattgtaaaatcaaaatatccatatgttgagaacaatgttgtcgtaatcgcttaccttacactgttcgtactgcaattgattattcttatgcctttaaagaagtagctgaagaactaaagaaggaacggttaggacatgtttgttaggatgaacttatgttgagttcattccactctttgaaatcttaagaaatgtgctaagtctagcaccattgcttgcttaagctcttggtgcacgttactttaatgctaaatttgatctgatactcatgtactcatgtctctgtaacgactactctgcatatacacatgttcatgatacaatatcaagttatacatgcttataacaag

SEQ ID NO: 8674 - DNA, 3146 bp, Zea Mays
cacaatacgacatttggcgtagtctggttgcttctagaggatggcgggatccgaaatctgtgaccctccgcgtcatctgaaccctagggccacggcccgccaccagtagctcgctcggctccagatcccgcgccacaccacatagcatggcagaagatacagcgtagcaaggtccggacgttcaccagagggcagtggggatggggatggggccggcccgcgtgcgctctccgtgcgggaggcctcggcggcggtgccgctcccgcacccatcggcggcggctgcgctcgaccttaggcggcggggcggccaggctggcgctgtgacctgaaacggtggcgggatggggaggaggaaggagcacctagagagagtccgagtggaggcgtactgctgggacgtgttcaagccagtggagatggtggagatcgacagcatggagaagcttgacgacgcgttcaggatggcaagttggtgtcagaaatgcatctacctaatgcccagaatggagaagatagcaggacaatatcctgggtggtcgcagcgatctgtgattgtttatgcccaaagcgtagggttacccgtcttgttagcgctaccttagtgccgcttttttgaaccctagacatctcagaagaggtaccagctgtactttcacgggctttaacaaattatttagaaagccatatcggggtgatctctctggtctggtgacctgatctgagttttttttgccttcattcaggggaagcactcggagatgaagctgaagcagagcaaacgtgagacgcaccgtgggcattctctatccaaggggaaggtgtgacctcaggcctcttctgtgcgatgcattactcttaatccgtgtttgcgttggttgctttgaattaattgtcatgtgcttatttgttagcagccaaacaaaaaatcgctcaagttatgataacccgactattccttgacctattatacctgtttccttataacttcttatgattgcacatcataattacttgagaacatatatttgtgaattgctttggtgtccccaacaaactattgtatgttccataacactatagacgtacaaatagtaattggaattgtttctgtacagagtaataatgaacatgcattggataaacagtaggaaacaaaagaagggcaacatcattactctgatcctcgacttacatttctatttgtttttccttcgtacagtacattccctgtcatttgtttgaatgatatgtcaagctttgaattctccaaatcatgcacaatcataagaaacacgtgcagcttattaggccacaattttccatgctttttgatcagtactgaaccccataaatggagactacattgtgtttgacaaaaaacatgcatctttaagtgtcgtgataattttttccacaaatcaacaaccataacccaaaataatgtatcactaatatttaaagctgctacttctagttttctctagaaacctttatgcgtattttgtggacttgctcctactaaggttttgctatttgcaaatttatatagatcagtctcaccattcaaaaagtgcttggatgaaagggaaaaagttaccattcaaaaagtgcttggatgaaagggaaaaagtttggatgaaggcattggtctataaatttttagaaagtccaatatgtgctaaatcctatgtattcgacattgtgtgtcctaatctccccttatcaaaaatagcatagagaaaaaaagaataagtgcaacacaaatgcacaaaaaacagtcaatgtttcggtaaaaatatgctttacactttgacagaaaaaagaggaatatagaataagtagcataaacaagatacatcaaaaataataatgagagtacaataaaaaatgtaggtatcaagatatggatcccaccttgtgaccaaacttacttttattttggctttacagtttgatctatggaatgctaagttcttttgcttgccaactttgctcactcaagcaacttctttctttaaagttatcctattattcatgatttttatttggatgttttggaccttttcttcaaacattagcgagatgcagtgctagtgttgttaatatacctacttgcaggttgctcttttcttatattatttccctatgtgtcgtgctacattataaatatcaagtaattttaatggtacttcttttctgtaagtatacacattaatccttgcaaaagttaaatctacatgtgcatttatttatatatctatatacgcagtgaactttatgtactcaatctaaagatcgttctatattcaatatatctagaatccaatgtggcattttattagcttttagataccaaaccttgctattgactgttcatacatatgtttctaatcactggtagacttcataacttttagacatttttgacctttgtaaattcatattacatattgtattcagtttcttatctcaaatattatagaactatattattataggttgctggaacatgatctggattcaaaatggttggctattgttgatatatcttgttctccccacaattttatgttctacatgagtggagagatcatatagctcatgagaaagatgagggtactggttagtggttgtatactgccaaataaagcttgaatcgagataggtgttgttgtttttttctttatatcctgttataatggtgcaaaattggatctacaactttgctagctcccccccccccccccccaaaaaaataaagcagatacctacagatgttggacattgtaaaagaattgtaaaatcaaaatatccatatgttgagaacaatgttgtcgtaatcgcttaccttacactgttcgtactgcaattgattattcttatgcctttaaagaagtagctgaagaactaaagaaggaacggttaggacatgtttgttaggatgaacttatgttgagttcattccactctttgaaatcttaagaaatgtgctaagtctagcaccattgcttgcttaagctcttggtgcacgttactttaatgctaaatttgatctgatactcatgtactcatgtctctgtaacgactactctgcatatacacatgttcatgatacaatatcaagttatacatgcttataacaag

SEQ ID NO: 8675 - DNA, 3648 bp, Zea Mays
ccgcacaatacgacatttggcgtagtctggttgcttctagaggatggcgggatccgaaatctgtgaccctccgcgtcatctgaaccctagggccacggcccgccaccagtagctcgctcggctccagatcccgcgccacaccacatagcatggcagaagatacagcgtagcaaggtccggacgttcaccagagggcagtggggatggggatggggccggcccgcgtgcgctctccgtgcgggaggcctcggcggcggtgccgctcccgcacccatcggcggcggctgcgctcgaccttaggcggcggggcggccaggctggcgctgtgacctgaaacggtggcgggatggggaggaggaaggagcacctagagagagtccgagtggaggcgtactgctgggacgtgttcaagccagtggagatggtggagatcgacagcatggagaagcttgacgacgcgttcaggatggcaagttggtgtcagaaatgcatctacctaatgcccagaatggagaagatagcaggacaatatcctgggttactcagaccttactcctgcccctctctcctgtttattctattatctggctccatttgtgcagcacaaaacttagcactttgtttcattttggaatattcttgcttttagtttctgatttaattgtagcttcttgctaagtgattgacattatctggttcttattcatttcaagttgttctttcaaaaaaattggaataaaagtcattttggaatcgtgtggttctattgctgctagcttagtaaggtaaaatagcctgacctcgtcaacaattagttctttttaggagaaaaagatgcaacaaatgaggattgatgcttcccgcaagagtacatgatgtggtcgcagcgatctgtgattgtttatgcccaaagcgtagggttacccgtcttgttagcgctaccttagtgccgcttttttgaaccctagacatctcagaagaggggaagcactcggagatgaagctgaagcagagcaaacgtgagacgcaccgtgggcattctctatccaaggggaaggtgtgacctcaggcctcttctgtgcgatgcattactcttaatccgtgtttgcgttggttgctttgaattaattgtcatgtgcttatttgttagcagccaaacaaaaaatcgctcaagttatgataacccgactattccttgacctattatacctgtttccttataacttcttatgattgcacatcataattacttgagaacatatatttgtgaattgctttggtgtccccaacaaactattgtatgttccataacactatagacgtacaaatagtaattggaattgtttctgtacagagtaataatgaacatgcattggataaacagtaggaaacaaaagaagggcaacatcattactctgatcctcgacttacatttctatttgtttttccttcgtacagtacattccctgtcatttgtttgaatgatatgtcaagctttgaattctccaaatcatgcacaatcataagaaacacgtgcagcttattaggccacaattttccatgctttttgatcagtactgaaccccataaatggagactacattgtgtttgacaaaaaacatgcatctttaagtgtcgtgataattttttccacaaatcaacaaccataacccaaaataatgtatcactaatatttaaagctgctacttctagttttctctagaaacctttatgcgtattttgtggacttgctcctactaaggttttgctatttgcaaatttatatagatcagtctcaccattcaaaaagtgcttggatgaaagggaaaaagttaccattcaaaaagtgcttggatgaaagggaaaaagtttggatgaaggcattggtctataaatttttagaaagtccaatatgtgctaaatcctatgtattcgacattgtgtgtcctaatctccccttatcaaaaatagcatagagaaaaaaagaataagtgcaacacaaatgcacaaaaaacagtcaatgtttcggtaaaaatatgctttacactttgacagaaaaaagaggaatatagaataagtagcataaacaagatacatcaaaaataataatgagagtacaataaaaaatgtaggtatcaagatatggatcccaccttgtgaccaaacttacttttattttggctttacagtttgatctatggaatgctaagttcttttgcttgccaactttgctcactcaagcaacttctttctttaaagttatcctattattcatgatttttatttggatgttttggaccttttcttcaaacattagcgagatgcagtgctagtgttgttaatatacctacttgcaggttgctcttttcttatattatttccctatgtgtcgtgctacattataaatatcaagtaattttaatggtacttcttttctgtaagtatacacattaatccttgcaaaagttaaatctacatgtgcatttatttatatatctatatacgcagtgaactttatgtactcaatctaaagatcgttctatattcaatatatctagaatccaatgtggcattttattagcttttagataccaaaccttgctattgactgttcatacatatgtttctaatcactggtagacttcataacttttagacatttttgacctttgtaaattcatattacatattgtattcagtttcttatctcaaatattatagaactatattattataggttgctggaacatgatctggattcaaaatggttggctattgttgatgtaagaatatactttatgtaccctcaagatcattctgcattcaatatatctagaacctaatgaggctcattctgcattcaatatatctagaacctaatgaggcatttccttggcttttagataccaaaccttgctactgtttgttcatatatatatatatatatatatatatatatatatatatatatatatatatatatatatatatatatatatatatatattcatgttaagacatcttattgtatccaatttcttatctcagatatcttgttctccccacaattttatgttctacatgagtggagagatcatatagctcatgagaaagatgagggtactggttagtggttgtatactgccaaataaagcttgaatcgagataggtgttgttgtttttttctttatatcctgttataatggtgcaaaattggatctacaactttgctagctcccccccccccccccccaaaaaaataaagcagatacctacagatgttggacattgtaaaagaattgtaaaatcaaaatatccatatgttgagaacaatgttgtcgtaatcgcttaccttacactgttcgtactgcaattgattattcttatgcctttaaagaagtagctgaagaactaaagaaggaacggttaggacatgtttgttaggatgaacttatgttgagttcattccactctttgaaatcttaagaaatgtgctaagtctagcaccattgcttgcttaagctcttggtgcacgttactttaatgctaaatttgatctgatactcatgtactcatgtctctgtaacgactactctgcatatacacatgttcatgatacaatatcaagttatacatgcttataacaag

SEQ ID NO: 8676 - DNA, 224 bp, Zea Mays
tctcatatatgcaccaaaaaagaacaacacatataatgaccaagtgtatagatataaatgtcacaaacattattacatagcggaagtgtctgacaaaaacaaatgataacaataaagcgaactaatattattccttggtgccattaaactgactaggagacgccacctagacttcctcgtactcctcgtagtagtcctcctcctaggctacctgctcttcacct

SEQ ID NO: 8677 - DNA, 643 bp, Zea Mays
gtagccagccgtggatctagattggagaccaaatcatccatgacctcgagcggtggctgcgccggatctactaggaacgccgaggcgacgcagccggagctccaacgatcgcctccgctctgctcacggagttctcagccgatgaggccgcaccacatatggcagctaactctcctagagcgcacttcctcaactagaagatttacagggggcaagttcaacaaaaattacaggtcccaggtcaacaacaaatgcaatacatccaagcattgtcgcaacaatttcataactttaacagatagatggaaactggacgtatgcaaccaggcaaggctcagagtcaattgaatcaaggaactcagctacgaagtcatctaggccactttattggagcttcaaatagtgcgatgttcaatgctccaatctcaactaaagactgagaggcaagaaaaagatagaattaggcatgaaatgaatgatagaaaagttgtgtgcactcatgttgtttcatggaaatgcatgcacgatttggtttgaattcaattaaatgttgttttttattgattgatgatgaactaaaaatgtaataaacccatcatgttagctgtcacatcatcatgctttatgacaaaaatattcttca

SEQ ID NO: 8678 - DNA, 389 bp, Zea Mays
gttgttacgaagttaacgcaactggaacaaaataaatcaaacgtttaatacaaaggttaacacatatttaataaattgcgaatttaatatgatgaggcacaattctactcgctagaggttgtcgcaccgagggtcacatggggttgcagccacaacagatcagacttgagggattttgtgtgaatgaacaattctctttcttcctcctggcatccacgagcagcaaggggatggggaaattgatttggctgtagggcaagcaggggcctagcatctagcgtggggaattggccacgcatgggggcccatggccgctcggccagctgcacgcaggggggtatgggggctatccgggtcgtgctgctggccgcgagagaacaggggaggag

SEQ ID NO: 8679 - DNA, 1674 bp, Zea Mays
ctccctccctccctccgcccgttcgttccccaacagcacagcacgaagacactagacagcagccgccgccgccgccgccttcgcccgcgtaaccgggacagcgtacgcgcacggtggatcgcacggtgtgccggcgatgatggcggggaacgaggaccagctgcgggcggtggcggcgcgggccgtcaccgactcgctgcgcgcggccgcgtcccgctgctcggccgccgaccgcgccgcgcgcttccgggactgcgtccgcagcctcgaggccgagaaggccaagatggaggtcttccgccgggagctccccatcagcgtccacctcgtcgccgacgtgatcgactggctcaaggaggagctcgcgcagcaccgccgccgcccgtcggacctcttcgcgccaccagcgccgccgccgccggcaaaggacggagccgtcttggcggacgcggacgccaacgacaagcgcagctggatgagctccgtgcagctctggagctgcggtagccacgacgacagcaccgccaacaccaacggcgccgccgccgccgcccacaaggtgtccagcgcgttcgtggcactggccgccagcccgccggcgccgacgctggcgaggccatccggcgacgcggcgggtaagcccggagccagcgccagcgccatgccggtcgcggacctgtccctctcgtccccggcggccgccgcctctccgagcgccgccagcagcgccgtcacggacgcggccggggcgcaccgccggcaacatgcgcagcagaggaaggcgaggaggtgctggtcgcccgggctgcaccgccgcttcgtcgccgccctgcagcggctcggcggcgcgcaagtcgccacgccgaagcagatcagagagctgatgaaggtggacgggctcaccaacgacgaggtcaagagccacctgcaggctgcacacgcggcgcgcgtcgtcggacggcggcgaccagcacgcgggcgggctgtggtcgtcggcgccggagcagcagtacacgacgtcgcagcacagcacgtcgcagtcgcagtcgcagtccgggtcgccgcaggggccgctgcagctggcggtgtcgagcagggccatgtcggccaccgccggggacagctgcgacgccggcgacgaggcccagggcggccggtcggagagctacggctgggagatgccgcagcacgggacgaaggcgtcgtcgtcttgatgatccttgtccttggacgggatcacaattcacaacagtatagaagacggtgcggcgtggggcatggtactgaggacaactgcggaagaggcggcattttttgtacaggcgttgagatgatttcatttttcccccttccttttttttctggtagagggaggaggatgtgatggtgaagatgaactgatctggtgttgttgatcgagagtgaggcatatgagatgagatgttattttttacatcccattgtacaatctggaggctggatcgcgttgttttaacggggatggatcggttttcgcatctacgaaaggagggtgaggattgctagcgttgctgcctgacatgggaatacacgtctgccatctctgctgttcttgcaatctgatgcagattgatccatcctggattcctgtcactgttcatattgctcatgtggttctcttcctgccttctggat

SEQ ID NO: 8680 - DNA, 1794 bp, Zea Mays
cttttctccacctcccacgcgccaaatgacccttctgccctcccgggatctccatcttctccccccttccccttccggtataaacccaccgacgacgcgacgggactcccccctccctccctccctccgcccgttcgttccccaacagcacagcacgaagacactagacagcagccgccgccgccgccgccttcgcccgcgtaaccgggacagcgtacgcgcacggtggatcgcacggtgtgccggcgatgatggcggggaacgaggaccagctgcgggcggtggcggcgcgggccgtcaccgactcgctgcgcgcggccgcgtcccgctgctcggccgccgaccgcgccgcgcgcttccgggactgcgtccgcagcctcgaggccgagaaggccaagatggaggtcttccgccgggagctccccatcagcgtccacctcgtcgccgacgtgatcgactggctcaaggaggagctcgcgcagcaccgccgccgcccgtcggacctcttcgcgccaccagcgccgccgccgccggcaaaggacggagccgtcttggcggacgcggacgccaacgacaagcgcagctggatgagctccgtgcagctctggagctgcggtagccacgacgacagcaccgccaacaccaacggcgccgccgccgccgcccacaaggtgtccagcgcgttcgtggcactggccgccagcccgccggcgccgacgctggcgaggccatccggcgacgcggcgggtaagcccggagccagcgccagcgccatgccggtcgcggacctgtccctctcgtccccggcggccgccgcctctccgagcgccgccagcagcgccgtcacggacgcggccggggcgcaccgccggcaacatgcgcagcagaggaaggcgaggaggtgctggtcgcccgggctgcaccgccgcttcgtcgccgccctgcagcggctcggcggcgcgcaagtcgccacgccgaagcagatcagagagctgatgaaggtggacgggctcaccaacgacgaggtcaagagccacctgcagaaatacaggctgcacacgcggcgcgcgtcgtcggacggcggcgaccagcacgcgggcgggctgtggtcgtcggcgccggagcagcagtacacgacgtcgcagcacagcacgtcgcagtcgcagtcgcagtccgggtcgccgcaggggccgctgcagctggcggtgtcgagcagggccatgtcggccaccgccggggacagctgcgacgccggcgacgaggcccagggcggccggtcggagagctacggctgggagatgccgcagcacgggacgaaggcgtcgtcgtcttgatgatccttgtccttggacgggatcacaattcacaacagtatagaagacggtgcggcgtggggcatggtactgaggacaactgcggaagaggcggcattttttgtacaggcgttgagatgatttcatttttcccccttccttttttttctggtagagggaggaggatgtgatggtgaagatgaactgatctggtgttgttgatcgagagtgaggcatatgagatgagatgttattttttacatcccattgtacaatctggaggctggatcgcgttgttttaacggggatggatcggttttcgcatctacgaaaggagggtgaggattgctagcgttgctgcctgacatgggaatacacgtctgccatctctgctgttcttgcaatctgatgcagattgatccatcctggattcctgtcactgttcatattgctcatgtggttctcttcctgccttctggat

SEQ ID NO: 8681 - DNA, 1803 bp, Zea Mays
ccacggccgcctccgccgccgccgccgaccaccatagcaacagatatttcggagctcgcgccttacgcgcatggtttgctcgacgtgcaccgtaactaatcgactataagcgtggtgcctattgacgagatgatgccggtggaggaggcggcggcggatgactggtcggagtgcgcgttctcgctgacctgcgaggaagactgcgccgacctcggcgacggcgagctattcccgctctacagtgccggcgacgaggaggaagatgagtacttggagcagctggtgttcaaggagaccagcttctgctcctcctccgactcagctgccgactgcgacggcgatgaagaaggagacgaagaatactcttcgctcacctcagaggagtggttccgccaagctcgcctcgccgccgtcaagtggattcttgagacccgcgggtgcttcggcttcggccaccggacggcgtacctcgccatctcctacttcgatagcttcctcctccggcgacgcatcgatagggagacgatgccgtgggcggcgcagctgctgtccgttgcgtgcgtgtccgtggccgccaagatggaggagtgccaggcgccggcgctgtcggagttccacgccggcggcttcgacttcgactcggcgtccatccggcggatggagctgctggtgctgtccacgctcgggtggcgcatgggcgccgtcacgcccttggactttctcccctgcttctcctcccgcgtccacccgcatggcggcgccggcgccggcgccggcggccgcgtcgccatcggtttcatctttgccacggccgaaggctggtagcgtgctcgatcacaggccgtccactgtggctgcagccgcaatcttggctgcaacctacggacctctgctgaccaaagaagcactgagctccaagatgagctgcctttctccatcttatcttattgagaaggagcatgtacatgcctgctacagcatgatggttggggacatgagcaggagaggcagcaagagatcattgccatgttcaggccccgacgagattgccactagtacatatcattctgttctagttgatgatgccacggacaccgccgccttcgcctcggcggtggccgcggcgaggagtaagcagatcaggctggagctgacgggcatccattgaggaagctagcaccaccggggacacgatttttagccagatgtctagggggggcttggtttgatcttccctttcgttttctttccttcttttttttaacctatatgtttgcaaaaaaagaagagatttttttaggttcttttagccattgccatggggttggcgtttggctgctgtcagattggtttgatttggtttgtgagaggtggaagagatgaacaaagcagagggctgagcttccctatggagaggggagcttaggttaataagcccgctgcacagtgctccaacagggcactcgtttccagtgaactttatttcgaagttgcactgtttgataaaccattgttgatgcaatgctgcattgcatatggtggtgagatgcagagaagatgcaaaacaagcgaggttgagggttttgccattgtgtatagagagagggagagagagggagagatgtttccctttttcacttgtgcaagtgggtggtgtttcactctgcacctgcaagggtcacatcggtatgaacagaccctgtgtacttgtgtaaaaactcctcttgttcttgaggaactgagagagaatcagattgcatcaagctttgcctgcctgtgtgagtgtgtgtgtgtatgtcgcga

SEQ ID NO: 8682 - DNA, 1765 bp, Zea Mays
cctaaagtttatctcgtgacattgaaacatgctcttaagctagagctagttaaataggtggaggaggcttcggttgccatctcactctcgccgtcactccggcctcttccacggcggcggatgactggtcggagtgcgcgttctcgctgacctgcgaggaagactgcgccgacctcggcgacggcgagctattcccgctctacagtgccggcgacgaggaggaagatgagtacttggagcagctggtgttcaaggagaccagcttctgctcctcctccgactcagctgccgactgcgacggcgatgaagaaggagacgaagaatactcttcgctcacctcagaggagtggttccgccaagctcgcctcgccgccgtcaagtggattcttgagacccgcgggtgcttcggcttcggccaccggacggcgtacctcgccatctcctacttcgatagcttcctcctccggcgacgcatcgatagggagacgatgccgtgggcggcgcagctgctgtccgttgcgtgcgtgtccgtggccgccaagatggaggagtgccaggcgccggcgctgtcggagttccacgccggcggcttcgacttcgactcggcgtccatccggcggatggagctgctggtgctgtccacgctcgggtggcgcatgggcgccgtcacgcccttggactttctcccctgcttctcctcccgcgtccacccgcatggcggcgccggcgccggcgccggcggccgcgtcgccatcggtttcatctttgccacggccgaagctggtagcgtgctcgatcacaggccgtccactgtggctgcagccgcaatcttggctgcaacctacggacctctgctgaccaaagaagcactgagctccaagatgagctgcctttctccatcttatcttattgagaaggagcatgtacatgcctgctacagcatgatggttggggacatgagcaggagaggcagcaagagatcattgccatgttcaggccccgacgagattgccactagtacatatcattctgttctagttgatgatgccacggacaccgccgccttcgcctcggcggtggccgcggcgaggagtaagcagatcaggctggagctgacgggcatccattgaggaagctagcaccaccggggacacgatttttagccagatgtctagggggggcttggtttgatcttccctttcgttttctttccttcttttttttaacctatatgtttgcaaaaaaagaagagatttttttaggttcttttagccattgccatggggttggcgtttggctgctgtcagattggtttgatttggtttgtgagaggtggaagagatgaacaaagcagagggctgagcttccctatggagaggggagcttaggttaataagcccgctgcacagtgctccaacagggcactcgtttccagtgaactttatttcgaagttgcactgtttgataaaccattgttgatgcaatgctgcattgcatatggtggtgagatgcagagaagatgcaaaacaagcgaggttgagggttttgccattgtgtatagagagagggagagagagggagagatgtttccctttttcacttgtgcaagtgggtggtgtttcactctgcacctgcaagggtcacatcggtatgaacagaccctgtgtacttgtgtaaaaactcctcttgttcttgaggaactgagagagaatcagattgcatcaagctttgcctgcctgtgtgagtgtgtgtgtgtatgtcgcga

SEQ ID NO: 8683 - DNA, 672 bp, Zea Mays
ataggttcccgatgtttgaccagtgcatatgcatgggctcggcagctctgagaagcgcacatggatgcgatgcatctcacaagaaatgctcaaatccgcctgtaaacgcaacaagatcctctgcagctactcctcacatgtaggtgaagagaggatctgctggtaactactgacgccattggatgagacaatgcactaagttgcagggcaaaagacagccaaatgtatagtacaaaatgacctgatgcactcgtagggatggaatacagattccatgataatgtagtgaaaaaaaaggcaagttgatgagatagttagttgcacaaggcgaaatgcatgcaaaagggaccacttatctgcagcgccattacctttttttagcccttgtaattagcatccaaaaactgtacgtactaaacttcagtccgagattcaaacaggcgcttaggaagctatggctggcagatgcggtgtccactttctctgtccaaaacttcggtagaaaattgcccgtccatacatatctgtagtgtagctgcttggagaatctgaaaatggcagctttcacagcaacgagcagtaggctaccttcatcaacttatccatccatatttaaacttcagtatgtaaacagcgtaagacaataagcttggatagactgatgcaaacttg

SEQ ID NO: 8684 - DNA, 396 bp, Zea Mays
atggatggtgcaggggctgctcgccacagagcggagtggaagtcatggcgtcggatgagactgatcccgaccatggcggcacgcgaaggaggagctcggggcgccgcaacgctgctggagcagagggataccaatgccgtccacaaccagtgtggaggagttcgaggaggtacctatgatgaatctgcagggccacgcccggacatgtcggcaagcacgcagcgagcagaatccgacgaggtgggcagggagaggaaagtggcgacctgggagatgagggcgagcttggggaaggagcagagacctacgaccaccatggcaggcgctaccggggtctcagtgttgatggaggcaagggcgcgacgctgggaacgagggcttgccgcacgtccctag

SEQ ID NO: 8685 - DNA, 1505 bp, Zea Mays
tgctctgaatccattaatagagttgacatgtccattttagagtgttggctatgcccagcttttctataatggagaaaccctcgcctgagcctctatttcgttgaagccgcacccgtcgcgtttcataatgtcaaatctctctgctctacttggtttatcagtctcgccacacttctgcttcgaagtagatgccccgtgcgtggacgccgccgccgcagcgaggcgcagctgcgctcccaggccttccggttccggaccacggaacacgcggcggcgtgcagcctgtcgacgccctccgccactgaaacgcccgtgcaccttgttggcggcgaagaaacagggcgccttctcgcagccgctggagtccaggaccaggacgtcgaaggagcagccgctgccgctgccgccgccgccgccgcgcgtgaagaccacgaggtcgtcctcctgtagctcgtgcgctctggcgaagtcgccccatcctgacccgaggagcagctcgtcggcgtcggcgttccttgcgacgtcgacgagccacgtcgcgccgctcggcgatttcaggctcagcgtttcggtgagctgcccatttggatcgctcacgaacttctccgaatgggtagaatccctcattactcccctccaaaaggctccttcgggcggaaggacatctctaccttaatggatcatttttcatgggattgcaatgccaatggctggggatggtaggaccattcttctctcgcaggatgtatggaacagctctcggctcaggcagacttacccttgcttgtactcttttgctaaaaaggaagattgctccctcgcggaatatcttggcaatcaaaatcttgaggaaaatttccattctcctttgtccccggaagctcttgaggaatatttggaattatgtaactttgttaatttgatccagcatgatgggagaggaaaagacaagtggatttatgtctggggcaatgacaacttcagttccacctgaatttataatttgaactttcaatgtgttcggccacctcctccatttctctggatttggaagtccaaagtttgcaaaaagctgaaggttttcatttggctagtattcagggcagaatcaactcaaggaatttgctaagaagaaagggctacgatttaccaaataatgatcattgcggaccctttttctggaagtgctggctatcactgcttgggaaatttggagacaacgaaattcggctatcttcagagaatctgttccgtctttcaattccgggaggacctgaagcttcagatgatcagatttagcgctgaacttaaaatgcttgtctcattgtggctttcttccctttaagctcactatctctctctttctcttcagccccacctcttcttttcttgtgcagttttatcttatgtttgtacctattccttttttttcaatattactaaaatctatagctgtgggggtttcccctgcagcctttctttgttaatttattgtacaaatttag

SEQ ID NO: 8686 - DNA, 621 bp, Zea Mays
catacacccaggcatgcacacgtacacacgttcttcactttttggacgaagtgcaggaaaacgatatcgctcccgcctgttcagcaaagcccatttcttcgggcccaatcagcgcagaatccggtccacgacgactcttcaccccaccctctcctcctccaactagtcaggctgctagtgctacctttcaaaaaacccctacatcctgccatacatccatccgccgccgccgccgccgccatctcctcccactctcttcccactccgacgaaaccctattcagtatccatctctccatccatggcgtggcgcggccccgccacccgggccgtcctcgccgccgtccgccgcccggcagcggccgcgcgcctccacgccccgcgccgccgcgtcccgcccgccttcgccaccacctcctccccgctcccgtccgcgcggcctctggcggcgttgatggggtccccggtgacggtggccgccgtgatggcgcgtctcacggcgcatcccggcgccagcgcgcgcgcgtgctgcgagctttcccagggtacttgaatctgttgtgtagatcccatcctttcgaaaggataaatgatgtgtcttttgggggaataaaagctatta

SEQ ID NO: 8687 - DNA, 2576 bp, Zea Mays
tctccatctctcctccctttcgtctcgctccctcgcgcatgctccaaaaagcagctactcctcccccatcctgctttcccctcctcgtctagggtttcccacccccatgcctctcccgaaaccctagccgccgcctcctgttcactgctctcctcgccgctgcagccgtttccggccatggccgctggagccagcgactactctttcgcggcggagtacgttggcccgccactcccctacacgctcccgcgcgccatcccgctcgacctctcccgcatcccgctcgccgcgctgtcttcctcgcccccggcctccccctccgcctcctcgtctccactccccgtcgttcgcccgccgtctaggctccgcccggggttctattggtacgataaggtgtctggcttctggggaaaggagggacacaaaccacattgcataatcaccgcaaatctaaatgttggaggttctctagatcaaaaagcaagcaacgggaacaccggaatattgattaatgggcgagagattacaaaatctgaactgcaaatgcttaaggagtccaatgtgctgggaaacctcacttttgggtgaacgctgatgggacttaccaagaggaaggccaaaaaactgttaaaggaaagatctgggataagcctatagtgaagcttcttagtcctgttctgtcattgccaacacccaacaaagcagctaatcaatccagcgaagatgctgttgacatagtaaacagagccatccctgactacctggaacaaagaacaacacagaagtttttgttggttgggtcaggggcaagcaccatactcaagcaggcgaagttcttgtacaagactggcaagccattttcagtggatgagcgtgaagatctgaaacttatcatacaaagcaacatatacaactaccttggcatattgcttgaagggcgtgagcggtttgaagaggaatctttagctgatagaagaaaaaccagtcagtgtgacccttctagctctgggtgttgtgaacctggattatgtgacgaagtcactgagtactcccttattccacgtttgaaagcattctcagattggattcttaaagcaatggctttaggtaatcttgaagacatatttcctgcagcaagccgtgaatatgcaccacttgttgatgaattatggaaagatcctgctattcaagctacatatagaagaagtgaactgccattccttccacctgctgccagttattttcttgacaaggctgttgatatatctcgaacggaatatgagctgtcagatatggatatactgtatgctgatgggattacatcctcagatggggtagcatcaactgaattctctttccctcagctgtctttgggtggactgggtgttgatgagcccgatgcacaagacactttgctaaggtaccaattgatcaggataaacagtagaggtttgcatgggaactgcaaatggctgcaaatgttcgatgacgtaaggcttgttatcttctgtgttgctgctagcgactacgatgagtactacgaagatgcaaacggtaccattgtcaacaagatgatagagagcaggcagctgttcgagagcatcaccctccatccaacattcgagcaagcagacttccttctgctcctcaccaagttcgatctcctagagcagaagatcagcagttccccgctgacctcgtgcgattggttcagcgacttcactcccctgatcagccgcaacctcctcaacggcggtggcggcggcggccgcaggactgcgcgcagcagcaccggcgcgacactgccccagatggctgcgcactacatggcgaccaagttcaagaggctgttcgagtcgatgacggggcggaagctctacgtgtcgtacgtgaacgctctggaccaggagtccgtccggtcggcgatccgctacgggcgggaggtcgtcaagtgggaggaggagaagcccgtgttcggtgccagcgagacagtctacagcgaggagccgagctccttcactgcctgaccttccttcgtcgtgtgcagaagaagaggtgtaaatatctgtgcatttctttcctccccagcacgctctcttagagctgtacccccatccgtcccgtcgcagatcgtccgtcttgtgtggctgttcagttgtttttgcaaagtagaatggtggagacgacccggcccattctgattcttgtaaattgtattgtgggttgcttgcgtttgatgcattattaggctggcgcgaagttaagtctgccagaccatcggcttgtatgctggttacttctggtatatattgtctggttcgccatcagtgtcaagagagaccataccatgggaaggatgctttgctccattgctgagatattttgctgggagatgcgtcatctgtctttgaggtgttttgcacttttgctgggagatgtccattattgagatgcgtcatcttcaaccgtgggcctaaaagtaaatcctgtgcgtctgcaaacttgcggaaaaaattgtaggtctagtttgataactttatttttaagggattcttattttttaaggaaaaataaac

SEQ ID NO: 8688 - DNA, 2632 bp, Zea Mays
caccggtccacggacccagctcacagttcacaggcaaaagcagtcgccttctccatctctcctccctttcgtctcgctccctcgcgcatgctccaaaaagcagctactcctcccccatcctgctttcccctcctcgtctagggtttcccacccccatgcctctcccgaaaccctagccgccgcctcctgttcactgctctcctcgccgctgcagccgtttccggccatggccgctggagccagcgactactctttcgcggcggagtacgttggcccgccactcccctacacgctcccgcgcgccatcccgctcgacctctcccgcatcccgctcgccgcgctgtcttcctcgcccccggcctccccctccgcctcctcgtctccactccccgtcgttcgcccgccgtctaggctccgcccggggttctattggtacgataaggtgtctggcttctggggaaaggagggacacaaaccacattgcataatcaccgcaaatctaaatgttggaggttctctagatcaaaaagcaagcaacgggaacaccggaatattgattaatgggcgagagattacaaaatctgaactgcaaatgcttaagttggcaggagtccaatgtgctgggaaacctcacttttgggtgaacgctgatgggacttaccaagaggaaggccaaaaaactgttaaaggaaagatctgggataagcctatagtgaagcttcttagtcctgttctgtcattgccaacacccaacaaagcagctaatcaatccagcgaagatgctgttgacatagtaaacagagccatccctgactacctggaacaaagaacaacacagaagtttttgttggttgggtcaggggcaagcaccatactcaagcaggcgaagttcttgtacaagactggcaagccattttcagtggatgagcgtgaagatctgaaacttatcatacaaagcaacatatacaactaccttggcatattgcttgaagggcgtgagcggtttgaagaggaatctttagctgatagaagaaaaaccagtcagtgtgacccttctagctctgggtgttgtgaacctggattatgtgacgaagtcactgagtactcccttattccacgtttgaaagcattctcagattggattcttaaagcaatggctttaggtaatcttgaagacatatttcctgcagcaagccgtgaatatgcaccacttgttgatgaattatggaaagatcctgctattcaagctacatatagaagaagtgaactgccattccttccacctgctgccagttattttcttgacaaggctgttgatatatctcgaacggaatatgagctgtcagatatggatatactgtatgctgatgggattacatcctcagatggggtagcatcaactgaattctctttccctcagctgtctttgggtggactgggtgttgatgagcccgatgcacaagacactttgctaaggtaccaattgatcaggataaacagtagaggtttgcatgggaactgcaaatggctgcaaatgttcgatgacgtaaggcttgttatcttctgtgttgctgctagcgactacgatgagtactacgaagatgcaaacggtaccattgtcaacaagatgatagagagcaggcagctgttcgagagcatcaccctccatccaacattcgagcaagcagacttccttctgctcctcaccaagttcgatctcctagagcagaagatcagcagttccccgctgacctcgtgcgattggttcagcgacttcactcccctgatcagccgcaacctcctcaacggcggtggcggcggcggccgcaggactgcgcgcagcagcaccggcgcgacactgccccagatggctgcgcactacatggcgaccaagttcaagaggctgttcgagtcgatgacggggcggaagctctacgtgtcgtacgtgaacgctctggaccaggagtccgtccggtcggcgatccgctacgggcgggaggtcgtcaagtgggaggaggagaagcccgtgttcggtgccagcgagacagtctacagcgaggagccgagctccttcactgcctgaccttccttcgtcgtgtgcagaagaagaggtgtaaatatctgtgcatttctttcctccccagcacgctctcttagagctgtacccccatccgtcccgtcgcagatcgtccgtcttgtgtggctgttcagttgtttttgcaaagtagaatggtggagacgacccggcccattctgattcttgtaaattgtattgtgggttgcttgcgtttgatgcattattaggctggcgcgaagttaagtctgccagaccatcggcttgtatgctggttacttctggtatatattgtctggttcgccatcagtgtcaagagagaccataccatgggaaggatgctttgctccattgctgagatattttgctgggagatgcgtcatctgtctttgaggtgttttgcacttttgctgggagatgtccattattgagatgcgtcatcttcaaccgtgggcctaaaagtaaatcctgtgcgtctgcaaacttgcggaaaaaattgtaggtctagtttgataactttatttttaagggattcttattttttaaggaaaaataaac

SEQ ID NO: 8689 - DNA, 1480 bp, Zea Mays
caaaagcagtcgccttctccatctctcctccctttcgtctcgctccctcgcgcatgctccaaaaagcagctactcctcccccatcctgctttcccctcctcgtctagggtttcccacccccatgcctctcccgaaaccctagccgccgcctcctgttcactgctctcctcgccgctgcagccgtttccggccatggccgctggagccagcgactactctttcgcggcggagtacgttggcccgccactcccctacacgctcccgcgcgccatcccgctcgacctctcccgcatcccgctcgccgcgctgtcttcctcgcccccggcctccccctccgcctcctcgtctccactccccgtcgttcgcccgccgtctaggctccgcccggggttctattggtacgataaggtgtctggcttctggggaaaggagggacacaaaccacattgcataatcaccgcaaatctaaatgttggaggttctctagatcaaaaagcaagcaacgggaacaccggaatattgattaatgggcgagagattacaaaatctgaactgcaaatgcttaagttggcaggagtccaatgtgctgggaaacctcacttttgggtgaacgctgatgggacttaccaagaggaaggccaaaaaactgttaaaggaaagatctgggataagcctatagtgaagcttcttagtcctgttctgtcattgccaacacccaacaaagcagctaatcaatccagcgaagatgctgttgacatagtaaacagagccatccctgactacctggaacaaagaacaacacagaagtttttgttggttgggtcaggggcaagcaccatactcaagcaggcgaagttcttgtacaagactggcaagccattttcagtggatgagcgtgaagatctgaaacttatcatacaaagcaacatatacaactaccttggcatattgcttgaagggcgtgagcggtttgaagaggaatctttagctgatagaagaaaaaccagtcagtgtgacccttctagctctgggtgttgtgaacctggattatgtgacgaagtcactgagtactcccttattccacgtttgaaagcattctcagattggattcttaaagcaatggctttaggtaatcttgaagacatatttcctgcagcaagccgtgaatatgcaccacttgttgatgaattatggaaagatcctgctattcaagctacatatagaagaagtgaactgccattccttccacctgctgccagttattttcttgacaaggctgttgatatatctcgaacggaatatgagctgtcagatatggatatactgtatgctgatgggattacatcctcagatggggtagcatcaactgaattctctttccctcagctgtctttgggtggactgggtgttgatgagcccgatgcacaagacactttgctaaggtgtgataacgatgggggttattttaatttgttttcag

SEQ ID NO: 8690 - DNA, 10858 bp, Zea Mays
gaaattactgttctgccattccgtaaataccctcacggccccgcgctccccgttccccttcctcgctccccaccactccgttccatccctcgcctgccttcgcacgggtgcgccgcccgctcgacggccacgccacgccgcgccgcgccgctcagctgccccggcacccgcccttcctcgccgagctcgggatcgacgtctcccgcacctcctcgcgcccgttccgggctccgcatccggcccctccccgtccccaaccccattccgcagctggcgaccagcacaacatcccgaatcccccacctcgcattcggctcgccgtagctcctcctccgcgtcccgccgcccccggcacgcacaagtttactatgtctgggatggcatttgatgattcacctgcccaagtgaatgttgaaggagatgtttcagagaaaaaagtagaagttcaagaccagaatgaagtgggtgggatgccctcacgacaagaggaggaggcagcaattaagaaaaagtatgaaggaatattgcccagaaagactcctgcttatatctaagaactgctaccagcaacatcagtcgtcagcacaagttcagatgtcagtcgtcatcagcgcaacgtccaaggacttgcttggattcacatgtatctatattaatccgcaagccctattgtgctacagtatattggaattaaacttaggggccaacaagattggatcccttcattttgggaaattggaatatatatctctctcacgtgaccaacagtaggatacaaatacgttctatataaaaccaggggcggacccagcccaaaatctaagtgggggcctaaatagaggcttagtaactaataaacctttgtttctatagtaaataaggtaaaaggtccattaaaacttgaaatttgagtgggggcctgtgccccgctccgtataacgtaggtccgcctaggggtgacaatgggctctaatatttatactataaaatataaggatcggatcggattaatatcggtccctatttctattcatttttgaactaaaatttattcagggccctaaataattgtgaaaaacatttggatcgcgatccattaccacccctaggtgcgcccttgcataaaattgtattagctggaccgatatgtgccttgaatcacgattatattttgaatggaatttaattctgagtatccaaacgggtcgtttgagggactaaagattagttcatccattttagttctatttaatcactaaggccttgtttgggagtaagggtaatagaggggattggaggggttagaatcccccactattcaattttaaatagtagaggattatagccccctcaatccccttcatttcacttgctcccaaacaagccctaaattgcccaacagtgggactaaaacagggactaaactgttttagtctctagtccctcaaggggtgactaaaaaggactaaaacatattaatttcaaccttttcctctcctttatttcagttgcactaatggcgggagaatactaagggatattttggtcctcttatgattcatttattgcattctgaataattttagtccctagaaccaaacagggtagggactaaactttagttctctaattaaactttaatccctggactaaaggaaccagacatgccctaagtctaacgttcgcttcattccaatgtacttggacacgcgtagatagagataaatacacatgcatcaaactaaatcctcccgacttttcaacacaaccgattaccgacccccgtttcacaaatacaggccgttcctttcagaattgccgctagaaacggccggttctggccactgggtgaggagaactgttcacgaccattattaaatccagatgaaaggtgggtggtggaaggcgatgaagacctgatctgaggttgcctcacgtgacgtgcatccatagtacacccacactgtcggtgttttgggtccgaccgcacacccggggttgcccctcaaggtgttttaggagtaggacggtgtcgtcgactgtagctaaatggttcgtgccggatgcacgaggaacaatggacagtgtttacaggttcggggcgctttgagatgcgtaacaccctacgtcctggcgagtatgctttatgtaatgggttacaagggggctctctaaagctagaacgtagagagttggggtggatggctgagtagcgggatcaatcattctgaaggggtgccccctaggccttatatattcgaccgtgaggcaatacatgcggatgagataacaaactgcgcctaagagatagtgaactgattgagtttatcttcctatagttctgccgacttatcctcgcctggctctgttgtacggggctccagcgcgggaaagtcgggtcttctgttgtggttgcttgctcaacgttgttgggccattcgggctcgcaccgatccggccttatgtcgatctgcttcactggtcgttcctccctaggcccatgaaggagtgaccttacgatttattgggcccttgggcctttcgtgaggtcttttatccttccagtggacctgggggatatctgtcccccctacacacaatactactctggtaagctaacctcggacgggagacgcagtcacggctcgctcgaggccatccttggacgggagaagcagttacggctcgcccgagactatcctcggacgggagtcgcagtcacggctcacctgaggccatcctcggacgggagacgatcatgactcgtccgaggccaaccccgagccggagacgcagtcacgactcgctcgaggccaaccttgagcgagagacgaagtcacccaggctgacccaagcttgctttttttctcgtttcttctccacttgacttcaactcttaggaggaccttcttgtgacttagacaaacacatttagagtataattcaattcactgagtcctagaagattacctcttttcatatcttctcccagcttttctgttcgaggtcgacgttggactccaaaactccaagtctccaagacttgatccagattgtcatctatgagctctaacacccaacataggtcacatagaacatatccaaacacaggaacaacccaaactcatggtaaaagtaaacttagctcttttggattgcttccaggttctcgctttggcactgctctttctagtgaccttgctctatgacttgagcttgatcttgagccttatgacttacaccacataaccatagatgttacctcattggttgtaagtaatgtccttagatagtgattctcgatgcaccatatcttttctcaactcgatcaatccttgacattgcaagtcttcttcaccctggctttgggttcctcggcctccttgaccttccatgcactcggtacctcgaagctcttcttgcctccagccttggcttgaccagttgtctccaagatatgcacaccaagtctcacataagcaatcttctccttcacttgtggtgtccacacccttaatcaactcagcctttggaacatcactcatgaacacttgagttgaactttacaagttttacacaaagcacccgtccaacacttaacacacctgtcagtcctttatttgggttgtcattcaaaccacccaaacccacaagagagctttcaggtgggcgggtggaggaagaggcacatgcatctagggaagtacttcaatgtcttgtgttgtttcgtgccacatgcagaggtgcgtgcatccacagaagttcgtcctgtggcctgcggacagtggacgcgagtgaccggacgcgacgcctatgtccagtcgtccaggcacgacgcctacgtcagcacgtccgggcgcgaggagttctgattatttatgtatggcaaatactcattatgaaaatataaaggcatctaggcactatgcagcagatcatgaataaaaaagtagtccctaatatatagctaataataaagaggcaaaaattcagcctattttttgtctatccattttttaggcccgtctctctctaactaccagacaatagagactttctttgtccagacttcatctagaccaatatggagtatgaatcctaatctaaacaggttcctcagatcatgagtactctaaaattgaacccatatataataatcaaatagaaaaggtaagagtcgttctgctatttattttgctcgactttctttatttagttctctatcaagagggagacaaaaaaatcatgtccatgtgttccttattttatattctccgtccgtttacaaagcaagcgaactcccaatttttatctccttttttattcaagcttgtagagttcaaatattttacagaaacgtgatggcaatctttctaaatatttttgtacaaatattatgtagtagtaacatgttcgggcttgaactccgggtgaagaacgacagagatatatggtatatagcctgagacaccatacatacatgtatataatgaataaatacatatatattacgccgtaccattattgttattctttagtttgatttgattgagtgaagctcttcagtagattcagatgcaatgaactgcggtgtggtgtactggtatgacctcgtgacattgaaaaggcggcgggcacgaggacgaccatgaccaacacagcatcgtggtgcacatgctagacaacaagcgtggcatgagtcggacgtaggtggctagaccgaggtcgtcacgggagtctctaggcacttgacctggttcgctttgacgacagacgacgttggcaataagttgtcatgtcaaggccatcggagtagctccaatatgacaggatgttcgttttgggcaactttaggtgcactctaccctatgactccgcaatttctagccacctcgccgtggtcgtatctcggatgtggctagacctttaagtttaattccgcaattatttcggtcagccaacgttaagttttagaaaagactattcgccccctctagtccaccatatagaccctacagcagcgaccgatgacacccataagtaatggttataactagtgcttcatatatattgtatgcatctcgttcattttttattaatcatatcctagaaatgatgttcgtacctaggacgatcggatcaaaagttgctgcggcattaatccatgatcggaatgctcgacaccaatattgggaaccatccacaagtgtgtcaagtattgctcaccaatttctaaaatataattgcgcctaaaaataaaggactaataaatacatcaccgaacatacatcactcgtcaacacaagacatctcattgtttattattcaatatattgagtaggacactatatatagattcaacacatacacttaaatgtatgaaatcaaccatgaaagcaagatcagacatcacactcgcattattcaattgatgcttgcctttcatatatcaaggcataaaaaggtataaaggtagcctttgctagtaggcaatctagcctattagcaaagggtctttatacctttttatgccttgatatatggagtttcttcaacgatttcctcattagtgtttgggtccacgctgaagtagatgacaacacgtatagttccgggtgcgagttggtctgaaggcctcggggtctcgttcaaatccacatctagtgactcaaagaatgttacatctggccgctcttgttctattacttcaattgcatcattaatctccttgccaatcaactcgggccaactggtcttgtcctgcgtagccatgatcacgtactatccttagcttttctctcttttgaaactgttataatatcaataagaatcaataatcgagcaacgtcagtgtaatgaatagaaacataatatgttgttttgtgctaatgctatcatactttcatagtaagcatgtcttaatcgaatgcactacataactaccgagctgcaaacagtctattaaaatgctaaaaagatacttttttcaaagcaattactaataaagaaatacatgataacctgtgtggaagaagaacacggtagcctttggtgatgataagtgctctatgtataggtgtgtatatatacatgatgacatttgtattgttgcttggatgctgtcggtgaaaacaatgcaaatattttgtccactattaattaggaaacatgatcatattgcccttttgctaccaataactgtagttatctaccataacaatgcatgctttgacttagtaaacatcatcatatctccttgttcacagggggacagctgaatgtacatactgtacacagcccgtgactcaaacaatatacgtgtaatccaaacgaaacataaaaaagccctagaaatagtggcaacccgctaattcatgtcgttgttgtccagctaaaatttttgaccccacatgcatcgttttctaacctcactcaaatccaacagatgccagacttttgtggtttctcatgttttgttatttttattttttttcatatatttaaatgcctcactagattcttagctaagggctggcatgatgcatctgtcaacaagatcaccagttttccacgctgttgaatcgacaggtatagcagacaaacacaatttttatgttgaactattttttttatagaaatttatgttcacctgataatcatcagaatatcctgaaatcaaactactcacgcaagaaaaaaaattctggaaagtaattgcatataggccccacattttgattatatcatcatgcaatcagcttatccgcatgatatgcaggcagattaattcaagttatagtaacttggacctcacgtgaaacggttaataagcttagagagttggatttgcatttttggaaatttgggaacttggatcgaaccaagttcataaacttttattcacataaggtacaaaagcaccaaactatatggtgtagaaacaatccacatgaaatgtcatgaagtgtctgtagcataacacacctctgtatattaataaatctgaaagctgactcattgacggatgatacatcactggccaagaacatggcacactacagccagtgcactcgtacgaagagaggaaaagcagcatgctaggctagcaatatgtgctggcacatcttctattttttttataacaatagggaacagactgaaaaatcagaggccgcaggcattacagaatgtagcattcgaaaatcagtataatatgcaatagcaggtagtcaacgaagagcatcccgtttgaatgtatcttctgaaaaaatggatataataaagaagtaggggagaggagaaaagggatagaaaattgaaaaaaatgatgtagctaggaaatctagattagtagcagctgctagttaagacgtctacaaattcctatatctcggagcatcaagcctgaattctccacggaagcacaaaccatctgcttcgacttgctccttgtgctcagatagtcagtgggagccaaaagtacacacacgcacaaacgcccttctcctatctgtgcatctgcggcctttccgtgtagacgaaaatttgctgtcaccgtacattggccagcccagctaatccatgtagaactcgaattgaaccccattagaagcagattgaaaaggatctgcgaagcggacacacacagcaacaacctatcgctaaaggtgacggaagtgcaaggggaggtgagggggaacatgtcgctggcacacgaagaactggagcatccatactgcaataacagtagaaggtatagcggcagaaggtataccgacagcagcacgtataccttctatagatgtagcgacccatgcactattaaatgggccgtgcttcgggtcggcctgccaggaacaatccatttggccatctatagacgtcaatgtaaggagagttccatctctcttttggaaatatctttcactgctccatagactcaaacggaagagtcttgttggtatcttgatccgaggatccaccaaccagtgaaataatgttgtgtgccctggcccagatgagtgatgcaaggtgatacaagttgtttatcctggttcgggcgagagaaagccctacttccagcagagggaggacgagacttatattacttgcacctaagtgcttgcagtagggagtacaaacaggtcgagagaggggaggatcccaagtccctggggttgattgaggcaagtgtcaatatcgcagtggaggtgaaaaccgtgaagtgttcgcccgcctccctgaagccacagactcctctatttatagcctcaaggagggctgccatgagtgccggggttggccgggtatggtgaggaggcgaggttgagcacctgtagacggtatggcctgtggtatgaggcttgtacttgctgttgacttatgcctggtggagacgtctggttcctgtatttgcatctttgactacgcagagagtcgaggctagggccgagggctcggtcacatacccgagcctacctgatggggaagttgcacatgtcgtagtggttggtgtagtgctgagcatggcaaaaagcccatgggtaatatgtcagctcccccgttttcggtgacgtcgggcgcccttttgttgataataacgaggtcgatgccgtgctcgggcgaggcgaaagtctgcccgaggccgtgactgagcccgcaccgggattcgtagacgtgcgcgacacagttgaaggagtggtctcctgcggtattcgcggggagtaagtagccgaggctgggctcgggcgaggtgtactttcctctcgaggtccagtcccgcgctttgtcgaatgcgtgtatgcgtgtcccatcagtagttggtaggtgacgtgggggaacaacagccgttgtacttaggcatacatcatcgtagttggtgaaagccgacgagaccgcggtcttgtcgctcctgttcgcctgcagcgctgcgtggggtaggtatgctcattaaatgctcatgtcccctgtgaccttcggctgagacctgcctcggggatgccttccttgctcgagacgggctcgggcgaggcggagacggtagttatggggagagaggacctcggctgggacgaggattctactgagtatgtaccttgtccgagggcaggtccgggcgaggcaaagttatgggtgaccgccgagaggggccttgggcgaatcgtggtttataccttattgtcctcgggaatgtgcctggtggcaacctcggggttaagcacgtttagggatgtaatccaggtacctctaattacgatacccgacaagtcatctcttgagttggatctttcggctagtcttgagtcttgacttagaccagtgactacactgggcatgaaagaagaggagagaagaacgatgcagtccttaaataccctaatttcgtcatcaaatcaaatttaaattaagacctgttggatccacttgactaaattttagccctatcacattaaatgtttaatactagtcaggagtattaaatataatctaattataaaactaattacataggtaatgactaaacagtacaaccagtctatagagcctaattatgttatgatttactcatgtgatgctacattgaacatttgctaattatagattaactagccagttgcacgtgctttgctacggttgttatatatcatataaataagtattgagatatttattcaaatataattattgtttgtttctaaacactaaggtacgtgtggtcttgtggttagccccacatttctagagtagggggtgtatgtttgagtgctcgctctgcactattttttgtgcggtgtggtagctgtatgggcggggtcaggtgctagacaggcaggtggcggcgcgggcgctgggggtccacattgcactagctgagagagcgctgcacgggcgcgggcgtgaggcccacagggcacgacgcagaggcggggtgaagcaccaggtgcccacattaggttcttaatagagtaataggtatgtgcccgtatgttgtcccaggagttaaaaatagtataaaacatagatataaaacgataaacatcactatgatatacaaaacccgcgtaacggctcgcctgaggtcaaccccggacaagcagcgcattttcgactctctcgagggcgcctcaggcgactgtccggtgaggcccagactggcccaagcttgcttttttctgtttcttctcaacttgacttcgactcttgggaggatcttcctgtgacttagacaaacacatttagagtataattcaattgactgagtcccagaagattacctcttttcatatattctcccagcttttatgttcgaggtagatgttggactccaaaactccaagtctccaagacttgatccagattgttatctatgagctccaacaccctgcataggtcacacagaacatatccaaacacaagaacaacccaaactcatggtcaaagtaaacttagctcttttgagttgcttccaggttctcgctttgacactacttctagtgaccttgctttatgacctgagcttgatcttgagccttatgacttacaccacataaccatagatgttacatcattggttgtaagtcatgtccttagatagtgattctcgatgcaccatatcttttctcaactcgatcaattcttgacttgcaagtcttcttgttatggtcgctagatcggtgagggattagagaggggtatcgatgggcaggaacgtcggtcgggggcctcttcccacagccgagcaagaggagggtttctcccttctaattcttgcctgctttatttctcatccattgattacataaataggccggttggccgcccctatctaactagagatccttatctccttaaaactctc

SEQ ID NO: 8691 - DNA, 10846 bp, Zea Mays
gaaattactgttctgccattccgtaaataccctcacggccccgcgctccccgttccccttcctcgctccccaccactccgttccatccctcgcctgccttcgcacgggtgcgccgcccgctcgacggccacgccacgccgcgccgcgccgctcagctgccccggcacccgcccttcctcgccgagctcgggatcgacgtctcccgcacctcctcgcgcccgttccgggctccgcatccggcccctccccgtccccaaccccattccgcagctggcgaccagcacaacatcccgaatcccccacctcgcattcggctcgccgtagctcctcctccgcgtcccgccgcccccggcacgcacaagtttactatgtctgggatggcatttgatgattcacctgcccaagtgaatgttgaaggagatgtttcagagaaaaaagtagaagttcaagaccagaatgaagtgggtgggatgccctcacgacaagaggaggaggcagcaattaagaaaaagtatgaaggaatattgcccagaaagactcctgcttatatctaagcaacatcagtcgtcagcacaagttcagatgtcagtcgtcatcagcgcaacgtccaaggacttgcttggattcacatgtatctatattaatccgcaagccctattgtgctacagtatattggaattaaacttaggggccaacaagattggatcccttcattttgggaaattggaatatatatctctctcacgtgaccaacagtaggatacaaatacgttctatataaaaccaggggcggacccagcccaaaatctaagtgggggcctaaatagaggcttagtaactaataaacctttgtttctatagtaaataaggtaaaaggtccattaaaacttgaaatttgagtgggggcctgtgccccgctccgtataacgtaggtccgcctaggggtgacaatgggctctaatatttatactataaaatataaggatcggatcggattaatatcggtccctatttctattcatttttgaactaaaatttattcagggccctaaataattgtgaaaaacatttggatcgcgatccattaccacccctaggtgcgcccttgcataaaattgtattagctggaccgatatgtgccttgaatcacgattatattttgaatggaatttaattctgagtatccaaacgggtcgtttgagggactaaagattagttcatccattttagttctatttaatcactaaggccttgtttgggagtaagggtaatagaggggattggaggggttagaatcccccactattcaattttaaatagtagaggattatagccccctcaatccccttcatttcacttgctcccaaacaagccctaaattgcccaacagtgggactaaaacagggactaaactgttttagtctctagtccctcaaggggtgactaaaaaggactaaaacatattaatttcaaccttttcctctcctttatttcagttgcactaatggcgggagaatactaagggatattttggtcctcttatgattcatttattgcattctgaataattttagtccctagaaccaaacagggtagggactaaactttagttctctaattaaactttaatccctggactaaaggaaccagacatgccctaagtctaacgttcgcttcattccaatgtacttggacacgcgtagatagagataaatacacatgcatcaaactaaatcctcccgacttttcaacacaaccgattaccgacccccgtttcacaaatacaggccgttcctttcagaattgccgctagaaacggccggttctggccactgggtgaggagaactgttcacgaccattattaaatccagatgaaaggtgggtggtggaaggcgatgaagacctgatctgaggttgcctcacgtgacgtgcatccatagtacacccacactgtcggtgttttgggtccgaccgcacacccggggttgcccctcaaggtgttttaggagtaggacggtgtcgtcgactgtagctaaatggttcgtgccggatgcacgaggaacaatggacagtgtttacaggttcggggcgctttgagatgcgtaacaccctacgtcctggcgagtatgctttatgtaatgggttacaagggggctctctaaagctagaacgtagagagttggggtggatggctgagtagcgggatcaatcattctgaaggggtgccccctaggccttatatattcgaccgtgaggcaatacatgcggatgagataacaaactgcgcctaagagatagtgaactgattgagtttatcttcctatagttctgccgacttatcctcgcctggctctgttgtacggggctccagcgcgggaaagtcgggtcttctgttgtggttgcttgctcaacgttgttgggccattcgggctcgcaccgatccggccttatgtcgatctgcttcactggtcgttcctccctaggcccatgaaggagtgaccttacgatttattgggcccttgggcctttcgtgaggtcttttatccttccagtggacctgggggatatctgtcccccctacacacaatactactctggtaagctaacctcggacgggagacgcagtcacggctcgctcgaggccatccttggacgggagaagcagttacggctcgcccgagactatcctcggacgggagtcgcagtcacggctcacctgaggccatcctcggacgggagacgatcatgactcgtccgaggccaaccccgagccggagacgcagtcacgactcgctcgaggccaaccttgagcgagagacgaagtcacccaggctgacccaagcttgctttttttctcgtttcttctccacttgacttcaactcttaggaggaccttcttgtgacttagacaaacacatttagagtataattcaattcactgagtcctagaagattacctcttttcatatcttctcccagcttttctgttcgaggtcgacgttggactccaaaactccaagtctccaagacttgatccagattgtcatctatgagctctaacacccaacataggtcacatagaacatatccaaacacaggaacaacccaaactcatggtaaaagtaaacttagctcttttggattgcttccaggttctcgctttggcactgctctttctagtgaccttgctctatgacttgagcttgatcttgagccttatgacttacaccacataaccatagatgttacctcattggttgtaagtaatgtccttagatagtgattctcgatgcaccatatcttttctcaactcgatcaatccttgacattgcaagtcttcttcaccctggctttgggttcctcggcctccttgaccttccatgcactcggtacctcgaagctcttcttgcctccagccttggcttgaccagttgtctccaagatatgcacaccaagtctcacataagcaatcttctccttcacttgtggtgtccacacccttaatcaactcagcctttggaacatcactcatgaacacttgagttgaactttacaagttttacacaaagcacccgtccaacacttaacacacctgtcagtcctttatttgggttgtcattcaaaccacccaaacccacaagagagctttcaggtgggcgggtggaggaagaggcacatgcatctagggaagtacttcaatgtcttgtgttgtttcgtgccacatgcagaggtgcgtgcatccacagaagttcgtcctgtggcctgcggacagtggacgcgagtgaccggacgcgacgcctatgtccagtcgtccaggcacgacgcctacgtcagcacgtccgggcgcgaggagttctgattatttatgtatggcaaatactcattatgaaaatataaaggcatctaggcactatgcagcagatcatgaataaaaaagtagtccctaatatatagctaataataaagaggcaaaaattcagcctattttttgtctatccattttttaggcccgtctctctctaactaccagacaatagagactttctttgtccagacttcatctagaccaatatggagtatgaatcctaatctaaacaggttcctcagatcatgagtactctaaaattgaacccatatataataatcaaatagaaaaggtaagagtcgttctgctatttattttgctcgactttctttatttagttctctatcaagagggagacaaaaaaatcatgtccatgtgttccttattttatattctccgtccgtttacaaagcaagcgaactcccaatttttatctccttttttattcaagcttgtagagttcaaatattttacagaaacgtgatggcaatctttctaaatatttttgtacaaatattatgtagtagtaacatgttcgggcttgaactccgggtgaagaacgacagagatatatggtatatagcctgagacaccatacatacatgtatataatgaataaatacatatatattacgccgtaccattattgttattctttagtttgatttgattgagtgaagctcttcagtagattcagatgcaatgaactgcggtgtggtgtactggtatgacctcgtgacattgaaaaggcggcgggcacgaggacgaccatgaccaacacagcatcgtggtgcacatgctagacaacaagcgtggcatgagtcggacgtaggtggctagaccgaggtcgtcacgggagtctctaggcacttgacctggttcgctttgacgacagacgacgttggcaataagttgtcatgtcaaggccatcggagtagctccaatatgacaggatgttcgttttgggcaactttaggtgcactctaccctatgactccgcaatttctagccacctcgccgtggtcgtatctcggatgtggctagacctttaagtttaattccgcaattatttcggtcagccaacgttaagttttagaaaagactattcgccccctctagtccaccatatagaccctacagcagcgaccgatgacacccataagtaatggttataactagtgcttcatatatattgtatgcatctcgttcattttttattaatcatatcctagaaatgatgttcgtacctaggacgatcggatcaaaagttgctgcggcattaatccatgatcggaatgctcgacaccaatattgggaaccatccacaagtgtgtcaagtattgctcaccaatttctaaaatataattgcgcctaaaaataaaggactaataaatacatcaccgaacatacatcactcgtcaacacaagacatctcattgtttattattcaatatattgagtaggacactatatatagattcaacacatacacttaaatgtatgaaatcaaccatgaaagcaagatcagacatcacactcgcattattcaattgatgcttgcctttcatatatcaaggcataaaaaggtataaaggtagcctttgctagtaggcaatctagcctattagcaaagggtctttatacctttttatgccttgatatatggagtttcttcaacgatttcctcattagtgtttgggtccacgctgaagtagatgacaacacgtatagttccgggtgcgagttggtctgaaggcctcggggtctcgttcaaatccacatctagtgactcaaagaatgttacatctggccgctcttgttctattacttcaattgcatcattaatctccttgccaatcaactcgggccaactggtcttgtcctgcgtagccatgatcacgtactatccttagcttttctctcttttgaaactgttataatatcaataagaatcaataatcgagcaacgtcagtgtaatgaatagaaacataatatgttgttttgtgctaatgctatcatactttcatagtaagcatgtcttaatcgaatgcactacataactaccgagctgcaaacagtctattaaaatgctaaaaagatacttttttcaaagcaattactaataaagaaatacatgataacctgtgtggaagaagaacacggtagcctttggtgatgataagtgctctatgtataggtgtgtatatatacatgatgacatttgtattgttgcttggatgctgtcggtgaaaacaatgcaaatattttgtccactattaattaggaaacatgatcatattgcccttttgctaccaataactgtagttatctaccataacaatgcatgctttgacttagtaaacatcatcatatctccttgttcacagggggacagctgaatgtacatactgtacacagcccgtgactcaaacaatatacgtgtaatccaaacgaaacataaaaaagccctagaaatagtggcaacccgctaattcatgtcgttgttgtccagctaaaatttttgaccccacatgcatcgttttctaacctcactcaaatccaacagatgccagacttttgtggtttctcatgttttgttatttttattttttttcatatatttaaatgcctcactagattcttagctaagggctggcatgatgcatctgtcaacaagatcaccagttttccacgctgttgaatcgacaggtatagcagacaaacacaatttttatgttgaactattttttttatagaaatttatgttcacctgataatcatcagaatatcctgaaatcaaactactcacgcaagaaaaaaaattctggaaagtaattgcatataggccccacattttgattatatcatcatgcaatcagcttatccgcatgatatgcaggcagattaattcaagttatagtaacttggacctcacgtgaaacggttaataagcttagagagttggatttgcatttttggaaatttgggaacttggatcgaaccaagttcataaacttttattcacataaggtacaaaagcaccaaactatatggtgtagaaacaatccacatgaaatgtcatgaagtgtctgtagcataacacacctctgtatattaataaatctgaaagctgactcattgacggatgatacatcactggccaagaacatggcacactacagccagtgcactcgtacgaagagaggaaaagcagcatgctaggctagcaatatgtgctggcacatcttctattttttttataacaatagggaacagactgaaaaatcagaggccgcaggcattacagaatgtagcattcgaaaatcagtataatatgcaatagcaggtagtcaacgaagagcatcccgtttgaatgtatcttctgaaaaaatggatataataaagaagtaggggagaggagaaaagggatagaaaattgaaaaaaatgatgtagctaggaaatctagattagtagcagctgctagttaagacgtctacaaattcctatatctcggagcatcaagcctgaattctccacggaagcacaaaccatctgcttcgacttgctccttgtgctcagatagtcagtgggagccaaaagtacacacacgcacaaacgcccttctcctatctgtgcatctgcggcctttccgtgtagacgaaaatttgctgtcaccgtacattggccagcccagctaatccatgtagaactcgaattgaaccccattagaagcagattgaaaaggatctgcgaagcggacacacacagcaacaacctatcgctaaaggtgacggaagtgcaaggggaggtgagggggaacatgtcgctggcacacgaagaactggagcatccatactgcaataacagtagaaggtatagcggcagaaggtataccgacagcagcacgtataccttctatagatgtagcgacccatgcactattaaatgggccgtgcttcgggtcggcctgccaggaacaatccatttggccatctatagacgtcaatgtaaggagagttccatctctcttttggaaatatctttcactgctccatagactcaaacggaagagtcttgttggtatcttgatccgaggatccaccaaccagtgaaataatgttgtgtgccctggcccagatgagtgatgcaaggtgatacaagttgtttatcctggttcgggcgagagaaagccctacttccagcagagggaggacgagacttatattacttgcacctaagtgcttgcagtagggagtacaaacaggtcgagagaggggaggatcccaagtccctggggttgattgaggcaagtgtcaatatcgcagtggaggtgaaaaccgtgaagtgttcgcccgcctccctgaagccacagactcctctatttatagcctcaaggagggctgccatgagtgccggggttggccgggtatggtgaggaggcgaggttgagcacctgtagacggtatggcctgtggtatgaggcttgtacttgctgttgacttatgcctggtggagacgtctggttcctgtatttgcatctttgactacgcagagagtcgaggctagggccgagggctcggtcacatacccgagcctacctgatggggaagttgcacatgtcgtagtggttggtgtagtgctgagcatggcaaaaagcccatgggtaatatgtcagctcccccgttttcggtgacgtcgggcgcccttttgttgataataacgaggtcgatgccgtgctcgggcgaggcgaaagtctgcccgaggccgtgactgagcccgcaccgggattcgtagacgtgcgcgacacagttgaaggagtggtctcctgcggtattcgcggggagtaagtagccgaggctgggctcgggcgaggtgtactttcctctcgaggtccagtcccgcgctttgtcgaatgcgtgtatgcgtgtcccatcagtagttggtaggtgacgtgggggaacaacagccgttgtacttaggcatacatcatcgtagttggtgaaagccgacgagaccgcggtcttgtcgctcctgttcgcctgcagcgctgcgtggggtaggtatgctcattaaatgctcatgtcccctgtgaccttcggctgagacctgcctcggggatgccttccttgctcgagacgggctcgggcgaggcggagacggtagttatggggagagaggacctcggctgggacgaggattctactgagtatgtaccttgtccgagggcaggtccgggcgaggcaaagttatgggtgaccgccgagaggggccttgggcgaatcgtggtttataccttattgtcctcgggaatgtgcctggtggcaacctcggggttaagcacgtttagggatgtaatccaggtacctctaattacgatacccgacaagtcatctcttgagttggatctttcggctagtcttgagtcttgacttagaccagtgactacactgggcatgaaagaagaggagagaagaacgatgcagtccttaaataccctaatttcgtcatcaaatcaaatttaaattaagacctgttggatccacttgactaaattttagccctatcacattaaatgtttaatactagtcaggagtattaaatataatctaattataaaactaattacataggtaatgactaaacagtacaaccagtctatagagcctaattatgttatgatttactcatgtgatgctacattgaacatttgctaattatagattaactagccagttgcacgtgctttgctacggttgttatatatcatataaataagtattgagatatttattcaaatataattattgtttgtttctaaacactaaggtacgtgtggtcttgtggttagccccacatttctagagtagggggtgtatgtttgagtgctcgctctgcactattttttgtgcggtgtggtagctgtatgggcggggtcaggtgctagacaggcaggtggcggcgcgggcgctgggggtccacattgcactagctgagagagcgctgcacgggcgcgggcgtgaggcccacagggcacgacgcagaggcggggtgaagcaccaggtgcccacattaggttcttaatagagtaataggtatgtgcccgtatgttgtcccaggagttaaaaatagtataaaacatagatataaaacgataaacatcactatgatatacaaaacccgcgtaacggctcgcctgaggtcaaccccggacaagcagcgcattttcgactctctcgagggcgcctcaggcgactgtccggtgaggcccagactggcccaagcttgcttttttctgtttcttctcaacttgacttcgactcttgggaggatcttcctgtgacttagacaaacacatttagagtataattcaattgactgagtcccagaagattacctcttttcatatattctcccagcttttatgttcgaggtagatgttggactccaaaactccaagtctccaagacttgatccagattgttatctatgagctccaacaccctgcataggtcacacagaacatatccaaacacaagaacaacccaaactcatggtcaaagtaaacttagctcttttgagttgcttccaggttctcgctttgacactacttctagtgaccttgctttatgacctgagcttgatcttgagccttatgacttacaccacataaccatagatgttacatcattggttgtaagtcatgtccttagatagtgattctcgatgcaccatatcttttctcaactcgatcaattcttgacttgcaagtcttcttgttatggtcgctagatcggtgagggattagagaggggtatcgatgggcaggaacgtcggtcgggggcctcttcccacagccgagcaagaggagggtttctcccttctaattcttgcctgctttatttctcatccattgattacataaataggccggttggccgcccctatctaactagagatccttatctccttaaaactctc

SEQ ID NO: 8692 - DNA, 3045 bp, Zea Mays
  misc_feature (3044)..(3045): n is a, c, g, or t
agagaagctaaggacagtacgtgatcatggctacgcaggacaagaccagttggcccgagttgattggcaaggaaattaatgatgcaattgcagtaatagaacgagagcggccagatgtaacattctttgattcagtagatgtggatttgaacgagagcccgaggccttcggacgaactcgcacccggagctatacgtgttgtcatctactttggcctggacccaaacactaatgaggaaatcgttgaagaaactccatatatcaaggcataaaggtagcctttgctagtaggcaatacatttttatgccttgatataagaaaggcaagcatcaattgaataatgtgagtgtgatgtctgatcttgctttcatggttgatttcatacatttaagtgtatgtttgaatctatattgagtagtgtcctactcaatatattgaataataaacaatgagatgccttgtgttgacgagtgatgtatgtccggtgatgtatttattagtcctttatttttaggcgcaattatattctagaaattggtgagcaatacttgacacacttgtggatggtccccaatattggtgtcgagcattccaatcatggattaatgccgcaacaacttttgatccgatcctcctaggtacgaacatcatttctaggatatgattaataaaaaatgaacgagatgcatacaatatatatgaagcactagttataaccattacttatgggtgtcaccggttgctgctgtagggtctacatggtggactagagggggcgaatagtcttttctaaaacttaatcgcgttggctgaccgaaataattgcggaattaaacttaaaggtctagccacatccgagatatgaccacggcgaggtggctagaacttgcgaccacgacaccacatgcgcatggtgttactaaccatggcgaggcagcctgggccgatagcgtgatggccacagtacgaaactatgccgaaactgcaccacgacacaacgttcatgccggagtagtcatcgcaacacgcacgcagtgtcttcaggcaccctaggccggaactatgtggtgcacacgtggcttagataagcgtctgccttgttggtccccatacgcatagaggtgacccaatgcacaagcacgctagtgatgtctgtagtctgctctagagacggtgcctttgatacgatttgacttccagttccaatagtttttaatccaacaggacgcctaggagactgacaggaagtcgccgagatatgcgacacgcagccgaagcggaacgcgcggcgcacacagcaggcgcgcgagataaggaaggtccggaagaggaaggtccagaagaggaaggtccggcagggggctaagataagggaatagccttccatgaataaatccttcctattattgagatagctttatataaaataaaaccttcctagtattagtagttctttcctgttatgagatcctaaattagtgggctgatggcctatatatatgctgtaaccgcacttagaataatcaagcaagaaataccacttcctattctcccctcttctctcaagcctgcagttggggagttctaaccccacctgagaagacggacggctacgagctgcgtagccgaggtccggctagtcaggggttcaacgcccttgacagattcacacttaagtaacaacggtaataaagttgaatatgttgttatcagtttctagtgtggtatctgattacggttgaaattaaacagacatgatttaacgttatcagttagatataaggcaatgctattgaccttagatataagcgcgagtctttctgggcaatattccttcatactatttcttaatcgctgcctcctaaaaaaacacataagtagcagtgaaccggttagaaggcaatattccttcatgtacatgaagtgaaggctatgcgaatgttataaatacgcgcaacagacaagagggaaatggtgatgccaaaaggcagtacctcctcttgtcgtgagggcatcccacccacttcattctggtcttgaacttctacttttttctctgaaacatctccttcaacattcacttgggcaggtgaatcatcaaatgccatcccagacatagtaaacttgtgctgcaagagcaaagctcaactccatgattagttcatattcatgaatcaagatggtgatcagataatttgcgatgtacaacagtttcaaaagagagagaagctaaggacagtacgtgatcatggctacgcagaacaagaccagttggcccgagttgattggcaaggaaattaatgatgcaattgcagtaatagaacaagagcggccagatgtaacattctttgattcagtagatgtggatttgaatgagagcccgaggccttcagacgaactcgcagccggagctatacgtgttgtcatctactttggcctggacccaaacactaatgaggaaaccgttgaagaaactccatatatcaaggcataaaatggtataaaggtagcttttgctagtaagctagattgcctactagcaaaggctatatttataccttttatgccttgatatatgaaaggcaagcatcaattgaataatgcgagtgtgatgtctgatcttgctttcatggttgatttcatacatttaagtgtctgtgttgaatctatattgagtagtgtcctactcaatatatcgaataataaacaatgagatgcctagtgttgacaagtgatgtatgtccggtgaagtatttattagtcctttatttttaggcgcaattatatttgagaaattggtgagcaatacttgacacacttgtggatggttcccaatattggtgtcgagcattccgatcatggattaatgccgcaacaacttttgatccgatcctcctaggagcgaacatcatttctaggatatgattaataaaaaacgaacgagatgcatacaatatatatgaagcactagttataaccattacttatgggtgtcactggttgctgacgtagggtctatatggtggacaagatggggtgaatnn

SEQ ID NO: 8693 - DNA, 2618 bp, Zea Mays
agagaagctaaggacagtacgtgatcatggctacgcaggacaagaccagttggcccgagttgattggcaaggaaattaatgatgcaattgcagtaatagaacgagagcggccagatgtaacattctttgattcagtagatgtggatttgaacgagagcccgaggccttcggacgaactcgcacccggagctatacgtgttgtcatctactttggcctggacccaaacactaatgaggaaatcgttgaagaaactccatatatcaaggcataaaggtagcctttgctagtaggcaatacatttttatgccttgatataagaaaggcaagcatcaattgaataatgtgagtgtgatgtctgatcttgctttcatggttgatttcatacatttaagtgtatgtttgaatctatattgagtagtgtcctactcaatatattgaataataaacaatgagatgccttgtgttgacgagtgatgtatgtccggtgatgtatttattagtcctttatttttaggcgcaattatattctagaaattggtgagcaatacttgacacacttgtggatggtccccaatattggtgtcgagcattccaatcatggattaatgccgcaacaacttttgatccgatcctcctaggtacgaacatcatttctaggatatgattaataaaaaatgaacgagatgcatacaatatatatgaagcactagttataaccattacttatgggtgtcaccggttgctgctgtagggtctacatggtggactagagggggcgaatagtcttttctaaaacttaatcgcgttggctgaccgaaataattgcggaattaaacttaaaggtctagccacatccgagatatgaccacggcgaggtggctagaacttgcgaccacgacaccacatgcgcatggtgttactaaccatggcgaggcagcctgggccgatagcgtgatggccacagtacgaaactatgccgaaactgcaccacgacacaacgttcatgccggagtagtcatcgcaacacgcacgcagtgtcttcaggcaccctaggccggaactatgtggtgcacacgtggcttagataagcgtctgccttgttggtccccatacgcatagaggtgacccaatgcacaagcacgctagtgatgtctgtagtctgctctagagacggtgcctttgatacgatttgacttccagttccaatagtttttaatccaacaggacgcctaggagactgacaggaagtcgccgagatatgcgacacgcagccgaagcggaacgcgcggcgcacacagcaggcgcgcgagataaggaaggtccggaagaggaaggtccagaagaggaaggtccggcagggggctaagataagggaatagccttccatgaataaatccttcctattattgagatagctttatataaaataaaaccttcctagtattagtagttctttcctgttatgagatcctaaattagtgggctgatggcctatatatatgctgtaaccgcacttagaataatcaagcaagaaataccacttcctattctcccctcttctctcaagcctgcagttggggagttctaaccccacctgagaagacggacggctacgagctgcgtagccgaggtccggctagtcaggggttcaacgcccttgacagattcacacttaagtaacaacggtaataaagttgaatatgttgttatcagtttctagtgtggtatctgattacggttgaaattaaacagacatgatttaacgttatcagttagatataaggcaatgctattgaccttagatataagcgcgagtctttctgggcaatattccttcatactatttcttaatcgctgcctcctaaaaaaacacataagtagcagtgaaccggttagaaggcaatattccttcatgtacatgaagtgaaggctatgcgaatgttataaatacgcgcaacagacaagagggaaatggtgatgccaaaaggcagtacctcctcttgtcgtgagggcatcccacccacttcattctggtcttgaacttctacttttttctctgaaacatctccttcaacattcacttgggcaggtgaatcatcaaatgccatcccagacatagtaaacttgtgctgcaagagcaaagctcaactccatgattagttcatattcatgaatcaagatggtgatcagataatttgcgatgtacaacaggtaatagatgcacatatgtgagacaaataattccatattaccaagtccgcataatttcttttataaaaaataatatgtttattttcctttatgacatagcaggaaagcatcatcataatccaaaaggggtcctctaatgacaactctatgtgctacaccaacattgattttccatcaaaaacttggttatgataatgcattcaaaatttcaaacaatgaactgccttcaggcttcaacagaagagcaagtctgagtaagtgaatggcaccacagaagaatggagacagcaagcgtacttgctataatgctatcaacaacaatctcagccctaaagatacccagtcaaatatgtttcataaggtcaagtcatgttcttgacagaaagttacaagcatgacattagat

SEQ ID NO: 8694 - DNA, 1825 bp, Zea Mays
agtggtggcatccttgtggcttggaagaggaacattggccatactggactccagagaattgacagtcatagtgtctcggtccagttctgtagacaggatggacaaccgtggtggttaacttgtgtttatgggcccaggggaatgctgataaaattatttttctccaagagctgagagatgtcaaggcagcttgtgttggaccttgggtggttgctggagattttaatctaatatataagactagtgatccgtttagaacgcggatcaatgatttggctcttaaagaaattcagttgcatggaagaaaatatacctggaccaatcaacaagataacccagtgcttgtgaagttggatagagttctatgttctgccgattgggaatcctacttcccaaatgtgcttctactcagttcatcttcacaagattcagaccattgccctctgcttcttggcctaaaagacaacaccgttggcaagaaaatgttccatttcgaatctttctggaccagaatggagggttttcaggatgtggtgctggaagcttggaactctgtacaatcggccagatgtccttttcttactctggataggaaactcaaggagacggccaagagattacatatctggagtgaaaagcaggtagggcatattgtttctcagctttgtctggcaaaggagctgctgcataaacttgaaattgctcaagatcacagacccctcaagaaacagtccttgttgttggcctccttcaaaagaacaatggcaagattaagatcaagaataacatggataaaggagggtgatgcaaacactaaatatttccatatgcatgctagatatcggaaaaggaaaaaaattggtgaccttgctgagagatggagataatattgtcactagccaggctgacaaagctaatctggtggaccagttctattccaatcttatcggtcagtctgtcttcagggaaagcaccatcgacctagaagcccttggtctcccagctcataacctctctactctggacgcccctttcactaagcaggaggtttgggaagctgtgtcgaatcttccttccgataaggcccctgggccagatgggttcacagagaggtttaacaaggtgctcaatgcaatttcagcagtatggagtaggaacttcataaacttggacaaagtaaattctgcatatattgctatggtcccaaagattgatgggaccgatcaggtgaaagatttcagacctatcagtttagtgcacagctttgctaaattggtaactaagatcctggccaataggcttgctagcaaactgaacgagctggtatctccaaatcagagtgccttcatcaaaggaagattcattaaggacaattttatgcaagttcagcaaacttcgagatttttgcatcaacaaaatagggcatgtcttcttttcaaacttgacatcacaaaagcctttgactcggtttcatggccttctctaattgaggtgctgcaggcattgggttttggccaggtctggagagatattatttgtgggttcttggttcctctactactcaagtgttgctcaatggttgtcctggaaataaaatccaccatagaagggggcttaggcaaggatgttattttttttctcgaacacgcaggagaactgcgcatcattatattaagtagagaaggtctaaagaagaccaagaacaacagctatacaaaaaaaaggataaaagggggaaaaatcagaaaataaaggagaaaaaggaagaaaaagaaagaacaaacaaaaaaaaagggggggaagtgaaccaagcccctaatttaag

SEQ ID NO: 8695 - DNA, 3122 bp, Zea Mays
ctgggctactgttcctcttcccccaaacccccaaatacttcggcgcgggctgttgcagccaccgcggatccaactggggttgttgtcgcgcccgtccataaaaccctggccgcgggattgcctcaccctcctacgcacctcaaccaatcggaagcaccctggattggagagaaaccaaaggggggactgcctagattattgccaccgcttcgcgcacacatcccgtctgtgtcgtgctcggccttcgggggtcgttgtgggggttcgccggggtacaccggagacagtcggggcctcttcgcgccgggaacaccacttggggcttcggaattactcgtcaaacctccgctccgccgcaagaccaccctatgccatagactgaggtctgctcatcccaaacctctggtatgttgtcttttccgaattcgcctttcttgtgccattatctagcaaccggtacaacgacgttatgggttctgaggcgcttgatcgagggacgccggcgatcccccaccgtgtaggtacgagcgccgctgcgcctagacatgcggaggtaggtgacagcgcgtgggtcatgatctgtgcgcgtacgactgcgattagatgagaggataacctttcgcgacaatgaatcatgaccgcagattggtagatcggatggtccggaatcgataccggttcgatgagtggcttgatgtaatctgggccttagatctgtgatcggatggcccagagctcacgcgcgttgccacccgcggcactttttcgaaagataccccgagtttttgataaataaacccgccatcccctagtattgaaagagtattagactatctccagcaacgtcccctaaattctatcccctaaaagaatatttcttgtcctttacaacacactctaaaagatttcgttctctatatcttctcagtctccagcaacgtcccatatatcttatcctctatattttataaactatactaatacaaattatcaacttcaaatattgtatattatattagctaagtgcaacgttacctctaacaagacggtcatcggattccagccaagcaaataaactaggccgagggaggaaatggaataaaaatcatccgccagcaacagccgcttgggcgcctcactgccaccatggaatcgacttccttcctgtttgcagcagccggcgtggaggaaggggcaccgtaggaccagtggcctcaccaacagcgacaagaagctgcccgaaagaggggccaaggtagatagcggacgcacgagaagtctctaggtttagcgtgtacgatcgtggtcctctattatatcgaattatttaccgaacgttgctggacgccgtagcggacgtataaagcgctaaatatagcggacaactccatttagcggaccttgttgaacatagccttacacagagtccctggaattaacgaaaacaaccctgacctctctggtaattatgtaggcagtccagaatcattggggaaatacagaaattaaatcagaaaatgatttttagtataaaaataattacagaaacttgtttaattcataagtaattcattttaactcctttttgatccattccagttgcattaatctaacaataatattgtttatcatctagtaactttgtattaccataaaatctatgattaaaatcttgtacctcctttgttttatagtaacacctaaacctttggaaaatcataactttatagccgtaactctgaatttagtggttcttggacctaggatctcgatacgacgcgtagaacattattatgcagtttgttcttatgtttggtgtgatattaattttgcatataccatgtttgtttgtattgctatgagtatcatcgaggttacgagtcacttgaagagcaagttggtacctaggaatctcgagcctaaggtaagttgtgcccttgatcacttttctttacataataatgttcatgttaatcactgtgacatgctcagctcaatttgatgggacccaataggtttccctagcgttgtttatcccttaccttgcaaacagaagcaccattgggtagttttgctattgctctacttggttttggtaaattaatgttatattatgatcatgttccagttatactgttgttttaattattgtttatgacaatatcattatgttaattggaacatggagcgaccaccctggaaaaagagtgctaccacaagggtggtatgggacgcccttggctaactaattaggaaagctagtggaagactaccttacctgaaaaggcaacacaaaaaggggttaaatgataacacccttcgtccttcgaagcattatttccctgaggatataacgatcttcggacgaaggtcatgaaggacataccttcatcatcacaacatgtattaatgaaagacgaagcatatgaaacatgagaaacaacatagataattatataacatcatccatgttgggggccttcgtcctccgaaggtcctcaaaaacataatttaacaatgtcttccaagtatggtttatggacaggtatcttcagattaatgataaaagcatacacgatgaggagcttggtcgtgacgaaggttgtcgtcgctccgaagctgtgcgaaagggagcttcggctaaatcacagaaaagggaaccgacttaaaagggaaaaggttgttcagtcctcatagatttttttataagccaatagtaaatgtaaagggcataattgtaatttctcataggttgtgtcttgtgcctataaatagatgaacagtacccctgtactgttcatgctgactggtacttgcttttgcatcacgcttgtactttttgtcttctgttaagccgaggtacttttgtaattcaatattgtttctgtctttccatgataatataataagaatgaattaataatgttatataattgtttatgttgtctcttatatttcatatgcttcttcttgtattaacttatattgcaatgatgaaggtacgtccttcatgaccttcgtctgaagatcattatatcctgaggggaataatgctttgaaggacgaaggacattaacatttaatatcttgtgttgccttgttcttaattcatagtatttgag

SEQ ID NO: 8696 - DNA, 220 bp, Zea Mays
accagtcaagatctcccataaaactatcccaaaagagaacacatccacctgcatgtgtcaaaccaaatactcattaggtattagcctgtcatagttccatatgcaaagagctatcaggagcatggtcagaaaaaaaacttgctttctcagagactttgctgctgctgccattcagtagctctggtgccatccatggaagagtgccgcggaccccccccag

SEQ ID NO: 8697 - DNA, 1459 bp, Zea Mays
ctcagatcaaaccaaaagtttagccttgtcatttgatacaaaaaccaaacgaagtttatatcagcatagccagcattccagcatctgttgcacataattacaggttccaagctcatatttttacaacccacggcccaccaaaaagcttgagtggtctaccatacatctatctggcagaccctcacaacctacacagaaaaattgttgacgtgtggccacagcaacccgcctgtgctactctttttttttcactcagatacatgtaattacaccagaagccctcaacatggggtgcaaaaaaggatgtacacaagaagcatatttacgtcaggatagaatacacaccgtgaccagtacatgtatatatatactctatgcacacataggagactcgcggggtcagtgcagaagctgattgcagctaaaaataatctgctggctgatgtttataacacctcatcatctggttgccggagcctgtccccctctcgcctgaatcaccggcggcatggctcggagcctgtcggtgacctcggtgaatgaggggcgggcgtcagggttcgccgaccaacattgctccatcagcttttgccagtccgggtcacacttctcaggtattggaggccggagtgtgttattgacgatacccccttctcgcaacaaataacactagttagttaaatggaggatattgatattcaacaagattaaacagacttcggatgactagggcgccaactgatgaagaattgtattttgatagctttctttctcgataaacaaagggcaggtctggtgcagtggcgagagctgaggtcgcgggttcgaatcagcctctccgcatttgcagagcaaaagcttgcctcggtttatcccttccctagaccccaccaatttgggagccttcggcactaggtctgtccctcttttctcattaaaggcctgtttggttcgtggctaactgtgccacactttgcctaaggttagtagtccgaatttaagaactaaccttagacagaaaaattaggcaaagtgtggcaagttaggcagagaaccaaacataccctaagtgtatcaatcattgtttgtaagtcgtccgactaatcgcgattagtcgagctggtagccaggtagtaggcgactaggaggacgacgcgatcagattgtctagtcgtccaagtcgtccgattaggcgtcaatctgggcgacgtctccaagctctagtcacctgcgctggcgtctccagtccagcagtgagcagaccaacaacagggagccagtgacccttagtccagatgagctcgtcatctgaaggtagcacctgctcccctcctctccctttcctatctcttaccagttaccagttaccactgtccactggaatcctatagttcacacttcacaggatgtctgtagattgcatagttcacacttaccaggaccgaataggcgtcctaat

SEQ ID NO: 8698 - DNA, 1397 bp, Zea Mays
atcattttgctgagggggcctcttttcaatctggttctcttgtatcaggatttctagacgcatttcatattagttgtttctgccttttatcaatattttttatgctgccatcaacccctttcaatctgaagttgtgcttttgtgctacttggttgacgttaattgtccccactagcatgacagcctacctatatctgtactcacatggagaagtgtcccttgcagcatctcaaccagttctcttgtatgctattcttctgatgatcctcctttctccttttgatatgttttacttatcatcacgcttttactttctgagaacagtctggcgtataatactgcctttacaagcaattacatttcctgacttctttttggctgatatttttacatccatgtcaaaggtgttctcagatctggagcgttcggtttgtcgtatggtgaatcgccaggttgcaacaatcgcttggtttgaagcagattctatttgtggcagtcattccgtagctattcctcttgttctcgtgtttccctacttgtggcgtttcttccaatgtctccgtcagtacaaggatacaaaggagaagacatgtcttttcaatgctctcaagtactcgacagcaattcctgtgattttcctttccgctctcaagtatcatgtatatcctgatcaatgggttggcttctaccgccccctctggcttatctctagtgttgtaaattcactgtattccttctactgggatataaagcgagattgggatttgagcatcctaaccaggattttcatgttcaaaaatccaagcatatggactaatcttctttacgggcagaactgggtattctactgggtactgggcagcaacttggttctgcgatgcacatggacatacaagctctcggcgcatctccggcacaactacctgacagtgttcaccatagcagctctggaaatcctgagacggtggcagtgggtgttcttccgggtcgagaacgagtggaacaagatgacggccaaacaaaacttggagatgtcatctgacatgccttccgaaggggacaggctactggattcgagtaaccacacagtgtgagctgaacagcagcctcacatttctcgatacagattcattgccattcttttagcgtgaccattgtggccaatcttacgtcgacggttcagattttgtctgtagagctcaaaaggtcaaagggatacacaataggtttctatataaaaaagttgaaatttgttggcggcttcggatgttatacctcttgaggatgtatactgttatagccctcttgaacgattgaatctaacaggaggtattcgttgagacatgaaagaataaaagtaatgctgaaattttacgaaacttctttcaggttgtctt

SEQ ID NO: 8699 - DNA, 2413 bp, Zea Mays
gtctccgtaccttccgttccctttctcccattcgcacgccgccccgtgccgtcctcctcccagatctcgtggtctcgtggccgtcgccattcccccccgctccgctacacgccgagcgcaccgattgcaaatcagtcgtctccgctgctcctcgccctcgccccgcccgcggcgtggtgaggagaggagatcccccctgaggttgtacgagacggtgcttcaggaccgccctctggcgcggaggacgcataagctcggcggcggcggcggcgacatgaagggctcgaccatcccttcggtcgcgatcatgccctcgccgctcttcctctggcggtttaaggttgtgttgtttcttctatggggcttatgttgttgcaagataggttgggactcagttatgagaatgagtgttgatctcagagacctatttctttatgaggctttcttgtactataatcctcttcttcttgtggccttgatgatttggttgtggggagtaaatctatgggtctttgcacaatcatctgtgaattatgcaaaagtgtttgatcttgcacaaacacatttatctcaccgtgagatatggaggtgtgctacttggttgacgttaattgtccccactagcatgacagcctacctatatctgtactcacatggagaagtgtcccttgcagcatctcaaccagtgtaatatctagcctattcagtagtaattcattcactgctttgtcatcttccttttgtgcttgagctcatgagacactctagtttatttcttataatttcttattatgttttttggtagtgcttccattgagccagcattgcttgaacagttaaactaatcaaatgtatataagaatataattccctcgattcactcattcagtacctgtatcctaaacagttgctaattgataactagcaccctgtcataatagaaaaatctaagcggtagtttatacaaggtgataattttactgaagatctgtgatgacttgtctctgtctaaagaaatgacccaaaacaattcagtgaaatatagcaaggtatatctcagcaaagtccacaagattggtgcacatactgatggttgcatgtaataccttttttaaaataaaataaataaaattgaagagcctgttacccagtcatttattcagttgatgaatgctatatattccatgttcacatgctatttttcagatccagggtggtgaactaattgacatatctttttgcctctttgcaggttctcttgtatgctattcttctgatgatcctcctttctccttttgatatgttttacttatcatcacgcttttactttctgagaacagtctggcgtataatactgcctttacaagcaattacatttcctgacttctttttggctgatatttttacatccatgtcaaaggtgttctcagatctggagcgttcggtttgtcgtatggtgaatcgccaggttgcaacaatcgcttggtttgaagcagattctatttgtggcagtcattccgtagctattcctcttgttctcgtgtttccctacttgtggcgtttcttccaatgtctccgtcagtacaaggatacaaaggagaagacatgtcttttcaatgctctcaagtactcgacagcaattcctgtgattttcctttccgctctcaagtatcatgtatatcctgatcaatgggttggcttctaccgccccctctggcttatctctagtgttgtaaattcactgtattccttctactgggatataaagcgagattgggatttgagcatcctaaccaggattttcatgttcaaaaatccaagcatatggactaatcttctttacgggcagaactgggtattctactgggtactgggcagcaacttggttctgcgatgcacatggacatacaagctctcggcgcatctccggcacaactacctgacagtgttcaccatagcagctctggaaatcctgagacggtggcagtgggtgttcttccgggtcgagaacgagtggaacaagatgacggccaaacaaaacttggagatgtcatctgacatgccttccgaaggggacaggctactggattcgagtaaccacacagtgtgagctgaacagcagcctcacatttctcgatacagattcattgccattcttttagcgtgaccattgtggccaatcttacgtcgacggttcagattttgtctgtagagctcaaaaggtcaaagggatacacaataggtttctatataaaaaagttgaaatttgttggcggcttcggatgttatacctcttgaggatgtatactgttatagccctcttgaacgattgaatctaacaggaggtattcgttgagacatgaaagaataaaagtaatgctgaaattttacgaaacttctttcaggttgtctt

SEQ ID NO: 8700 - DNA, 1842 bp, Zea Mays
gtctccgtaccttccgttccctttctcccattcgcacgccgccccgtgccgtcctcctcccagatctcgtggtctcgtggccgtcgccattcccccccgctccgctacacgccgagcgcaccgattgcaaatcagtcgtctccgctgctcctcgccctcgccccgcccgcggcgtggtgaggagaggagatcccccctgaggttgtacgagacggtgcttcaggaccgccctctggcgcggaggacgcataagctcggcggcggcggcggcgacatgaagggctcgaccatcccttcggtcgcgatcatgccctcgccgctcttcctctggcggtttaaggttgtgttgtttcttctatggggcttatgttgttgcaaggttgggactcagttatgagaatgagtgttgatctcagagacctatttctttatgaggctttcttgtactataatcctcttcttcttgtggccttgatgatttggttgtggggagtaaatctatgggtctttgcacaatcatctgtgaattatgcaaaagtgtttgatcttgcacaaacacatttatctcaccgtgagatatggaggtgtgctacttggttgacgttaattgtccccactagcatgacagcctacctatatctgtactcacatggagaagtgtcccttgcagcatctcaaccagttctcttgtatgctattcttctgatgatcctcctttctccttttgatatgttttacttatcatcacgcttttactttctgagaacagtctggcgtataatactgcctttacaagcaattacatttcctgacttctttttggctgatatttttacatccatgtcaaaggtgttctcagatctggagcgttcggtttgtcgtatggtgaatcgccaggttgcaacaatcgcttggtttgaagcagattctatttgtggcagtcattccgtagctattcctcttgttctcgtgtttccctacttgtggcgtttcttccaatgtctccgtcagtacaaggatacaaaggagaagacatgtcttttcaatgctctcaagtactcgacagcaattcctgtgattttcctttccgctctcaagtatcatgtatatcctgatcaatgggttggcttctaccgccccctctggcttatctctagtgttgtaaattcactgtattccttctactgggatataaagcgagattgggatttgagcatcctaaccaggattttcatgttcaaaaatccaagcatatggactaatcttctttacgggcagaactgggtattctactgggtactgggcagcaacttggttctgcgatgcacatggacatacaagctctcggcgcatctccggcacaactacctgacagtgttcaccatagcagctctggaaatcctgagacggtggcagtgggtgttcttccgggtcgagaacgagtggaacaagatgacggccaaacaaaacttggagatgtcatctgacatgccttccgaaggggacaggctactggattcgagtaaccacacagtgtgagctgaacagcagcctcacatttctcgatacagattcattgccattcttttagcgtgaccattgtggccaatcttacgtcgacggttcagattttgtctgtagagctcaaaaggtcaaagggatacacaataggtttctatataaaaaagttgaaatttgttggcggcttcggatgttatacctcttgaggatgtatactgttatagccctcttgaacgattgaatctaacaggaggtattcgttgagacatgaaagaataaaagtaatgctgaaattttacgaaacttctttcaggttgtctt

SEQ ID NO: 8701 - DNA, 2153 bp, Zea Mays
atttttttccgtctccgtaccttccgttccctttctcccattcgcacgccgccccgtgccgtcctcctcccagatctcgtggtctcgtggccgtcgccattcccccccgctccgctacacgccgagcgcaccgattgcaaatcagtcgtctccgctgctcctcgccctcgccccgcccgcggcgtggtgaggagaggagatcccccctgaggttgtacgagacggtgcttcaggaccgccctctggcgcggaggacgcataagctcggcggcggcggcggcgacatgaagggctcgaccatcccttcggtcgcgatcatgccctcgccgctcttcctctggcggtttaaggttgtgttgtttcttctatggggcttatgttgttgcaagataggttgggactcagttatgagaatgagtgttgatctcagagacctatttctttatgaggctttcttgtactataatcctcttcttcttgtggccttgatgatttggttgtggggagtaaatctatgggtctttgcacaatcatctgtgaattatgcaaaagtgtttgatcttgcacaaacacatttatctcaccgtgagatatggaggtgtgctacttggttgacgttaattgtccccactagcatgacagcctacctatatctgtactcacatggagaagtgtcccttgcagcatctcaaccagttctcttgtatgctattcttctgatgatcctcctttctccttttgatatgttttacttatcatcacgcttttactttctgagaacagtctggcgtataatactgcctttacaagcaattacatttcctgacttctttttggctgatatttttacatccatgtcaaaggtatgtgttagtttaccgagaagtgttgattgtagactgtttttcttgttcgacacatcccaacttggagacaaaatgtcaggaccagacttgtcatattgtgtttagtataatatatagtaatacatttttagtagacattaccttttgactatatgacacattcatgctgttccttagttttcaaaatcagagaagtgattctaagttgtaactcctccattgttttgagttatagcatgttttatctttgatgttctgttttgccatttgttgtttttcttcaactctacacaggtgttctcagatctggagcgttcggtttgtcgtatggtgaatcgccaggttgcaacaatcgcttggtttgaagcagattctatttgtggcagtcattccgtagctattcctcttgttctcgtgtttccctacttgtggcgtttcttccaatgtctccgtcagtacaaggatacaaaggagaagacatgtcttttcaatgctctcaagtactcgacagcaattcctgtgattttcctttccgctctcaagtatcatgtatatcctgatcaatgggttggcttctaccgccccctctggcttatctctagtgttgtaaattcactgtattccttctactgggatataaagcgagattgggatttgagcatcctaaccaggattttcatgttcaaaaatccaagcatatggactaatcttctttacgggcagaactgggtattctactgggtactgggcagcaacttggttctgcgatgcacatggacatacaagctctcggcgcatctccggcacaactacctgacagtgttcaccatagcagctctggaaatcctgagacggtggcagtgggtgttcttccgggtcgagaacgagtggaacaagatgacggccaaacaaaacttggagatgtcatctgacatgccttccgaaggggacaggctactggattcgagtaaccacacagtgtgagctgaacagcagcctcacatttctcgatacagattcattgccattcttttagcgtgaccattgtggccaatcttacgtcgacggttcagattttgtctgtagagctcaaaaggtcaaagggatacacaataggtttctatataaaaaagttgaaatttgttggcggcttcggatgttatacctcttgaggatgtatactgttatagccctcttgaacgattgaatctaacaggaggtattcgttgagacatgaaagaataaaagtaatgctgaaattttacgaaacttctttcaggttgtctt

SEQ ID NO: 8702 - DNA, 2495 bp, Zea Mays
aggtggctcgcgcgtgattgaccgtaccgcgcgcgggggaggatcctctgtggccggcacgcgtggatccacggactctttattgactactgtagcagcagtgataagaagttaagaactcaccggcgacgtagtagcatccatcgccggcggcgtatccgtcaccggacatcccggcgaccacgcacgcgcagcggtggcccctcgtgcctctcgacgtctcgatgtcctggcatgtcgcgttccgcgcgcactggccgcccgcggtagcgttggcgcacgtcccgtcgagccaccaccccagctccgcggcgccgaaatccaccgacggcagcccctccggcgataacgcggacaccgcggacgtgagtgcgtcctcgcacccagcgtcctccaccttcttccacggcaggaactggcccgcctccccgtcccacgccgcagcagcagccgtggcgttgaggccctgcggcggcggcagcggcgcggccacgcacgtccagatggcgcctttgtcgccgcaccccgccgtgcggagcgcggttttcatgatggtcgcggacacggagcagttgccggtggccgccgctttcccgaggcagccacgggccaggaagagcccggtgtggctcgtgacgccgtagcgggagccgtcgagcgccgccctggcctctccgacggtgcggttgcacgagggcggcagcgagacgaggaaagtggaggcggtggcgtcgaacgagaggatcgggtagggcgacgccgcggagctgttcgtgacgagctgcggcgtggtgacgttgcagtccaggcggatgggacaggcgccggagaagccgaaagggtacggcactgtggtgttgccgcactgccggtcgcacccgacgccgccgctagcggccgcgggcgcggctgcggaggaggttgcatggaggaagaggaggaggaggaagtgcaggcggcgcatgtgggcaggcaggcaggcaggcagtcagttcacgctgccggtcggtctccgcgcgctgtgtgcttgcaatgaccgatgagtagttgtttcgattgcttgcttattagctagtctagtcatatacgcctgcggcctgcctaatattgcaacgcagagctggaggaacatgccatgccaatggactggagaaagagacggcaaatgcttttgcctcgcctgtttattagtcagacagacagccgcgtgattgctgctgcagcagctgcgcctctaaaggcctcctttcgatatgtagcccaatttccttccctccccagcccattccagcccagcccagcccaggttaccatttggatgttgctccaggtactaacatgtagacgtggcacgcaatgacgcgagcaacaaataattgacgacgacgaagacgaacaacacgtacacggccagatcagtgctcacctctcggagcgccgtcgtagtagcacccttgcccggcggcgaacccgtctccggccatcccgtccacgcacgcgcaccggtgcccccaggccccgccgggcgtctgcacgtcgtggcacgtcgcgttccgcgcgcaccggccgccgccgccgcctccgtcaccgcatctcccgtcgacccaccagcccatctccgcgatgccgaactggatggacgggacgccctgcggcgagtacgcgtacacggccgaggtgagcgcgtcctcgcacccggcggcggccacctcgtcccagcgcatgaactggccctggcctctcgccgcggcggggctgccgggggccggcggcgcggacagcacgcacgtccaggagctgtcgttgccgccgccgcactgcaccgtgcggaggatggcggccatgacgcccgaggggacgttgcagtcgctcggcgacctcgaccccgccgcgcgcccgcagccgccgcggaggaacagcccggtgcgggacgacacgccgtagccggcgcctcccagcgccgccctggcctcggccacgccgcggccgcacgacggcacgagggagaccaggaaggtggatgccgcggagtcgaacgattgcaccgggtacgacgcggcggcggcggccgtgctgcgcgggaggagcgccgtggacgccgtggcgttgcaggcgaggaggatcgggcaggccccgccgccggagaagccgaacgggtacggcacggtcgtgcttccgcaccgacggttgcacggcccggcgggcgccgcgaaggttgttgcatcgaggaggagcaagaagaggaagaggaggagctggtggtgcatgtaggattgtaggtagccagttcactgtgccggtcgtcgtctacttgcgccaagcagtagcgtctcgattgcttgcttccttagctagtcatcatttatatggatgattggaatggaaacaaagcttgtttagtcagtcagagaggacgtgtagcgtatatggtcaagaaactaaccctgcaaaaaccatatcttttgggccctcattctgattccccgagtatagtt

SEQ ID NO: 8703 - DNA, 799 bp, Zea Mays
gccgcaacacctgccgtcagaattgacaaatctcatcattccaggtctactgcagcagtctgcaacaaaaatctgacttcactatacaaaagattttctttttttcgtttcttccatttatcttttccaggtcccggtcagcaaatcaacgtgcttgaaactgcacgtaaccggcggcgaaaagatggagcaggcgagacaaagctgacttttgactggactcgtctcgtcgtttgttctcaccatgccgtactcaaacaggattactgccggttgtactatccaaaagcaaggcagaagagttctgttaatcgtttttgtcgttttacctgctgcaactacgaggacaatcttcttcgcggaacgctctgcaaaaaggagagcaaaatgtcaggaaaaaagaacgggagcattacacaggaaggttatatatatttgcttttgatgaaacagaagtcgtggtgtgcattgacttggtgatatcataatgttggtgcagattctggtacttggtggcagttggtaggttttcttggcttcatttatataggacatgtctgtatgatcctgacagattggtactactcaagatcacattttgaaatttattagggctttggtctgattggtgctcggtgggatcctggacacacaaaaacatttctttgtttccaaacagtaataagtagaaggggtagaaaaaaaaactccccaggccacttccatgacagctcgatactgactaaggggtgtttggtttctaatgaatatggtgtttggtttctagagactaatgttt

SEQ ID NO: 8704 - DNA, 1340 bp, Zea Mays
aacgatggacgccagcccatgggccaacgatcctccgtgggccgacttcctaaccgcacgaacctccgagacggagcgtgacgcccgcctcggcgcctccgccctccgtcggcggcgcacggggagcatagaaggtgtcgtactcgtacctctcgcacacgcccccatcgccacgcgtgcaacgaagctggctccgtcgccatggccctgctgccgttgcccccctgttccccgtgccaccgccgggccgcgcctttgccggcgcccacggtcgcctcggcgcgccaccgcagggggagcctgcgcctcgctgcagccggtgcctgctccggacctaccgccgcgcggaagccccgtcccaccgccgccgacaggaggaggtgcgaatgctttgacctccatcggcggttagttccttacgcggaggcttactgctggcagaagtccattgtcgagaggaggaaaaggttgatagacagcggcgaagaccactccgacaccttgattgctttgcaacatccaccggtctacacattgggcaccgacagcaaggaggaatacctccattttgacaaggaagatgctcctttcgaggttcatcgtattaatcgcggcggtgaagtgacgtaccatggccctggacaggttggagactttgggttgacaaggttcaagcgcaacactctggtttctggtggtgtacgcgacactcttccatggatggcaccagagctactgaatggcagcagcagcaaagtttatgagaaggcaagtatgcatcgtggtgctatcatatgtatgtacctgcgatgcccatccaaccttttgtttgcctttcagcactggtacatttctcgaatgcgtcagcgttgaacatttaatgagaaaagtggggcaggcctaatgccgaaggctaacagatgagtggggtctagaaaagggataaaccgaggcaagtttttcctccgtatttgcaaatacggagaggctgcttcgaacctgaaacgaaaattcagcaaggcgtcatcaccttccttggcggccgtagcttgcagctgcagtgcttccccttctcgcgcggacgcgacatgcttgccgcagccgttccacgtgaacttgctgcactccaccttgtagcacatctttcgattcagatgtaggagcaggatgccctttcagtttctggaacggttttccttctgtgtcttcagtctttgcaggattcagtgcttatatagcttcatgctctgctggttccttgtaaaaaaaacagtgtattcccctatgcctttcatgtggcccagtgcaattggtgaaggaatgaagtgcggatattgttc

SEQ ID NO: 8705 - DNA, 2548 bp, Zea Mays
aacgatggacgccagcccatgggccaacgatcctccgtgggccgacttcctaaccgcacgaacctccgagacggagcgtgacgcccgcctcggcgcctccgccctccgtcggcggcgcacggggagcatagaaggtgtcgtactcgtacctctcgcacacgcccccatcgccacgcgtgcaacgaagctggctccgtcgccatggccctgctgccgttgcccccctgttccccgtgccaccgccgggccgcgcctttgccggcgcccacggtcgcctcggcgcgccaccgcagggggagcctgcgcctcgctgcagccggtgcctgctccggacctaccgccgcgcggaagccccgtcccaccgccgccgacaggaggaggtgcgaatgctttgacctccatcggcggttagttccttacgcggaggcttactgctggcagaagtccattgtcgagaggaggaaaaggttgatagacagcggcgaagaccactccgacaccttgattgctttgcaacatccaccggtctacacattgggcaccgacagcaaggaggaatacctccattttgacaaggaagatgctcctttcgaggttcatcgtattaatcgcggcggtgaagtgacgtaccatggccctggacaggtatttatcagctacttttgttgtagttgctcctttcgaggttcgtcgtattaattcttgttggtgtttagttatagctcccagtgactagtaatagaccctagtatcggccatgtttgaagtcaggatacgaccgatcttgactctgcatactcttgttcagtctttggttcaaaaaatatataccacgagtgaatatttcacatgcgcttctcacagtcatttgatttgtttctcctagcttgttatgtacccgattatgaatctgcggtaccacaaagaggatcttcactggtacttcaggtcactcgaagaagtgatcatccgcgcacttaaatccgccttctctataacggcagcaagagtagaaggtctcactggtgtttgggttggggaccgtaaagttgcggcgatagggatccacggttctcggatgatagtttatcacgggctcgcactaaacataacaactgaccttgctccattcagaatgattgatccttgcggcataaaggaccgcggtgtggggagcattaaggagatactacaaagggtgtctgatgcggaagagatcgatgacgcgtcactgatggatatagtgtatgattccatgatcaaggagtttgcggaactcttccagctcagtctagacttcagccctggttgcagtttccagtgagaacaacgcttttagcagaccgtatgatgctgccgttgtattctggacggaatgttagctcacggcctttcgtgctcggtatctccgtgtctgctgcactccaccatgtataccacatccacctttcagtcgcaggatatctctggaatctgtagcagtagagtcgggttcttcggtgtcctctcttcatgggctctggtgtttatagagcatcactgctctctctctctctctctctctctctctctctctctctctctctcttgtatgtaacagtgtatacttacacattcttccatctgagcagataataatatcccagccagcgattttaaaccgtgtattgttgtttgcatccacagtttatattcgaaatgttctggtttacgttatggcttttgcttccttcagtttctggaaggacagatgactagcctctcggagcaccgcgaggtgcccgcttcagctgcaatcactgtttcaaaggcgtcgcctagacatccaggcgcccaaaaggtccaccgtttaggttggagactttgggttgacaaggttcaagcgcaacactctggtttctggtggtgtacgcgacactcttccatggatggcaccagagctactgaatggcagcagcagcaaagtttatgagaaggcaagtatgcatcgtggtgctatcatatgtatgtacctgcgatgcccatccaaccttttgtttgcctttcagcactggtacatttctcgaatgcgtcagcgttgaacatttaatgagaaaagtggggcaggcctaatgccgaaggctaacagatgagtggggtctagaaaagggataaaccgaggcaagtttttcctccgtatttgcaaatacggagaggctgcttcgaacctgaaacgaaaattcagcaaggcgtcatcaccttccttggcggccgtagcttgcagctgcagtgcttccccttctcgcgcggacgcgacatgcttgccgcagccgttccacgtgaacttgctgcactccaccttgtagcacatctttcgattcagatgtaggagcaggatgccctttcagtttctggaacggttttccttctgtgtcttcagtctttgcaggattcagtgcttatatagcttcatgctctgctggttccttgtaaaaaaaacagtgtattcccctatgcctttcatgtggcccagtgcaattggtgaaggaatgaagtgcggatattgttc

SEQ ID NO: 8706 - DNA, 1448 bp, Zea Mays
aacgatggacgccagcccatgggccaacgatcctccgtgggccgacttcctaaccgcacgaacctccgagacggagcgtgacgcccgcctcggcgcctccgccctccgtcggcggcgcacggggagcatagaaggtgtcgtactcgtacctctcgcacacgcccccatcgccacgcgtgcaacgaagctggctccgtcgccatggccctgctgccgttgcccccctgttccccgtgccaccgccgggccgcgcctttgccggcgcccacggtcgcctcggcgcgccaccgcagggggagcctgcgcctcgctgcagccggtgcctgctccggacctaccgccgcgcggaagccccgtcccaccgccgccgacaggaggaggtgcgaatgctttgacctccatcggcggttagttccttacgcggaggcttactgctggcagaagtccattgtcgagaggaggaaaaggttgatagacagcggcgaagaccactccgacaccttgattgctttgcaacatccaccggtctacacattgggcaccgacagcaaggaggaatacctccattttgacaaggaagatgctcctttcgaggttcatcgtattaatcgcggcggtgaagtgacgtaccatggccctggacagtcatttgatttgtttctcctagcttgttatgtacccgattatgaatctgcggtaccacaaagaggatcttcactggtacttcaggtcactcgaagaagtgatcatccgcgcacttaaatccgccttctctataacggcagcaagagtagaaggtctcactggtgtttgggttggggaccgtaaagttgcggcgatagggatccacggttctcggatgatagtttatcacgggctcgcactaaacataacaactgaccttgctccattcagaatgattgatccttgcggcataaaggaccgcggtgtggggagcattaaggagatactacaaagggtgtctgatgcggaagagatcgatgacgcgtcactgatggatatagtgtatgattccatgatcaaggagtttgcggaactcttccagctcagtctagacttcagccctggttgcagtttccagtgagaacaacgcttttagcagaccgtatgatgctgccgttgtattctggacggaatgttagctcacggcctttcgtgctcggtatctccgtgtctgctgcactccaccatgtataccacatccacctttcagtcgcaggatatctctggaatctgtagcagtagagtcgggttcttcggtgtcctctcttcatgggctctggtgtttatagagcatcactgctctctctctctctctctctctctctctctctctctctctctctcttgtatgtaacagtgtatacttacacattcttccatctgagcagataataatatcccagccagcgattttaaaccgtgta

SEQ ID NO: 8707 - DNA, 689 bp, Zea Mays
ctgacttatctccacattgagttatttccttatgtatcatcatatacgtacttcgtgctaagcatatctacaccatctcctattcattgagttacatggatactaataccgacagtaaaagcgggtttaaagactcgagcaatttgctagtttgattctgagctgcaccacgaatcgggctcctttcatagatcagtttgtattctttttttttgtttccgttattttttaaaatatctaaaccaacatcgaatgggatgcaaatttctatgaaacaaccccggtggagagtggagactcagaagagcggagtgcccatcggagacccaagacgcagcagaacaatcgcttcgctgaaaatacagtcgaaaacaggagacgcttgatcgaggccgtccggcgagaaaacgggggctccatccgatgccgtcgttttctgatcggacggcccggacatgcctgcccgtgcccactggtggcccctacacgcccatggtcaaacgagacgagagagcagaggagacagcgctgcgctgcgctgcggagccaagcgcagtggcccgtgggagtgagtgagtgctgctaggggcggaaccggaagcgacaccaccacgcggtctgggcacacgtcctcccgccattaaaaccgtggcagggcgtcgcatttatcgcgccattactgcccgccc

SEQ ID NO: 8708 - DNA, 788 bp, Zea Mays
aaaagagcctagcccaactacagctacaaggcccaataagattggtccactcaaaatcgccaggttggatttcagtgaccatcatttcttcagtgctcatgacctagagaaaattcaagaaacagcgaggaatctcatggacgagcacagcaaagataccatagtcttagttactgagaaggattatgaccgtgatccagaggccctcaagacactggacgcaaacgtttgggtgctgtcttcttcactgcagattatgcatcacagcaaacaaggagaagatgaattcatgaggaaagtcaatgagattatcacagttacctggtgtgcgaagtcacatgcagcggaccgggccacgggttgctgagggtgtggtttgatatggttgtacctgaaagcaaccggtagtgaaacatttttgcctggagatatgaacattagcatgcaggatagagtttttccttgcagctgtggggttgtttgggtttatggattaatgtttagtctatctattttattcctattttagttcataaattgctaaacacgaaaactaaaatagagttttagtttctgtattgggcaaactagagactaaaaataaataaaatagagggactaaaaattagtccctaaaccccaaacaaccccagtcaaacctacaagatttaggatgtgtttgtttcccttctagattatataagttggacgatgctggaaagataggagactaaaggccggtttggttcactgcctaacttatatattttgtctaacttttctgtcta

SEQ ID NO: 8709 - DNA, 1694 bp, Zea Mays
cctgtatccggccgccgcgctgcccatgaacggcggcgagtatggtcgtatggaggagatggcgaggcagctcgtcgctcgccttgccgccaccccggactctgctctgcggggcctccccttcctccaccgcgttctcaccctccccctcctctccgccgcgtccgccgtgctccgcctgtccctgctcctttcgcggctccgctcgcgccgcgcgctgcccgtgcccgtcgttagcgtcggcaacctcacttggggtggcaatggcaagacacccatggtagacttcttggcccgcagcttccaccgcctcggcgtctcgccactactactgacaaggggttatgcaggtggagatgagccaaagatgctccggaggcgcctttccgatacttcggccaagatcggggtcggtgcaaatagaacggcagtggcttcttccatgcttcaagaatatggcttcatccatcattttcagaacacatttgccgagaagaagctttcttcagtctgcaaactggaatctggtaataggattggagtagccatattagatgacggtatgcagcactggagcttgctccgagatgtggagattgtgatggttaatgggttggctccgtggggaaactcacatttcattccgcgaggacccatgagagaacctctgagtgcactcggtcgagctgatattgtggtcattcataatgctgacatggtatgtggtaatagaggtgcttctgaaatgcaacttaaagcaataaggtccgcaatagaggataataatgcaacatgttcagtgttctacagcagattggctccatcacatttttttgaagttaagcaaccatcacagagactccctcttaatgtgttgaatgataagatcgtgctatgtgtttctgcaattggctgcccaaatgctttcattcatacagccagagagattggtccactcaaaatcgccaggttggatttcagtgaccatcatttcttcagtgctcatgacctagagaaaattcaagaaacagcgaggaatctcatggacgagcacagcaaagataccatagtcttagttactgagaaggattatgaccgtgatccagaggccctcaagacactggacgcaaacgtttgggtgctgtcttcttcactgcagattatgcatcacagcaaacaaggagaagatgaattcatgaggaaagtcaatgagattatcacagttacctggtgtgcgaagtcacatgcagcggaccgggccacgggttgctgagggtgtggtttgatatggttgtacctgaaagcaaccggtagtgaaacatttttgcctggagatatgaacattagcatgcaggatagagtttttccttgcagctgtggggttgtttgggtttatggattaatgtttagtctatctattttattcctattttagttcataaattgctaaacacgaaaactaaaatagagttttagtttctgtattgggcaaactagagactaaaaataaataaaatagagggactaaaaattagtccctaaaccccaaacaaccccagtcaaacctacaagatttaggatgtgtttgtttcccttctagattatataagttggacgatgctggaaagataggagactaaaggccggtttggttcactgcctaacttatatattttgtctaacttttctgtcta

SEQ ID NO: 8710 - DNA, 1708 bp, Zea Mays
aaggcagccagcccatcctgtatccggccgccgcgctgcccatgaacggcggcgagtatggtcgtatggaggagatggcgaggcagctcgtcgctcgccttgccgccaccccggactctgctctgcggggcctccccttcctccaccgcgttctcaccctccccctcctctccgccgcgtccgccgtgctccgcctgtccctgctcctttcgcggctccgctcgcgccgcgcgctgcccgtgcccgtcgttagcgtcggcaacctcacttggggtggcaatggcaagacacccatggtagacttcttggcccgcagcttccaccgcctcggcgtctcgccactactactgacaaggggttatgcaggtggagatgagccaaagatgctccggaggcgcctttccgatacttcggccaagatcggggtcggtgcaaatagaacggcagtggcttcttccatgcttcaagaatatggcttcatccatcattttcagaacacatttgccgagaagaagctttcttcagtctgcaaactggaatctggtaataggattggagtagccatattagatgacggtatgcagcactggagcttgctccgagatgtggagattgtgatggttaatgggttggctccgtggggaaactcacatttcattccgcgaggacccatgagagaacctctgagtgcactcggtcgagctgatattgtggtcattcataatgctgacatggtatgtggtaatagaggcttctgaaatgcaacttaaagcaataaggtccgcaatagaggataataatgcaacatgttcagtgttctacagcagattggctccatcacatttttttgaagttaagcaaccatcacagagactccctcttaatgtgttgaatgataagatcgtgctatgtgtttctgcaattggctgcccaaatgctttcattcatacagccagagagattggtccactcaaaatcgccaggttggatttcagtgaccatcatttcttcagtgctcatgacctagagaaaattcaagaaacagcgaggaatctcatggacgagcacagcaaagataccatagtcttagttactgagaaggattatgaccgtgatccagaggccctcaagacactggacgcaaacgtttgggtgctgtcttcttcactgcagattatgcatcacagcaaacaaggagaagatgaattcatgaggaaagtcaatgagattatcacagttacctggtgtgcgaagtcacatgcagcggaccgggccacgggttgctgagggtgtggtttgatatggttgtacctgaaagcaaccggtagtgaaacatttttgcctggagatatgaacattagcatgcaggatagagtttttccttgcagctgtggggttgtttgggtttatggattaatgtttagtctatctattttattcctattttagttcataaattgctaaacacgaaaactaaaatagagttttagtttctgtattgggcaaactagagactaaaaataaataaaatagagggactaaaaattagtccctaaaccccaaacaaccccagtcaaacctacaagatttaggatgtgtttgtttcccttctagattatataagttggacgatgctggaaagataggagactaaaggccggtttggttcactgcctaacttatatattttgtctaacttttctgtcta

SEQ ID NO: 8711 - DNA, 1747 bp, Zea Mays
aaaaaaaggcccacgatgatgctagcccattacttcccggcggctgcgcaaagcaaaggcagccagcccatcctgtatccggccgccgcgctgcccatgaacggcggcgagtatggtcgtatggaggagatggcgaggcagctcgtcgctcgccttgccgccaccccggactctgctctgcggggcctccccttcctccaccgcgttctcaccctccccctcctctccgccgcgtccgccgtgctccgcctgtccctgctcctttcgcggctccgctcgcgccgcgcgctgcccgtgcccgtcgttagcgtcggcaacctcacttggggtggcaatggcaagacacccatggtagacttcttggcccgcagcttccaccgcctcggcgtctcgccactactactgacaaggggttatgcaggtggagatgagccaaagatgctccggaggcgcctttccgatacttcggccaagatcggggtcggtgcaaatagaacggcagtggcttcttccatgcttcaagaatatggcttcatccatcattttcagaacacatttgccgagaagaagctttcttcagtctgcaaactggaatctggtaataggattggagtagccatattagatgacggtatgcagcactggagcttgctccgagatgtggagattgtgatggttaatgggttggctccgtggggaaactcacatttcattccgcgaggacccatgagagaacctctgagtgcactcggtcgagctgatattgtggtcattcataatgctgacatggcttctgaaatgcaacttaaagcaataaggtccgcaatagaggataataatgcaacatgttcagtgttctacagcagattggctccatcacatttttttgaagttaagcaaccatcacagagactccctcttaatgtgttgaatgataagatcgtgctatgtgtttctgcaattggctgcccaaatgctttcattcatacagccagagagattggtccactcaaaatcgccaggttggatttcagtgaccatcatttcttcagtgctcatgacctagagaaaattcaagaaacagcgaggaatctcatggacgagcacagcaaagataccatagtcttagttactgagaaggattatgaccgtgatccagaggccctcaagacactggacgcaaacgtttgggtgctgtcttcttcactgcagattatgcatcacagcaaacaaggagaagatgaattcatgaggaaagtcaatgagattatcacagttacctggtgtgcgaagtcacatgcagcggaccgggccacgggttgctgagggtgtggtttgatatggttgtacctgaaagcaaccggtagtgaaacatttttgcctggagatatgaacattagcatgcaggatagagtttttccttgcagctgtggggttgtttgggtttatggattaatgtttagtctatctattttattcctattttagttcataaattgctaaacacgaaaactaaaatagagttttagtttctgtattgggcaaactagagactaaaaataaataaaatagagggactaaaaattagtccctaaaccccaaacaaccccagtcaaacctacaagatttaggatgtgtttgtttcccttctagattatataagttggacgatgctggaaagataggagactaaaggccggtttggttcactgcctaacttatatattttgtctaacttttctgtcta

SEQ ID NO: 8712 - DNA, 1767 bp, Zea Mays
aaaaaaaggcccacgatgatgctagcccattacttcccggcggctgcgcaaagcaaaggcagccagcccatcctgtatccggccgccgcgctgcccatgaacggcggcgagtatggtcgtatggaggagatggcgaggcagctcgtcgctcgccttgccgccaccccggactctgctctgcggggcctccccttcctccaccgcgttctcaccctccccctcctctccgccgcgtccgccgtgctccgcctgtccctgctcctttcgcggctccgctcgcgccgcgcgctgcccgtgcccgtcgttagcgtcggcaacctcacttggggtggcaatggcaagacacccatggtagacttcttggcccgcagcttccaccgcctcggcgtctcgccactactactgacaaggggttatgcaggtggagatgagccaaagatgctccggaggcgcctttccgatacttcggccaagatcggggtcggtgcaaatagaacggcagtggcttcttccatgcttcaagaatatggcttcatccatcattttcagaacacatttgccgagaagaagctttcttcagtctgcaaactggaatctggtaataggattggagtagccatattagatgacggtatgcaggcagcactggagcttgctccgagatgtggagattgtgatggttaatgggttggctccgtggggaaactcacatttcattccgcgaggacccatgagagaacctctgagtgcactcggtcgagctgatattgtggtcattcataatgctgacatggtatgtggtaatagaggcttctgaaatgcaacttaaagcaataaggtccgcaatagaggataataatgcaacatgttcagtgttctacagcagattggctccatcacatttttttgaagttaagcaaccatcacagagactccctcttaatgtgttgaatgataagatcgtgctatgtgtttctgcaattggctgcccaaatgctttcattcatacagccagagagattggtccactcaaaatcgccaggttggatttcagtgaccatcatttcttcagtgctcatgacctagagaaaattcaagaaacagcgaggaatctcatggacgagcacagcaaagataccatagtcttagttactgagaaggattatgaccgtgatccagaggccctcaagacactggacgcaaacgtttgggtgctgtcttcttcactgcagattatgcatcacagcaaacaaggagaagatgaattcatgaggaaagtcaatgagattatcacagttacctggtgtgcgaagtcacatgcagcggaccgggccacgggttgctgagggtgtggtttgatatggttgtacctgaaagcaaccggtagtgaaacatttttgcctggagatatgaacattagcatgcaggatagagtttttccttgcagctgtggggttgtttgggtttatggattaatgtttagtctatctattttattcctattttagttcataaattgctaaacacgaaaactaaaatagagttttagtttctgtattgggcaaactagagactaaaaataaataaaatagagggactaaaaattagtccctaaaccccaaacaaccccagtcaaacctacaagatttaggatgtgtttgtttcccttctagattatataagttggacgatgctggaaagataggagactaaaggccggtttggttcactgcctaacttatatattttgtctaacttttctgtcta

SEQ ID NO: 8713 - DNA, 1762 bp, Zea Mays
caaactgttgcaaaaaaaggcccacgatgatgctagcccattacttcccggcggctgcgcaaagcaaaggcagccagcccatcctgtatccggccgccgcgctgcccatgaacggcggcgagtatggtcgtatggaggagatggcgaggcagctcgtcgctcgccttgccgccaccccggactctgctctgcggggcctccccttcctccaccgcgttctcaccctccccctcctctccgccgcgtccgccgtgctccgcctgtccctgctcctttcgcggctccgctcgcgccgcgcgctgcccgtgcccgtcgttagcgtcggcaacctcacttggggtggcaatggcaagacacccatggtagacttcttggcccgcagcttccaccgcctcggcgtctcgccactactactgacaaggggttatgcaggtggagatgagccaaagatgctccggaggcgcctttccgatacttcggccaagatcggggtcggtgcaaatagaacggcagtggcttcttccatgcttcaagaatatggcttcatccatcattttcagaacacatttgccgagaagaagctttcttcagtctgcaaactggaatctggtaataggattggagtagccatattagatgacggtatgcaggcagcactggagcttgctccgagatgtggagattgtgatggttaatgggttggctccgtggggaaactcacatttcattccgcgaggacccatgagagaacctctgagtgcactcggtcgagctgatattgtggtcattcataatgctgacatggcttctgaaatgcaacttaaagcaataaggtccgcaatagaggataataatgcaacatgttcagtgttctacagcagattggctccatcacatttttttgaagttaagcaaccatcacagagactccctcttaatgtgttgaatgataagatcgtgctatgtgtttctgcaattggctgcccaaatgctttcattcatacagccagagagattggtccactcaaaatcgccaggttggatttcagtgaccatcatttcttcagtgctcatgacctagagaaaattcaagaaacagcgaggaatctcatggacgagcacagcaaagataccatagtcttagttactgagaaggattatgaccgtgatccagaggccctcaagacactggacgcaaacgtttgggtgctgtcttcttcactgcagattatgcatcacagcaaacaaggagaagatgaattcatgaggaaagtcaatgagattatcacagttacctggtgtgcgaagtcacatgcagcggaccgggccacgggttgctgagggtgtggtttgatatggttgtacctgaaagcaaccggtagtgaaacatttttgcctggagatatgaacattagcatgcaggatagagtttttccttgcagctgtggggttgtttgggtttatggattaatgtttagtctatctattttattcctattttagttcataaattgctaaacacgaaaactaaaatagagttttagtttctgtattgggcaaactagagactaaaaataaataaaatagagggactaaaaattagtccctaaaccccaaacaaccccagtcaaacctacaagatttaggatgtgtttgtttcccttctagattatataagttggacgatgctggaaagataggagactaaaggccggtttggttcactgcctaacttatatattttgtctaacttttctgtcta

SEQ ID NO: 8714 - DNA, 536 bp, Zea Mays
ttctcgatggctagatactcagaacggtggatctggagacgacgtcggcgctagcagatctcgtcgtcggcgctggcaggtgtcgtcggaacgtgtggaggaggagggaggcgtcggggagggaggagccgttgggctcactggcggcgcgacgggtggcggcgtccatgatgccgcatcggtgaggactgaggagggtggatcgggatgactcaacgttgattccggctggtgtggaagggattgaggtttctatacgtaggtatccgattccaatgaatgtgattccaatgaaactcataacaaacatatgtaacagtatcagatacccgaaggaatccgatatcgttacatagcccgtcataattcatttttcctttagaaaaatgagaatccattgagaaaataaaattgtcaaactagccctaagagcaacttgactttgtacccaatgtcatgtatgatgtctgatcggatatttggtttctagcggatatctagtttagcactaaacatctggttgaacgggagttcag

SEQ ID NO: 8715 - DNA, 444 bp, Zea Mays
acactctctatttcttaaccttctttctattctcagacattttcttctatatgctaaccccatgaacaaccagacataatagtacgtgacaaggagagaactcaagatacccctaaatgccatattccttcgtcgagttcttgaggataaatctggaggtcaacaaatgagtttcatataaatctggatatcattgtgcacatcaaataaattaaacagagcatagaggactcagaagaaaatgacattcggagtggtcacgatagtaccaccagctaaatccgaagcaaaacaagttacacaagtttcagatcctgctataaagtttcagatcctactataaattaaacagagctgaagagagaagagcctgccattttgcaaaactcttccatcctagccagatactggtactgacatttgagcttgccttgtcaattgcac

SEQ ID NO: 8716 - DNA, 990 bp, Zea Mays
cggccccgttcgcgcaatcgcgctcccgcatttcgtcgagcaggtgtgaatttgtgatgccgccgtctcctatcgtcctccctgccaccgcgctgccggcggcccgcctcgccagagtggtggccgcctccgaaagcggaggcgcgactcctccgagggcgtcccctcggcgggggcggcgcggcaagcccgggttctctcggcgttcggcaatcaagaagagcttccaccaggagcaggtcgtgttctccactcccgtctccaccgaccccaccgttgccgtcatcggaggcggcgcttccggcctctcctgcgcaacttccctcgccgcccgcggcgtccgctccgtcgtcttcgatacggggatgcatggcctagggggaaggatggcgactaggttcgtcgacggaggcaagcagctggtgttcgaccacgcggcacagttcttcaccgcgagcgacgagaggttccagaggctagtcaacgagtggctcgacagagggctggtccgtgagtggagcggtttgatcggcgagctcgaagccggcggctgtttcaggcccataccttcgttgacaccgaggtacatcggtgtgaatgggatgcgcccacttgcagatgcaatgctgcctgagggaaatgtgccaaccgtctgctctctacatcaggattgccattactaacaaaacaaatgaagagactagagctcagttctgtctgggctctccttgcagcatttgaagatcctcttccgattccacttcttgattccaatgcagcatttgaaggagcatttgtgagagatgtggattctctctcttggatgggcaacaatacccgcaaactttttccaatgcagacaggcgcacccgagtgctggacatttttcagtactgctgcttatggaaaaagaaacaaagttccacaggaaaatatcccaaaactcactgcagaaaaggtgaaggaagacatgcttggaggagtagacga

SEQ ID NO: 8717 - DNA, 1402 bp, Zea Mays
cggccccgttcgcgcaatcgcgctcccgcatttcgtcgagcaggtgtgaatttgtgatgccgccgtctcctatcgtcctccctgccaccgcgctgccggcggcccgcctcgccagagtggtggccgcctccgaaagcggaggcgcgactcctccgagggcgtcccctcggcgggggcggcgcggcaagcccgggttctctcggcgttcggcaatcaagaagagcttccaccaggagcaggtcgtgttctccactcccgtctccaccgaccccaccgttgccgtcatcggaggcggcgcttccggcctctcctgcgcaacttccctcgccgcccgcggcgtccgctccgtcgtcttcgatacggggatgcatggcctagggggaaggatggcgactaggttcgtcgacggaggcaagcagctggtgttcgaccacgcggcacagttcttcaccgcgagcgacgagaggttccagaggctagtcaacgagtggctcgacagagggctggtccgtgagtggagcggtttgatcggcgagctcgaagccggcggctgtttcaggcccataccttcgttgacaccgaggtacatcggtgtgaatgggatgcgcccacttgcagatgcaatgctgcctgaggtatatctgatcagctccacctttttcaagctccatggaagtgcagtgcagtagtatgaagtgatccatattcattgctatccagtcacttgcacatccccatgaattcaccaaacattccacatcatatcctgctctagggacttgtcctgattttgttctcagagttcagtccaagtagcttgaagttataactcaatggttttgcggaaccttttctattcagttcttgacttgaccgatgaatgtcagtcccattgctgagttgcatgttgcattctgcagactgatatgattaaagttttgaggccttgttggataagcaaacttgagccgttcaatggtttgtggcgcttgtttgagaatgaaaagcctcgcggtgaatacgatgcagttgtgatagctcataatgggaaatgtgccaaccgtctgctctctacatcaggattgccattactaacaaaacaaatgaagagactagagctcagttctgtctgggctctccttgcagcatttgaagatcctcttccgattccacttcttgattccaatgcagcatttgaaggagcatttgtgagagatgtggattctctctcttggatgggcaacaatacccgcaaactttttccaatgcagacaggcgcacccgagtgctggacatttttcagtactgctgcttatggaaaaagaaacaaagttccacaggaaaatatcccaaaactcactgcagaaaaggtgaaggaagacatgcttggaggagtagacga

SEQ ID NO: 8718 - DNA, 1220 bp, Zea Mays
caaagacaggtaaccaaaatagatgatattggttgatctggtttagaccgttagattgcaatctgatggttcacttcatccactgccatctgtcaattgaagaagtaaagaaatccaaccccgtaataataaacagataacggccccgttcgcgcaatcgcgctcccgcatttcgtcgagcaggtgtgaatttgtgatgccgccgtctcctatcgtcctccctgccaccgcgctgccggcggcccgcctcgccagagtggtggccgcctccgaaagcggaggcgcgactcctccgagggcgtcccctcggcgggggcggcgcggcaagcccgggttctctcggcgttcggcaatcaagaagagcttccaccaggagcaggtcgtgttctccactcccgtctccaccgaccccaccgttgccgtcatcggaggcggcgcttccggcctctcctgcgcaacttccctcgccgcccgcggcgtccgctccgtcgtcttcgatacggggatgcatggcctagggggaaggatggcgactaggttcgtcgacggaggcaagcagctggtgttcgaccacgcggcacagttcttcaccgcgagcgacgagaggttccagaggctagtcaacgagtggctcgacagagggctggtccgtgagtggagcggtttgatcggcgagctcgaagccggcggctgtttcaggcccataccttcgttgacaccgaggtacatcggtgtgaatgggatgcgcccacttgcagatgcaatgctgcctgagactgatatgattaaagttttgaggccttgttggataagcaaacttgagccgttcaatggtttgtggcgcttgtttgagaatgaaaagcctcgcggtgaatacgatgcagttgtgatagctcataatgggaaatgtgccaaccgtctgctctctacatcaggattgccattactaacaaaacaaatgaagcatttgaagatcctcttccgattccacttcttgattccaatgcagcatttgaaggagcatttgtgagagatgtggattctctctcttggatgggcaacaatacccgcaaactttttccaatgcagacaggcgcacccgagtgctggacatttttcagtactgctgcttatggaaaaagaaacaaagttccacaggaaaatatcccaaaactcactgcagaaaaggtgaaggaagacatgcttggaggagtagacga

SEQ ID NO: 8719 - DNA, 1332 bp, Zea Mays
cctaggactagaaataagcatccaaatcgaattgacaagaatttgaactaggtgacaccgacaagaccaaagaggcaaagacaggtaaccaaaatagatgatattggttgatctggtttagaccgttagattgcaatctgatggttcacttcatccactgccatctgtcaattgaagaagtaaagaaatccaaccccgtaataataaacagataacggccccgttcgcgcaatcgcgctcccgcatttcgtcgagcaggtgtgaatttgtgatgccgccgtctcctatcgtcctccctgccaccgcgctgccggcggcccgcctcgccagagtggtggccgcctccgaaagcggaggcgcgactcctccgagggcgtcccctcggcgggggcggcgcggcaagcccgggttctctcggcgttcggcaatcaagaagagcttccaccaggagcaggtcgtgttctccactcccgtctccaccgaccccaccgttgccgtcatcggaggcggcgcttccggcctctcctgcgcaacttccctcgccgcccgcggcgtccgctccgtcgtcttcgatacggggatgcatggcctagggggaaggatggcgactaggttcgtcgacggaggcaagcagctggtgttcgaccacgcggcacagttcttcaccgcgagcgacgagaggttccagaggctagtcaacgagtggctcgacagagggctggtccgtgagtggagcggtttgatcggcgagctcgaagccggcggctgtttcaggcccataccttcgttgacaccgaggtacatcggtgtgaatgggatgcgcccacttgcagatgcaatgctgcctgagactgatatgattaaagttttgaggccttgttggataagcaaacttgagccgttcaatggtttgtggcgcttgtttgagaatgaaaagcctcgcggtgaatacgatgcagttgtgatagctcataatgggaaatgtgccaaccgtctgctctctacatcaggattgccattactaacaaaacaaatgaagagactagagctcagttctgtctgggctctccttgcagcatttgaagatcctcttccgattccacttcttgattccaatgcagcatttgaaggagcatttgtgagagatgtggattctctctcttggatgggcaacaatacccgcaaactttttccaatgcagacaggcgcacccgagtgctggacatttttcagtactgctgcttatggaaaaagaaacaaagttccacaggaaaatatcccaaaactcactgcagaaaaggtgaaggaagacatgcttggaggagtagacga

SEQ ID NO: 8720 - DNA, 1828 bp, Zea Mays
cttgaagatgcagccaccgcctccgtgtcgtcttcctcgtcagcacgcagcagtcaggtcaccaccaacagcaacagcagtagtgccgtcgcgttgtctcccactcccaagtcccaactcccacctcccccgcccgccgttcaaatctccctagcctcccgaagtaggcaagtagccctccctgttccatcgaacccagcagagcagccagccgaacaacgaagcatgccgtcgaagccgaacgccgcgtcgcgcctcgtcttcctcgctttcctcctcgtcatcagcgccgccgcggccaacgatgacgccgcggcgcggcggacgatggagcagttcgccggcttccccgcctccgacgacggcgagggcccttccagcgacttccacgtcgactccgagggcctccagcgtcagatcgatgaactggcctcgttctccgactcgcccgcgccgtccgtgacccgcgttctgtacaccgacaaggatgtgcaggctcgaaggtatataaaagggataatgaatcaacttggccttgttgttcgagaagatgctgttggtaacatatttggccgctgggagggttccgagcctggactaggagcagttgcaactggatctcatgttgatgccattccattctcaggcaaatttgatggtgttgttggagttctgggtgctcttgaggcaattagtttgctgaaaaggtctgctttcctgccaaaaagatctttggaggttattatgtttacatcagaggagcctacacgatttggaattagctgcttgggaagccgcttaatggcagggattgaagaacttgctcaatccctccgaaaagtagttgacaatcagaatgtgtcatttttggatgctgcagaatctgctggctataagttgaatctagaggacctgcatagcgtatttttaaagacagacaaatactctgcttttatagaactgcacattgagcagggtcccatcttagaaaaggagggtatccctattggcattgttactgcaattgctgctcctgcaagtcttaaggtggactttgaagggaatggcggtcatgctggagcagtgctgatgcctgcaaggtattctgcagttacatccaggagcaatcaatagcatcccaagcaaatcacacctagaaattgatgtaagagatattgatgagaagagaaggaatgatgtcattgagaagattcgccagtctgcagcacatatttcaaagaaccgtggagtagagctttcagaatttaagatcatcaaccaggacccacctgctctatctgacaaatcagtcgttgacgcaatggaatttgctgcaaaacagttaaacctggcatacaaaaagatgattagcagagcctaccacgattcactcttcatggccagagtatcaccaatgggtatgatcttcattccctgttacaaaggttacagccacaagccggaggagtatgcatcacccgaggacatggcgaatggggtgaaggtcctagccttgacaatggctacgctgtcgctggagtgacttgttagcgtttggaggaatcaagtcagcccgtgccaaaaaggcaaaaacaaacacctgtgttatttctaataataagctgcatagcattggcgtcatcttccctgcaccaggcctgtatacaaaccatcattcatcagggtttaggaataaagttgtcatctgtatctgtatgatctggacaatgattttctagcttgatcatattgatatatagtagtgattttctaaatctttatccatataaacaaactaatatagaaacgatgttatatcaattgtaca

SEQ ID NO: 8721 - DNA, 1231 bp, Zea Mays
cttgaagatgcagccaccgcctccgtgtcgtcttcctcgtcagcacgcagcagtcaggtcaccaccaacagcaacagcagtagtgccgtcgcgttgtctcccactcccaagtcccaactcccacctcccccgcccgccgttcaaatctccctagcctcccgaagtaggcaagtagccctccctgttccatcgaacccagcagagcagccagccgaacaacgaagcatgccgtcgaagccgaacgccgcgtcgcgcctcgtcttcctcgctttcctcctcgtcatcagcgccgccgcggccaacgatgacgccgcggcgcggcggacgatggagcagttcgccggcttccccgcctccgacgacggcgagggcccttccagcgacttccacgtcgactccgagggcctccagcgtcagatcgatgaactggcctcgttctccgactcgcccgcgccgtccgtgacccgcgttctgtacaccgacaaggatgtgcaggctcgaaggtatataaaagggataatgaatcaacttggccttgttgttcgagaagatgctgttggtaacatatttggccgctgggagggttccgagcctggactaggagcagttgcaactggatctcatgttgatgccattccattctcaggcaaatttgatggtgttgttggagttctgggtgctcttgaggcaattagtttgctgaaaaggtctgctttcctgccaaaaagatctttggaggttattatgtttacatcagaggagcctacacgatttggaattagctgcttgggaagccgcttaatggcagggattgaagaacttgctcaatccctccgaaaagtagttgacaatcagaatgtgtcatttttggatgctgcagaatctgctggctataagttgaatctagaggacctgcatagcgtatttttaaagacagacaaatactctgcttttatagaactgcacattgagcagggtcccatcttagaaaaggagggtatccctattggcattgttactgcaattgctgctcctgcaagtcttaaggtggactttgaagggaatggcggtcatgctggagcagtgctgatgcctgcaagaaatgatgctggactggcagcagctgaattagcattagcagtcgagaaacatgtcctggaatcaggatcaattgatacggttggcaccgttgatgatgaagctgctgcaactacaagtgatgaaggcgtgg

SEQ ID NO: 8722 - DNA, 2609 bp, Zea Mays
ggactttcacagtaaacctaaagagcgatgattgggcaacaagtttgtttagaaaggcttgagctacccttatttggaatagtgagaaaagtggggctaaacaaagggtttcaatcggacttaagcacttcagtgcacaccagaaaaatctaaagaaaatatcgccgcaactataaaatctagggagagatgagagataagtgagaaccctggggggcataacttggacggattcaatgttgtgatgtggtgtcaagcttgcctgatggctaacccccagtactgtccattcggtgtctgtctgtccactctcgtgtcctcaagccaggtccagtgaacctgccccagcgccatcccttatttaagtgcttgtccagggagccctgttgtctcgagctttagctggatccttgggcatctctgtggtggtgtgtgcaagcctgagttcatctccttagcctctgtgtcggctttgttcagttcatcaagtgccattccattgtctggtactctagtgccacagcaaccatccttccacctcgccgtggtcagactatctcaacaagtttgttgcccagagttgtgccaccgtagaccagagccgtgagcagcccctgtgttgaccgaacaactcacactttctcttgtcgattccttgtgagcaccaaagtttagaactcctaccagaaggagtgaagattcaagctgaagaggtgactgaagaagagtttgctccagtgcctattcatcaagtggatggagctatctaactggttattgggtagaaaggtcttgaacctcttcactgcaacaaaggcaagcctcagtgcatgcaaccccttccttgtgtttttaaattattttacatactttaagtctagtgaatgtgcattaggtttataggagttgcttggaaacccattgatgcattgcctaccttgatatccatatctttgtagatacttctgacgaagtatcaaaatatgatttacaaaaatgcttatccctgcttagatcttgtggatagaggttatcttttgcattaaggcctagctcatgggttatcctgaggaaggagaacttctacctgcaagaatattttcattaggagcatggggggatcttactgcaaagttccctttgatgctcttttcatcctaaggcacacaaacaatcctaaggatggaagtacttaaaccgggacttgggctaggaacaggtgatgttctacccaggttgattaaggattggatgcgtatgtaggcttgatgatcaaggactatcttaactggccacatgccctggatatgggacagggtaagctttgcctcgggcagactaataccagaataagataacacgcaatgggagtggagagatggcgagagtagcgtgtaccctccgtggcaagaggctggacggtggtgtatctgtgctctcggttggcgtgaacctgatctggtcttaagaaccccggtggcgagttgacatatgcaagggttaagtgctacatatgtcgtgtggttagagatcctcagctgagtaaatcgattcggatcgccgttatatccccggacagtggagacttggtcactgacctacaacctaagtcaggatgtgaacctcatgaataaaaatgatgttgtattgatgagatggagaaattagaccagatgcaaacagagtctattaatatttaatctggcgttaaaatattgaaagtaaggactcactttagtaagctatttctgcaaaagtatctaatttgattcttgctaaaacttttccttgattccacaatccagcataccctagagagtcttttctttagtcgggtaagtcttgctgagtaattccgtactcagggttttattccctgttgtttttcaggtcatagttttgtgctgttgatgatggtgttaagtgccggtgggctcagccttcttataagtctaagtaactcttctatacttctttttgaggatggtcacttgagctagcatatatttcaaacttatagacaatttataacaattcaaagttatttctttgaatcacttttgtaaccactccgatcatgtacattgtaaaacttgatgtaacatgtaaaatttggtaataagatttccgctacaaaattattggtgtgtgatttgtgtttacttaatcccgcggttctagttataagtggtttatccggtgtccttggggcaatcggacggatcctgttaagttatctggtgcacatgcatagcagtctgaggtctttgagacaaggataggtgcatgtgggcccaataacttgggaggttctgccacatatagtcttcaacaaatcatcgggtttggttgaagtctctagcgacgttgtatttgatgagactaatggctctccaagagagcaagttgatcttaatgatgtagatgaagatgatgttccaacggtcgcaatacgcacgatggcgataggtgatgtgcgaccacaggaacaacaagagcaagatcaaccttcttcctcaacaatggtgcatcccccaactcaagatgatgaacatgtccctcaagaagaggcgcgtgatcaagggggagcacaagaagaacaagttacg

SEQ ID NO: 8723 - DNA, 1592 bp, Zea Mays
cccagtagtgtccattcggtgtctgtctgtccactctcgtgtcctcaagctaggtccagtgaacctgccccagcgccatcccttatttaagtgcttgtccagggagccctgctggatccttgggcatctctgtggtggtgtgtgcaagcctgagttcatctccttagcctctgcgtcggctttgttcagttcatcaagtgccattccattgtctggtactctggtgccacaacaaccatccttccacctccccgtggtcagagtatctcaagaagtttgttgcccagagttgttccaccgcagaccggagccgtgagcagcctctgtgttgaccgaacaactcacgctttctccggtcgattccttgtgagcaccaaagtttagaagtgggaagaaatacaagcgacgtctatgaggttgttccctgcagttgcattaagcgacccagttgtgtatcaacaccaggcccgattaatggaaagcattcccattgggcaggattctgttgaatcggcatctgcttgagttttgatggctatgctagagttgcagcttactcgagggcacagtcgtcaaatgtggcagcagttgtacactgggagttatgcaacatttaagatgacggaaatggccaagaatagggcttgtactcaggcacaagaatggttgaagaaacaaagattcaagctgggcgaattgttggactagagcatcaggtgatagaacttcaaacgcaacaccaagctgatcagaatcgcattaaggaactcgagcattagctgactaatgctcattcaaaatctaaaattttgattcagcaacaagaagatactcactcgtatgctattacggttagggaagaacttaaggaaaccatgggcttcctaggtcatcatgatcaggtgcttgaggagttgcatcatacctatccgatggaatttcaaacagtgcagcgactgatcaaccatctgcaacaaacggtgcatatgctcaatgttgccttttattctgccccaacaccaacagactaaaaggtacctatggagcatggaaacagacatctggcagatgtgataatcggagaagatgtagcaggcaacttaattctcgtcaggcaatatacctatgtaaattagttttgaaaggtagatgtaaggtagacccatatagtaatgttagctagtaaaaataggttaaactttgttgtaaagagtttttcctgtttcacctggatcaggtaacctgtgagcatgtctatggctatggtgtaataaagaactacctgtctcagtggcaactattggatgtttgtagtagtttgccaaatcctaaaagttaaaatggataaacgacttggcacacgctggtaccatagtttctggttgtgtttcatgacgaaatggtaccaccgtgatttcccatgtaagtctgttgaacaagaaacagacaaatggatagacgttatccaaaacaaattagatgcaacatcttgggtaaaccacacagaaagagatttatcgccgagttatcattggaagtccgtagcattagagatgagtgcgaatgtcgagtgacatcgtggttaactcatg

SEQ ID NO: 8724 - DNA, 1738 bp, Zea Mays
cccagtagtgtccattcggtgtctgtctgtccactctcgtgtcctcaagctaggtccagtgaacctgccccagcgccatcccttatttaagtgcttgtccagggagccctgctggatccttgggcatctctgtggtggtgtgtgcaagcctgagttcatctccttagcctctgcgtcggctttgttcagttcatcaagtgccattccattgtctggtactctggtgccacaacaaccatccttccacctccccgtggtcagagtatctcaagaagtttgttgcccagaacagagttgttccaccgcagaccggagccgtgagcagcctctgtgttgaccgaacaactcacgctttctccggtcgattccttgtgagcaccaaagtttagaactcctaccagaaggagtgaagattcaagctgaagaggtgactgaagaagagtttgctccagtgcctattcatcaagtggatggagctatctaactagttattgggtagaaaggtcttgaacctcttcactgcaacaaagaagtgggaagaaatacaagcgacgtctatgaggttgttccctgcagttgcattaagcgacccagttgtgtatcaacaccaggcccgattaatggaaagcattcccattgggcaggattctgttgaatcggcatctgcttgagttttgatggctatgctagagttgcagcttactcgagggcacagtcgtcaaatgtggcagcagttgtacactgggagttatgcaacatttaagatgacggaaatggccaagaatagggcttgtactcaggcacaagaatggttgaagaaacaaagattcaagctgggcgaattgttggactagagcatcaggtgatagaacttcaaacgcaacaccaagctgatcagaatcgcattaaggaactcgagcattagctgactaatgctcattcaaaatctaaaattttgattcagcaacaagaagatactcactcgtatgctattacggttagggaagaacttaaggaaaccatgggcttcctaggtcatcatgatcaggtgcttgaggagttgcatcatacctatccgatggaatttcaaacagtgcagcgactgatcaaccatctgcaacaaacggtgcatatgctcaatgttgccttttattctgccccaacaccaacagactaaaaggtacctatggagcatggaaacagacatctggcagatgtgataatcggagaagatgtagcaggcaacttaattctcgtcaggcaatatacctatgtaaattagttttgaaaggtagatgtaaggtagacccatatagtaatgttagctagtaaaaataggttaaactttgttgtaaagagtttttcctgtttcacctggatcaggtaacctgtgagcatgtctatggctatggtgtaataaagaactacctgtctcagtggcaactattggatgtttgtagtagtttgccaaatcctaaaagttaaaatggataaacgacttggcacacgctggtaccatagtttctggttgtgtttcatgacgaaatggtaccaccgtgatttcccatgtaagtctgttgaacaagaaacagacaaatggatagacgttatccaaaacaaattagatgcaacatcttgggtaaaccacacagaaagagatttatcgccgagttatcattggaagtccgtagcattagagatgagtgcgaatgtcgagtgacatcgtggttaactcatg

SEQ ID NO: 8725 - DNA, 1155 bp, Zea Mays
cccagtagtgtccattcggtgtctgtctgtccactctcgtgtcctcaagctaggtccagtgaacctgccccagcgccatcccttatttaagtgcttgtccagggagccctgctggatccttgggcatctctgtggtggtgtgtgcaagcctgagttcatctccttagcctctgcgtcggctttgttcagttcatcaagtgccattccattgtctggtactctggtgccacaacaaccatccttccacctccccgtggtcagagtatctcaagaagtttgttgcccagaacagagttgttccaccgcagaccggagccgtgagcagcctctgtgttgaccgaacaactcacgctttctccggtcgattccttgtgagcaccaaagtttagatggatcaacaagaagcgcctacaggagttggagagtttctacgagattttggtgttccaatggtcctgtggtgattacttcaagaagttggatataccgaagcacccaagtaccagtggtcacgcactgttcttagaggacaaccatggtatgaggtagtagtgcgtattccagaacgtgctagaaaactatcttggccacattggatgttccatgctgaaggaatgactccttaggaaggtgctcaggtagctgccttagaggtgttatgtcacactcaggtttcggggcaccaagacccgagcgcgaacataatcgccaagtgtgctgggaccaagtctcacacatatgatgaatcatggcacaggatcgaatgtcacatctttactatacaataggagttctgtacaaaataaataaataattacattataaggagacaacggtccagcaacccaaagttgactgggagacgacgacctagacctctcacgaacttgtcacagcatcctccatgcgcctcaacctgtggtacctattcttgacctgtgggggggtgtgagacagcaagagtgagctcacatacgttcatagctcaacaagttgtggggaataatgtgtatgaactcgccaaagatgggagctcatgtgaagtgtaaggcttaccaaagaggatggttgaacctgagcattgcttttaaagttggtcaaaattttattagcaattactaagtataagtaaataccaacccaattaagtagtag

SEQ ID NO: 8726 - DNA, 552 bp, Zea Mays
cccagtagtgtccattcggtgtctgtctgtccactctcgtgtcctcaagctaggtccagtgaacctgccccagcgccatcccttatttaagtgcttgtccagggagccctgctggatccttgggcatctctgtggtggtgtgtgcaagcctgagttcatctccttagcctctgcgtcggctttgttcagttcatcaagtgccattccattgtctggtactctggtgccacaacaaccatccttccacctccccgtggtcagagtatctcaagaagtttgttgcccaggtgaaccttgttcggtaatctccctagattagtgaagctcaccgaactgggtttcctaattctagagtcttgtgcgactcagaacagagttgttccaccgcagaccggagccgtgagcagcctctgtgttgaccgaacaactcacgctttctccggtcgattccttgtgagcaccaaagtttaggtagaattgggttagggattccacagcaagatgggagaccatatcatgcacaacaaatttgatgcgaagagttggcttgct

SEQ ID NO: 8727 - DNA, 246 bp, Zea Mays
atggagattgaggccgagcgaaccgagagggcgtgctggcgggcaagaaggccgcgacgccatggacgaggtggagcgcgcacaggaaagactggcgagcacgcgcgcaaccagggacaaggcacggagctggagctgagcacaaccaagggagggacctcggcatcgcagagcagggagaacacgaaggctttcctcgatccgccacatttccacacggccgcggcgtgccatggtcgaacctag

SEQ ID NO: 8728 - DNA, 674 bp, Zea Mays
tggtctgctcgaggcagagcttacccaagacaaggcatgtgaccagttaaagagtcctcggtcagcacggtccttaagtgactcagacggggacactacaccgagactcccttctcatgcaagtcacctacccggtctcagctttattattttaaacccaaagtttggtacctggcagaggtacatcttttcagatgttgaacccatcaaggccctgatggatccatcatcacaagtttttctttgtaaaaattcccatccaccgtgaagcatcaccttttgttttaaaacaaaacattttgttttactaaagcaaggctaagcatcataaaaatccttttcataaaagggtatcaaggaagggtaatcaatttttcaaagaaggaaatgcatcaactgtttagcacacaactcctatcacctaatgcatcaaacaaggtgataaagattttaaaacacaaggaaagggataatgcaccggggcttgcctagaataaacactacattagtgtttgttagacgttgatcacttgacgaccatcctttgtcctggcacttgatcaggttatccatctttaggttcgtccatcagcttcactatgcggagtagtccacccgttacgtcatcttggggtcgacttggcttgtattccgtatcacatgctcaactagcg

SEQ ID NO: 8729 - DNA, 860 bp, Zea Mays
ctagttcgtaacaactgcgaccaggagtttcttgcttcgacggatatattaggatgccctgcgccacccttccgtcccacgcaacgagcggagtgcctactcgtggccaagtcaccgctatagctgagaggaaggaagaggtgcgttgagggagaaggtggtgctgaacatccaccacggcaggcccaagcatccattgtccaccggggactgatgggaggcgcaaaggttcgcttaggtggtcaggggatgtaaacagcgatgtcaggcacagttgcaatgcaaaaccaggcggattcctcaccggagaagcgtctccgtcgtagccccaccccacgccatgggcagacatcaccgaggccgccaaacgctggcgcaatgccccctcgctcgagaaactacaatgtcaaaggattcaagactggagggcgcgaaggcctaaagagtgggctacgcttcgaagtgcacgaagagagctcggggaagactcaggcgctccctttgtttggacggtccagagcgaagaccatcgagcattacaatgacagagaatctaggatgtgaagaccatgtgtggtaacttactactaattgtaataagggggcccatgtatagttggaccatgctacaagatcccacctataggccactacgcggtcatagctgttagtgggtcaacccatgtttgtaattaattatgttgtaatgacccgccataacccccaaaggagaatattccggggataacgtaggtaaccaagggtataatcgtctttgacggggcagggccgtccctcggttacctataaatacccccgtacatcactattacgggggacggaagaaaatcactattgcc

SEQ ID NO: 8730 - DNA, 1372 bp, Zea Mays
cattttgtgtctagattaattttttgctaattggtcacgtgtgcttggatgagtggtgccgcacagtcataatggctgataaggcagattggtgtgatgccaatgtgaggcatttcattgatgtatgcaaaggagagatagatgctgggaatcggccgatgggaatgttcaccaaaactggttggaaaaatcttagaactaagcatgaagaaaaaacaggccagaagctaaccaaaaaacaattaaagaataagttggacaatatgaaaaaggaatatacatggttcatggagttcaagaattatgccactgggcttggatgggatgaggcaaagcaaacagttgactgttctaaggaatggtgggatgaacaccttgctagatgtaataatcctggaaaaggtattaaatgcaaccatgtgaggttcagaaaacaaggacccaagcaccttgatgatctacatatattgttcgataaggtacacgttagcggggctactgcatcctgtcctggagatatatcctcggatgagtcaagtgatgatgatgtggttgaggtacaaaaaactgttgataatgttgatgtgaagctggctgcgttgaagaaatcaaaactaggaaaaaggaagcgtaaggactgctctactgctactaaagagaaggatgagaagagcccattctttcgactgtacaagaacacatgtttgaagatagaaactgcagcagagaagatctccacaagtgttgaagcatcatcgactcctccaaccaacccagtccctagtattgcagaggccatgaagatggtgaaagattgtggggtgcaagaaaaaactgcactaatgcacacagctaccttcctaattgtgaagcctgaatttagggaggtcttcagcttactagaaacaaatgaaggaaggctagatttgcttgaaagggagcatgaaaaggagtcgattaagcggatgtagaacactttcagtgcctttattttcagaattgtattgtgaaccaatatttttttatttcccaatgttaagaactatattttttcgtgagttgtgttgtgcttgtaatgtactatattatttgcttctatcattggtattgtgtcattggtcccagttgtgtgattgctgaaatctattgttattgttgccatatagtcttgtgtgattgctaaaatttattgttattggtgccatatatttgctgccactattattaatatattcatatatcatgtgtagatgggtgataacacagaagatttggcaaaaaaaggacagaatggccttttgcttctggctcaactttcccagcaagctgctgtcattggtcaaatggggaacatgtacactgaacggtattt

SEQ ID NO: 8731 - DNA, 1373 bp, Zea Mays
ctgaaatgcagcagcagcagtaagtaatttctatttatgtggtggcggtggagaggagcacatcactggtgaatggctgataaggcagattggtgtgatgccaatgtgaggcatttcattgatgtatgcaaaggagagatagatgctgggaatcggccgatgggaatgttcaccaaaactggttggaaaaatcttagaactaagcatgaagaaaaaacaggccagaagctaaccaaaaaacaattaaagaataagttggacaatatgaaaaaggaatatacatggttcatggagttcaagaattatgccactgggcttggatgggatgaggcaaagcaaacagttgactgttctaaggaatggtgggatgaacaccttgctagatgtaataatcctggaaaaggtattaaatgcaaccatgtgaggttcagaaaacaaggacccaagcaccttgatgatctacatatattgttcgataaggtacacgttagcggggctactgcatcctgtcctggagatatatcctcggatgagtcaagtgatgatgatgtggttgaggtacaaaaaactgttgataatgttgatgtgaagctggctgcgttgaagaaatcaaaactaggaaaaaggaagcgtaaggactgctctactgctactaaagagaaggatgagaagagcccattctttcgactgtacaagaacacatgtttgaagatagaaactgcagcagagaagatctccacaagtgttgaagcatcatcgactcctccaaccaacccagtccctagtattgcagaggccatgaagatggtgaaagattgtggggtgcaagaaaaaactgcactaatgcacacagctaccttcctaattgtgaagcctgaatttagggaggtcttcagcttactagaaacaaatgaaggaaggctagatttgcttgaaagggagcatgaaaaggagtcgattaagcggatgtagaacactttcagtgcctttattttcagaattgtattgtgaaccaatatttttttatttcccaatgttaagaactatattttttcgtgagttgtgttgtgcttgtaatgtactatattatttgcttctatcattggtattgtgtcattggtcccagttgtgtgattgctgaaatctattgttattgttgccatatagtcttgtgtgattgctaaaatttattgttattggtgccatatatttgctgccactattattaatatattcatatatcatgtgtagatgggtgataacacagaagatttggcaaaaaaaggacagaatggccttttgcttctggctcaactttcccagcaagctgctgtcattggtcaaatggggaacatgtacactgaacggtattt

SEQ ID NO: 8732 - DNA, 1670 bp, Zea Mays
cttcattgcctttcgtccttcggcttctcgtccctcctcgataagcacgtaaataaatttcatttttctccctgtcgtcctcctctgcttaactcccttcacctccacctccacctccacctcggcgtcgtcgtgcgcttcgatctctccccccatttccacgcggaggggaggcgtcggcgcaataaaaggcggcgcttttgcatcgcccctccccggcatgcgtagctagcctcgcggctggcccccacgccatgcagaccaccgggcccgcatcgccggataagccgccagttgttgacccggaggccgacgacaaggtggaggaaggggcgcgggcgaaggaggacgatgcggcgaaagtgagcggcgaggatgaggatgaggaagagcaggaggggaggagaggcaggcggcagcggcgccggcgaggcggtgcggcgggggacagctccgtggccatggtgaagcgggagctgctcgcgcgctgcttgacgtgcccgctctgcgaccgcctgctccggaaggccaccaccatctccgagtgcctccatacattttgtagaaattgtatctataataagatcaatgatgaggatctggaccactgtccagtatgtaaaattgatctgggctgcactccagtcgataagcttagagctgatcacaatatacaggatgtgagatcaaaagtttttcccttcaaaaggaagaaggttaatgctgaagaggcagaatctcccattatgctacctgttaaagttaaagagaggtctatctcatcattggtggtcaatacacctagagtaaccccagcagcttcaacagggaggcgaacaagggtggttaccaggaaggctgccgcattacgtggccttggccctatcattgtggatcctttaaagaaggataatgataactcaaataagcaaactgataattcaagcttgctagatagcttgagcaaaatacctcaaacaagaagacagttattgtcgaatggggacacatcaagtcacccctctgtcaaagataaagcagatgataataaggacttcgataagtccgagctctggaaacctctgaactgtcttgtagaggctgcaagcaaaacaaagcccctgacaagtgcacaaagtccagctttgaagggagaattcagagaatctcccagtagcgaacattttagcagaacaaaggtcaaagttgaagataacaaaagtgacgatcctgagccaatagtgctgcttagaaagagagggcggcctggccggaagaggaaaaatcccctacctgaaacaaatgcagcttccacggctacagctatccaggccagaaaggcatttagcccgatatggttttcattgattgcctcatttgaccagaaaggcaaccctcctttgcctcagatacctgcccactacttgagaataaaggatgggagcatacccgcatcatccatccaaaagtacattatgcagaagctcagtcttgtaagtgaatccgaggttggcaatctggatcctgttaatttacaccatctcctccggcatgtccaaatggtacttgtggcatctttgttcagtcatgcacatggaaagtttgtgtgtccttttcctccctctcaaaagttgtatcagatctttgagaagtgatgaccacatcgcctt

SEQ ID NO: 8733 - DNA, 210 bp, Zea Mays
cactaaacctgacctctaaatgttgggtaccctgagataacatgtaccatgaactatttaagtttcccaaggaaattgcacatgagtttctgaacacaatatagcgtacctgtatcactgtatggttagaaaaactgtagagtttattggatccacatcaaagccgaggagctgcagggggaagacggccgatttgttgccaacgtaccc

SEQ ID NO: 8734 - DNA, 707 bp, Zea Mays
agcagctcccgtacctggcagccctgcacgtgacggccgggttcctgatctggtccaggctctggaccagccggatatccaggctgctgttggtcgacgggtcgtcgaagcaagccgtcctgtagtcctcctccacggccctcttcagactatctgcagtgcgcaacccttcccctcccctcccctaacactgttcattgtttaggagctatagtagcacccttctttcagcaacggcgcgtgctaccgtctcctttctgacgcgctccccttctctctcacgccaggtgaagaggttcactgttctctcccctcacctgcttctcgcggaagacgccgcccgcgccacacccaagaatgttcgcactccacttctctccctctcgacgcgtctgtggaaggaggccgcgttcccgcaacgcggcggcagatctgccggcggaaggaggaatcggagccggtcccggtcggctgcgaggaagacgaagtcgagttcgtgaacagacaatcccattcgcgaccgaagatgaagcggccacaaatctgcttccgccgaggttcttcgccaccgcatccttcgtttccttctccgagcttcgacggctacctcagatccggacttgcccgcttggattcgtcgtgttgcgggccaaatcttccgttcttgagatccatttgttgctaagcatcgacgaacaagataaaac

SEQ ID NO: 8735 - DNA, 2465 bp, Zea Mays
agcagctcccgtacctggcagccctgcacgtgacggccgggttcctgatctggtccaggctctggaccagccggatatccaggctgctgttggtcgacgggtcgtcgaagcaagccgtcctgtagtcctcctccacggccctcttcagactatctgcagtgcgcaacccttcccctcccctcccctaacactgttcattgtttaggagctatagtagcacccttctttcagcaacggcgcgtgctaccgtctcctttctgacgcgctccccttctctctcacgccaggtgaagaggttcactgttctctcccctcacctgcttctcgcggaagacgccgcccgcgccacacccaagaatgttcgcactccacttctctccctctcgacgcgtctgtggaaggaggccgcgttcccgcaacgcggcggcagatctgccggcggaaggaggaatcggagccggtcccggtcggctgcgaggaagacgaagtcgagttcgtgaacagacaatcccattcgcgaccgaagatgaagcggccacaaatctgcttccgccgaggttcttcgccaccgcatccttcgtttccttctccgagcttcgacggctacctcagatccggacttgcccgcttggattcgtcgtgttgcgggccaaatcttccgttcttgagggtttgcacttgttactgaaagggaaatgtgcccttgggccatttctagtatattttggtgattaagtgcacaacacatattaaagtgagtaattatgtgccaaataatgaatgaagtgcaaatcaacaagaaggtatgattctagacttagtacattggtttttgtgtactaatttatttgtctaagtgcttgaatcaggaaaagaaagggattggaaagagttggctgtgttcagccagctgctgctcagtctgggtgcaccggacagtgtccggtgcgccaggctggctctagcgaactggccactctcgggaattcgtcggcggcgtacgactataatttaccggactgtccggtgagccaaaggccgtcagcgcaacggtcggccgcgcaatccgcgcgcgacgcgtggccccagccaacggtcggcttggggcaccggactgtccggtgtgcaccggacagtgtccggtgcgccaacggctacaattctacaacggccaaaggtcggcttggggcaccagactgtccggtgtgcaccggactgtccgatgtgcaccggacattgtccggtgcgccaacggctacaattctacaacggtcggctgtgccatttcaggaaggagatccgcaccggacaatgaacaatgaatgtccggtgcgccacccgacagaaggcaagaattgccttccaagaatgcctccaacggctcctagctgtcttggggctataaaagggacccctaggcgcatggaggagatacccaagcatactttgagcattctaagtcttccacacctcgtctccacacacttgattgactttcttagtgatttgagctctgttctagtggtgaacttgttgcaattcatttgagctcaagtcttggctgtgtgtgtgcgtattgctgcagatttgtgtgtgttgcttccctcccttactctaagtgctttcactttgatctttgttgtaagggcgagagactccaagttgtggagattcctcgcaaacgggaaagagtataagaaagaaaactaccgtggtattcaagtggatcatttgatcacttgaaaggggttgagtgcaaccctcgtccattgggacgccacaacgtggagtaggcaagtgttatacttggccgaaccacgggataaatcatcgtgtctcttgtgcttgttttctttgtgactattgtgtttcacaagagctcggttcttagccacttgattctattgtgctaacacttaaacaagttttgtggctataagttttaagtttttacaggatcacctattcacccccctctaggtgctctcaattggtatcagagccgttctcttcacgaaagggactaatcgcccgaagagatggatcctaagggaaaggggatggtggtcaacgacaaggagaaggaatccgtcttcaatgagccaagagacgataagcccactgactctggctcaagtcacaagaagaaggacaggaagaataagaggcgcatcaagaagatagtctactatgacagtgacgaatcttcctcttccaaacgagacgacgaggacgagaaaaagaaaccggttaactcaaacttttcttttgactattctcgtattccgtctaactccaatgctcatttactttcgattccacatgaggattccggtcgttacatgatttacgacgacatatgtgattgtcatcaattatacagtattaacgaccacaattatcgaaataacgatgacatttttcgtcgttaataattgtgtataggctgccatgattcattaacg

SEQ ID NO: 8736 - DNA, 3037 bp, Zea Mays
gaaaaatagcgctacgggtgcaccggttcagcagctcccgtacctggcagccctgcacgtgacggccgggttcctgatctggtccaggctctggaccagccggatatccaggctgctgttggtcgacgggtcgtcgaagcaagccgtcctgtagtcctcctccacggccctcttcagactatctgcagtgaagaggttcactgttctctcccctcacctgcttctcgcggaagacgccgcccgcgccacacccaagaatgttcgcactccacttctctccctctcgacgcgtctgtggaaggaggccgcgttcccgcaacgcggcggcagatctgccggcggaaggaggaatcggagccggtcccggtcggctgcgaggaagacgaagtcgagttcgtgaacagacaatcccattcgcgaccgaagatgaagcggccacaaatctgcttccgccgaggttcttcgccaccgcatccttcgtttccttctccgagcttcgacggctacctcagatccggacttgcccgcttggattcgtcgtgttgcgggccaaatcttccgttcttgagggtcttcttcaaactcgtcatgaaccatttgcaaaatagtctacatggatctgctccggcggtacaacgatgttatttagcacgagaggggaagtccaatccgtgtgggattgctctggcgcaggccattacttggaatcctagaattcaggcatgttttttttttgctcaattcaactgtcatgtgcactgccacataaatattattacttatgcctttaccaacaatgatttcaagcacctgctatgtaatgtttggtttcaacatacaatgtttgatgagtccacaatatttggtgcctaatgttctgtacaaatcaggatttcataatgtttgttggaataaaactgatttccttttcacctgttctcatcgtatgttaccaactattaatagaatagatgtttgatctttcattttgtttgtgactacatcatgacaaccacaaggcatgctgattttgtagacaaatattaccctggtacaatatagatcatgagtatgtgacagttttgtgtgtttcctctttcatgactcatgcttgcattaaaattttatgttcctcgcatcattatgagtcatggtttcattaacaattttatgtccctggctataattgtgtgcttcaattagtaaagatattgattcagtgtgtctatatgctttgtaagggtttgcacttgttactgaaagggaaatgtgcccttgggccatttctagtatattttggtgattaagtgcacaacacatattaaagtgagtaattatgtgccaaataatgaatgaagtgcaaatcaacaagaaggtatgattctagacttagtacattggtttttgtgtactaatttatttgtctaagtgcttgaatcaggaaaagaaagggattggaaagagttggctgtgttcagccagctgctgctcagtctgggtgcaccggacagtgtccggtgcgccaggctggctctagcgaactggccactctcgggaattcgtcggcggcgtacgactataatttaccggactgtccggtgagccaaaggccgtcagcgcaacggtcggccgcgcaatccgcgcgcgacgcgtggccccagccaacggtcggcttggggcaccggactgtccggtgtgcaccggacagtgtccggtgcgccaacggctacaattctacaacggccaaaggtcggcttggggcaccagactgtccggtgtgcaccggactgtccgatgtgcaccggacattgtccggtgcgccaacggctacaattctacaacggtcggctgtgccatttcaggaaggagatccgcaccggacaatgaacaatgaatgtccggtgcgccacccgacagaaggcaagaattgccttccaagaatgcctccaacggctcctagctgtcttggggctataaaagggacccctaggcgcatggaggagatacccaagcatactttgagcattctaagtcttccacacctcgtctccacacacttgattgactttcttagtgatttgagctctgttctagtggtgaacttgttgcaattcatttgagctcaagtcttggctgtgtgtgtgcgtattgctgcagatttgtgtgtgttgcttccctcccttactctaagtgctttcactttgatctttgttgtaagggcgagagactccaagttgtggagattcctcgcaaacgggaaagagtataagaaagaaaactaccgtggtattcaagtggatcatttgatcacttgaaaggggttgagtgcaaccctcgtccattgggacgccacaacgtggagtaggcaagtgttatacttggccgaaccacgggataaatcatcgtgtctcttgtgcttgttttctttgtgactattgtgtttcacaagagctcggttcttagccacttgattctattgtgctaacacttaaacaagttttgtggctataagttttaagtttttacaggatcacctattcacccccctctaggtgctctcaattggtatcagagccgttctcttcacgaaagggactaatcgcccgaagagatggatcctaagggaaaggggatggtggtcaacgacaaggagaaggaatccgtcttcaatgagccaagagacgataagcccactgactctggctcaagtcacaagaagaaggacaggaagaataagaggcgcatcaagaagatagtctactatgacagtgacgaatcttcctcttccaaacgagacgacgaggacgagaaaaagaaaccggttaactcaaacttttcttttgactattctcgtattccgtctaactccaatgctcatttactttcgattccacatgaggattccggtcgttacatgatttacgacgacatatgtgattgtcatcaattatacagtattaacgaccacaattatcgaaataacgatgacatttttcgtcgttaataattgtgtataggctgccatgattcattaacg

SEQ ID NO: 8737 - DNA, 1067 bp, Zea Mays
ttttgcaagtaatcacggatataatacatgtatcatcagcaaaaccgacagtgaggcttcattcacctgaaaaaaaaatatagggcatcgtctaacttgaaggatcccacctagactcacgagttcctctagtggtaatattaaaatgtcactgtagcaacaaagtttgaccgtctagagtgttcataaatataaaccaaatgaaacagctttctgtagcagagactttcttcatgcaggcacatacaggccaggacgcaaaaggccggtttacttactggtttatcaggcttcagcatgccctgaccaaaactcgaggcccggcccacctttatgcagatcgccagcgacagacaaggaaaagcctctcgcatccaccagcgacagtttgcgtgttcttgcacacactgactgacacacagcacagcatcagtaggcacacacgctagcctagccctgcccacaatggatgaattcaatgcaatggttacacacacctagctctggttggacttggacctaacgcaaggcaagactgacccagagaccagacccaatcatgcatgcagttcatggggaatgcagtgcacgcaccgtaccgcaattaagcgaaatggagaagatctgcagcggagcaggcaggcaggggaccctcctgtcctgtgtgtgcagggtgcagctgcactggatcaccgttggtttcgccgccgatgctgctctgctgctgccaccgcctgggccctagctgctacctggagctacctgactagctccaggctctacgtacgctctccggttccggcggcccgactgaccgccggccaggcacggcgtggagggatgcgagcctcgcctcgcctcggatgccctctcgtctcgttcgccgtccgtccagggtcttcagtctttgactgaaagtgaaaccatgtcatgtgcgccaccacatgtccgtcgccgcggcgacgacgacgaacagccgcacgtcaccttatccttaccactgccaaggcaaggatatctggaaatggatgggcgctctgcgcaagtgtgcaagcaccagcacggcg

SEQ ID NO: 8738 - DNA, 1435 bp, Zea Mays
gtcggagaacctcccggctccccgcagtccccctggcctcgcagatccgcggcctgcttcgttgctgccttgccagcaagcagccgcgctcatcctcgcggacgccagcggcggggcagccccctctcctgtgatccactccggcgcccgtggccgcggttgctccccgccaggtctcagggagcgacctaccccaaggtggggagttcgttccttttccagtaacgaggagggcaaactcatattccatcatgatggaagaggacatggaaaatggaaggtcgtatcaagaaagaccaaggactttttcaacagtacgaagcaagtcatctatcccgctggccttacgtttgttgatgaggataaatccccgtgccttgattattctttctcttttggtattcagtggtgtgctatatgtgggagccagtacatcaccaattgtggtctttgtgttctgtatatgtactctcagtctattcttctctctctaccttacaaagtgggttcttgctaaggacgaaggaccaccagaaatgtctgagatatctgatgccataagagatggtgctgaagggttttttaagacacaatatggaactatttctaaaatggcatttattctggcctttgtcatccttggcatttatctctttcgcactactaccccacagcaggaggcgtctggcttgggaagggcaacactagcctatattacagttgcttcttttcttcttggagcattatgttctggaatagctggctttgttggaatgtgggtgtctgtgcgtgcaaatgtacgagtttcaagtgctgctcggcgctctgcaagggaagcattgcagattgctgtccgtgctggtggtttctcagccatcgtagttgtttgcatggctgtatttggcgtggcaatattgtactcaacattttatgtttggcttggagtagattcacctgggtcaatgaaggttactgacttgcctcttctccttgtgggatatggttttggtgcctcttttgttgccctttttgctcagttgggtggtggaatatacaccaaagctgctgatgttggagctgatctggtcggaaaagttgagcagggaatacccgaagatgatcctcgtaacccagctgtcattgctgacttggttggtgacaatgttggagattgtgctgcccgaggcgctgatctttttgagagcatagcagcagaaattatcagtgcaatgatacttggaggaactatggcacaacgctgtaaaattgaagatccctctggctttattttgtttcctcttgtcgtccattcatttgatttggtggtgtcatcagttggaattctctcaatcagaggaacacgtgactctggactcatttctcctatcgaagatcccatggcaattatgcaaaaaggctactctgttactattat

SEQ ID NO: 8739 - DNA, 1217 bp, Zea Mays
agcttccttactcgcttcttctcgaatatatatgttcttgcttgtcgcgggacatgtatatgcatccatctaaactgctcattttgacggtggtggtcaccggcgccgctgcggcgcatgaccacccttccgctagcactccggcggcgcagttctggcagcaggccctcccgggcacgccgatgccggaggccatcgctgacctcgtccagaaagcgcgtgcggcgcatggagcaacctgtgcacgcgcagcgtggcggcggggacgggcatcttcttccacgaggcggaactgcgtccgggcagcgccatggcgctctccttcccggcggaagtggacacacccatcctcccgcacgccgtcgccgccgccgctccattcgcgaacctgacggccgtcttcgccacgttcggcgtcgccgggggctccgccgaggccgagcacgtgcgggacacgctcaggtggtgcgaggcgccgccgcggccggccggcgagcgcgtggccgcctgcgccacgtcgctggaaagcacggtgcggagcgccacgcgcatgctcggcgccgccggcggtgacggtgtgtgggcggcggccacgtcggcgcgcctccgcgctggcctgccgcgcgggcggtacgtggtcggggcggtcgccccgctccacggagaccaactcgtggcctgccaccgcgtgccgttcccgtacgccgtgtaccagtgccacatgacgacgaggaagacggacagggcctacgtggtctcgcttcgcggccgcggggggccggtgctcgacgacgtgctggcgttctgccaccgcgacacctccggctggagcccggaccatccggcgttccggatactgcgcgtccgcctaggcacgccggtgtgccacttcgtaccgtacgggaatccagtcttcggtaggaaggccagcacaacatagtagtacgttatcgacttgtcgttatcaaatatttatcgtcggccagttctttattaactaaaatgtgataaataaaaaagaacaaagtaaacttcgtctatgtctgaagaatactgtgtcttttaaacatttttgcataataagaatcgtccaaattatactcctattacataaccagcatgaggttgcattcatcattaatacattagatgaactcccatatatagctatggagtgaacatgttatgataatattatattaaaatttaaaaaatct

SEQ ID NO: 8740 - DNA, 2784 bp, Zea Mays
ccaaacttctcgtttgcaatttcatcacatcgaactgtagcaaccattaccttgcatggtaaagcaaatggaagtaaatcatgaataaaaggggttgagtattttattttaaaaatttgtaatactcccttcgcaaatatatgacgcaattggctttttccaacactttaatcattcgtcttattaaaaaaacatgagttgtcatttattttgttgtgatttgttttatcactttatgatattctaagactggtggagtagagttgaatgtcaagtgccaaaaattcagagaaaatgttttaatacgatggtaatcctagtagcatggtggctctggaaacatcgaaatacattcatgaggatgcagctctgtggggaatggctggagctagagcccttagaagtctttggtcttaagctgttggccttggaccactaatgggttatagatgagtcttttgatgtttttgtttttctacttctgtaaggaggtttttgtatttggtctcttcccagacccttactcttttcttcttaatatattgataatgcaactctttcgcgaaataaagtcacggggtagagaaggctgcagctcccccgcgtgggcgactcgagcggcaaaaccctagccgctaccgccccactgccccttctctctgtctcacggctgccagaggggttggccggcatgcccgccgggcccccaggatggtggcggcgacgcatccgcccagttggcgtcgcgagcgcccagatccacgcgggagggaactcgtggccggggcgtggtcatggtgttcgtggcggtgccgtgcgctcgcgtgggcgttgcaggtagaggcgcggtggcggtggtgcaacggcccactgacggcgtgcacgtggaagctcaccgtgtcgacgaagttgggggtgaggagtgcgacgccgacccgaagcatcacaggccgggagagcaaccgcctcccacccgccggtcgtcctcggcctcgttcgctaccttcttcgcgctgcacggtcggtggctgcaccgtgctgcccgccggggcgcgagctggcgccgatcggcagatgcagcaacatgtcgttcagctggctctttgagcggccgttgtggccctcttgcgcggagctcctggcggctcggggaggaggtgcagcgaccgtacctgcacggcggtcatctcctcgtggcgggggtgagaccctcgcagtggccgcgagtgccaggccggcgacgactgccggcatcggcttcggcgcgtgatagcatgacgcacacggcaaggtgaaatcgagctccgtgtgccctgctagagggggtggcgaccgacgcagctttgaggctgttgcggtagccgatgcgtcgagccgtcgatgcccctctagaagggtttgtgcgggatcgcagggcagctacgacgacaaagacaacttgctatggcccagcttcttgacctcacgatgtgttgggagacatcttgggcgaaagtctcggcgacggtgatgtccgtggcgcttctcttgtcgagggtgtcacattccccagcatcgttttttttgggcgaaagctcaatccatctcggacaggcgatggaggtgtccccgacgtcattcccttcctaaaggcgtcactattgaaattcgtcttgaccacgacgtcgcatttagttgatgctttcgcttctcgatgcccgatatgcgggtagaggaagggacttgcaacgtgaggtcggagctgctacgttagaggatgtgactcgacaatgatgacatgaagcaaaaccctccctccttcgtggactggtttgctttggaggttgggcatatgtcgggggcggggcgccagatcaagattggaagtcggagctgctccttggtttgagctcaacaatgatggcctgttgtgacctttcgcttcgggccgcctgcctgttttcgtttggatcatctaagatttgccatggtaagtcagagtcgctggctactttacaaccatgcttggcaatgataactcatggcagctttaggtgctcttctgcattgcgttggtgggtttgcccttcgtggtcttgttagttttggttgtaggagttggtttgtggtctggtgcatgaagtcggagctgctaagcctcggtgctaagctcgacaacgatgacttgagccaggctttagaactgctgacgaggtgagtggagtagagcaaaagtgttgtgtggtcatctgttgatgtcccaatccaaccagcccacttttgttgtttctagttggttcgagtgttgtgtggcacatgttgatgttccaatccaaccatacgctgttgtttggtcgttttgcctagtctgggtctcttcttctttttaatataatcggcatctctgcctagttcgttaaaaaaaaaacaaacgattaaccatctgttggttagatgcgtcttaacaaggcacttctggtttatccttctccagcgattggggctagtggctctctccccacagcccgatgaggtctcctctttttacttcttgaatggtggcggcgagcgtccatcttagttcctaacactcttcaaaagggtttgaacaccctaaacacaagaatgagtgtgtcttcaacagaatttcccctcgcctatctacggtgttgagtttggctggtgacgaaatctaaaaccatggtgtagcaagagtcaagggcctatgttcactcgttgcgccaagtgaagaggtcgaatgggaataatgctcaatttgtgttggccgctgttctaatgtttacc

SEQ ID NO: 8741 - DNA, 562 bp, Zea Mays
ctacaagtcgtagtagatagattaccgatagctatgaagtaataagtctcggtacatatcattgacagttgtagccaatgaaccggatagcgtttaaacattagattacggtgttagcatatatataaaaagagctgaatgcggctggggtatttctagcgcacttaattaaacaatgcctacgactttcagtttcaaatgggtagctcctttctatacatatgctgaaaaatggtgccaggtagcaattgtccatctatgcattatcccctccctctccttgcaaaaactaaaggattgcacggcagaagagggtcctgcattatttctgccttgatatcctactgaagcataacgataatcactatacataatgcattgaaataggagacagcagaaggtccatagttcatactccataccttgtacctatagcagtcaaacgcgcgccacgatggctggtgcgtggatcacactatcgagtcggcgacggtggcctcgttctcaggcgccccgactgcccctggtcttggcttctggtcctcgccaacgtgcctagggg

SEQ ID NO: 8742 - DNA, 2612 bp, Zea Mays
cccctccctcccttcctcctttcccacccttctctctctctagccgccgtgctctccttttctatctccacggcaggcttctccctccctccccctcatccccattgcctttgggaggctatatagggcgggactggactggattggattggaaagggagctcccggcgagtttgaacccaccccaccccacttttctcgcctcgtcccctcgcgcttcccgccgccgacgccgcgtctatctggtctaggaccaaatgccgcgagatcttcgcgcgtgacgccgtcccccccgccggagccgccctccgagctccgggccacggagcgcttcgtcccggatctctctggtggctcaggacagtagaaaggaaaggagaaaagcttgttgtgtctgtgtgtgagctgcagaccccgagaggatggatcagtatgaggtgctggagcagattgggaaaggagcatttggttctgcactcttggtgaggcacaaggccgagaagaagaagtatgtgctcaagaagatacggctcgcgcggcagaccgaccgcacacgccggtctgcccaccaggagctcatcgcgacggtccggaatccgttcattgtggagtacaaagattcatgggtggaaaagggttgctacgtttgcattgtcatcggttactgcgagggaggagacatggctgaagctatcaaaaaagtcaatggaaaccatttctcggaggagaaactttgcaagtggcttgtgcaacttctcatggctctcgattatctgcacgcaaatcacattcttcatcgggatgtgaagtgctccaatatatttattgccagagatcaaagcatacgccttggtgactttggtcttgcgaaaatattgacttcggatgatcttgcatcctctgtggtaggaacaccaagctacatgtgcccagaacttcttgccgacataccgtatggtactaaatctgatatttggtctctaggatgttgtatttatgaaatggcagctctcagaccagcatttaaagcctttgacatgcaagccctcattagcaagatcacaaagtcgatagtatcgccgttgcccacgagatattctggttcctttaggggactcatcaagagcatgctacggaaaagcccagaacaccgaccaagcgctgcagaactgctgaagcacccacacctccagccatacgtgctgcaggtccagctgaagtccagcccctctcgcaccacgtccccaatctaccaagctctgacggacaaagtgaagaagatgacgttcgtgagcgacaccgccgattccgcgaggaggagggctgcgagacggagctctctggggagcgagaggaccgtgacgttctgcaagccatcccccgagcgcaactccgtcagctccacgcggagcatcaaggagtacacgacgacgacccagagtgccagggagctctctgtcggcagcagcctgcaggtcgacgacgaggtcacgagtaaggctgttgtgacgaagacggcaggcgttctacggactcccagcaagagccgtgctccggcatctaagacgttggtggcggctagaagccggctggatcctccgaagacgtcctatgccagaacgaaccgtgccgagttggactcaaggacgcctctgagcaagagcagcgcgcggacggcaaggagagcatccctcccgctggcggcgtacagagcacccagcggcggccgcgccggtagcttcctggagcagctggactcgccggacgtgtccgtgaacgcgccgcggatcgacaggatcgcggagttccccctagcctcgtccgaggagcccctggcgcccatgaacaagaagctgtcctgctccacgcctcccttcagcacccggtccatcacgaaggacaagtacacggtgcaggcggtggcgccgcgcgcgggcgacggggacaccgccgcgagcgactcgtcggggcgcaacgccacggctgcgtccagccgtgggtccagcgactcgtcgtcgaggcagcagcagcatcacttgcagcagcggttcgacacgtcgtcgtaccagcagcgcgccgaggcgctggagggcctgctggagttcagcgcgcagctgctgcagcaggagcggtacgaggagcttggcatcctgctgaagccgttcggccccgagatggcttccccccgggagacagccatctggctcaccaagagcttcaaggagacggcgccgtcgtagccgtgggacgagcgggaggaaggggtaggggtaggtaggtagctgccagttttgtaacgtgcgatgtactactagctcaggtagtttaagctaatgttaggacataaaagttctcgtgttgtattagctattctccagtttccagtaggaattcgagcgatcagtggtagcattagagaggacactgcaagctgagcccaggatctggcaaagatcttgaaaccttgatgtatcgaatcatgtgtcacttgcaatgcaatgtgtgtatgtagtacgtactaaacagtctaaactggagggcttggccgctcgggatggatatcgagtagcagcaggcagcaggttggtcgtccactccagttgggagaggtct

SEQ ID NO: 8743 - DNA, 2663 bp, Zea Mays
ctcttcttcagtcagagcagagccatcacggcatcctcgctccctcccctccctcccttcctcctttcccacccttctctctctctagccgccgtgctctccttttctatctccacggcaggcttctccctccctccccctcatccccattgcctttgggaggctatatagggcgggactggactggattggattggaaagggagctcccggcgagtttgaacccaccccaccccacttttctcgcctcgtcccctcgcgcttcccgccgccgacgccgcgtctatctggtctaggaccaaatgccgcgagatcttcgcgcgtgacgccgtcccccccgccggagccgccctccgagctccgggccacggagcgcttcgtcccggatctctctggtggctcaggacagtagaaaggaaaggagaaaagcttgttgtgtctgtgtgtgagctgcagaccccgagaggatggatcagtatgaggtgctggagcagattgggaaaggagcatttggttctgcactcttggtgaggcacaaggccgagaagaagaagtatgtgctcaagaagatacggctcgcgcggcagaccgaccgcacacgccggtctgcccaccaggagatgcagctcatcgcgacggtccggaatccgttcattgtggagtacaaagattcatgggtggaaaagggttgctacgtttgcattgtcatcggttactgcgagggaggagacatggctgaagctatcaaaaaagtcaatggaaaccatttctcggaggagaaactttgcaagtggcttgtgcaacttctcatggctctcgattatctgcacgcaaatcacattcttcatcgggatgtgaagtgctccaatatatttattgccagagatcaaagcatacgccttggtgactttggtcttgcgaaaatattgacttcggatgatcttgcatcctctgtggtaggaacaccaagctacatgtgcccagaacttcttgccgacataccgtatggtactaaatctgatatttggtctctaggatgttgtatttatgaaatggcagctctcagaccagcatttaaagcctttgacatgcaagccctcattagcaagatcacaaagtcgatagtatcgccgttgcccacgagatattctggttcctttaggggactcatcaagagcatgctacggaaaagcccagaacaccgaccaagcgctgcagaactgctgaagcacccacacctccagccatacgtgctgcaggtccagctgaagtccagcccctctcgcaccacgtccccaatctaccaagctctgacggacaaagtgaagaagatgacgttcgtgagcgacaccgccgattccgcgaggaggagggctgcgagacggagctctctggggagcgagaggaccgtgacgttctgcaagccatcccccgagcgcaactccgtcagctccacgcggagcatcaaggagtacacgacgacgacccagagtgccagggagctctctgtcggcagcagcctgcaggtcgacgacgaggtcacgagtaaggctgttgtgacgaagacggcaggcgttctacggactcccagcaagagccgtgctccggcatctaagacgttggtggcggctagaagccggctggatcctccgaagacgtcctatgccagaacgaaccgtgccgagttggactcaaggacgcctctgagcaagagcagcgcgcggacggcaaggagagcatccctcccgctggcggcgtacagagcacccagcggcggccgcgccggtagcttcctggagcagctggactcgccggacgtgtccgtgaacgcgccgcggatcgacaggatcgcggagttccccctagcctcgtccgaggagcccctggcgcccatgaacaagaagctgtcctgctccacgcctcccttcagcacccggtccatcacgaaggacaagtacacggtgcaggcggtggcgccgcgcgcgggcgacggggacaccgccgcgagcgactcgtcggggcgcaacgccacggctgcgtccagccgtgggtccagcgactcgtcgtcgaggcagcagcagcatcacttgcagcagcggttcgacacgtcgtcgtaccagcagcgcgccgaggcgctggagggcctgctggagttcagcgcgcagctgctgcagcaggagcggtacgaggagcttggcatcctgctgaagccgttcggccccgagatggcttccccccgggagacagccatctggctcaccaagagcttcaaggagacggcgccgtcgtagccgtgggacgagcgggaggaaggggtaggggtaggtaggtagctgccagttttgtaacgtgcgatgtactactagctcaggtagtttaagctaatgttaggacataaaagttctcgtgttgtattagctattctccagtttccagtaggaattcgagcgatcagtggtagcattagagaggacactgcaagctgagcccaggatctggcaaagatcttgaaaccttgatgtatcgaatcatgtgtcacttgcaatgcaatgtgtgtatgtagtacgtactaaacagtctaaactggagggcttggccgctcgggatggatatcgagtagcagcaggcagcaggttggtcgtccactccagttgggagaggtct

SEQ ID NO: 8744 - DNA, 782 bp, Zea Mays
cttcattttgcaacttgaaaaggcatttgagtcccccaacactcatgctgagtgcttcacatatctgcggcaatacgcggagaattgttctgcgaaggctgcttgtatggtggcacctaagagcatcatctcctacccacaggtctggaaagggcaagggtcgaggaagtggaagcttgaccagagcgacgggttcttcgtgcaattcgaggcaccggcgctgaggaagatatggtttgtgccaagcacaaaagagaagggacggacattgtgcaggagccctgaggccttggacatcggcatccatgaagtgctcccccgtatattcaaggaggcagcttaagcccaataatggaggactgtccatggattcctgatcctgcacagcgcttgctggatgttctccctgggacctgggaggaggaaagagctcgcccgacatacatttgtgtaaccagtggaatcggctacgctggcagacgcagactcggaagatttgatgctgtcactgtgctatgcaatgagcgtgttgtgtttcgagtggcaccgtctcgtggttagtgcgggtgttttgtttccattttcttttgattatctacctatttaccgaatgatccctgtcaagagctatgctcctttttttttcttcttcaccggaaggacaagatcgctgttggtgcccctgtgggagtggcaagcacacgggaggaagggtgggtgtgatgtaaagcgggatgaacagctatatacctaggtggattgggtgagacagaacagcaacc

SEQ ID NO: 8745 - DNA, 1463 bp, Zea Mays
atcttgcatccagattccagagaacaggagaaagaaaagttgcgaaaaaagaacaacaaaaaaggaaacgaaaacgagcgggggagctcgcggaccccaaaaccctaaccccgcggacccacctggcggcggcggcggcggcgatggcggacggcggaggagaaggaggacctcctgcggcgtcggcggcgctcaaggaccaggggaatgagcagttcaaggcggggagctacctcaaggctgccgcgctctacacgcaggccatcaagctcgaccccgacaacgccaccctctacagcaaccgagctgcagcattcctgcagttggttaagcttagcaaagcgcttgctgatgcagagacaacagtcaggctgaagccacaatgggagaagggtcatttcaggaaaggttgtgttttggaggcaatggagcgctatgaagaggcgatagctgcatttcagatagctttgcagcacaattcacaaaatacagaagtctcgagaaaaatcaagaggctatctcagttggccagggaaaagaagcgagcccttgatgtagagaacatgcgttcaaatgttgacattgcaaagaacttagaatcactgaagactgagttggaaaagtagatccaagggtccattttcttctcgatgatcagaagaccgatactgaaaaatatgccccagtagttaacattgacaaggcatttgagtcccccaacactcatgctgagtgcttcacatatctgcggcaatacgcggagaattgttctgcgaaggctgcttgtatggtggcacctaagagcatcatctcctacccacaggtctggaaagggcaagggtcgaggaagtggaagcttgaccagagcgacgggttcttcgtgcaattcgaggcaccggcgctgaggaagatatggtttgtgccaagcacaaaagagaagggacggacattgtgcaggagccctgaggccttggacatcggcatccatgaagtgctcccccgtatattcaaggaggcagcttaagcccaataatggaggactgtccatggattcctgatcctgcacagcgcttgctggatgttctccctgggacctgggaggaggaaagagctcgcccgacatacatttgtgtaaccagtggaatcggctacgctggcagacgcagactcggaagatttgatgctgtcactgtgctatgcaatgagcgtgttgtgtttcgagtggcaccgtctcgtggttagtgcgggtgttttgtttccattttcttttgattatctacctatttaccgaatgatccctgtcaagagctatgctcctttttttttcttcttcaccggaaggacaagatcgctgttggtgcccctgtgggagtggcaagcacacgggaggaagggtgggtgtgatgtaaagcgggatgaacagctatatacctaggtggattgggtgagacagaacagcaacc

SEQ ID NO: 8746 - DNA, 717 bp, Zea Mays
cacattgtactgtactaacagctatttcagaggaccttgaatcatttgggaaatttaatgcagattggacactcagcatatgttgattctccactcgggccagatgcgtttcgggaatatgaaaccttacttattcaggaccatgatgagcttcttaagaaatctgagaatttagacagacataaagaaaacattcataaagaggcgagtgattttacctctgacgttgataattattctaagtggggttctggggtgcattatggctctaattctgagtctagcccaacgaaaagggattttttgatgacgaaatgggccagggtttttgttttgccctctgaaggcataattgctgactcaagcctgtcgaatcatcatgaggattcccttggctctggtttaccctccatatctactggtaaaccttttgatagtgacgaggtaccaccaggagtgacattgactgcccagtttctgtaccatttggccaataagatggacctaaagcttgatatattttcacttggtgatacatcaaagccagcaaatggtgaagcagcaagccccaagaagcagagcccatctggctcacgctctcctgatttgttaatggcaaacacagctgaactgacaacaatcggtcaaaatttgcaggcgaagcctgaataaaattgctatgctgttaaaggattccagatggagtcaggagctctt

SEQ ID NO: 8747 - DNA, 5393 bp, Zea Mays
gacgagttcgtgcttcctttttttttttggtagtttctgttctggaccccatttcgcccccacagatttcgcccggtgaaccccactatgttgtaggaaaatgccttgatttctgctttccttcccttgcgtccatattcgtatcgtcctcgttggcagcagcagatggcgcccctgccttagtaggatttagaactcgttcgtcctttcttcttattattattatcatcctcattggagcccgtctccagtctccaccaagcagcatccagttcatgaaatgctgcccgtgttcatgatttcctccagcacttactgcaggtagtaggttggtgccagactcttgaacagattcaactctagttgcttgggtctactgcatcagctttgaagccacagaagttttctcaagagcccaggagtgctgttctgctctcttagctggcctcaatggccatgtcgccatccaatccaatgcgcaagtactcatggtggtgggatagtcacatatcccccaagaactccaaatggctccaggagaatctcaccgatatggatagcaaaatcaaagtgatgatcaagattattgatgaggatgctgactcgtttgccagaagagcagaaatgtattacaaaaggcgcccagagctgatgtctttgcttgaggagttgtaccgtgcttatcgagctttagctgaaagatacgatcatgcagctggagaactccgacaggcccataaaaagatggcagaagcatttcctgatgagtttcagttggactttgatgatgacttgcctacagaaactgtaactactgaaactgaagcagacaatcgtgatatgactccatttttcctttcattcatcaaggctggtgattcgaaaaaacgtgctaaagaggatcaagaccatgagaagctgcaaaaagagatatcgagtttgtcacaggaaaatcaagaactcaagaagaaaattacatcagtgttagaaaaaggcaatatggctgaatttgaagttctttctctcaaggaggcccttgcagaacaagaagcggagaaggaagctgcattttcacaatgccagcaatccagtgatcgattacagagcctcaagtctgaaatattgcatacccaggaggagttcaataaactgaaagaggagatgcaaaatggactgcagaatttgagcactgcagaggagaggtgccttctgcttgagacagctaaccagaatttgcttctcgagctagataagctgaagcttgcctcaaaagaaaagcatgacgagctaaatgaaaaacacattgaattggagaagcttagcatctctatacaagaagagcaactcaagagcatgcaagcagaaatggcccggctatctgtggagaagcaattgacacaagcacaggagaagctaagacttatgtctcttgaaaagcatggggaaacaagtaagattgagaacattgaatcaaccagagttcaacttcaaaaggaattagacagtattcgagaagagaaccggaaactggatgatcaaaaccactcctctacctctgtgataatccgtcttcaagatgagataatttctttgaagaatgcacagcggcgtcttgaagaggaggtatctcggcatgtggaggataaaaaggtgcttcagcatgagctttcacacctcaaagatagcaagggtgacatggacaggaagcacttttcgatcaaggagcaaatacaagaggtgaatttcaatgtagaatcactccaatcacttgctcaagaggtgagggatggaaatgttgagctaaaagagaccataaaaaatcatgatggtgtaaaagccttgtacgttgataatctgatgttgctggagagaacgctggagaaaaatgctcatttggagagatcactttcagctgccactaatgaaattgaaggattgcaggagaagaagtctgcattggaagaatcatgtaaacaccttcattccaaggttaatggccatcagtctgagagggccatgtttgttgcacggattgagggtatttctcataccgtagagaagctatcagaaaagaatgtcttcttggaaaatttgttatctgataagaatactgagctggagttgcttagaaggaagctgaaagattcagaggaatctactcatgcattccgcaaccaaaattctgtacttcgatctgaaaaaagaactcttatgcgtgaggtggatagcatcaatagtgctctactcagtttggaaacccaatatgcagagttagaagggcgatatttggatcttgagcaagacaaagacaaggccctcaatgaagtgatcaaactacgagacctgttgaggctagaaaaagaaaaacacaaagaagccaccaactcagacatgactaaattcagtgctatacagaagcagataggccttctgctaaaagaagttcaccgcagggaggaccagcttcaagaggaggagcacaggattgttgaagctcagactgaaatttttatcttacagaggtgcttaggtgacatggctgaagcaaatgctgatgtcttggcacaattgcagaagcaacaagtggtatgcaaggatcaagaggagaaagttgatttcttgtcacagaacaaccagcagctgactgaagggataggttctgtagtggaagtactgaatctggatgagaaatacgaatcattggatctgatgaagattgatgttgttgtgcagctcctcttgcatgagatcaagtgcctactgaatactatttctgatgctcaggatgtgaagcagaaccagatccttgagaagtcccttgttgtcacgcttcttgagcactttgggcgagaggtggctgacctgaggtcggaaaggagtgttctgaagcaagagtggcaagcaaagagtgaggagctgcagcagctgcagagtgaaaagcatgacctcctaaagataagctgtgagctacggaaggaaatggaggctcgtaaccgcaaagtggatgaactgaaatctgaggcaaagttcttggttcgacaactgtcggaattgcaagagtcacggcagtcgttgcaagcagagattgtcaagctgattgcagagaactcttcactctctagcaaagtttacagatccagagagaaagagacgtcatttgatgaggatttcagcacacttgttgatgaagcgatcaggacagatattcttggtgtcatttttagaagcctttatgaagagaggacatcacaattgcagcgtttgcatgaggattttgggtctctacatgcagcaggcaatgagctgtatcaggaaatcaagctgatgaacaagaagctcggagacctacagcttgagaacaactatcttgagaaggaactcagtagaactctaagcatctgtgatggctctggtacagaaatttcctccggaagaaggcgtgctatgaggagggacacgaagctattaaaatctggcaggaaaagccaagagggtggccagaacatggaacaacgaaaagaagttgacaatgctggcctcgagaaatcgaacgaaatgcttagagtggagctccagaagttgaaaaatgaactgcaggtccttaaaagcaaggaacagcctgtgattgacgtgaaatcttgtgacgcagagatcactaaactgctggccagcatgcaattggccacagcgaatgcgtctctcttcaaggagaaggtgcttgagctcatcgtgacatgcgagagttttgagatcagtgacatggtgcagaaagaggtgctgaaagaggagatcactcggaggaactcttacgtggatgagctcaaggacaagcttaatgccattgagattgagaacagaaggctgaaggttgatctgaacggcgacttcacactgctcggagcattgcaaactgaagttgatgccctggagaaacaaaccttgtctctagccaaggattgcctaccaccaagcatgctcaagaaggaggagaatccactatcacctcagctgtcaaagattgctgtgaggccaagtgaagatcagaacaccacaaaggtggtgaaggacatggagctgcagaaactccacgggaccatcaaagcacttcagaaagtggtgtcagataccggggtggtcctggagcaagagcggcttgacttcaacagcaacctccaggacgcgaggaagcagatcgagatgctgaagctgaaggagatcctggacagcgacgccagcgacgtgaactacgagcggatgatgaaagacatccagctggacctcgtccatacgcctagccggcgagccgccgcatcctcacacgggcgccacaggaagaagaactcagtagccgcgacggcgcagtctgacgacaacaagatgctcgcgctgtggagcgtggacagggtgagcagcggcagccggcggcacgacatggacctgcggccgccgcagagcgaggctgccgagaccgagaagggaaagaagcggccatcctccgagccagtgccagttgtgaccgtgaaggacctcagcgtggacaagcaggaggtcctctcacggcccacggtgatggcagtggcggcgacggccaccacgacggagccacaccgggagtggaagaagaaggtgatcgaccggctatcctcggaggcgcagcggctccgtgacctccggaccatcgtccaggagctgcgcgccggcgtggaggcgtcgtcggacgcggagctggacggcgtcaaggcgcagatggccggcgcggagggcgccatcgcggagctggtcgacgcgaacgctaagctcctgaagaaggcggaggagttcacgtcggcgggcgacggcggcggcgacgtggacctgcgcagccggagccagcgcaagatcctggagcgcgtgcgcaagatgtcggacaaggccgggcggctggagctggagctgcagcggttccagcacgcgctgctgcggcacgaggaggagcgcgcggcgcggcgcgcggccaaggcggcggcggcgagcaccaccgtgcaggtgcagcggcggtcgcgggtgcagcttgtggagtacctgtacgggcggcggcgcgacagccggcggcccaagcagaaggcccgcggcccgtcctgctgcatgagggccaaggccatcgacgactgacgtgacgtggcgtcctaggtaaataatttaattactggactgatcttagttacgtcggaggttctttttcctaccctaaagtaaagtaaggtcttaagatgtaaatcgtacgtaggcaactcttgtgttcctcgtctgcaaatttttcgcatgtaaaattccagacggtaatcttcggtctcgttgctttccagttcttagaaaaaaatatttacaagttgatgtcagtcgataaaatgcgg

SEQ ID NO: 8748 - DNA, 5078 bp, Zea Mays
ctgcatgtagtaggttggtgccagactcttgaacagattcaactctagttgcttgggtctactgcatcagctttgaagccacagaagttttctcaagagcccaggagtgctgttctgctctcttagctggcctcaatggccatgtcgccatccaatccaatgcgcaagtactcatggtggtgggatagtcacatatcccccaagaactccaaatggctccaggagaatctcaccgatatggatagcaaaatcaaagtgatgatcaagattattgatgaggatgctgactcgtttgccagaagagcagaaatgtattacaaaaggcgcccagagctgatgtctttgcttgaggagttgtaccgtgcttatcgagctttagctgaaagatacgatcatgcagctggagaactccgacaggcccataaaaagatggcagaagcatttcctgatgagtttcagttggactttgatgatgacttgcctacagaaactgtaactactgaaactgaagcagacaatcgtgatatgactccatttttcctttcattcatcaaggctggtgattcgaaaaaacgtgctaaagaggatcaagaccatgagaagctgcaaaaagagatatcgagtttgtcacaggaaaatcaagaactcaagaagaaaattacatcagtgttagaaaaaggcaatatggctgaatttgaagttctttctctcaaggaggcccttgcagaacaagaagcggagaaggaagctgcattttcacaatgccagcaatccagtgatcgattacagagcctcaagtctgaaatattgcatacccaggaggagttcaataaactgaaagaggagatgcaaaatggactgcagaatttgagcactgcagaggagaggtgccttctgcttgagacagctaaccagaatttgcttctcgagctagataagctgaagcttgcctcaaaagaaaagcatgacgagctaaatgaaaaacacattgaattggagaagcttagcatctctatacaagaagagcaactcaagagcatgcaagcagaaatggcccggctatctgtggagaagcaattgacacaagcacaggagaagctaagacttatgtctcttgaaaagcatggggaaacaagtaagattgagaacattgaatcaaccagagttcaacttcaaaaggaattagacagtattcgagaagagaaccggaaactggatgatcaaaaccactcctctacctctgtgataatccgtcttcaagatgagataatttctttgaagaatgcacagcggcgtcttgaagaggaggtatctcggcatgtggaggataaaaaggtgcttcagcatgagctttcacacctcaaagatagcaagggtgacatggacaggaagcacttttcgatcaaggagcaaatacaagaggtgaatttcaatgtagaatcactccaatcacttgctcaagaggtgagggatggaaatgttgagctaaaagagaccataaaaaatcatgatggtgtaaaagccttgtacgttgataatctgatgttgctggagagaacgctggagaaaaatgctcatttggagagatcactttcagctgccactaatgaaattgaaggattgcaggagaagaagtctgcattggaagaatcatgtaaacaccttcattccaaggttaatggccatcagtctgagagggccatgtttgttgcacggattgagggtatttctcataccgtagagaagctatcagaaaagaatgtcttcttggaaaatttgttatctgataagaatactgagctggagttgcttagaaggaagctgaaagattcagaggaatctactcatgcattccgcaaccaaaattctgtacttcgatctgaaaaaagaactcttatgcgtgaggtggatagcatcaatagtgctctactcagtttggaaacccaatatgcagagttagaagggcgatatttggatcttgagcaagacaaagacaaggccctcaatgaagtgatcaaactacgagacctgttgaggctagaaaaagaaaaacacaaagaagccaccaactcagacatgactaaattcagtgctatacagaagcagataggccttctgctaaaagaagttcaccgcagggaggaccagcttcaagaggaggagcacaggattgttgaagctcagactgaaatttttatcttacagaggtgcttaggtgacatggctgaagcaaatgctgatgtcttggcacaattgcagaagcaacaagtggtatgcaaggatcaagaggagaaagttgatttcttgtcacagaacaaccagcagctgactgaagggataggttctgtagtggaagtactgaatctggatgagaaatacgaatcattggatctgatgaagattgatgttgttgtgcagctcctcttgcatgagatcaagtgcctactgaatactatttctgatgctcaggatgtgaagcagaaccagatccttgagaagtcccttgttgtcacgcttcttgagcactttgggcgagaggtggctgacctgaggtcggaaaggagtgttctgaagcaagagtggcaagcaaagagtgaggagctgcagcagctgcagagtgaaaagcatgacctcctaaagataagctgtgagctacggaaggaaatggaggctcgtaaccgcaaagtggatgaactgaaatctgaggcaaagttcttggttcgacaactgtcggaattgcaagagtcacggcagtcgttgcaagcagagattgtcaagctgattgcagagaactcttcactctctagcaaagtttacagatccagagagaaagagacgtcatttgatgaggatttcagcacacttgttgatgaagcgatcaggacagatattcttggtgtcatttttagaagcctttatgaagagaggacatcacaattgcagcgtttgcatgaggattttgggtctctacatgcagcaggcaatgagctgtatcaggaaatcaagctgatgaacaagaagctcggagacctacagcttgagaacaactatcttgagaaggaactcagtagaactctaagcatctgtgatggctctggtacagaaatttcctccggaagaaggcgtgctatgaggagggacacgaagctattaaaatctggcaggaaaagccaagagggtggccagaacatggaacaacgaaaagaagttgacaatgctggcctcgagaaatcgaacgaaatgcttagagtggagctccagaagttgaaaaatgaactgcaggtccttaaaagcaaggaacagcctgtgattgacgtgaaatcttgtgacgcagagatcactaaactgctggccagcatgcaattggccacagcgaatgcgtctctcttcaaggagaaggtgcttgagctcatcgtgacatgcgagagttttgagatcagtgacatggtgcagaaagaggtgctgaaagaggagatcactcggaggaactcttacgtggatgagctcaaggacaagcttaatgccattgagattgagaacagaaggctgaaggttgatctgaacggcgacttcacactgctcggagcattgcaaactgaagttgatgccctggagaaacaaaccttgtctctagccaaggattgcctaccaccaagcatgctcaagaaggaggagaatccactatcacctcagctgtcaaagattgctgtgaggccaagtgaagatcagaacaccacaaaggtggtgaaggacatggagctgcagaaactccacgggaccatcaaagcacttcagaaagtggtgtcagataccggggtggtcctggagcaagagcggcttgacttcaacagcaacctccaggacgcgaggaagcagatcgagatgctgaagctgaaggagatcctggacagcgacgccagcgacgtgaactacgagcggatgatgaaagacatccagctggacctcgtccatacgcctagccggcgagccgccgcatcctcacacgggcgccacaggaagaagaactcagtagccgcgacggcgcagtctgacgacaacaagatgctcgcgctgtggagcgtggacagggtgagcagcggcagccggcggcacgacatggacctgcggccgccgcagagcgaggctgccgagaccgagaagggaaagaagcggccatcctccgagccagtgccagttgtgaccgtgaaggacctcagcgtggacaagcaggaggtcctctcacggcccacggtgatggcagtggcggcgacggccaccacgacggagccacaccgggagtggaagaagaaggtgatcgaccggctatcctcggaggcgcagcggctccgtgacctccggaccatcgtccaggagctgcgcgccggcgtggaggcgtcgtcggacgcggagctggacggcgtcaaggcgcagatggccggcgcggagggcgccatcgcggagctggtcgacgcgaacgctaagctcctgaagaaggcggaggagttcacgtcggcgggcgacggcggcggcgacgtggacctgcgcagccggagccagcgcaagatcctggagcgcgtgcgcaagatgtcggacaaggccgggcggctggagctggagctgcagcggttccagcacgcgctgctgcggcacgaggaggagcgcgcggcgcggcgcgcggccaaggcggcggcggcgagcaccaccgtgcaggtgcagcggcggtcgcgggtgcagcttgtggagtacctgtacgggcggcggcgcgacagccggcggcccaagcagaaggcccgcggcccgtcctgctgcatgagggccaaggccatcgacgactgacgtgacgtggcgtcctaggtaaataatttaattactggactgatcttagttacgtcggaggttctttttcctaccctaaagtaaagtaaggtcttaagatgtaaatcgtacgtaggcaactcttgtgttcctcgtctgcaaatttttcgcatgtaaaattccagacggtaatcttcggtctcgttgctttccagttcttagaaaaaaatatttacaagttgatgtcagtcgataaaatgcgg

SEQ ID NO: 8749 - DNA, 3016 bp, Zea Mays
cccgtccccacgagattagacaagttctggtgtatgcattgttcggaaatggagggtttggactttggaccttctgccctccaatgctagtgcttagatcggcaaatcacagcattgtctgataggtttggtggtcttctgtccatgggaaatgcgagttcttcagagcctgaggattctcctgtcttcaatttcatcaacaatctctcgcctataccaccacctaaacctttagactcagcacataatgtgcagctattcaagtcatcagacttggcacctgtttcttcgatctttgcctcaccacatgttaatccagtgaaggaaactaaagttttgatcagggatgaatctgttcaccttcctcaagaattgcactcgcctagcagtgtcaggactcgaatagacacctcaggctcttttagaatgatcagatgcaaagacattgtgtcggacaattgcaatatcacttgtcaactaaacgaggcatctattgattcttctgatcatacatcaaactctacaggccaattgactcaatccatacaggatgctgctggcagtatggaaagcgataaggatcaatgcgatgccaataaaacagaccttaccatatcccaggagtgcacaggcctagaaggtatgaaccttgatgagagtggcccagacaaaatggattcgtcacattctgggattgttgttcatgaaaaccagctatctgaacaaaacaatgacgaacctgcagcatataatgagggttacattattacacaccaatcaactagtgatatgctcactttagccataccatctggaacagaaacacaaccagtgaatgatacacaaatggctgataacccctactcttgtgaatccttgttggatgatcagtcaagtggatattgcacccagaattctgtgcatgaaccccatttgtactggactggggcagttgaagggtctgcagtatcctatactccccaaacactccctggtgctttgcaaagtcagctgatgccatgtaacaagctcagtgaaccaaaagattacgtgcctactgagcaaaatgccttgtcacagcacttacgtggcatgcgtaggcgcagccttttcaatgaaaaggctggaattagtaataaaggtgtagacaaaacttcggatcatcatcctgtaaattcaactacccccaaatgcaaaactatttctggtgacaactcaaagcctctaagaacccctccatgcgcattacctggtattggcttgcacttgaatgcccttgctacaatacctaaagagaaaatagtccctcgagagattcagtctactataaatgaatcaagtaacttgataggccctgctggatcttctccagcaccttttgagcaaaacattataaatgatgatttcactcaaacaactgatgttgcaactgccgaagcttctagtcagggtagtcccaagaagaaaaggcataagtttgacaatggtgatggcacttcatgcaagcgttgtagttgtaagaagtcaaaatgcctgaaactttactgtgagtgttttgctgctggagtctattgttctgagccttgttcgtgtatcggctgtcagaacaaccagagtcatatggaaacagttctgtctacacggcaacagattgaatctcgcaatccattagcatttgctcctaaagtcattcatacatctgagcctggtatggacttaggggacttttccaataaaactcctgcttcagctcgtcacaaaaggggatgcaattgcaagaagtcgtcgtgtctaaaaaaatactgtgaatgttttcagggcggcgtgggatgctccgtaagttgcagatgcgagggctgtaagaatgcttttggaaaacgggagggggcttctgtgttaggcataggggaacctaaacagggattggaagaaaagtatgtttgtgtgaaagaagaaaaaagtgaaatcgataaacagcttgttgtctaccagactactgacgctgctcctgctgaaaatgtactgaccacaccttccatggtggagtgcagacccttggcttgtcttccacccgcaagctccaagaaaagctccaaaaaaccacggtcttcaacaaagctcacaggacatccttctcggccgtgcaacttacaagctcctccaaagaccgacgttgtgctctccccattcgaaaactacgcggaaatggtcctcggtgatagcacatcagatatcctgaagggaaattcatctcctcatacttctgttaaagttgtgtcaccgaataagaagcgaatctctcccccacggatgggtatcgggctatctccaatctgtaggagtggcaggaagctgattctcaagtccatcccttctttcccttcccttggtggtgatgtaaacaacgaggatccgaaggccaagctcccagcgccttgaatttatcatgttttgtgtcactcgtggcccttcccgttggttctcgaaatcgcccacgcgctgactgcaccagactgtttctaccaccataccatcagatagtggatggacaaccaagcgtgcaccgtttcatcatttgtgtaattgtgtttgcttcgattaataattattcacgtactgctataataacccactgtgatggcagaattctacctacctcccagaaccaccagtggcatttggtttgctggtaagttatgtctcggctcaaggacgttgctgtgttgcctgtgcctgtatgtctgtataatttatgttcattatccgggatcaagatgtggaacctctatgtacctgatggcagaactgttaagacatattttattttatttttatctgaggttaaactgtgagacttatttgtgtaaggtcatactgttttttacattttttccaggaacgtgcctgagcatgtctttcattaagaggggggaaaaagtttcagaacaggttttgaatggcagagaacttggacgagcctctcagccttgccacttgtcaggtcagcagcaacgag

SEQ ID NO: 8750 - DNA, 2869 bp, Zea Mays
gtccatctcaccgtctccttgaaacgcacccgagccaggtcgagccgtcgagtcgagtcgtcgacgacagcacgcggcgggcggaaggggacgcagacacgcagttgcaggctcgcagcagcaagaaggaggcggcgtggaaggggaggcagatgcgggaggcccaccgcagggtcgtcgcaccagatggacacgccggataggccccgcgccgccgccgccgccgggttcgaggattctcctgtcttcaatttcatcaacaatctctcgcctataccaccacctaaacctttagactcagcacataatgtgcagctattcaagtcatcagacttggcacctgtttcttcgatctttgcctcaccacatgttaatccagtgaaggaaactaaagttttgatcagggatgaatctgttcaccttcctcaagaattgcactcgcctagcagtgtcaggactcgaatagacacctcaggctcttttagaatgatcagatgcaaagacattgtgtcggacaattgcaatatcacttgtcaactaaacgaggcatctattgattcttctgatcatacatcaaactctacaggccaattgactcaatccatacaggatgctgctggcagtatggaaagcgataaggatcaatgcgatgccaataaaacagaccttaccatatcccaggagtgcacaggcctagaaggtatgaaccttgatgagagtggcccagacaaaatggattcgtcacattctgggattgttgttcatgaaaaccagctatctgaacaaaacaatgacgaacctgcagcatataatgagggttacattattacacaccaatcaactagtgatatgctcactttagccataccatctggaacagaaacacaaccagtgaatgatacacaaatggctgataacccctactcttgtgaatccttgttggatgatcagtcaagtggatattgcacccagaattctgtgcatgaaccccatttgtactggactggggcagttgaagggtctgcagtatcctatactccccaaacactccctggtgctttgcaaagtcagctgatgccatgtaacaagctcagtgaaccaaaagattacgtgcctactgagcaaaatgccttgtcacagcacttacgtggcatgcgtaggcgcagccttttcaatgaaaaggctggaattagtaataaaggtgtagacaaaacttcggatcatcatcctgtaaattcaactacccccaaatgcaaaactatttctggtgacaactcaaagcctctaagaacccctccatgcgcattacctggtattggcttgcacttgaatgcccttgctacaatacctaaagagaaaatagtccctcgagagattcagtctactataaatgaatcaagtaacttgataggccctgctggatcttctccagcaccttttgagcaaaacattataaatgatgatttcactcaaacaactgatgttgcaactgccgaagcttctagtcagggtagtcccaagaagaaaaggcataagtttgacaatggtgatggcacttcatgcaagcgttgtagttgtaagaagtcaaaatgcctgaaactttactgtgagtgttttgctgctggagtctattgttctgagccttgttcgtgtatcggctgtcagaacaaccagagtcatatggaaacagttctgtctacacggcaacagattgaatctcgcaatccattagcatttgctcctaaagtcattcatacatctgagcctggtatggacttaggggacttttccaataaaactcctgcttcagctcgtcacaaaaggggatgcaattgcaagaagtcgtcgtgtctaaaaaaatactgtgaatgttttcagggcggcgtgggatgctccgtaagttgcagatgcgagggctgtaagaatgcttttggaaaacgggagggggcttctgtgttaggcataggggaacctaaacagggattggaagaaaagtatgtttgtgtgaaagaagaaaaaagtgaaatcgataaacagcttgttgtctaccagactactgacgctgctcctgctgaaaatgtactgaccacaccttccatggtggagtgcagacccttggcttgtcttccacccgcaagctccaagaaaagctccaaaaaaccacggtcttcaacaaagctcacaggacatccttctcggccgtgcaacttacaagctcctccaaagaccgacgttgtgctctccccattcgaaaactacgcggaaatggtcctcggtgatagcacatcagatatcctgaagggaaattcatctcctcatacttctgttaaagttgtgtcaccgaataagaagcgaatctctcccccacggatgggtatcgggctatctccaatctgtaggagtggcaggaagctgattctcaagtccatcccttctttcccttcccttggtggtgatgtaaacaacgaggatccgaaggccaagctcccagcgccttgaatttatcatgttttgtgtcactcgtggcccttcccgttggttctcgaaatcgcccacgcgctgactgcaccagactgtttctaccaccataccatcagatagtggatggacaaccaagcgtgcaccgtttcatcatttgtgtaattgtgtttgcttcgattaataattattcacgtactgctataataacccactgtgatggcagaattctacctacctcccagaaccaccagtggcatttggtttgctggaacgtgcctgagcatgtctttcattaagaggggggaaaaagtttcagaacaggttttgaatggcagagaacttggacgagcctctcagccttgccacttgtcaggtcagcagcaacgag

SEQ ID NO: 8751 - DNA, 2966 bp, Zea Mays
gtccatctcaccgtctccttgaaacgcacccgagccaggtcgagccgtcgagtcgagtcgtcgacgacagcacgcggcgggcggaaggggacgcagacacgcagttgcaggctcgcagcagcaagattctcctgtcttcaatttcatcaacaatctctcgcctataccaccacctaaacctttagactcagcacataatgtgcagctattcaagtcatcagacttggcacctgtttcttcgatctttgcctcaccacatgttaatccagtgaaggaaactaaagttttgatcagggatgaatctgttcaccttcctcaagaattgcactcgcctagcagtgtcaggactcgaatagacacctcaggctcttttagaatgatcagatgcaaagacattgtgtcggacaattgcaatatcacttgtcaactaaacgaggcatctattgattcttctgatcatacatcaaactctacaggccaattgactcaatccatacaggatgctgctggcagtatggaaagcgataaggatcaatgcgatgccaataaaacagaccttaccatatcccaggagtgcacaggcctagaaggtatgaaccttgatgagagtggcccagacaaaatggattcgtcacattctgggattgttgttcatgaaaaccagctatctgaacaaaacaatgacgaacctgcagcatataatgagggttacattattacacaccaatcaactagtgatatgctcactttagccataccatctggaacagaaacacaaccagtgaatgatacacaaatggctgataacccctactcttgtgaatccttgttggatgatcagtcaagtggatattgcacccagaattctgtgcatgaaccccatttgtactggactggggcagttgaagggtctgcagtatcctatactccccaaacactccctggtgctttgcaaagtcagctgatgccatgtaacaagctcagtgaaccaaaagattacgtgcctactgagcaaaatgccttgtcacagcacttacgtggcatgcgtaggcgcagccttttcaatgaaaaggctggaattagtaataaaggtgtagacaaaacttcggatcatcatcctgtaaattcaactacccccaaatgcaaaactatttctggtgacaactcaaagcctctaagaacccctccatgcgcattacctggtattggcttgcacttgaatgcccttgctacaatacctaaagagaaaatagtccctcgagagattcagtctactataaatgaatcaagtaacttgataggccctgctggatcttctccagcaccttttgagcaaaacattataaatgatgatttcactcaaacaactgatgttgcaactgccgaagcttctagtcagggtagtcccaagaagaaaaggcataagtttgacaatggtgatggcacttcatgcaagcgttgtagttgtaagaagtcaaaatgcctgaaactttactgtgagtgttttgctgctggagtctattgttctgagccttgttcgtgtatcggctgtcagaacaaccagagtcatatggaaacagttctgtctacacggcaacagattgaatctcgcaatccattagcatttgctcctaaagtcattcatacatctgagcctggtatggacttaggggacttttccaataaaactcctgcttcagctcgtcacaaaaggggatgcaattgcaagaagtcgtcgtgtctaaaaaaatactgtgaatgttttcagggcggcgtgggatgctccgtaagttgcagatgcgagggctgtaagaatgcttttggaaaacgggagggggcttctgtgttaggcataggggaacctaaacagggattggaagaaaagtatgtttgtgtgaaagaagaaaaaagtgaaatcgataaacagcttgttgtctaccagactactgacgctgctcctgctgaaaatgtactgaccacaccttccatggtggagtgcagacccttggcttgtcttccacccgcaagctccaagaaaagctccaaaaaaccacggtcttcaacaaagctcacaggacatccttctcggccgtgcaacttacaagctcctccaaagaccgacgttgtgctctccccattcgaaaactacgcggaaatggtcctcggtgatagcacatcagatatcctgaagggaaattcatctcctcatacttctgttaaagttgtgtcaccgaataagaagcgaatctctcccccacggatgggtatcgggctatctccaatctgtaggagtggcaggaagctgattctcaagtccatcccttctttcccttcccttggtggtgatgtaaacaacgaggatccgaaggccaagctcccagcgccttgaatttatcatgttttgtgtcactcgtggcccttcccgttggttctcgaaatcgcccacgcgctgactgcaccagactgtttctaccaccataccatcagatagtggatggacaaccaagcgtgcaccgtttcatcatttgtgtaattgtgtttgcttcgattaataattattcacgtactgctataataacccactgtgatggcagaattctacctacctcccagaaccaccagtggcatttggtttgctggtaagttatgtctcggctcaaggacgttgctgtgttgcctgtgcctgtatgtctgtataatttatgttcattatccgggatcaagatgtggaacctctatgtacctgatggcagaactgttaagacatattttattttatttttatctgaggttaaactgtgagacttatttgtgtaaggtcatactgttttttacattttttccaggaacgtgcctgagcatgtctttcattaagaggggggaaaaagtttcagaacaggttttgaatggcagagaacttggacgagcctctcagccttgccacttgtcaggtcagcagcaacgag

SEQ ID NO: 8752 - DNA, 2937 bp, Zea Mays
gtccatctcaccgtctccttgaaacgcacccgagccaggtcgagccgtcgagtcgagtcgtcgacgacagcacgcggcgggcggaaggggacgcagacacgcagttgcaggctcgcagcagcaagattctcctgtcttcaatttcatcaacaatctctcgcctataccaccacctaaacctttagactcagcacataatgtgcagctattcaagtcatcagacttggcacctgtttcttcgatctttgcctcaccacatgttaatccagtgaaggaaactaaagttttgatcagggatgaatctgttcaccttcctcaagaattgcactcgcctagcagtgtcaggactcgaatagacacctcaggctcttttagaatgatcagatgcaaagacattgtgtcggacaattgcaatatcacttgtcaactaaacgaggcatctattgattcttctgatcatacatcaaactctacaggccaattgactcaatccatacaggatgctgctggcagtatggaaagcgataaggatcaatgcgatgccaataaaacagaccttaccatatcccaggagtgcacaggcctagaaggtatgaaccttgatgagagtggcccagacaaaatggattcgtcacattctgggattgttgttcatgaaaaccagctatctgaacaaaacaatgacgaacctgcagcatataatgagggttacattattacacaccaatcaactagtgatatgctcactttagccataccatctggaacagaaacacaaccagtgaatgatacacaaatggctgataacccctactcttgtgaatccttgttggatgatcagtcaagtggatattgcacccagaattctgtgcatgaaccccatttgtactggactggggcagttgaagggtctgcagtatcctatactccccaaacactccctggtgctttgcaaagtcagctgatgccatgtaacaagctcagtgaaccaaaagattacgtgcctactgagcaaaatgccttgtcacagcacttacgtggcatgcgtaggcgcagccttttcaatgaaaaggctggaattagtaataaaggtgtagacaaaacttcggatcatcatcctgtaaattcaactacccccaaatgcaaaactatttctggtgacaactcaaagcctctaagaacccctccatgcgcattacctggtattggcttgcacttgaatgcccttgctacaatacctaaagagaaaatagtccctcgagagattcagtctactataaatgaatcaagtaacttgataggccctgctggatcttctccagcaccttttgagcaaaacattataaatgatgatttcactcaaacaactgatgttgcaactgccgaagcttctagtcagggtagtcccaagaagaaaaggcataagtttgacaatggtgatggcacttcatgcaagcgttgtagttgtaagaagtcaaaatgcctgaaactttactgtgagtgttttgctgctggagtctattgttctgagccttgttcgtgtatcggctgtcagaacaaccagagtcatatggaaacagttctgtctacacggcaacagattgaatctcgcaatccattagcatttgctcctaaagtcattcatacatctgagcctggtatggacttaggggacttttccaataaaactcctgcttcagctcgtcacaaaaggggatgcaattgcaagaagtcgtcgtgtctaaaaaaatactgtgaatgttttcagatgcgagggctgtaagaatgcttttggaaaacgggagggggcttctgtgttaggcataggggaacctaaacagggattggaagaaaagtatgtttgtgtgaaagaagaaaaaagtgaaatcgataaacagcttgttgtctaccagactactgacgctgctcctgctgaaaatgtactgaccacaccttccatggtggagtgcagacccttggcttgtcttccacccgcaagctccaagaaaagctccaaaaaaccacggtcttcaacaaagctcacaggacatccttctcggccgtgcaacttacaagctcctccaaagaccgacgttgtgctctccccattcgaaaactacgcggaaatggtcctcggtgatagcacatcagatatcctgaagggaaattcatctcctcatacttctgttaaagttgtgtcaccgaataagaagcgaatctctcccccacggatgggtatcgggctatctccaatctgtaggagtggcaggaagctgattctcaagtccatcccttctttcccttcccttggtggtgatgtaaacaacgaggatccgaaggccaagctcccagcgccttgaatttatcatgttttgtgtcactcgtggcccttcccgttggttctcgaaatcgcccacgcgctgactgcaccagactgtttctaccaccataccatcagatagtggatggacaaccaagcgtgcaccgtttcatcatttgtgtaattgtgtttgcttcgattaataattattcacgtactgctataataacccactgtgatggcagaattctacctacctcccagaaccaccagtggcatttggtttgctggtaagttatgtctcggctcaaggacgttgctgtgttgcctgtgcctgtatgtctgtataatttatgttcattatccgggatcaagatgtggaacctctatgtacctgatggcagaactgttaagacatattttattttatttttatctgaggttaaactgtgagacttatttgtgtaaggtcatactgttttttacattttttccaggaacgtgcctgagcatgtctttcattaagaggggggaaaaagtttcagaacaggttttgaatggcagagaacttggacgagcctctcagccttgccacttgtcaggtcagcagcaacgag

SEQ ID NO: 8753 - DNA, 3062 bp, Zea Mays
gtccatctcaccgtctccttgaaacgcacccgagccaggtcgagccgtcgagtcgagtcgtcgacgacagcacgcggcgggcggaaggggacgcagacacgcagttgcaggctcgcagcagcaagaaggaggcggcgtggaaggggaggcagatgcgggaggcccaccgcagggtcgtcgcaccagatggacacgccggataggccccgcgccgccgccgccgccgggttcgaggattctcctgtcttcaatttcatcaacaatctctcgcctataccaccacctaaacctttagactcagcacataatgtgcagctattcaagtcatcagacttggcacctgtttcttcgatctttgcctcaccacatgttaatccagtgaaggaaactaaagttttgatcagggatgaatctgttcaccttcctcaagaattgcactcgcctagcagtgtcaggactcgaatagacacctcaggctcttttagaatgatcagatgcaaagacattgtgtcggacaattgcaatatcacttgtcaactaaacgaggcatctattgattcttctgatcatacatcaaactctacaggccaattgactcaatccatacaggatgctgctggcagtatggaaagcgataaggatcaatgcgatgccaataaaacagaccttaccatatcccaggagtgcacaggcctagaaggtatgaaccttgatgagagtggcccagacaaaatggattcgtcacattctgggattgttgttcatgaaaaccagctatctgaacaaaacaatgacgaacctgcagcatataatgagggttacattattacacaccaatcaactagtgatatgctcactttagccataccatctggaacagaaacacaaccagtgaatgatacacaaatggctgataacccctactcttgtgaatccttgttggatgatcagtcaagtggatattgcacccagaattctgtgcatgaaccccatttgtactggactggggcagttgaagggtctgcagtatcctatactccccaaacactccctggtgctttgcaaagtcagctgatgccatgtaacaagctcagtgaaccaaaagattacgtgcctactgagcaaaatgccttgtcacagcacttacgtggcatgcgtaggcgcagccttttcaatgaaaaggctggaattagtaataaaggtgtagacaaaacttcggatcatcatcctgtaaattcaactacccccaaatgcaaaactatttctggtgacaactcaaagcctctaagaacccctccatgcgcattacctggtattggcttgcacttgaatgcccttgctacaatacctaaagagaaaatagtccctcgagagattcagtctactataaatgaatcaagtaacttgataggccctgctggatcttctccagcaccttttgagcaaaacattataaatgatgatttcactcaaacaactgatgttgcaactgccgaagcttctagtcagggtagtcccaagaagaaaaggcataagtttgacaatggtgatggcacttcatgcaagcgttgtagttgtaagaagtcaaaatgcctgaaactttactgtgagtgttttgctgctggagtctattgttctgagccttgttcgtgtatcggctgtcagaacaaccagagtcatatggaaacagttctgtctacacggcaacagattgaatctcgcaatccattagcatttgctcctaaagtcattcatacatctgagcctggacttttccaataaaactcctgcttcagctcgtcacaaaaggggatgcaattgcaagaagtcgtcgtgtctaaaaaaatactgtgaatgttttcagggcggcgtgggatgctccgtaagttgcagatgcgagggctgtaagaatgcttttggaaaacgggagggggcttctgtgttaggcataggggaacctaaacagggattggaagaaaagtatgtttgtgtgaaagaagaaaaaagtgaaatcgataaacagcttgttgtctaccagactactgacgctgctcctgctgaaaatgtactgaccacaccttccatggtggagtgcagacccttggcttgtcttccacccgcaagctccaagaaaagctccaaaaaaccacggtcttcaacaaagctcacaggacatccttctcggccgtgcaacttacaagctcctccaaagaccgacgttgtgctctccccattcgaaaactacgcggaaatggtcctcggtgatagcacatcagatatcctgaagggaaattcatctcctcatacttctgttaaagttgtgtcaccgaataagaagcgaatctctcccccacggatgggtatcgggctatctccaatctgtaggagtggcaggaagctgattctcaagtccatcccttctttcccttcccttggtggtgatgtaaacaacgaggatccgaaggccaagctcccagcgccttgaatttatcatgttttgtgtcactcgtggcccttcccgttggttctcgaaatcgcccacgcgctgactgcaccagactgtttctaccaccataccatcagatagtggatggacaaccaagcgtgcaccgtttcatcatttgtgtaattgtgtttgcttcgattaataattattcacgtactgctataataacccactgtgatggcagaattctacctacctcccagaaccaccagtggcatttggtttgctggtaagttatgtctcggctcaaggacgttgctgtgttgcctgtgcctgtatgtctgtataatttatgttcattatccgggatcaagatgtggaacctctatgtacctgatggcagaactgttaagacatattttattttatttttatctgaggttaaactgtgagacttatttgtgtaaggtcatactgttttttacattttttccaggaacgtgcctgagcatgtctttcattaagaggggggaaaaagtttcagaacaggttttgaatggcagagaacttggacgagcctctcagccttgccacttgtcaggtcagcagcaacgag

SEQ ID NO: 8754 - DNA, 1994 bp, Zea Mays
gtccatctcaccgtctccttgaaacgcacccgagccaggtcgagccgtcgagtcgagtcgtcgacgacagcacgcggcgggcggaaggggacgcagacacgcagttgcaggctcgcagcagcaagaaggaggcggcgtggaaggggaggcagatgcgggaggcccaccgcagggtcgtcgcaccagatggacacgccggataggccccgcgccgccgccgccgccgggttcgaggattctcctgtcttcaatttcatcaacaatctctcgcctataccaccacctaaacctttagactcagcacataatgtgcagctattcaagtcatcagacttggcacctgtttcttcgatctttgcctcaccacatgttaatccagtgaaggaaactaaagttttgatcagggatgaatctgttcaccttcctcaagaattgcactcgcctagcagtgtcaggactcgaatagacacctcaggctcttttagaatgatcagatgcaaagacattgtgtcggacaattgcaatatcacttgtcaactaaacgaggcatctattgattcttctgatcatacatcaaactctacaggccaattgactcaatccatacaggatgctgctggcagtatggaaagcgataaggatcaatgcgatgccaataaaacagaccttaccatatcccaggagtgcacaggcctagaaggtatgaaccttgatgagagtggcccagacaaaatggattcgtcacattctgggattgttgttcatgaaaaccagctatctgaacaaaacaatgacgaacctgcagcatataatgagggttacattattacacaccaatcaactagtgatatgctcactttagccataccatctggaacagaaacacaaccagtgaatgatacacaaatggctgataacccctactcttgtgaatccttgttggatgatcagtcaagtggatattgcacccagaattctgtgcatgaaccccatttgtactggactggggcagttgaagggtctgcagtatcctatactccccaaacactccctggtgctttgcaaagtcagctgatgccatgtaacaagctcagtgaaccaaaagattacgtgcctactgagcaaaatgccttgtcacagcacttacgtggcatgcgtaggcgcagccttttcaatgaaaaggctggaattagtaataaaggtgtagacaaaacttcggatcatcatcctgtaaattcaactacccccaaatgcaaaactatttctggtgacaactcaaagcctctaagaacccctccatgcgcattacctggtattggcttgcacttgaatgcccttgctacaatacctaaagagaaaatagtccctcgagagattcagtctactataaatgaatcaagtaacttgataggccctgctggatcttctccagcaccttttgagcaaaacattataaatgatgatttcactcaaacaactgatgttgcaactgccgaagcttctagtcagggtagtcccaagaagaaaaggcataagtttgacaatggtgatggcacttcatgcaagcgttgtagttgtaagaagtcaaaatgcctgaaactttactgtgagtgttttgctgctggagtctattgttctgagccttgttcgtgtatcggctgtcagaacaaccagagtcatatggaaacagttctgtctacacggcaacagattgaatctcgcaatccattagcatttgctcctaaagtcattcatacatctgagcctggtatggacttaggggacttttccaataaaactcctgcttcagctcgtcacaaaaggggatgcaattgcaagaagtcgtcgtgtctaaaaaaatactgtgaatgttttcagggcggcgtgggatgctccgtaagttgcagatgcgagggctgtaagaatgcttttggaaaacgggagggagaggagaacatcgaagagacttgggacagctaccagacgtagaggat

SEQ ID NO: 8755 - DNA, 579 bp, Zea Mays
ctcagccgccatggtcgcaacaacccgccggaatgcgcgcgttccagccaggcacaacaacggcctcccaaccaccccgcatcgagctcgggcctacatgacccatgccaccggcccaccgcaaccctgagcccttgattcgggcggatcgaagttagcctcagccttgcacgcggaaaggggcgtgaacggagaaattgggggcagggcgccgcagtcgattgcgcccgtacaccatcggaaggtccttgggccgggtctgggagtttcttatgccaccgcggggtgctcgtctcatctcgggcgtgtgcgacggtcggcgagcagcaatttctcgccgaactttgacttcgccgcacaactacgtatcgtcgtggattacgccgataccgtctagctccccgatgaacaagtgaccgaggacccaggtgttcagtaggtggaaattgcggagcaggagctcattgaaggcaagttgtgcccttgatcacttctatttacccaataatgttcatgttaatcattatgatctgtataagttaattttgatgggacccaataggtcaccctaggttgact

SEQ ID NO: 8756 - DNA, 3754 bp, Zea Mays
ctcctccttgccaagctcccacggcgcccagcccctgtgccgaggcctcccaacactctctccctcgaccggcgctctgcccaatccccaaactcgtcgcgcccctgctctccaggttggccgcacgcccatcttactaccgtgctcgcccagctcagatctcttcgtgccggcgctcttccctgccatggccgccccccctcagctcgcctccctcaagcacgccgcgctcctccctgctcgaccatggaagccgcaccgtcgacctcgcctgaaccccctctgccgcgtccctctccctgacttccgagcttcagtcatggtgtacggtgggatggggctcaggtacatgtacccctgcatcaccatggggagatcaccagggcctctggtgccatcggtctcttctacggcgcacaccttatcttctccctctagacccaactctccaccggccgtgcttgcctgcactgctcatggccggtatgcgttcgcgcccgcacagagcatctggagttctggcacgacgaacgggggaatgaagcagccagcatcgctcgcccaaatccggggagcacttgatgtccggccgtcacatccccgatcaccttttggttttcctctcttcgcctcggtgtccatgtccaagcgcactcgcctcggccagcaatggtgccgagttccttctgtccatgctgcacgtttccatcattcccgtcgcgcccaggatcgttttgtatgcgtgtcgttttcctggctctcctcacgccgatggtcgctgctccccatcgtgccgagctccccactgtcgtgcgtcgctacgggcttgctatcggacgcggctgtctccgtcacttgcttcagctcgctagccctgcagctctttacgccaccatcttgtatcgttgtcgatcctaccatcgaacgtcgtgcgtggcgtcatcatcatccttgtccactcatttaggttctcgtcgtgccatggccgcacgggaaggctggccggggttggccatggtggtcgggcactgctatttttgtgtgccatgctatggccgcaccaagttccatggtgttgtacagtggctgtccccgtctcctttgtcgtgcattttcgacttcaagcactgcttgcagcatcgttgatgtcgcgctttctttagacttgacgcgtcaaactccttcccgtcgcgcctcgtgtgccacttgtccggctaaatgtgagactcggccgtcgacgcactgtccgtctcttgggattcgatgtcgtcctcgcttcagccgccagatgttcgatgaaacgcctgaccctcggaactgtcattattccaacggccttgtcgcgtcttgcgtccccactggtccctattcgttgtccacctgtggcgcaatgaaaggctcgaactgggcatcattgtcaatctcgcggtttcaagtcagatttaggtaatagtagccaatttgttacttctgcttttggtcggatgaatttagttaaacatattagttgtgcaacgtataattaaattggttcttcgtatctgatgtggtcagtctagtcatatgtgatattgttgtttgtctagtgtactgtatgaactaattagcgtagtgggttagaaagctataaatgatttctatctgtagtcttgaatttaattatcttggaaacgtgagcctaatttttgttaattgtttggtataggctaaagtatggaacttatacttagggtgttgttgcctgatgtatgagttaaattcggttaagtaggaaggacgtgagtgttagtatgtatattttattattttgtgattattgcgcttagtcgtatgtcgataactagtgtttccgtatgaaatagtacaacgccttgctgctaggtgtttaattcgcgaacatgtagtaatatttagtctcatactattcttgtttatatgcattcatgtgcattatgcaaatcatttaggtacgtttgttgatcacgtgatgcggaagacgaccccaggataatgcagagagtgaacatctccgcaagacgacgtcgtcagtcggacgaacctgaagatggataatttgacgaatgtcaagataaaagatggtcgtcaagcagacatcgtctaacaacactaacctagtgtttatcccaggcaagccccgttgcatgcaaccccttccttgtgtttttaaattatttttacacactttaagtctactaaatgtgcattaggtttataggagttgcttggaaaccctttgatgcattggctaccttgaaatacatttcttttatagatacttctggtgaagtatcaaaatatgatttacaaaaaaatgcttagccctgcttataagcagatagagtttgtcctttgcacttatgcctagctcaggtttatcctgaggaagcatgacttctacctgcaagaatattttcattgggagcatggtgggatcttactgcaaagttccctataatgctcttttcatccttaggaacacaaaacaatcctaagggtggaagtacttaactcgagacttgggctaggaacaggtgatgctccacccaggttaattaaggattggatgtgtatgtaggcttgtatgatcaagaactatcttaaatggccacatgccctagatatgggacaggataagcttgaacccggctattccatacgtgaaaatacaaccgtgcactgggcgtgggagatggtgggagtagtgtgtaccctcctggctagatggatagaggagtattgtgctcccgggtagcgcggactggttcacgttgtggaggatctgtgggaacggatgacatatacaagggttaagtgctacatatgtcgtgtggttagagatcctcagctgagtaaatcgatttggatcgccgttatatccccggatagtggatacttgatcactgacctgcaaccatggtcaggatgtaaacattatgcataaaaatgatgttgtattgatgagatggtgaaattagactaggtgcaaccagattctattaatatttaatctggcgttaaaatattgaaagtaaggactcactttagtaagctatttctgcaaaaagtatctaagttgattcttgctaaaagcctctccttgattcctaaatcccgcatatcttgagagtctttttccttagtcgggtaagacttgcaaaagtacacttcgtactcagggctttgtcccatgttgttttaggtgaagagcctgcagagctttgctacttttgtgcaaaggtggttccctagtaggaggaagaaccgaaatagaagtgtgttgttgtggatggtgctaagtgccggtgggctcgaccttcttataagtctaagtacctcttctatacttcttattgaggatggtcacttgagctagcatatatttcaaaactacaaataatttataacatttcaaagtttatgctttgaaccaaattttttaatcactccgatcatgtacattgtaaacttcatgtaacttgtaaaatttggttataagatttccgctgcaaattgttggtgtgtgatttgtgtttacttaatcccgtggttctggttgtaagtgatttatccgaggtccttggggcactcggacagatcctgttaagttatctggtgcacatgcatagtcgtctgaggtctttgagacaagggcaggtgcatgtgggtccaataacttgggaggttctgccacatataattgagacttttatggcgttgaggaagcgcaggccag

SEQ ID NO: 8757 - DNA, 1282 bp, Zea Mays
gaatccccgaggcgagcacgagcacgggcgggcgccaccattacttcccggtccatccatccaactgcactgcactgcacccaccttttcaatccaatcctgccgcattgcataattcgcatcgaagatcgatgtgaatccgtggaagggagggcggaggagaaggaagaagaggggtcgaggccgaatccgccggtgagaaggggagcgatggcgaggctggcggtggccgcgagggcgttctccgctgcggcctccggcggcggcgtgtccttggtgcagggggcgtcccgggggatcggcctcgagttcgtgcggcagctgctgcgcagaagcgatggaggccgcgtcgtcgctacgtgccgcacgccgggttccgcggccgagctccagaagctcagggaggagcacgcgcccgggcgcctcaccgtgctgccgctcgacgtcaccgacgagagcaccatagaggcagctgcggcctcaatcacggagacccacggttctcttgaccttctgatcaactccgccggcatcctctcgatcccgaacgtgatacagccagagactacgctaagcaaggttcagaagtcgtccctgatgctggcatacgaggtgaacgcagtcggccctatcctagtgatcaagcacatgtggcctctgctgaagatcggaggccgctccgagactaggagagggttcgcgcttgttgcaaacatgagcgctcgagtcagctccataggagacaacgctctgggtggctggcatgcgtacagagcttctaaaacagcgctgaatcagttgtcggtggagttcggcaggaaggacaacatcgcctgcgtcctgctgcatcctggaaccgtggacaccgacctctcgaggccgtttcagaggaatgtccccgagggtaaactcttcacgagggagttctctgtgcagaggcttctctccgtcatcgacagcgtcaagaaaggcgacaacggcaagttcttcgcgtgggatggccaagaaatcccttggtgaacggtcatcgtaactcgcttgagtctatagcacagcacacagcagtcaacaacgcccctggttttaatccaacgttgtttttttttcaacaagccaagcgaacagatgcattatttctagctaaagggtcctctttttgtgttatcaccgacctaaagttcaagatgttttttttcttcttctaagtgttgaaatattagacatttttaaatcaaattctgaatataaatcatgactaaatcaaaagaactgaagtataaag

SEQ ID NO: 8758 - DNA, 1308 bp, Zea Mays
atggcgagggacgagcatgttaaatttacactaaaatttgagacaactgttgaaacggacagcacacaagctccaatttctcaggttctctacacattccactcagttcatcactctatgcctaaattggagtattcgagttctaaaatggatatggagaaagaaatcaggaaacaagtagatgacgccattgctaaagcaaagttagatgaggcgtccagggctctcctgatgaaggtactagaagatgccacccaggacgttgtgcagaggcaggcaaagatgttggtgctcttcgagacccccgcggggttcaccctattcaaggtgctcgacgaggggaagctcgacaaggtcgaggatctatggaaggagttcacgacgtcggactcagcgagaaaggtggtcgagctgaaggctttcaacaagtttgagaacacatctgatgccctatccgcggcaaccctgattattgatagcaagcctagcaagggtctgcgcaagttcttgcagaaacattgtgagggtgaaacattagtagtagctgattctaagcttggaaatgctataaaagaaaagctgctgatgagaggactgagaaatcagcttaccgagcttataactgggttgggtgcacaagaccttggtccaatgagcttgggattgtcccacagcttgtctaggtataagctgaagttcagccctgagaaggttgatacaatgatcattcaagacattggattattggatgatcttgacaaggagcttaacacttatgccatgagagttcgtgaatggtatggctggcactttccagagctcaccaaaatagttacagataatatacagtatgccaaagttgtgaagatgatgggcaacagagttaatgcagtcaaccttgacttctctaagatattgtcagatgaagagctagaaacacagctaaaggaggcagcaataatatccatgggaacagaagttagtgaccttgacttatcgaatatcagagagctatgtgatcaagtgctggccatttctgagtacagagcccagctgtatgactatttaagaagcaggatgaacactattgcaccaaatttgacagcactggctttattcagagctctaaagacaaagcattctacacctaagtatggcctcatctaccatgcatccttaattggcaaggcttctcaaaagcacaagggaaaaatctcccattctcttgctgcaaaaacggctcttgccatccggtatgatgcccttggtgatggtgaggacaaaatagtatcaacaattcaaaattaa

SEQ ID NO: 8759 - DNA, 635 bp, Zea Mays
caaggtcgtaatagttgcctaatagaatgaaatgttgcttttgcttcttcccctcctaaactcgtcttcggtaaagaagttccttctccccttctccaaagataagtcaggaggttcttctggtgatgaagcagattgtcctatatgtcggtccagtcctagcattccatttattgctcttccatgtcaacacaggtattgctactattgcctacgcacacgttgttcggctacgacttcttacagatgcacacgttgtgacggggcggtggttgcaattcaaagactaggatcaggttagttttacgacctagttgggttaaagaattctcgcccgtttctacagagaatcagcacttcggtgtttcatacggttacaagtttggatacgcgtcattcactgtatgtacatgtaattgccccaagtgtggacagttcggatgccatgagcccataactgacttgttgtatatcgaatgaatagtccgtcacaaaactaacacggattcactatgcgttttcttttcgattcgtctatttcaaaaatcgtgtattgaaaaatgccaaaacaattattggaaagagcaactgattcactgattatgtattgaaaagagattaggtttttaagtatg

SEQ ID NO: 8760 - DNA, 724 bp, Zea Mays
aaaatatttctatgataaatccttggaatgatatttttaccaagtcaagtatgttgcattgttaccatgattcaaatgcaattcacatggctctggtggcataatatatcctatatggaaatgttgcttttgcttcttcccctcctaaactcgtcttcggtaaagaagttccttctccccttctccaaagataagtcaggaggttcttctggtgatgaagcagattgtcctatatgtcggtccagtcctagcattccatttattgctcttccatgtcaacacaggtattgctactattgcctacgcacacgttgttcggctacgacttcttacagatgcacacgttgtgacggggcggtggttgcaattcaaagactaggatcaggttagttttacgacctagttgggttaaagaattctcgcccgtttctacagagaatcagcacttcggtgtttcatacggttacaagtttggatacgcgtcattcactgtatgtacatgtaattgccccaagtgtggacagttcggatgccatgagcccataactgacttgttgtatatcgaatgaatagtccgtcacaaaactaacacggattcactatgcgttttcttttcgattcgtctatttcaaaaatcgtgtattgaaaaatgccaaaacaattattggaaagagcaactgattcactgattatgtattgaaaagagattaggtttttaagtatg

SEQ ID NO: 8761 - DNA, 645 bp, Zea Mays
gtttactccagccagatattaggatgcaaacttgggaggaaatgttgcttttgcttcttcccctcctaaactcgtcttcggtaaagaagttccttctccccttctccaaagataagtcaggaggttcttctggtgatgaagcagattgtcctatatgtcggtccagtcctagcattccatttattgctcttccatgtcaacacaggtattgctactattgcctacgcacacgttgttcggctacgacttcttacagatgcacacgttgtgacggggcggtggttgcaattcaaagactaggatcaggttagttttacgacctagttgggttaaagaattctcgcccgtttctacagagaatcagcacttcggtgtttcatacggttacaagtttggatacgcgtcattcactgtatgtacatgtaattgccccaagtgtggacagttcggatgccatgagcccataactgacttgttgtatatcgaatgaatagtccgtcacaaaactaacacggattcactatgcgttttcttttcgattcgtctatttcaaaaatcgtgtattgaaaaatgccaaaacaattattggaaagagcaactgattcactgattatgtattgaaaagagattaggtttttaagtatg

SEQ ID NO: 8762 - DNA, 1283 bp, Zea Mays
gattttagtttccccgagggcgaggtcattatcccgatttcaatatctagggtgaaccagtttgatgctgcaaggctagatgttgagatgtcggccatgttgaaagagcagctagtcaaagtgttctctttgatgaagttttgatgccttcttttcatatcagccaggactcttattccaatatgagcctgaacttgatgctttccttgagttcctcatctggaggttctcaatttgggctgacaagcctacccctggcaatgcactgatgaacctgaggtacagagatgagcgggcagcacccatcactggaaaagaagttagaacaggtttggaaggacctgggctttctgtttctcaaaagatattttattgtattagctttgttggtggccaatatgtatggtcacgattacaatctttttctgctttccgtcgatggggcgattctgaacagagaccactagctcgccgtgcttgggcgttgatgcggaatgctgaagtattttatagggctgcttcattctttaacctattattgtttctttatggtggaaggtacaaaactgttgtagaaaggattctgaaggcaagacttgtttatgggagccccaacatgaatagagctgttagttttgagtacatgaatcggcagctggtctggaatgagttttcggaaatgttgcttttgcttcttcccctcctaaactcgtcttcggtaaagaagttccttctccccttctccaaagataagtcaggaggttcttctggtgatgaagcagattgtcctatatgtcggtccagtcctagcattccatttattgctcttccatgtcaacacaggtattgctactattgcctacgcacacgttgttcggctacgacttcttacagatgcacacgttgtgacggggcggtggttgcaattcaaagactaggatcaggttagttttacgacctagttgggttaaagaattctcgcccgtttctacagagaatcagcacttcggtgtttcatacggttacaagtttggatacgcgtcattcactgtatgtacatgtaattgccccaagtgtggacagttcggatgccatgagcccataactgacttgttgtatatcgaatgaatagtccgtcacaaaactaacacggattcactatgcgttttcttttcgattcgtctatttcaaaaatcgtgtattgaaaaatgccaaaacaattattggaaagagcaactgattcactgattatgtattgaaaagagattaggtttttaagtatg

SEQ ID NO: 8763 - DNA, 2256 bp, Zea Mays
gacaacatgcacccccccaccccgcacccaaccccacaaaaaaaaaggccgtgtaaaaaagggaaaaagaaaaaaccagagcaacgcagccgcaggctgggtgagcggcgcgggtcttcgtcggccggccccttcaccggtggcgagcatccaccagaccaccagtggatgcgcccctgccccccatgccccaggtcgagtcggccactgcctcggaggcgccgccgccgcaggacgcatggctcgtcgagctcggcagtcgcctcccgcagtgggagtcgctgcgggattcctccaaggtacagtctacagatgcccctgttttctcccatcctagggtttgttctgctgtatggtagcgctttgagatgccacataatttctaagttctacgtgatgtgaggtgctggagatggagactcgaaatccctcgcaagcatatgggattttagtttccccgagggcgaggtcaactaatttgattattgctaattgtcgctagattttctgttctgggtatggttttgcttatgtagataggtatggaatgtctcaagcactcggaggcattatttagttgtgaattatgatggttgttaattctggtgttgctgctggctcctggttcttcattttactaacatgaaaaggcttagaggttcttaagtaaaacaagttttgcgattgtctgtcagaacaggcagtggcggacccaggatttcttcaagtctaggcaaatcgagaactaggcaagacaatgatgcttgcagttgcaggccctgagaacaagcatgatgcttgcagttgcaggcacctagcgcacttagggggtgtttggttcccaactactaaactttagaacttttagtccctaaaataggcaaatagcaaacagggtgagtaaaatagctcttccaaataggatttatagggactatagtttagtccctaaagtttagtagggtgactaaaggaaccaaacacccccttaatttgggatgtaatgccattttttttcttacgcaggtcattatcccgatttcaatatctagggtgaaccagtttgatgctgcaaggctagatgttgagatgtcggccatgttgaaagagcagctagtcaaagtgttctctttgatgaaggactcttattccaatatgagcctgaacttgatgctttccttgagttcctcatctggaggttctcaatttgggctgacaagcctacccctggcaatgcactgatgaacctgaggtacagagatgagcgggcagcacccatcactggaaaagaagttagaacaggtttggaaggacctgggctttctgtttctcaaaagatattttattgtattagctttgttggtggccaatatgtatggtcacgattacaatctttttctgctttccgtcgatggggcgattctgaacagagaccactagctcgccgtgcttgggcgttgatgcggaatgctgaagtattttatagggctgcttcattctttaacctattattgtttctttatggtggaaggtacaaaactgttgtagaaaggattctgaaggcaagacttgtttatgggagccccaacatgaatagagctgttagttttgagtacatgaatcggcagctggtctggaatgagttttcggaaatgttgcttttgcttcttcccctcctaaactcgtcttcggtaaagaagttccttctccccttctccaaagataagtcaggaggttcttctggtgatgaagcagattgtcctatatgtcggtccagtcctagcattccatttattgctcttccatgtcaacacaggtattgctactattgcctacgcacacgttgttcggctacgacttcttacagatgcacacgttgtgacggggcggtggttgcaattcaaagactaggatcaggttagttttacgacctagttgggttaaagaattctcgcccgtttctacagagaatcagcacttcggtgtttcatacggttacaagtttggatacgcgtcattcactgtatgtacatgtaattgccccaagtgtggacagttcggatgccatgagcccataactgacttgttgtatatcgaatgaatagtccgtcacaaaactaacacggattcactatgcgttttcttttcgattcgtctatttcaaaaatcgtgtattgaaaaatgccaaaacaattattggaaagagcaactgattcactgattatgtattgaaaagagattaggtttttaagtatg

SEQ ID NO: 8764 - DNA, 2130 bp, Zea Mays
gacaacatgcacccccccaccccgcacccaaccccacaaaaaaaaaggccgtgtaaaaaagggaaaaagaaaaaaccagagcaacgcagccgcaggctgggtgagcggcgcgggtcttcgtcggccggccccttcaccggtggcgagcatccaccagaccaccagtggatgcgcccctgccccccatgccccaggtcgagtcggccactgcctcggaggcgccgccgccgcaggacgcatggctcgtcgagctcggcagtcgcctcccgcagtgggagtcgctgcgggattcctccaaggtacagtctacagatgcccctgttttctcccatcctagggtttgttctgctgtatggtagcgctttgagatgccacataatttctaagttctacgtgatgtgaggtgctggagatggagactcgaaatccctcgcaagcatatgggattttagtttccccgagggcgaggtcaactaatttgattattgctaattgtcgctagattttctgttctgggtatggttttgcttatgtagataggtatggaatgtctcaagcactcggaggcattatttagttgtgaattatgatggttgttaattctggtgttgctgctggctcctggttcttcattttactaacatgaaaaggcttagaggttcttaagtaaaacaagttttgcgattgtctgtcagaacaggcagtggcggacccaggatttcttcaagtctaggcaaatcgagaactaggcaagacaatgatgcttgcagttgcaggccctgagaacaagcatgatgcttgcagttgcaggcacctagcgcacttagggggtgtttggttcccaactactaaactttagaacttttagtccctaaaataggcaaatagcaaacagggtcattatcccgatttcaatatctagggtgaaccagtttgatgctgcaaggctagatgttgagatgtcggccatgttgaaagagcagctagtcaaagtgttctctttgatgaagccaggactcttattccaatatgagcctgaacttgatgctttccttgagttcctcatctggaggttctcaatttgggctgacaagcctacccctggcaatgcactgatgaacctgaggtacagagatgagcgggcagcacccatcactggaaaagaagttagaacaggtttggaaggacctgggctttctgtttctcaaaagatattttattgtattagctttgttggtggccaatatgtatggtcacgattacaatctttttctgctttccgtcgatggggcgattctgaacagagaccactagctcgccgtgcttgggcgttgatgcggaatgctgaagtattttatagggctgcttcattctttaacctattattgtttctttatggtggaaggtacaaaactgttgtagaaaggattctgaaggcaagacttgtttatgggagccccaacatgaatagagctgttagttttgagtacatgaatcggcagctggtctggaatgagttttcggaaatgttgcttttgcttcttcccctcctaaactcgtcttcggtaaagaagttccttctccccttctccaaagataagtcaggaggttcttctggtgatgaagcagattgtcctatatgtcggtccagtcctagcattccatttattgctcttccatgtcaacacaggtattgctactattgcctacgcacacgttgttcggctacgacttcttacagatgcacacgttgtgacggggcggtggttgcaattcaaagactaggatcaggttagttttacgacctagttgggttaaagaattctcgcccgtttctacagagaatcagcacttcggtgtttcatacggttacaagtttggatacgcgtcattcactgtatgtacatgtaattgccccaagtgtggacagttcggatgccatgagcccataactgacttgttgtatatcgaatgaatagtccgtcacaaaactaacacggattcactatgcgttttcttttcgattcgtctatttcaaaaatcgtgtattgaaaaatgccaaaacaattattggaaagagcaactgattcactgattatgtattgaaaagagattaggtttttaagtatg

SEQ ID NO: 8765 - DNA, 1503 bp, Zea Mays
gacaacatgcacccccccaccccgcacccaaccccacaaaaaaaaaggccgtgtaaaaaagggaaaaagaaaaaaccagagcaacgcagccgcaggctgggtgagcggcgcgggtcttcgtcggccggccccttcaccggtggcgagcatccaccagaccaccagtggatgcgcccctgccccccatgccccaggtcgagtcggccactgcctcggaggcgccgccgccgcaggacgcatggctcgtcgagctcggcagtcgcctcccgcagtgggagtcgctgcgggattcctccaagggtgaaccagtttgatgctgcaaggctagatgttgagatgtcggccatgttgaaagagcagctagtcaaagtgttctctttgatgaaggactcttattccaatatgagcctgaacttgatgctttccttgagttcctcatctggaggttctcaatttgggctgacaagcctacccctggcaatgcactgatgaacctgaggtacagagatgagcgggcagcacccatcactggaaaagaagttagaacaggtttggaaggacctgggctttctgtttctcaaaagatattttattgtattagctttgttggtggccaatatgtatggtcacgattacaatctttttctgctttccgtcgatggggcgattctgaacagagaccactagctcgccgtgcttgggcgttgatgcggaatgctgaagtattttatagggctgcttcattctttaacctattattgtttctttatggtggaaggtacaaaactgttgtagaaaggattctgaaggcaagacttgtttatgggagccccaacatgaatagagctgttagttttgagtacatgaatcggcagctggtctggaatgagttttcggaaatgttgcttttgcttcttcccctcctaaactcgtcttcggtaaagaagttccttctccccttctccaaagataagtcaggaggttcttctggtgatgaagcagattgtcctatatgtcggtccagtcctagcattccatttattgctcttccatgtcaacacaggtattgctactattgcctacgcacacgttgttcggctacgacttcttacagatgcacacgttgtgacggggcggtggttgcaattcaaagactaggatcaggttagttttacgacctagttgggttaaagaattctcgcccgtttctacagagaatcagcacttcggtgtttcatacggttacaagtttggatacgcgtcattcactgtatgtacatgtaattgccccaagtgtggacagttcggatgccatgagcccataactgacttgttgtatatcgaatgaatagtccgtcacaaaactaacacggattcactatgcgttttcttttcgattcgtctatttcaaaaatcgtgtattgaaaaatgccaaaacaattattggaaagagcaactgattcactgattatgtattgaaaagagattaggtttttaagtatg

SEQ ID NO: 8766 - DNA, 1419 bp, Zea Mays
gacaacatgcacccccccaccccgcacccaaccccacaaaaaaaaaggccgtgtaaaaaagggaaaaagaaaaaaccagagcaacgcagccgcaggctgggtgagcggcgcgggtcttcgtcggccggccccttcaccggtggcgagcatccaccagaccaccagtggatgcgcccctgccccccatgccccaggtcgagtcggccactgcctcggaggcgccgccgccgcaggacgcatggctcgtcgagctcggcagtcgcctcccgcagtgggagtcgctgcgggattcctccaagccaggactcttattccaatatgagcctgaacttgatgctttccttgagttcctcatctggaggttctcaatttgggctgacaagcctacccctggcaatgcactgatgaacctgaggtacagagatgagcgggcagcacccatcactggaaaagaagttagaacaggtttggaaggacctgggctttctgtttctcaaaagatattttattgtattagctttgttggtggccaatatgtatggtcacgattacaatctttttctgctttccgtcgatggggcgattctgaacagagaccactagctcgccgtgcttgggcgttgatgcggaatgctgaagtattttatagggctgcttcattctttaacctattattgtttctttatggtggaaggtacaaaactgttgtagaaaggattctgaaggcaagacttgtttatgggagccccaacatgaatagagctgttagttttgagtacatgaatcggcagctggtctggaatgagttttcggaaatgttgcttttgcttcttcccctcctaaactcgtcttcggtaaagaagttccttctccccttctccaaagataagtcaggaggttcttctggtgatgaagcagattgtcctatatgtcggtccagtcctagcattccatttattgctcttccatgtcaacacaggtattgctactattgcctacgcacacgttgttcggctacgacttcttacagatgcacacgttgtgacggggcggtggttgcaattcaaagactaggatcaggttagttttacgacctagttgggttaaagaattctcgcccgtttctacagagaatcagcacttcggtgtttcatacggttacaagtttggatacgcgtcattcactgtatgtacatgtaattgccccaagtgtggacagttcggatgccatgagcccataactgacttgttgtatatcgaatgaatagtccgtcacaaaactaacacggattcactatgcgttttcttttcgattcgtctatttcaaaaatcgtgtattgaaaaatgccaaaacaattattggaaagagcaactgattcactgattatgtattgaaaagagattaggtttttaagtatg

SEQ ID NO: 8767 - DNA, 2759 bp, Zea Mays
tttatctcggccaacgtggacggcgcgtgattttctcttctctcgcagtcgcagcacggcagtcggcagcaggcaggcagccagccagcagccagcagctgcgaatcgaagcggaatcgaagcccaccaccagcagcagtgcccacttgcttggagcgcgagtttaccccgagcaaatcgcggcggcgctcgtgcccgtgcctcccgcgtcgaaccctagtgcaactaccagatccggagatcccgcgcgggcgcgggcgggacaccaagcttctgactcaactcaatccccgcacctgccaatgccaccccctcggcgctgatccgatcccgccgccgccgacactcgcgggcccgccccatggattccgcccggagctggctccagaagctgcagccgcgggacaaggacagagagcggggcgccaagacgccggcgccggcgtcgcccaacggtggcgccggcaactccgcgaggatggccgccgcggcgggggaggaggcgctgtctagcgccaccaagcagaaggtggcggcggcgaagcagtacatcgagaaccactacaagtcgcagatgaagtcgcttcaggagcgcaaggagaggcgttggatgttggagaggaaactagcagatgcagatgtatctgaagaagagcaaaacaatatcctgaaagatttagaaaaaaaggagacagaatacatgcgcctacgaaggcataaaatgggcgttgatgactttgaattgcttaccattattgggagaggtgcatttggggaggtgagactttgtagagaaaaagctacatccaatgtgtatgcaatgaaaaagcttaagaagtccgaaatgttacgaagagggcaggttgaacatgtcagagctgaaagggacctccttgcagaggttgatagtccttacattgttaagctgtactgctcatttcaagatgatgagtttctgtacctcattatggagtaccttcctggtggtgacatgatgactttactcatgcgcaaggacacactgactgaggacgaatctaagttttatgttgcagagacaatactagcaattgaatctattcacaaacgcatttatattcatagggatatcaagcctgataatttgttgctagatcgaagtggccacttgaagctttcagattttggcttatgtaaacctctagatagcagttgcttcccaaatctgagtgaccttgactatgcagcaggcggacacaacaggaacaactactacattggcagaagaatcggaggatgttggcttactctactgttggtacacctgattacattgcacccgaggtactcctgaagaaaggatatggaatggaatgtgactggtggtcacttggtgcaataatgttcgaaatgcttgtggggtatccgccattttattctgaagacccaatgtcaacatgtaggaagatagtgaattggagaagtcatctaaaattccctgaagaggccagcctttctctagaagctaaagatctcattagcaagctattgtgtaatgtggatcagagaattggaacaaaaggtgcacatgagataaaggcacatccatggtttgcaggtgttgagtgggaaaaactatatcagatggaagcagctttcattcctgaggttaatgatgagttggacacacaaaactttgaaaagtttgaggagactgctcctccaatgcaaacttcatcaaaggcaggtccttggagaaagatgctttcctccaaggacgtgaactttgttggctatacctacaagaactttgaaattgtgaacgatcctgagcttccaggaattggttggatatagttcctacttcacaccttcatttcgttcctagtttaggccccgtttggttccatggactgatctagtccctgttttttagtccggtttagtccttttttgccaaacagaaggactaaagtagggactaattggtttgtctttagtccctcaaagggtagctagaagggactaaagcagatttattcctctccgtgtccttcagttattgctcctccgtgacgtcttaagcacagaagggctgagctaaagaaaacgaacaacaagccaaagcgaccaaccatcaaatcattatttgagactgctgatagtgaagaccagccttctgatggcagttttctgaacctattacccacacaactggagctgccagagagccttgagccctctcctcactccagtatctcttctgaggattcccaagcacggaataggtagcaggtgtgttttctggcacctgccagcttagtccaacaaaagcaagacatagaggcctttcacctagtgatggattgctatctgcaggtctctattcagaggacaagctccataaagtttgcttttgaagagatgtttgtggtgctcagcagccatctaatgtacattgtcctgtacattgttactggtttccaaagttcctttggcaacgacacgaggaggttggttgtcatatagaggaggaggtatttgttctctcctgtaaatccttggattctttgagtttctgagatttattctttcgatatagcatgccaagggggtatgctgcctgtttcctttttacgtgcagaaatctgcatttctacatcgttgttgtaagatttgagacagtgtaaagaaattgcaagtgataaacaagcgaccgaaaatgataatgaaaatgctatttttcttctatacagccttttttctttgcccttgtactt

SEQ ID NO: 8768 - DNA, 3212 bp, Zea Mays
tttatctcggccaacgtggacggcgcgtgattttctcttctctcgcagtcgcagcacggcagtcggcagcaggcaggcagccagccagcagccagcagctgcgaatcgaagcggaatcgaagcccaccaccagcagcagtgcccacttgcttggagcgcgagtttaccccgagcaaatcgcggcggcgctcgtgcccgtgcctcccgcgtcgaaccctagtgcaactaccagatccggagatcccgcgcgggcgcgggcgggacaccaagcttctgactcaactcaatccccgcacctgccaatgccaccccctcggcgctgatccgatcccgccgccgccgacactcgcgggcccgccccatggattccgcccggagctggctccagaagctgcagccgcgggacaaggacagagagcggggcgccaagacgccggcgccggcgtcgcccaacggtggcgccggcaactccgcgaggatggccgccgcggcgggggaggaggcgctgtctagcgccaccaagcagaaggtggcggcggcgaagcagtacatcgagaaccactacaagtcgcagatgaagtcgcttcaggagcgcaaggagaggcgttggatgttggagaggaaactagcagatgcagatgtatctgaagaagagcaaaacaatatcctgaaagatttagaaaaaaaggagacagaatacatgcgcctacgaaggcataaaatgggcgttgatgactttgaattgcttaccattattgggagaggtgcatttggggaggtgagactttgtagagaaaaagctacatccaatgtgtatgcaatgaaaaagcttaagaagtccgaaatgttacgaagagggcaggttgaacatgtcagagctgaaagggacctccttgcagaggttgatagtccttacattgttaagctgtactgctcatttcaagatgatgagtttctgtacctcattatggagtaccttcctggtggtgacatgatgactttactcatgcgcaaggacacactgactgaggacgaatctaagttttatgttgcagagacaatactagcaattgaatctattcacaaacgcatttatattcatagggatatcaagcctgataatttgttgctagatcgaagtggccacttgaagctttcagattttggcttatgtaaacctctagatagcagttgcttcccaaatctgagtgaccttgactatgcagcaggtaagagcaccaatccatcatcagatggtgataagcaatccagtaactctactgcccccaggcggacacaacaggaacaactactacattggcagaagaatcggaggatgttggtgggtgcccagctatgtaaattttgactcctgccatttcattgtagatatgtcaactcaaatattggttgtgaacctcaatacacaaatctatctactacacaataaattagcttgtatctgcttgtcaacatgaatttgttctaaggagggtcctttttacacagtgtaggctttacaatgacatttcttatacacaatgtagaactagagagcacaatggcgacaataacaacagtcttttagtttgaagcaagttgagtaggccaggagttgttaagagcactaatgtactaaaactaggttagaatcaagaacatctatacatgtacggttattatgtacgttaaacatgcttgtatgagtgaaaggtttcaagatattattgtcttcaaacactgagcagtttgcatagatacatggagaaaatgaaatttcattccacctaagggcttgttcagttaggggtgtccgggtgtggattaattccctccaatccccctcaatccacctcaaactgaacaagccctaaggtgaagtgtaatcctcagcacatcacatatggaatggctcagattggtcatctgtttaaaactcatgcctggttctgtttcatatccttgactctattggtgtgcatggttcatgaaatttataggcttactctactgttggtacacctgattacattgcacccgaggtactcctgaagaaaggatatggaatggaatgtgactggtggtcacttggtgcaataatgttcgaaatgcttgtggggtatccgccattttattctgaagacccaatgtcaacatgtaggaagatagtgaattggagaagtcatctaaaattccctgaagaggccagcctttctctagaagctaaagatctcattagcaagctattgtgtaatgtggatcagagaattggaacaaaaggcacatccatggtttgcaggtgttgagtgggaaaaactatatcagatggaagcagctttcattcctgaggttaatgatgagttggacacacaaaactttgaaaagtttgaggagactgctcctccaatgcaaacttcatcaaaggcaggtccttggagaaagatgctttcctccaaggacgtgaactttgttggctatacctacaagaactttgaaattgtgaacgatcctgagcttccaggaattgctgagctaaagaaaacgaacaacaagccaaagcgaccaaccatcaaatcattatttgagactgctgatagtgaagaccagccttctgatggcagttttctgaacctattacccacacaactggagctgccagagagccttgagccctctcctcactccagtatctcttctgaggattcccaagcacggaataggtagcaggtgtgttttctggcacctgccagcttagtccaacaaaagcaagacatagaggcctttcacctagtgatggattgctatctgcaggtctctattcagaggacaagctccataaagtttgcttttgaagagatgtttgtggtgctcagcagccatctaatgtacattgtcctgtacattgttactggtttccaaagttcctttggcaacgacacgaggaggttggttgtcatatagaggaggaggtatttgttctctcctgtaaatccttggattctttgagtttctgagatttattctttcgatatagcatgccaagggggtatgctgcctgtttcctttttacgtgcagaaatctgcatttctacatcgttgttgtaagatttgagacagtgtaaagaaattgcaagtgataaacaagcgaccgaaaatgataatgaaaatgctatttttcttctatacagccttttttctttgcccttgtactt

SEQ ID NO: 8769 - DNA, 2388 bp, Zea Mays
tttatctcggccaacgtggacggcgcgtgattttctcttctctcgcagtcgcagcacggcagtcggcagcaggcaggcagccagccagcagccagcagctgcgaatcgaagcggaatcgaagcccaccaccagcagcagtgcccacttgcttggagcgcgagtttaccccgagcaaatcgcggcggcgctcgtgcccgtgcctcccgcgtcgaaccctagtgcaactaccagatccggagatcccgcgcgggcgcgggcgggacaccaagcttctgactcaactcaatccccgcacctgccaatgccaccccctcggcgctgatccgatcccgccgccgccgacactcgcgggcccgccccatggattccgcccggagctggctccagaagctgcagccgcgggacaaggacagagagcggggcgccaagacgccggcgccggcgtcgcccaacggtggcgccggcaactccgcgaggatggccgccgcggcgggggaggaggcgctgtctagcgccaccaagcagaaggtggcggcggcgaagcagtacatcgagaaccactacaagtcgcagatgaagtcgcttcaggagcgcaaggagaggcgttggatgttggagaggaaactagcagatgcagatgtatctgaagaagagcaaaacaatatcctgaaagatttagaaaaaaaggagacagaatacatgcgcctacgaaggcataaaatgggcgttgatgactttgaattgcttaccattattgggagaggtgcatttggggaggtgagactttgtagagaaaaagctacatccaatgtgtatgcaatgaaaaagcttaagaagtccgaaatgttacgaagagggcaggttgaacatgtcagagctgaaagggacctccttgcagaggttgatagtccttacattgttaagctgtactgctcatttcaagatgatgagtttctgtacctcattatggagtaccttcctggtggtgacatgatgactttactcatgcgcaaggacacactgactgaggacgaatctaagttttatgttgcagagacaatactagcaattgaatctattcacaaacgcatttatattcatagggatatcaagcctgataatttgttgctagatcgaagtggccacttgaagctttcagattttggcttatgtaaacctctagatagcagttgcttcccaaatctgagtgaccttgactatgcagcaggcggacacaacaggaacaactactacattggcagaagaatcggaggatgttggcttactctactgttggtacacctgattacattgcacccgaggtggtcacttggtgcaataatgttcgaaatgcttgtggggtatccgccattttattctgaagacccaatgtcaacatgtaggaagatagtgaattggagaagtcatctaaaattccctgaagaggccagcctttctctagaagctaaagatctcattagcaagctattgtgtaatgtggatcagagaattggaacaaaaggtgcacatgagataaaggcacatccatggtttgcaggtgttgagtgggaaaaactatatcagatggaagcagctttcattcctgaggttaatgatgagttggacacacaaaactttgaaaagtttgaggagactgctcctccaatgcaaacttcatcaaaggcaggtccttggagaaagatgctttcctccaaggacgtgaactttgttggctatacctacaagaactttgaaattgtgaacgatcctgagcttccaggaattgctgagctaaagaaaacgaacaacaagccaaagcgaccaaccatcaaatcattatttgagactgctgatagtgaagaccagccttctgatggcagttttctgaacctattacccacacaactggagctgccagagagccttgagccctctcctcactccagtatctcttctgaggattcccaagcacggaataggtagcaggtctctattcagaggacaagctccataaagtttgcttttgaagagatgtttgtggtgctcagcagccatctaatgtacattgtcctgtacattgttactggtttccaaagttcctttggcaacgacacgaggaggttggttgtcatatagaggaggaggtatttgttctctcctgtaaatccttggattctttgagtttctgagatttattctttcgatatagcatgccaagggggtatgctgcctgtttcctttttacgtgcagaaatctgcatttctacatcgttgttgtaagatttgagacagtgtaaagaaattgcaagtgataaacaagcgaccgaaaatgataatgaaaatgctatttttcttctatacagccttttttctttgcccttgtactt

SEQ ID NO: 8770 - DNA, 3186 bp, Zea Mays
tttatctcggccaacgtggacggcgcgtgattttctcttctctcgcagtcgcagcacggcagtcggcagcaggcaggcagccagccagcagccagcagctgcgaatcgaagcggaatcgaagcccaccaccagcagcagtgcccacttgcttggagcgcgagtttaccccgagcaaatcgcggcggcgctcgtgcccgtgcctcccgcgtcgaaccctagtgcaactaccagatccggagatcccgcgcgggcgcgggcgggacaccaagcttctgactcaactcaatccccgcacctgccaatgccaccccctcggcgctgatccgatcccgccgccgccgacactcgcgggcccgccccatggattccgcccggagctggctccagaagctgcagccgcgggacaaggacagagagcggggcgccaagacgccggcgccggcgtcgcccaacggtggcgccggcaactccgcgaggatggccgccgcggcgggggaggaggcgctgtctagcgccaccaagcagaaggtggcggcggcgaagcagtacatcgagaaccactacaagtcgcagatgaagtcgcttcaggagcgcaaggagaggcgttggatgttggagaggaaactagcagatgcagatgtatctgaagaagagcaaaacaatatcctgaaagatttagaaaaaaaggagacagaatacatgcgcctacgaaggcataaaatgggcgttgatgactttgaattgcttaccattattgggagaggtgcatttggggaggtgagactttgtagagaaaaagctacatccaatgtgtatgcaatgaaaaagcttaagaagtccgaaatgttacgaagagggcaggttgaacatgtcagagctgaaagggacctccttgcagaggttgatagtccttacattgttaagctgtactgctcatttcaagatgatgagtttctgtacctcattatggagtaccttcctggtggtgacatgatgactttactcatgcgcaaggacacactgactgaggacgaatctaagttttatgttgcagagacaatactagcaattgaatctattcacaaacgcatttatattcatagggatatcaagcctgataatttgttgctagatcgaagtggccacttgaagctttcagattttggcttatgtaaacctctagatagcagttgcttcccaaatctgagtgaccttgactatgcagcaggtaagagcaccaatccatcatcagatggtgataagcaatccagtaactctactgcccccaggcggacacaacaggaacaactactacattggcagaagaatcggaggatgttggtgggtgcccagctatgtaaattttgactcctgccatttcattgtagatatgtcaactcaaatattggttgtgaacctcaatacacaaatctatctactacacaataaattagcttgtatctgcttgtcaacatgaatttgttctaaggagggtcctttttacacagtgtaggctttacaatgacatttcttatacacaatgtagaactagagagcacaatggcgacaataacaacagtcttttagtttgaagcaagttgagtaggccaggagttgttaagagcactaatgtactaaaactaggttagaatcaagaacatctatacatgtacggttattatgtacgttaaacatgcttgtatgagtgaaaggtttcaagatattattgtcttcaaacactgagcagtttgcatagatacatggagaaaatgaaatttcattccacctaagggcttgttcagttaggggtgtccgggtgtggattaattccctccaatccccctcaatccacctcaaactgaacaagccctaaggtgaagtgtaatcctcagcacatcacatatggaatggctcagattggtcatctgtttaaaactcatgcctggttctgtttcatatccttgactctattggtgtgcatggttcatgaaatttataggcttactctactgttggtacacctgattacattgcacccgaggtactcctgaagaaaggatatggaatggaatgtgactggttagcttgatcttatgtacttgtgcattacacatccaatgatgtccttttacttacattgacttttcataggtggtcacttggtgcaataatgttcgaaatgcttgtggggtatccgccattttattctgaagacccaatgtcaacatgtaggaagatagtgaattggagaagtcatctaaaattccctgaagaggccagcctttctctagaagctaaagatctcattagcaagctattgtgtaatgtggatcagagaattggaacaaaaggtgcacatgagataaaggtgttgagtgggaaaaactatatcagatggaagcagctttcattcctgaggttaatgatgagttggacacacaaaactttgaaaagtttgaggagactgctcctccaatgcaaacttcatcaaaggcaggtccttggagaaagatgctttcctccaaggacgtgaactttgttggctatacctacaagaactttgaaattgtgaacgatcctgagcttccaggaattgctgagctaaagaaaacgaacaacaagccaaagcgaccaaccatcaaatcattatttgagactgctgatagtgaagaccagccttctgatggcagttttctgaacctattacccacacaactggagctgccagagagccttgagccctctcctcactccagtatctcttctgaggattcccaagcacggaataggtagcagaggacaagctccataaagtttgcttttgaagagatgtttgtggtgctcagcagccatctaatgtacattgtcctgtacattgttactggtttccaaagttcctttggcaacgacacgaggaggttggttgtcatatagaggaggaggtatttgttctctcctgtaaatccttggattctttgagtttctgagatttattctttcgatatagcatgccaagggggtatgctgcctgtttcctttttacgtgcagaaatctgcatttctacatcgttgttgtaagatttgagacagtgtaaagaaattgcaagtgataaacaagcgaccgaaaatgataatgaaaatgctatttttcttctatacagccttttttctttgcccttgtactt

SEQ ID NO: 8771 - DNA, 2293 bp, Zea Mays
tttatctcggccaacgtggacggcgcgtgattttctcttctctcgcagtcgcagcacggcagtcggcagcaggcaggcagccagccagcagccagcagctgcgaatcgaagcggaatcgaagcccaccaccagcagcagtgcccacttgcttggagcgcgagtttaccccgagcaaatcgcggcggcgctcgtgcccgtgcctcccgcgtcgaaccctagtgcaactaccagatccggagatcccgcgcgggcgcgggcgggacaccaagcttctgactcaactcaatccccgcacctgccaatgccaccccctcggcgctgatccgatcccgccgccgccgacactcgcgggcccgccccatggattccgcccggagctggctccagaagctgcagccgcgggacaaggacagagagcggggcgccaagacgccggcgccggcgtcgcccaacggtggcgccggcaactccgcgaggatggccgccgcggcgggggaggaggcgctgtctagcgccaccaagcagaaggtggcggcggcgaagcagtacatcgagaaccactacaagtcgcagatgaagtcgcttcaggagcgcaaggagaggtgagactttgtagagaaaaagctacatccaatgtgtatgcaatgaaaaagcttaagaagtccgaaatgttacgaagagggcaggttgaacatgtcagagctgaaagggacctccttgcagaggttgatagtccttacattgttaagctgtactgctcatttcaagatgatgagtttctgtacctcattatggagtaccttcctggtggtgacatgatgactttactcatgcgcaaggacacactgactgaggacgaatctaagttttatgttgcagagacaatactagcaattgaatctattcacaaacgcatttatattcatagggatatcaagcctgataatttgttgctagatcgaagtggccacttgaagctttcagattttggcttatgtaaacctctagatagcagttgcttcccaaatctgagtgaccttgactatgcagcaggtaagagcaccaatccatcatcagatggtgataagcaatccagtaactctactgcccccaggcggacacaacaggaacaactactacattggcagaagaatcggaggatgttggcttactctactgttggtacacctgattacattgcacccgaggtactcctgaagaaaggatatggaatggaatgtgactggtggtcacttggtgcaataatgttcgaaatgcttgtggggtatccgccattttattctgaagacccaatgtcaacatgtaggaagatagtgaattggagaagtcatctaaaattccctgaagaggccagcctttctctagaagctaaagatctcattagcaagctattgtgtaatgtggatcagagaattggaacaaaaggtgcacatgagataaaggtgttgagtgggaaaaactatatcagatggaagcagctttcattcctgaggttaatgatgagttggacacacaaaactttgaaaagtttgaggagactgctcctccaatgcaaacttcatcaaaggcaggtccttggagaaagatgctttcctccaaggacgtgaactttgttggctatacctacaagaactttgaaattgtgaacgatcctgagcttccaggaattgctgagctaaagaaaacgaacaacaagccaaagcgaccaaccatcaaatcattatttgagactgctgatagtgaagaccagccttctgatggcagttttctgaacctattacccacacaactggagctgccagagagccttgagccctctcctcactccagtatctcttctgaggattcccaagcacggaataggtagcaggtctctattcagaggacaagctccataaagtttgcttttgaagagatgtttgtggtgctcagcagccatctaatgtacattgtcctgtacattgttactggtttccaaagttcctttggcaacgacacgaggaggttggttgtcatatagaggaggaggtatttgttctctcctgtaaatccttggattctttgagtttctgagatttattctttcgatatagcatgccaagggggtatgctgcctgtttcctttttacgtgcagaaatctgcatttctacatcgttgttgtaagatttgagacagtgtaaagaaattgcaagtgataaacaagcgaccgaaaatgataatgaaaatgctatttttcttctatacagccttttttctttgcccttgtactt

SEQ ID NO: 8772 - DNA, 2317 bp, Zea Mays
tttatctcggccaacgtggacggcgcgtgattttctcttctctcgcagtcgcagcacggcagtcggcagcaggcaggcagccagccagcagccagcagctgcgaatcgaagcggaatcgaagcccaccaccagcagcagtgcccacttgcttggagcgcgagtttaccccgagcaaatcgcggcggcgctcgtgcccgtgcctcccgcgtcgaaccctagtgcaactaccagatccggagatcccgcgcgggcgcgggcgggacaccaagcttctgactcaactcaatccccgcacctgccaatgccaccccctcggcgctgatccgatcccgccgccgccgacactcgcgggcccgccccatggattccgcccggagctggctccagaagctgcagccgcgggacaaggacagagagcggggcgccaagacgccggcgccggcgtcgcccaacggtggcgccggcaactccgcgaggatggccgccgcggcgggggaggaggcgctgtctagcgccaccaagcagaaggtggcggcggcgaagcagtacatcgagaaccactacaagtcgcagatgaagtcgcttcaggagcgcaaggagaggcgttggatgttggagaggaaactagcagatgcagatgtatctgaagaagagcaaaacaatatcctgaaagatttagaaaaaaaggagacagaatacatgcgcctacgaaggcataaaatgggcgttgatgactttgaattgcttaccattattgggagaggtgcatttggggaggtgagactttgtagagaaaaagctacatccaatgtgtatgcaatgaaaaagcttaagaagtccgaaatgttacgaagagggcaggttgaacatgtcagagctgaaagggacctccttgcagaggttgatagtccttacattgttaagctgtactgctcatttcaagatgatgagtttctgtacctcattatggagtaccttcctggtggtgacatgatgactttactcatgcgcaaggacacactgactgaggacgaatctaagttttatgttgcagagacaatactagcaattgaatctattcacaaacgcatttatattcatagggatatcaagcctgataatttgttgctagatcgaagcggacacaacaggaacaactactacattggcagaagaatcggaggatgttggcttactctactgttggtacacctgattacattgcacccgaggtactcctgaagaaaggatatggaatggaatgtgactggtggtcacttggtgcaataatgttcgaaatgcttgtggggtatccgccattttattctgaagacccaatgtcaacatgtaggaagatagtgaattggagaagtcatctaaaattccctgaagaggccagcctttctctagaagctaaagatctcattagcaagctattgtgtaatgtggatcagagaattggaacaaaaggtgcacatgagataaaggtgttgagtgggaaaaactatatcagatggaagcagctttcattcctgaggttaatgatgagttggacacacaaaactttgaaaagtttgaggagactgctcctccaatgcaaacttcatcaaaggcaggtccttggagaaagatgctttcctccaaggacgtgaactttgttggctatacctacaagaactttgaaattgtgaacgatcctgagcttccaggaattgctgagctaaagaaaacgaacaacaagccaaagcgaccaaccatcaaatcattatttgagactgctgatagtgaagaccagccttctgatggcagttttctgaacctattacccacacaactggagctgccagagagccttgagccctctcctcactccagtatctcttctgaggattcccaagcacggaataggtagcaggtctctattcagaggacaagctccataaagtttgcttttgaagagatgtttgtggtgctcagcagccatctaatgtacattgtcctgtacattgttactggtttccaaagttcctttggcaacgacacgaggaggttggttgtcatatagaggaggaggtatttgttctctcctgtaaatccttggattctttgagtttctgagatttattctttcgatatagcatgccaagggggtatgctgcctgtttcctttttacgtgcagaaatctgcatttctacatcgttgttgtaagatttgagacagtgtaaagaaattgcaagtgataaacaagcgaccgaaaatgataatgaaaatgctatttttcttctatacagccttttttctttgcccttgtactt

SEQ ID NO: 8773 - DNA, 3229 bp, Zea Mays
tttatctcggccaacgtggacggcgcgtgattttctcttctctcgcagtcgcagcacggcagtcggcagcaggcaggcagccagccagcagccagcagctgcgaatcgaagcggaatcgaagcccaccaccagcagcagtgcccacttgcttggagcgcgagtttaccccgagcaaatcgcggcggcgctcgtgcccgtgcctcccgcgtcgaaccctagtgcaactaccagatccggagatcccgcgcgggcgcgggcgggacaccaagcttctgactcaactcaatccccgcacctgccaatgccaccccctcggcgctgatccgatcccgccgccgccgacactcgcgggcccgccccatggattccgcccggagctggctccagaagctgcagccgcgggacaaggacagagagcggggcgccaagacgccggcgccggcgtcgcccaacggtggcgccggcaactccgcgaggatggccgccgcggcgggggaggaggcgctgtctagcgccaccaagcagaaggtggcggcggcgaagcagtacatcgagaaccactacaagtcgcagatgaagtcgcttcaggagcgcaaggagaggcgttggatgttggagaggaaactagcagatgcagatgtatctgaagaagagcaaaacaatatcctgaaagatttagaaaaaaaggagacagaatacatgcgcctacgaaggcataaaatgggcgttgatgactttgaattgcttaccattattgggagaggtgcatttggggaggtgagactttgtagagaaaaagctacatccaatgtgtatgcaatgaaaaagcttaagaagtccgaaatgttacgaagagggcaggttgaacatgtcagagctgaaagggacctccttgcagaggttgatagtccttacattgttaagctgtactgctcatttcaagatgatgagtttctgtacctcattatggagtaccttcctggtggtgacatgatgactttactcatgcgcaaggacacactgactgaggacgaatctaagttttatgttgcagagacaatactagcaattgaatctattcacaaacgcatttatattcatagggatatcaagcctgataatttgttgctagatcgaagtggccacttgaagctttcagattttggcttatgtaaacctctagatagcagttgcttcccaaatctgagtgaccttgactatgcagcaggtaagagcaccaatccatcatcagatggtgataagcaatccagtaactctactgcccccaggcggacacaacaggaacaactactacattggcagaagaatcggaggatgttggtgggtgcccagctatgtaaattttgactcctgccatttcattgtagatatgtcaactcaaatattggttgtgaacctcaatacacaaatctatctactacacaataaattagcttgtatctgcttgtcaacatgaatttgttctaaggagggtcctttttacacagtgtaggctttacaatgacatttcttatacacaatgtagaactagagagcacaatggcgacaataacaacagtcttttagtttgaagcaagttgagtaggccaggagttgttaagagcactaatgtactaaaactaggttagaatcaagaacatctatacatgtacggttattatgtacgttaaacatgcttgtatgagtgaaaggtttcaagatattattgtcttcaaacactgagcagtttgcatagatacatggagaaaatgaaatttcattccacctaagggcttgttcagttaggggtgtccgggtgtggattaattccctccaatccccctcaatccacctcaaactgaacaagccctaaggtgaagtgtaatcctcagcacatcacatatggaatggctcagattggtcatctgtttaaaactcatgcctggttctgtttcatatccttgactctattggtgtgcatggttcatgaaatttataggcttactctactgttggtacacctgattacattgcacccgaggtactcctgaagaaaggatatggaatggaatgtgactggtggtcacttggtgcaataatgttcgaaatgcttgtggggtatccgccattttattctgaagacccaatgtcaacatgtaggaagatagtgaattggagaagtcatctaaaattccctgaagaggccagcctttctctagaagctaaagatctcattagcaagctattgtgtaatgtggatcagagaattggaacaaaaggtgcacatgagataaaggcacatccatggtttgcaggtgttgagtgggaaaaactatatcagatggaagcagctttcattcctgaggttaatgatgagttggacacacaaaactttgaaaagtttgaggagactgctcctccaatgcaaacttcatcaaaggcaggtccttggagaaagatgctttcctccaaggacgtgaactttgttggctatacctacaagaactttgaaattgtgaacgatcctgagcttccaggaattgctgagctaaagaaaacgaacaacaagccaaagcgaccaaccatcaaatcattatttgagactgctgatagtgaagaccagccttctgatggcagttttctgaacctattacccacacaactggagctgccagagagccttgagccctctcctcactccagtatctcttctgaggattcccaagcacggaataggtagcaggtgtgttttctggcacctgccagcttagtccaacaaaagcaagacatagaggcctttcacctagtgatggattgctatctgcaggtctctattcagaggacaagctccataaagtttgcttttgaagagatgtttgtggtgctcagcagccatctaatgtacattgtcctgtacattgttactggtttccaaagttcctttggcaacgacacgaggaggttggttgtcatatagaggaggaggtatttgttctctcctgtaaatccttggattctttgagtttctgagatttattctttcgatatagcatgccaagggggtatgctgcctgtttcctttttacgtgcagaaatctgcatttctacatcgttgttgtaagatttgagacagtgtaaagaaattgcaagtgataaacaagcgaccgaaaatgataatgaaaatgctatttttcttctatacagccttttttctttgcccttgtactt

SEQ ID NO: 8774 - DNA, 2396 bp, Zea Mays
tttatctcggccaacgtggacggcgcgtgattttctcttctctcgcagtcgcagcacggcagtcggcagcaggcaggcagccagccagcagccagcagctgcgaatcgaagcggaatcgaagcccaccaccagcagcagtgcccacttgcttggagcgcgagtttaccccgagcaaatcgcggcggcgctcgtgcccgtgcctcccgcgtcgaaccctagtgcaactaccagatccggagatcccgcgcgggcgcgggcgggacaccaagcttctgactcaactcaatccccgcacctgccaatgccaccccctcggcgctgatccgatcccgccgccgccgacactcgcgggcccgccccatggattccgcccggagctggctccagaagctgcagccgcgggacaaggacagagagcggggcgccaagacgccggcgccggcgtcgcccaacggtggcgccggcaactccgcgaggatggccgccgcggcgggggaggaggcgctgtctagcgccaccaagcagaaggtggcggcggcgaagcagtacatcgagaaccactacaagtcgcagatgaagtcgcttcaggagcgcaaggagaggtgagactttgtagagaaaaagctacatccaatgtgtatgcaatgaaaaagcttaagaagtccgaaatgttacgaagagggcaggttgaacatgtcagagctgaaagggacctccttgcagaggttgatagtccttacattgttaagctgtactgctcatttcaagatgatgagtttctgtacctcattatggagtaccttcctggtggtgacatgatgactttactcatgcgcaaggacacactgactgaggacgaatctaagttttatgttgcagagacaatactagcaattgaatctattcacaaacgcatttatattcatagggatatcaagcctgataatttgttgctagatcgaagtggccacttgaagctttcagattttggcttatgtaaacctctagatagcagttgcttcccaaatctgagtgaccttgactatgcagcaggtaagagcaccaatccatcatcagatggtgataagcaatccagtaactctactgcccccaggcggacacaacaggaacaactactacattggcagaagaatcggaggatgttggcttactctactgttggtacacctgattacattgcacccgaggtactcctgaagaaaggatatggaatggaatgtgactggtggtcacttggtgcaataatgttcgaaatgcttgtggggtatccgccattttattctgaagacccaatgtcaacatgtaggaagatagtgaattggagaagtcatctaaaattccctgaagaggccagcctttctctagaagctaaagatctcattagcaagctattgtgtaatgtggatcagagaattggaacaaaaggtgcacatgagataaaggcacatccatggtttgcaggtgttgagtgggaaaaactatatcagatggaagcagctttcattcctgaggttaatgatgagttggacacacaaaactttgaaaagtttgaggagactgctcctccaatgcaaacttcatcaaaggcaggtccttggagaaagatgctttcctccaaggacgtgaactttgttggctatacctacaagaactttgaaattgtgaacgatcctgagcttccaggaattgctgagctaaagaaaacgaacaacaagccaaagcgaccaaccatcaaatcattatttgagactgctgatagtgaagaccagccttctgatggcagttttctgaacctattacccacacaactggagctgccagagagccttgagccctctcctcactccagtatctcttctgaggattcccaagcacggaataggtagcaggtgtgttttctggcacctgccagcttagtccaacaaaagcaagacatagaggcctttcacctagtgatggattgctatctgcaggtctctattcagaggacaagctccataaagtttgcttttgaagagatgtttgtggtgctcagcagccatctaatgtacattgtcctgtacattgttactggtttccaaagttcctttggcaacgacacgaggaggttggttgtcatatagaggaggaggtatttgttctctcctgtaaatccttggattctttgagtttctgagatttattctttcgatatagcatgccaagggggtatgctgcctgtttcctttttacgtgcagaaatctgcatttctacatcgttgttgtaagatttgagacagtgtaaagaaattgcaagtgataaacaagcgaccgaaaatgataatgaaaatgctatttttcttctatacagccttttttctttgcccttgtactt

SEQ ID NO: 8775 - DNA, 1511 bp, Zea Mays
gcgtgtctgtctgcttagcttcggtctcggttttagtaggcgaatcgttcgatctcaagctattgtgaaggtgttggatctgaattctcaagtataagagcgtcaaacaattaactgccaccaaatcttgtgccagctagcaggacagcggtggattatttccatggcatcttctctatgctagacgcaagtcctggtgcttctagttgtttttgtcttaaataaagatgctaatatgcatgtggctatgtgaggtctattgcatccgatttagtgctgcacatttaagtaatgttgatgattgattcaagcaattttttacttggcctttatattctagattatgtaaccggttgaaactaagagatacatgatgattcgctaaatcataaatatatttatattgcataatatgctacctaaggccttagtgcctatccttaacaaatattttttatacttgattctattgtgtaggtatttatggctgtaagacaggccgttcaacgagcacctcattatctagagtctcaatttaaatggcttgatttctaaagtccaattagatttccagtcagcaatcacatattaactacacaagcaaagtgcaaagatatattatgttctttttttgaaacaagttatttcttacaatacccttttcattgtgttcttttcattgtattttggcttcatctgtcatgtcatgttgtgggtctggctagcttcaatcctgcttttcctttttcagttttgccttttccagtggtaatacttggcagagaaatcatgagccaagcgcaaaccttctgcaagacctggtaacgtattttagggtctagaaacaggcgacgatagtttacgccttgtttttttaaaccaatctagccctggattagcaatgattttttatgcagctcttgtttgttacgactactcatggcaccatttatgcatacatctgaactatttatgttgttgatatgtttctagtgtggcaatgattttttacatatagatgcttaccaaaagttcaaaatctctccggtcagtagcagtagaagcaacacacccaatttgtcatgagttgcgtcagaagggtttggtgaggtgtcacttttggtgtacctcaccgagcaaaaattaggggaatgttaatatagctgatctatttatgcgaaccaagacaagaatcacaaaatttacacttaatttgtgaacatcattagtagttttgtagacattaaacctgtgaaatataaaataccttcaatgttttgtagacattgttgtccttatttgaaaacttgctcattctacttcgttagcttttcgattattgcattcatgtcaaatgtcactcaaaatattgctgctatttttggaatgaagccttttgcccaattatggcttgcccatgagcatttgtacaagattatgtatcttacctttccatctaatttaatacaatatgagtgaggcatgtctgggtaggtgggatttggatccat

SEQ ID NO: 8776 - DNA, 519 bp, Zea Mays
ctcctttccatcatcctcccgccgctcgtcatcttcgtttgattcggctgctgtagtttttgccttttccagtggtaatacttggcagagaaatcatgagccaagcgcaaaccttctgcaagacctggtaacgtattttagggtctagaaacaggcgacgatagtttacgccttgtttttttaaaccaatctagccctggattagcaatgattttttatgcagctcttgtttgttacgactactcatggcaccatttatgcatacatctgaactatttatgttgttgatatgtttctagtgtggcaatgattttttacatatagatgcttaccaaaagttcaaaatctctccggtcagtagcagtagaagcaacacacccaatttgtcatgagttgcgtcagaagggtttggtgaggtgtcacttttggtgtacctcaccgagcaaaaattaggggaatgttaatatagctgatctatttatgcgaaccaagacaagaatcacaaaatttacacttaat

SEQ ID NO: 8777 - DNA, 1951 bp, Zea Mays
ggaacattgggagcgggaccgagagaatccaccgcgccacgcggcactgttcttcttcccctctctcattaaacaaattaaaaggccctccactccacagcgccggagcgcccctgcttgcccccaccttgccctgctgcaacttgaacctcctggcagctcctgtttcaggcaggcagcaagtagggaagaggctctgcagatcagttccatgcagacagcgatcgagcacgcctgctcggtggtggaatgcgctgcgacagcccgagccgccatggacatgagccactacatccccgattggagcagcagcatgggagacaccttcgcgccactgggcggcgaggacgacgacgggctcatcgagctcatgtggcgcaacggccacgtggtcatgcaggcccaggcgccgcggaagccgccgagacccgacgacgacgaggcggcggcggcgcaggcgcaggcgtggttccagtacccggtggaggagagggccgacctcttctcggagctcttcggggaggcgcaggcggccgtcggcggcgcgcgcggggaggccgcgcgccagagtatccggatgatgccgccgccgccgccgccgccgaggcccgcgcaagcgccgcgggaggagaaggcgtgcccgggagacggcggcacggcgacggcgacggacggcgccggctcgtccgtgctcacggtcgtgtccagcctctgcgggagcaacggcaaccacgtgcaggcgacggcgccgggggacgtcgccagggcccgcgacgtgctgatggtgacctcgtcgtcgacgacgcgttccaggtcatgcaccaccaagagcgagcagccgggtcccgggcccggcgctgcccgccggagcggcaagaggaagcataacgacgccaccgatgccgaggacgtggggctggagtgcgagccggcgcagaggacgacgactgccaagcggcgccgcgccgcgcaagtccacaacctctcggagcggaggagacgggacaggatcaacgagaagatgaaggccctgcaggaactcataccccactgcaacaaagcggacaaggcgtcgatgctggacgaggcgatcgagtacctcaagtcgctgcagctccagctgcaggtggtgtggatgggcggcggcatcgcggcggcgggggtgcaccagcggacgatggtggccgcgcccgggcgtcctccccacgtggcttccctgccggcgtcggcgcccgacctctatacgcgctacctcgccgtcgaccacctgccgccaccgcccttggtgccaccgccacgcacggttgagctgagcggcggcgatgggcttgtacccgcgccagaaccccgtgccggcgacgtcgtctccttccttccgaacgaccgaaaatacgcgaaaactatggcaagcctgagattcagatccggggtatggtgaccagctgatgggtcatctagctgcatgcatgtgtgtatgtgttggtagtatggttaagccttgacagagacttgtgatcgagaccgagatcgaccgataggccgtcacttcttttttcttccatctttcagtttttggttgataggccggagtgtaatttgaccagtggtcgagatttgtcaagcgacacaattcttttgtcactatatattactgttcctacttcacaccttcatttccttcctacttcacaattcctagtttaatacttacaccttcatgacacaattcttttgacacaatgcattatttgtgcattgcacatccctttgaagttctttttttttttttttgctcttgtctgcaagtattgcaaaactgtctgtatctatgtgcatgtcagtcgattttgttcgcttttgtgttcagtttgggttgaccagaaacttgaggtgagccgattcagtggaccagctttttcctgtgactggcaccggatcgccaaaagacttt

SEQ ID NO: 8778 - DNA, 1365 bp, Zea Mays
tttacggttcttaccctgtcaagttgcgggaaaaactgagctctccgaggtcagaagggagcgagcccggtcagtcccagtgggtctcttcccttgcctggatcgccacgtatttatggcacaagccacgcggtcttcttcttctcctcccgcggccattgcaggtcttgcagcaacgtctctctcctctgggcggtgggcgctcgatgttcttggctccttcacttggacttcgccccgtcggcgtccactgatcaattgatcatctgcaggtagataagctaccagcatctattttgcgtatctgaactccaaaaaggagagctcgaaactacagcaatgggttgctaccctgtgttctggaggaagaagaactccagaagccaggttgtgcagcttgaccaagacatcccaatcgcgggcaacgtgaaaatctactcgtccaaggagctgaggaaagccacgggaaatttctgcccgggaagcaagcttggacagggttctttcggccgtgtatacctgggaaaactgaacaatggcgagaaagttgccatcaaggtgctctcctcagagtccaggcaagggacaaaggagttcttgaatgaactgagtgtcatatccaacataactcaccacaaccttgtcaaactgcatggctgctgcatcgacggaggccagaagatgctggtctacaactacgtggagaacaacagccttgcacaaacccttttcggtaattcccgcagcggcatcagatttgactggagaacaagggtggagatctgcgttggcgttgccgatgggctcacgtacctccacgaagaagtccgtccaccgatcgtccaccgcgacatcaaagcgagcaacatccttctcgacagaaatctgagacccaagatagcagactttgggctggcgaagttcttccctggcaacatgacacacatcagcaccagagttgcagggacgctaggatatcttgcgccagagtacgccatccgagggcagctgaccaagaaggccgacgtctacagctttggtgtactgctgctggagatcgtcagtggcagatgccacactgatcccacattacctcttgacgagcagttcctcctagaaaaggtctggacactctcggagtccgatgatcttgagagcatcatcgacggtaccatggagcgcgatttcgacaccgaggaagcacgtcggttgctgaaaataggtcttctgtgcacccaggatagccccaagatcaggccctccatgtcaatggttgccaagatgctgaaggccgtccattgcagccgacgagccagcccccaggccaggtgtctgggtggtgagtccgcccctgtgtcagactgc

SEQ ID NO: 8779 - DNA, 1626 bp, Zea Mays
tttacggttcttaccctgtcaagttgcgggaaaaactgagctctccgaggtcagaagggagcgagcccggtcagtcccagtgggtctcttcccttgcctggatcgccacgtatttatggcacaagccacgcggtcttcttcttctcctcccgcggccattgcaggtcttgcagcaacgtctctctcctctgggcggtgggcgctcgatgttcttggctccttcacttggacttcgccccgtcggcgtccactgatcaattgatcatctgcagataagctaccagcatctattttgcgtatctgaactccaaaaaggagagctcgaaactacagcaatgggttgctaccctgtgttctggaggaagaagaactccagaagccaggttgtgcagcttgaccaagacatcccaatcgcgggcaacgtgaaaatctactcgtccaaggagctgaggaaagccacgggaaatttctgcccgggaagcaagcttggacagggttctttcggccgtgtatacctgggaaaactgaacaatggcgagaaagttgccatcaaggtgctctcctcagagtccaggcaagggacaaaggagttcttgaatgaactgagtgtcatatccaacataactcaccacaaccttgtcaaactgcatggctgctgcatcgacggaggccagaagatgctggtctacaactacgtggagaacaacagccttgcacaaacccttttcggtaattcccgcagcggcatcagatttgactggagaacaagggtggagatctgcgttggcgttgccgatgggctcacgtacctccacgaagaagtccgtccaccgatcgtccaccgcgacatcaaagcgagcaacatccttctcgacagaaatctgagacccaagatagcagactttgggctggcgaagttcttccctggcaacatgacacacatcagcaccagagttgcagggacgctaggatatcttgcgccagagtacgccatccgagggcagctgaccaagaaggccgacgtctacagctttggtgtactgctgctggagatcgtcagtggcagatgccacactgatcccacattacctcttgacgagcagttcctcctagaaaaggtctggacactctcggagtccgatgatcttgagagcatcatcgacggtaccatggagcgcgatttcgacaccgaggaagcacgtcggttgctgaaaataggtcttctgtgcacccaggatagccccaagatcaggccctccatgtcaatggttgccaagatgctgaagggtgagtgtgatgtgagtgaaaagatcatgcggcccagcctgatcacagacgtcatggacctgaaagtcaggacagtagagccgatccagttcagtttatccccatcgatgtcacctgcgctgagcagctcactggtgtccacacttgcattagctggtagcacagttgtagagagccgctgaaggaactagttaaaggaccaggttcctacaaaaaatggtttgttagaagcagcatgaattgtttttttgtttgtgttttagtacattgtaaggttgtcagtttgtatatataacatcctagtttgattatcgagattagagattttggccatatgaa

SEQ ID NO: 8780 - DNA, 1996 bp, Zea Mays
ataaagttcacattggtcgtagtttgactgtttatttattgcggcaaatagctacgttccagtcagtttgtatgactaccttggcatgaggattcgatgaaatactagaattgggtcccatatagagctgtccttgagccagcaatgcaaggaagggacatggttggccgtgccaaaactgggactggtaaaactttggcatttggaatccccataatggatgcaattatccgccacaacgagaagtacaagcctggtaagtttcccttggctattgttttggcgccaacaagagaacttgcaaaacaggttgagagggagttccttgattcctcccctttggaaacactatgtgtatatggtgggactccaattatgcagcaaataaggaaacttaattatggcgttgatgtggtcattgggacacctggacgtgtgattgatctgctaaaaagaggttctcttagtttggcagagatccgttttgttgttcttgatgaagcagaccagatgttgtctgttgggtttgatctagatgttgagacaattttggagagggtgcctccgcaacgtcagacattgatgttctctgcaacaatgccaacatggatacggaagctcacacagaagtacctcaacaatcctgtcacagttgaccttgttggtgaggatgaccagaagcttgctgaaggaattagtcttctcgctgtctcttcggagaaccgtgaaaaaccagctgtccttggggaattgattaaggaacatgccaaaggtggtaagtgcattgtttttacacaaacaaaaagggatgcagatagattgtcacacaatatgagtcgaagtttccagtgtgaggctcttcatggggatatctctcaatcccaaagagagagaacactggcaggatttcgagatgggaggtttaatatattgattgctactgatgtcgctgctcgaggattggatatcccaaatgtagatctggtgatacattttgaattgccaaactcgtcagagttgtttgttcacagatctggccgaactggccgtgctgggaagaagggcactgcaattgtgatgtacaactatgaccaaagtagagctgtacgggtcattgaacgtgacgttggatgcaagtttacagagctgccaaaaattactgttgatggatctgacttgctgagtggtggatttgactccttcggtggcgggtatagcggttcaaactatgggcgctcaggtggattcggtggacgtggtggttttggccgatcaggcggtggcggcggatatggcaattctggatttggtcactcaagcggtggatatggacgttctggtggtggaggattcggtgactcagggtttggtggtcggtcaggtggcggtggaggattcggtgactctggattcggtggccaatcaggcggcggtggaggattcggcgactcagggtttggccgcacaagcggtggtgggtcaggttttggtcgttctggtggtttcggcgattctggttccggccggttcggtggcggtttcggcggttctggctcgggtggtttcggtggctttggcgacaagaactcacggtagactcttgcaagtaatagcaggtataaaattatggacgtcctgagccaggttcagcattggtaatgcacatcactctctgaccccctatccatgaccccctcagaaagtgcagaaatctgtgttttgcggtagcaagaacatctggagagacgatccgccggatctcagaaggcagaaggaaataatcacgtgcctttgcttattagtgttcttctctgtttgcattttgatcgttcaagctctagctctagaccatacctgtaaaatattccgtggctcctctatctactgtatgattattgtggcgctgtcttttcttgtaggctgttttaacctgaatgacggcctctatataagcatgtcataaatcgactttattcgtcacaaaaaatgaaaaaaa

SEQ ID NO: 8781 - DNA, 1610 bp, Zea Mays
ccatcaccacctcaaccgacagctcgtcactctcctactcccgtcccacctcccatcatccgcgagccccgccaggccccagctgcagcagcggctatggcgtcgtctccgcccgacgtggacctgggcaagctgagctacgagatcttctccctactcgagagcaagttcctcttcggcggcggctccgtgccgggcacgccagcgcgggcggcggctccgggccccggggaggaccgcggcagggtgcgggtgctggcgatcgacgggtgcgggccgggccccggcgacgcgctgctggcggcggccgcgctcgcgaggctggaggcggcgctgcgggcgcgcgcgggggaccccggcgcgcgcgtggccgacttcttcgacgcggcggcgggggccggcgccggcggcgtgctggccgcgatgctgttcgtgcggggcgacgacgggcgggcgcggtacacggcggcggacgcgctggcgttcgtggcggccagcctcgggagaggcggcgggtggggcagcggcggcggcgggggcgtacggggcaagtgggccgcgctgttccggcgcggggggaggcggggtgcgccctcgccgccgctgcggcgggtgttcggggacgccacgctcagggacaccgtggcgccgctgctggtgccctgctacgacctggccacggccgcgcccttcctcttctcccgcgccgacgccgtcgggagcggcagcctcgacttccgcctccgcgacgtgtgcgccgccacctgcgccgccgccgggggcgccgcgcccgccgtgcggtccgtggacggccgcacggccatcgccgccgcgtccggcggcgtcgccgccatgggcaaccccgccgcggccgccatcacgcacgtgctccacaacaagcgggagttcccgctcgccgccggcgtcgacgacctcctcgtcgtgtccatcggctcgggatcgtccttcgcctccgccgccgccgcttctgctccttccaccggctggcggacgcccgtcccgccgcgctcgccgtcgcccgccgagatggtccgcctcacctccgagggtgtcgccgacatggtcgaccaagcagtggccatggcgttcgggcacacgtgcgggcgcaactacgttcgcatccaggcgtcgtgcgtcgggacggcgctgaggtcgctggacgcgaagaaggcggtggccttggcggacggcatgctggcgcagcggaacgtggaggcggagctgttccgggggcggcggctgtcggccaagtcgaaccgggagaagctggacgcgttcgcggcggagctggtgaaggagcaggagcggcgggaccgccaccgtgccgttcccggcatcgcagggctcgtaccagccctagccccagccattggcgatcgagtggatccgaggacgagctggtcaaagtaagttatactatacgatgcggtatgtccgccgtggctcgagaagaagggcggtagcgtggagagcaatgattagaggttacttttgcatggaaaaagtggatttggatgctaatggcgaggttagataggatgttaatgcctttttaatggagtacgtgcacttggattcgtatgtgcgag

SEQ ID NO: 8782 - DNA, 888 bp, Zea Mays
taaaaaaaatatatgtggccagccggaccgggcaacttcaaggcctaaaggccgagcagccccagccggctgcggtgaagctacggcacctcggtgccttcagctgccttacgggagtaaggcagaggctggcgcataggcggtggttgagagcagcagcgacggcgttcttcgtacgccgatttctacggctcgatcttccgctcttctcgctaatctatttgcctccttcgtttctcggctccttaaaggatgggcagtcaacccctgagcgacaggctgcaaaacaccgtgtgtttctcccgtgttctagtgctcctcttgtgcgcctatgtggcgctgtgttcgtctgattattgtccaccgtggcctggtgtttggactctctgctgcgcggtgttcgtcttctcgggctggtgctgtggacgtctcacacgatctcagcagcggctctagtatctccgtcaacttcccgctgtgcaggcccgaacgtgggcggcggaattggttttctgggatagaacttcatgttcgttgagctggtattcccacgtagacaatctacgtgttgtgagttgcccgttgcctcactttatttactgtttaattttgtgcaatctgctagtattaaatacttgggtgtgattgcactattgtgggcggatttgtttgctcaataataatagcgttatagtgagacaacgtgacagtttgagttttagtgtgttgttaatttcagcatcaagtatatatttgtgcctaattatatctatatttgttgagattgtttacctatgttaaattatgttattttatttaatacacaactccttactatttgtatttatgcttgattacatgtctcattacatttgatctaaaaccctg

SEQ ID NO: 8783 - DNA, 2108 bp, Zea Mays
ctcattgtcatcaaattacttgtataatatgtagcttttacttgcaaggggctgcagcagcagttgttcactatatgggctatacacctggccttttcattgttgggctgtttggaatattaattatgtggatgtatggctacttttggattacaggaatgcttctagttgctggaggttgtatgtgctctttgaaacatgctcgatatgtgatacctgttttgacttcatatggtgtttattctgtggctgttcgtgttgggtggcttggagtcttcttgacactaaacctttctttcttgacaaatgatcttcttaataagttagtgcaaggatacgaaggaagcactgaagaaagccagtttgaagacatgaaggattctgatccagttatggatgagttctatcgtagttgtgaattcccatcagttcctgacagtgaacctgagaccgtgtcttgcgcgaagccatactgctcagcacccatccaagatgtattacatgtacaaaaagaggaacctcctagtaaagtagtgaaatctgattctacttcattggatgagattaagaggataatggatggttcaaaccattatgaagttttgggtgtacctcgtaatagaagcattgatcagaagacactgaaaaaagaatatcacagaatggtcctgcttgtacatcctgataaaaatatgggaaatcaattggcttgtgaatcattcaagaagcttcaaacagcttatgaggtcctctctgatttcacaaagaaaaacagctatgatgagcaactgaggaaagaagaatcacagaaaatgaccccaagatcatgtgttgtctctcaacagagtggtggtgtggagtttctctcagaagagtccaggcgaatacagtgcactaagtgtggtaatttccatatatggatatgcaccaagagaagcaaaacaagggcacgattctgtcagggctgtgatcagtttcatcaagccaaggatggagatggatgggttgaaaccagattttcgacctccatcaagatggaaataccacgggcttttgtctgtgctgagagcaaaatatttgatgtgtctgagtgggctacttgccagggaatggagtgcaagcctaacactcacggtccaacgtttatggtaaacatggttggcgcagataggatgcctcagagatcctacagttcccggtatcccttcagcttggacgcagagatgatcccggaagacgagttcgagctgtggcttcagcaggcgctggcgtcaggcgtcttcgctgacagccccaagcgcaggaaaagttggagcccattcaaactgcctcaaaagggaattaaaagttggcgaagatcgtcatgagggtgcagcaggcattacacagcgaggggtgtaggcgactacatcattggaaagaaggcaatggtgcagggcttcatgaatgtaaataaactgaccaacaatttgcccggatggacaagtgatttttgttcgaagggaaatttggatccataccattaaaagatcaccactttggatccataccattactatctcacttacatgtgggtccacatgagtcaatgacatgtggggtccatggtatatatctaaagtttggatcttttaatggtatagatccaattgttccttgttcgaaaggagaaagagggtggagaagaaacactcatgaataggtataacacataccactgctgaacttggttccctctgcagcaatcccacgagtttagccgtgaaccagtggtgctatcccccctacgatcaaagtaccggtggatctgtggtgtgttagtttcagtagtttagggatctgacatggaagaacgccaagacatcgttcctaagacggctgagatatggagcggtgttcattttaatcgtcaataatatttctgagaagcattgtctttgtgtagaagggaaggaaagaaggatgaaagtgatattggggactggctgtaaagtgtaaatacactaaaagctccctcctgtggaattactgcttgtaacattgtatacactgactgattaacctagtaaaaaacttccatgtttcaaattctctactctactgtttat

SEQ ID NO: 8784 - DNA, 3646 bp, Zea Mays
aagcacataaatgaactcagttgtctttctaccatgttttctcattatatattggcataccagtttttttgaagcagtattaatttccattctcatcatcattaattaaaacaaaatagcgattttttcccgaactgttggtgccactgttactcattcaattgaaccaaacactttcttttccctctctataaccacccatcccatatccatcagcactgagttgagcacccctgctggctgcttgccctgctcctctcttctgcccatgtcttctccctcccccattccactgacgacagtagcaaccaacggtgtctcctctgtcctctctcctaagttacttgcagccctatcctgtctatcctcatcttcctcctctccctgccatcttttgcaagatctctccttcgtcttctctttccccttttaaatccaccggaatccctcttttgtcacgagccaagccgccgagcgcagcataaagcgagcgaagcaccagcaaaagagagcgacgccgcctgcgccaaagcttcggattcccgtctattttaccccccaccctcgccgactcaccggcgcgagatccatccgcaggtgtcggcggcctgcagccccccttgaaagatggcgcctttctgaggctccccgggggtttctcgtcgtttcttgcttggcccctaaagcgggagagcggcttccagggagctcctcccgttcccggccaattcagctgaagtggcggcaagtgggtttagggctcgatccggttttgtgcccgggcgtgtctgactctgacccgggctagggagcggtggttcttggctagttcttgagctggttgcggcgcttatccctcttcttggagctcttggattggtttgggggaaagcaggttcttgcaagcagctgcttcggttctcgaggatgttaattttttgaattcagtcggggggaatggggctctcgcggtctctggattgagcatttctttattggaattcgacatttcgtgcggcctccagtccatggaggatttggggctgtggaagcaggcgtggatgtgggtgttgtcccagaagcacatcctagcgtgggcgcacacggctgcgtgcggcagcagggagcgcctcgccttcctggtcgatcggcactggcccgccgtgtcccgggcctgcgccacctcctcgcgactcgcgctcgccgcgctgcggcaatggcgcgggtgcacggcgcgcggggtgctggcggtggcgagcctcggccctgccgccgtcttcgtcatcctctggagcttcttcgtgtgcatgacctcgccggcgtgcgccctctacgcgcttcttagcctgggggctgcagcagcagttgttcactatatgggctatacacctggccttttcattgttgggctgtttggaatattaattatgtggatgtatggctacttttggattacaggaatgcttctagttgctggaggttgtatgtgctctttgaaacatgctcgatatgtgatacctgttttgacttcatatggtgtttattctgtggctgttcgtgttgggtggcttggagtcttcttgacactaaacctttctttcttgacaaatgatcttcttaataagttagtgcaaggatacgaaggaagcactgaagaaagccagtttgaagacatgaaggattctgatccagttatggatgagttctatcgtagttgtgaattcccatcagttcctgacagtgaacctgagaccgtgtcttgcgcgaagccatactgctcagcacccatccaagatgtattacatgtacaaaaagaggaacctcctagtaaagtagtgaaatctgattctacttcattggatgagattaagaggataatggatggttcaaaccattatgaagttttgggtgtacctcgtaatagaagcattgatcagaagacactgaaaaaagaatatcacagaatggtcctgcttgtacatcctgataaaaatatgggaaatcaattggcttgtgaatcattcaagaagcttcaaacagcttatgaggcaagtgtttggatgtttatgctttgactcatcattgtctagattagtgtttaatacagtattgtatcttttatttaacagctagttgttataggctccttgcgttctggtggcttggattgcctctcttcctggacccgtggtgtctaggagagatggctttagcgttgctttttgtgatgtttaccatgtgtatcacaaaactctgtaatttgttgtgttcggattcaaccatggtcctctctgatttcacaaagaaaaacagctatgatgagcaactgaggaaagaagaatcacagaaaatgaccccaagatcatgtgttgtctctcaacagagtggtggtgtggagtttctctcagaagagtccaggcgaatacagtgcactaagtgtggtaatttccatatatggatatgcaccaagagaagcaaaacaagggcacgattctgtcagggctgtgatcagtttcatcaagccaaggatggagatggatgggttgaaaccagattttcgacctccatcaagatggaaataccacgggcttttgtctgtgctgagagcaaaatatttgatgtgtctgagtgggctacttgccagggaatggagtgcaagcctaacactcacggtccaacgtttatggtaaacatggttggcgcagataggatgcctcagagatcctacagttcccggtatcccttcagcttggacgcagagatgatcccggaagacgagttcgagctgtggcttcagcaggcgctggcgtcaggcgtcttcgctgacagccccaagcgcaggaaaagttggagcccattcaaactgcctcaaaagggaattaaaagttggcgaagatcgtcatgagggtgcagcaggcattacacagcgaggggtgtaggcgactacatcattggaaagaaggcaatggtgcagggcttcatgaatgtaaataaactgaccaacaatttgcccggatggacaagtgatttttgttcgaagggaaatttggatccataccattaaaagatcaccactttggatccataccattactatctcacttacatgtgggtccacatgagtcaatgacatgtggggtccatggtatatatctaaagtttggatcttttaatggtatagatccaattgttccttgttcgaaaggagaaagagggtggagaagaaacactcatgaataggtataacacataccactgctgaacttggttccctctgcagcaatcccacgagtttagccgtgaaccagtggtgctatcccccctacgatcaaagtaccggtggatctgtggtgtgttagtttcagtagtttagggatctgacatggaagaacgccaagacatcgttcctaagacggctgagatatggagcggtgttcattttaatcgtcaataatatttctgagaagcattgtctttgtgtagaagggaaggaaagaaggatgaaagtgatattggggactggctgtaaagtgtaaatacactaaaagctccctcctgtggaattactgcttgtaacattgtatacactgactgattaacctagtaaaaaacttccatgtttcaaattctctactctactgtttat

SEQ ID NO: 8785 - DNA, 3426 bp, Zea Mays
aagcacataaatgaactcagttgtctttctaccatgttttctcattatatattggcataccagtttttttgaagcagtattaatttccattctcatcatcattaattaaaacaaaatagcgattttttcccgaactgttggtgccactgttactcattcaattgaaccaaacactttcttttccctctctataaccacccatcccatatccatcagcactgagttgagcacccctgctggctgcttgccctgctcctctcttctgcccatgtcttctccctcccccattccactgacgacagtagcaaccaacggtgtctcctctgtcctctctcctaagttacttgcagccctatcctgtctatcctcatcttcctcctctccctgccatcttttgcaagatctctccttcgtcttctctttccccttttaaatccaccggaatccctcttttgtcacgagccaagccgccgagcgcagcataaagcgagcgaagcaccagcaaaagagagcgacgccgcctgcgccaaagcttcggattcccgtctattttaccccccaccctcgccgactcaccggcgcgagatccatccgcaggtgtcggcggcctgcagccccccttgaaagatggcgcctttctgaggctccccgggggtttctcgtcgtttcttgcttggcccctaaagcgggagagcggcttccagggagctcctcccgttcccggccaattcagctgaagtggcggcaagtgggtttagggctcgatccggttttgtgcccgggcgtgtctgactctgacccgggctagggagcggtggttcttggctagttcttgagctggttgcggcgcttatccctcttcttggagctcttggattggtttgggggaaagcaggttcttgcaagcagctgcttcggttctcgaggatgttaattttttgaattcagtcggggggaatggggctctcgcggtctctggattgagcatttctttattggaattcgacatttcgtgcggcctccagtccatggaggatttggggctgtggaagcaggcgtggatgtgggtgttgtcccagaagcacatcctagcgtgggcgcacacggctgcgtgcggcagcagggagcgcctcgccttcctggtcgatcggcactggcccgccgtgtcccgggcctgcgccacctcctcgcgactcgcgctcgccgcgctgcggcaatggcgcgggtgcacggcgcgcggggtgctggcggtggcgagcctcggccctgccgccgtcttcgtcatcctctggagcttcttcgtgtgcatgacctcgccggcgtgcgccctctacgcgcttcttagcctgggggctgcagcagcagttgttcactatatgggctatacacctggccttttcattgttgggctgtttggaatattaattatgtggatgtatggctacttttggattacaggaatgcttctagttgctggaggttgtatgtgctctttgaaacatgctcgatatgtgatacctgttttgacttcatatggtgtttattctgtggctgttcgtgttgggtggcttggagtcttcttgacactaaacctttctttcttgacaaatgatcttcttaataagttagtgcaaggatacgaaggaagcactgaagaaagccagtttgaagacatgaaggattctgatccagttatggatgagttctatcgtagttgtgaattcccatcagttcctgacagtgaacctgagaccgtgtcttgcgcgaagccatactgctcagcacccatccaagatgtattacatgtacaaaaagaggaacctcctagtaaagtagtgaaatctgattctacttcattggatgagattaagaggataatggatggttcaaaccattatgaagttttgggtgtacctcgtaatagaagcattgatcagaagacactgaaaaaagaatatcacagaatggtcctgcttgtacatcctgataaaaatatgggaaatcaattggcttgtgaatcattcaagaagcttcaaacagcttatgaggtcctctctgatttcacaaagaaaaacagctatgatgagcaactgaggaaagaagaatcacagaaaatgaccccaagatcatgtgttgtctctcaacagagtggtggtgtggagtttctctcagaagagtccaggcgaatacagtgcactaagtgtggtaatttccatatatggatatgcaccaagagaagcaaaacaagggcacgattctgtcagaattatgtggatgtagggctgtgatcagtttcatcaagccaaggatggagatggatgggttgaaaccagattttcgacctccatcaagatggaaataccacgggcttttgtctgtgctgagagcaaaatatttgatgtgtctgagtgggctacttgccagggaatggagtgcaagcctaacactcacggtccaacgtttatggtaaacatggttggcgcagataggatgcctcagagatcctacagttcccggtatcccttcagcttggacgcagagatgatcccggaagacgagttcgagctgtggcttcagcaggcgctggcgtcaggcgtcttcgctgacagccccaagcgcaggaaaagttggagcccattcaaactgcctcaaaagggaattaaaagttggcgaagatcgtcatgagggtgcagcaggcattacacagcgaggggtgtaggcgactacatcattggaaagaaggcaatggtgcagggcttcatgaatgtaaataaactgaccaacaatttgcccggatggacaagtgatttttgttcgaagggaaatttggatccataccattaaaagatcaccactttggatccataccattactatctcacttacatgtgggtccacatgagtcaatgacatgtggggtccatggtatatatctaaagtttggatcttttaatggtatagatccaattgttccttgttcgaaaggagaaagagggtggagaagaaacactcatgaataggtataacacataccactgctgaacttggttccctctgcagcaatcccacgagtttagccgtgaaccagtggtgctatcccccctacgatcaaagtaccggtggatctgtggtgtgttagtttcagtagtttagggatctgacatggaagaacgccaagacatcgttcctaagacggctgagatatggagcggtgttcattttaatcgtcaataatatttctgagaagcattgtctttgtgtagaagggaaggaaagaaggatgaaagtgatattggggactggctgtaaagtgtaaatacactaaaagctccctcctgtggaattactgcttgtaacattgtatacactgactgattaacctagtaaaaaacttccatgtttcaaattctctactctactgtttat

SEQ ID NO: 8786 - DNA, 3431 bp, Zea Mays
aagcacataaatgaactcagttgtctttctaccatgttttctcattatatattggcataccagtttttttgaagcagtattaatttccattctcatcatcattaattaaaacaaaatagcgattttttcccgaactgttggtgccactgttactcattcaattgaaccaaacactttcttttccctctctataaccacccatcccatatccatcagcactgagttgagcacccctgctggctgcttgccctgctcctctcttctgcccatgtcttctccctcccccattccactgacgacagtagcaaccaacggtgtctcctctgtcctctctcctaagttacttgcagccctatcctgtctatcctcatcttcctcctctccctgccatcttttgcaagatctctccttcgtcttctctttccccttttaaatccaccggaatccctcttttgtcacgagccaagccgccgagcgcagcataaagcgagcgaagcaccagcaaaagagagcgacgccgcctgcgccaaagcttcggattcccgtctattttaccccccaccctcgccgactcaccggcgcgagatccatccgcaggtgtcggcggcctgcagccccccttgaaagatggcgcctttctgaggctccccgggggtttctcgtcgtttcttgcttggcccctaaagcgggagagcggcttccagggagctcctcccgttcccggccaattcagctgaagtggcggcaagtgggtttagggctcgatccggttttgtgcccgggcgtgtctgactctgacccgggctagggagcggtggttcttggctagttcttgagctggttgcggcgcttatccctcttcttggagctcttggattggtttgggggaaagcaggttcttgcaagcagctgcttcggttctcgaggatgttaattttttgaattcagtcggggggaatggggctctcgcggtctctggattgagcatttctttattggaattcgacatttcgtgcggcctccagtccatggaggatttggggctgtggaagcaggcgtggatgtgggtgttgtcccagaagcacatcctagcgtgggcgcacacggctgcgtgcggcagcagggagcgcctcgccttcctggtcgatcggcactggcccgccgtgtcccgggcctgcgccacctcctcgcgactcgcgctcgccgcgctgcggcaatggcgcgggtgcacggcgcgcggggtgctggcggtggcgagcctcggccctgccgccgtcttcgtcatcctctggagcttcttcgtgtgcatgacctcgccggcgtgcgccctctacgcgcttcttagcctgggggctgcagcagcagttgttcactatatgggctatacacctggccttttcattgttgggctgtttggaatattaattatgtggatgtatggctacttttggattacaggaatgcttctagttgctggaggttgtatgtgctctttgaaacatgctcgatatgtgatacctgttttgacttcatatggtgtttattctgtggctgttcgtgttgggtggcttggagtcttcttgacactaaacctttctttcttgacaaatgatcttcttaataagttagtgcaaggatacgaaggaagcactgaagaaagccagtttgaagacatgaaggattctgatccagttatggatgagttctatcgtagttgtgaattcccatcagttcctgacagtgaacctgagaccgtgtcttgcgcgaagccatactgctcagcacccatccaagatgtattacatgtacaaaaagaggaacctcctagtaaagtagtgaaatctgattctacttcattggatgagattaagaggataatggatggttcaaaccattatgaagttttgggtgtacctcgtaatagaagcattgatcagaagacactgaaaaaagaatatcacagaatgtcttgtgttttgtttctctaggtcctgcttgtacatcctgataaaaatatgggaaatcaattggcttgtgaatcattcaagaagcttcaaacagcttatgaggtcctctctgatttcacaaagaaaaacagctatgatgagcaactgaggaaagaagaatcacagaaaatgaccccaagatcatgtgttgtctctcaacagagtggtggtgtggagtttctctcagaagagtccaggcgaatacagtgcactaagtgtggtaatttccatatatggatatgcaccaagagaagcaaaacaagggcacgattctgtcagggctgtgatcagtttcatcaagccaaggatggagatggatgggttgaaaccagattttcgacctccatcaagatggaaataccacgggcttttgtctgtgctgagagcaaaatatttgatgtgtctgagtgggctacttgccagggaatggagtgcaagcctaacactcacggtccaacgtttatggtaaacatggttggcgcagataggatgcctcagagatcctacagttcccggtatcccttcagcttggacgcagagatgatcccggaagacgagttcgagctgtggcttcagcaggcgctggcgtcaggcgtcttcgctgacagccccaagcgcaggaaaagttggagcccattcaaactgcctcaaaagggaattaaaagttggcgaagatcgtcatgagggtgcagcaggcattacacagcgaggggtgtaggcgactacatcattggaaagaaggcaatggtgcagggcttcatgaatgtaaataaactgaccaacaatttgcccggatggacaagtgatttttgttcgaagggaaatttggatccataccattaaaagatcaccactttggatccataccattactatctcacttacatgtgggtccacatgagtcaatgacatgtggggtccatggtatatatctaaagtttggatcttttaatggtatagatccaattgttccttgttcgaaaggagaaagagggtggagaagaaacactcatgaataggtataacacataccactgctgaacttggttccctctgcagcaatcccacgagtttagccgtgaaccagtggtgctatcccccctacgatcaaagtaccggtggatctgtggtgtgttagtttcagtagtttagggatctgacatggaagaacgccaagacatcgttcctaagacggctgagatatggagcggtgttcattttaatcgtcaataatatttctgagaagcattgtctttgtgtagaagggaaggaaagaaggatgaaagtgatattggggactggctgtaaagtgtaaatacactaaaagctccctcctgtggaattactgcttgtaacattgtatacactgactgattaacctagtaaaaaacttccatgtttcaaattctctactctactgtttat

SEQ ID NO: 8787 - DNA, 5821 bp, Zea Mays
ctccttgctgaggcagaggaggactgcagccagcagtactgtacggctattaaacaagcccagagctttgctggctggctggctggcttgccgctgctcctctcctctcctctcctcgctagctccccccaagcgagcacgccgcccaccacgatgccagcgcgcacgggagccggctgctccgcctccgcctcctctccgctcccgcaccactagcgcgggagcccgatggcgagcagcagggggaggctgaggctctccccgcgcgcggcggcgccgcagctggacgcgggcaagtacgtgcggtacacggcggagcaggtggatgcgctggagcttgcctacggcgagtgccccaagcccagctcgctgcgccggcagcagctcatccgggactgcgccgtcctcaccaacgtcgagcccaggcagatcaaggtctggttccagaaccgcagatgccgggagaagcagcggagggagtcctctcgtctgcagaccgtcaaccggaagctgggtgccatgaacaagctgttgatggaggagaacgaccggctgcagaagcaggtgtcccgtctcgtcttcgacaacgggtatatgaagaatcggctccacagtccttctgtagccaccaccgacacaagctgcgagtctgtggtgacaagtggtcagcacaagcagcagcaaaacccagcagttctgcatcctccacaaagggatgcgaacaacccagcaggtctactcgctattgctgaggagacattggcggagttcatgtccaaggcgaccggaactgctgtcaactgggtgcagatggttgggatgaagcctggtccggattccgttggaatcatcgctgtttcgcacaactgcagcggcgtagcagcacgagcttgcggccttgtgagcctcgagcccacaaaggttgccgagatccttaaggatcgcgcatcgtggtatcgcgattgtcggcgtgttgatatcctccatgttatccctacgggtaacggtggaacgattgagctgatctatatgcagacttatgcactgacaactctggcggaaccgcgcgacttttggacactacgatacactagtggtcttgacgatggcagtcttgtgatctgcgaaaggtcattgacccactccactggaggtccttctggacctaaaactccagattttataagagctgaggtgcttcctagtggttatctgattcgaccttgtgatgggggaggttccatgatttacattgtggatcatgttgatctgaatgcttgtagtgtccctgaggttcttcgaccgctctatgaatctcctaagatactggcacaaaagatgactgctgcggcgttgcgtcacattaggcaaattgcacacgaatcaagtggtgaaacgccctatggtgctgggcgacagccagctgttctcagaactttcagtcaaaggctcagcagaggcttcaatgatgctgtgagtggctttccagacgatggctggtcttctttgttgagcagtgatggtgctgaggatatttcaattacaatcaactcatctccaaacaaacttattgggtctgatgtcagcccttccccattcttttctgccatggggggcggcatcatgtgcgcaaaagcgtcaatgctactgcagaatgtgccacctgctctacttgtgcgatttttgagggagcatcgctctgaatgggctgaccctggtgttgatgcttattccgctgcctctctgagggccaacccatataatgttccgggtttaagggctggtgggtttatgggcaaccaggttatactaccccttgcacgcaccgtggagcatgaagagtgcttggaggttattcgacttcaaggacatggctttagccatgacgaggttcttatgtccccggatatgtttcttctgcagttgtgcagcggcatcgatgaggatgcgccgggtgcttgtgcacagcttgtcttcgctcctatcgatgaatcttttgctgacgatgcaccgttgctaccctctggcttccgtgtgataccgcttgatgctaagacggatgtgccatctgccacacgtacccttgaccttgcttctgcgctcgaggtcggatcaggcggaggtctgtgtgctttaagcgatagcgggtcaggcacgcgcagcacgaggtcggtcctgaccatcgccttccagttctcgttcgagaaccacctccgcgagagcgtggcagcgatggccaggcagtatgtcagggcagtgatggcgatcgtgcagagggtggccatggcgatttctccctctcgccttggcccgcatgtcgaactgaagcatccgccaggctctcccgaggcactcgcactagcttcgtggattggcaggagctacagggcgcacactggaacggagatccgctggtcggacactgaagacgcggcgggctctcccctgacgctgttctggaagcacagcgacgccataatctgctgctctctaaagccggctttcacactcaagttcgccaacagcgccggcttcgacatactggagacgacggtcgcgaacgtccaggacctgcagctggaggcggtccttgatgacgggggacagaaggccctggtcgcacagctccccaagatcatgctgcagccttgcctttgaccctttgtgagcagggcctggcgtacctccccggcggcgtgtgcaggtcgagcatggggcggcaggcgtcgtacgagcaggcggtggcgtggaaggtggtgggcgacgacggcgcgccgcagtgcctggcgctcatgttcgtcaactggaccttcatctgatgctcctccgctcttgacgttcacagcctcgtgcctcgctcggcagcgctagatcggttgccgcctttatcctatcctatccgactacgtattactagttgctttccgttgcacctgtgtgctacaactgctcgagacaatgcccctgctgtctgtttatggcctaagtctactgtggtggatcgggagttggagaacaatgcccctgctgtctgtttatgtgtgagacttaaccctattactactgctgttatcattgaatctttgtgatcttttgtgtcattgtgtgacctgcaaaggttaatcctaaccacggaaaatttaacattttagcatcatttaggactgatttagtgaccagcggatttagatgagatccctagggtttgaataggaagaggtttctccccagagatcccaccaccaaatcctggtcacaatcatccgttagcgtgagtgacacctggacctgcaactccgatctgacgaggtggacggatttcaggcctgtcaagtcaacgctggcgagctagtaataattacactgatcaatggcgctggccggcggccagcgccgcagaggaacagcggcaactgcagcgacggatggagatggactactcgggctcaccgcgtactgtgctgtcgtcgtctctccgccgctgctccgtggcgtttaaactccgcccgtgaccgactgaccggtcgatgacgctccattgctgttctgctcgccggggatttccctgatccgtcgggagtcgggacccattcctgcctgcgtcaccacgctcaggctgaaaaaattgctattttgtcactctcaatgtgggctatttgctattatgtcgcctgtgggctgtggggtttgcgcctgcggcctgtcggccgctcccgtcgtgtacgcgacctacctggaccggctcaattgtaacgttaatgggccgaaaagctggcgcttgggcccgactagcccatctccgtccgtccccgtccctcacccgcgactccgcgagccaacccgaccaccacttccgccatggccatgctcgctctctcctcccgccccctctcctcctcctccttcctccgctcgaagccgcgcgcgctccacctccaccgccacctcctccccaaacccctcggctccgcctccccgctcacgccgcctactccccgcgccgaccccgccccggcgccggacgcggaccccaccccgctcttcctccgcccagcgtcccaccgggtcccacgcgccgccctcgccgcgttccgccgccgcgcggccgcgctcgtcccgcccaccgcgccgcacctccaccgccacctccgctggctcctcgccgacgccaccggggacccgtccgccgccaccacctcgtcctccgaaggcccagcgctcctccgcgcgccgctcgaggacctcgaggccctgtggctgcgccacgtccgggagcgcacgccgttccagtacgtggtcgggaacgagcactggcgggacctggtggtcgccgtcagggagggcgtcctcatcccgcgcccggagacggaggccatcatcgacatggtgcgcgccgtggaggacttcgccgacgggtggtgggccgacctcggcaccggcagtggcgccatcgccgtggcgctcgccagggagctcgccgggcaagggagggtgttcgccacggatgtcagcgaggtggccatcgacgttgcgaggctcaacgtccagaggtacggtgtgcaggataaagttgaaataaggcatggctcatggtttgaacctctggaagatttgaaaggaaaacttatgggtgtgattagtaaccctccgtacataccaaccgacgacctacctggtctgcaacctgaggttggttggcatgaaccaaagttggcgcttgacggcggcaaggatggccttgaacatctgctgcatctctgtgaagggttatcctcagttctgaaacctggaggcttctttgtttttgagacaaatggcaacaaacagtccgagctccttgttgatttgataagcacaaagtggagttgttcttttcacaatgtcaaagcagttttagactttgcagacatcaagcgttttgtaacgggatatcgaagatgaacaataaagcacagatgtttgtgtaatcatttggagacatgttttgtttccttcttacttaaggacctcccccaattgaaaaaaacgagatcagtctgggctggcttgggcagaaagcgaacaacacatgcagttgccccctttgcagagctcatcgcttggagttaaagcctgctggtggcaacaatatgtctcagagttaatcataaattcatattcgttaaaaaaatgtatcctctaggcatgcgaggtagtaatatgtttgtttggcagagccaagctgcgcatccaactgctcaagaaagctcgacggcagtagacgagagagagtgctgtggcagttgggctttcaggagactgtagctcgtatgtatctggccactagttttctggccgagttgggtggtgattgtgatttaattaaagtggaagcttttgtgcctgccttccaaaattattccgccgtccacacgccaccttgcgtgtttcattattgatggcgtggtccagttttctgtttttatttctttctgtctttctttcttgcttacttatgctgaagccatctccagagctattactgtttatttggggtggaaaaatctgggaatcatgagacgtgatgtgtaaggattgcagcacagggtctcgctggaaaggagtgtcggggccacgagaagccgtctcgtcttgtgcatctgcgtctttgccgagtgtgtgtggaaactggtggcgacactgagactgagaggctggcttgtgaagtggttctctcctggatctggccccacccatccattcccagcccggtcgtttggtttggtttgtttgtccaccaatttgcggcggtggttgctcctgtcctgtgcttcgcaaaaac

SEQ ID NO: 8788 - DNA, 930 bp, Zea Mays
cttgtactaggtggcctaggggacttggctctgcctgtcctttcggttctatttttcctacttataagtgttgtttcataccttaacggttaccccagcccagacaaatggcaacaaacagtccgagctccttgttgatttgataagcacaaagtggagttgttcttttcacaatgtcaaagcagttttagactttgcagacatcaagcgttttgtaacgggatatcgaagatgaacaataaagcacagatgtttgtgtaatcatttggagacatgttttgtttccttcttacttaaggacctcccccaattgaaaaaaacgagatcagtctgggctggcttgggcagaaagcgaacaacacatgcagttgccccctttgcagagctcatcgcttggagttaaagcctgctggtggcaacaatatgtctcagagttaatcataaattcatattcgttaaaaaaatgtatcctctaggcatgcgaggtagtaatatgtttgtttggcagagccaagctgcgcatccaactgctcaagaaagctcgacggcagtagacgagagagagtgctgtggcagttgggctttcaggagactgtagctcgtatgtatctggccactagttttctggccgagttgggtggtgattgtgatttaattaaagtggaagcttttgtgcctgccttccaaaattattccgccgtccacacgccaccttgcgtgtttcattattgatggcgtggtccagttttctgtttttatttctttctgtctttctttcttgcttacttatgctgaagccatctccagagctattactgtttatttggggtggaaaaatctgggaatcatgagacgtgatgtgtaaggattgcagcacagggtctcgctggaaaggagtgtcggggccacgagaagccgtctcgtcttgtg

SEQ ID NO: 8789 - DNA, 5521 bp, Zea Mays
gccgcctcactcccacagtggacgaatcaagaactagaataacgacaccttttaagcgaaaagctttggtagatgcagacacatctctttcagctagctagctaggctaatgtaatggttcacatacatttggttcgtgcatagtatccgttttgtctcttttactccacctttttcccatacatccctaccctgtgctcatgccataagaggatgtcactgagatgccttctttctgttcattcttggttgtatgccagtcaacaactacaacgggatcccgtgcattggaagccgatgccgggagaagcagcggagggagtcctctcgtctgcagaccgtcaaccggaagctgggtgccatgaacaagctgttgatggaggagaacgaccggctgcagaagcaggtgtcccgtctcgtcttcgacaacgggtatatgaagaatcggctccacagtccttctgtagccaccaccgacacaagctgcgagtctgtggtgacaagtggtcagcacaagcagcagcaaaacccagcagttctgcatcctccacaaagggatgcgaacaacccagcagggtaataagtctggaacacggttgcatttcgttttcaaactctatgcctgctctaatgctagtttcccagtctactcgctattgctgaggagacattggcggagttcatgtccaaggcgaccggaactgctgtcaactgggtgcagatggttgggatgaagcctggtccggattccgttggaatcatcgctgtttcgcacaactgcagcggcgtagcagcacgagcttgcggccttgtgagcctcgagcccacaaaggttgccgagatccttaaggatcgcgcatcgtggtatcgcgattgtcggcgtgttgatatcctccatgttatccctacgggtaacggtggaacgattgagctgatctatatgcagacttatgcactgacaactctggcggaaccgcgcgacttttggacactacgatacactagtggtcttgacgatggcagtcttgtgatctgcgaaaggtcattgacccactccactggaggtccttctggacctaaaactccagattttataagagctgaggtgcttcctagtggttatctgattcgaccttgtgatgggggaggttccatgatttacattgtggatcatgttgatctgaatgcttgtagtgtccctgaggttcttcgaccgctctatgaatctcctaagatactggcacaaaagatgactgctgcggcgttgcgtcacattaggcaaattgcacacgaatcaagtggtgaaacgccctatggtgctgggcgacagccagctgttctcagaactttcagtcaaaggctcagcagaggcttcaatgatgctgtgagtggctttccagacgatggctggtcttctttgttgagcagtgatggtgctgaggatatttcaattacaatcaactcatctccaaacaaacttattgggtctgatgtcagcccttccccattcttttctgccatggggggcggcatcatgtgcgcaaaagcgtcaatgctactgcagaatgtgccacctgctctacttgtgcgatttttgagggagcatcgctctgaatgggctgaccctggtgttgatgcttattccgctgcctctctgagggccaacccatataatgttccgggtttaagggctggtgggtttatgggcaaccaggttatactaccccttgcacgcaccgtggagcatgaagagtgcttggaggttattcgacttcaaggacatggctttagccatgacgaggttcttatgtccccggatatgtttcttctgcagttgtgcagcggcatcgatgaggatgcgccgggtgcttgtgcacagcttgtcttcgctcctatcgatgaatcttttgctgacgatgcaccgttgctaccctctggcttccgtgtgataccgcttgatgctaagacggatgtgccatctgccacacgtacccttgaccttgcttctgcgctcgaggtcggatcaggcggaggtctgtgtgctttaagcgatagcgggtcaggcacgcgcagcacgaggtcggtcctgaccatcgccttccagttctcgttcgagaaccacctccgcgagagcgtggcagcgatggccaggcagtatgtcagggcagtgatggcgatcgtgcagagggtggccatggcgatttctccctctcgccttggcccgcatgtcgaactgaagcatccgccaggctctcccgaggcactcgcactagcttcgtggattggcaggagctacagggcgcacactggaacggagatccgctggtcggacactgaagacgcggcgggctctcccctgacgctgttctggaagcacagcgacgccataatctgctgctctctaaagccggctttcacactcaagttcgccaacagcgccggcttcgacatactggagacgacggtcgcgaacgtccaggacctgcagctggaggcggtccttgatgacgggggacagaaggccctggtcgcacagctccccaagatcatgctgcagggcctggcgtacctccccggcggcgtgtgcaggtcgagcatggggcggcaggcgtcgtacgagcaggcggtggcgtggaaggtggtgggcgacgacggcgcgccgcagtgcctggcgctcatgttcgtcaactggaccttcatctgatgctcctccgctcttgacgttcacagcctcgtgcctcgctcggcagcgctagatcggttgccgcctttatcctatcctatccgactacgtattactagttgctttccgttgcacctgtgtgctacaactgctcgagacaatgcccctgctgtctgtttatggcctaagtctactgtggtggatcgggagttggagaacaatgcccctgctgtctgtttatgtgtgagacttaaccctattactactgctgttatcattgaatctttgtgatcttttgtgtcattgtgtgacctgcaaaggttaatcctaaccacggaaaatttaacattttagcatcatttaggactgatttagtgaccagcggatttagatgagatccctagggtttgaataggaagaggtttctccccagagatcccaccaccaaatcctggtcacaatcatccgttagcgtgagtgacacctggacctgcaactccgatctgacgaggtggacggatttcaggcctgtcaagtcaacgctggcgagctagtaataattacactgatcaatggcgctggccggcggccagcgccgcagaggaacagcggcaactgcagcgacggatggagatggactactcgggctcaccgcgtactgtgctgtcgtcgtctctccgccgctgctccgtggcgtttaaactccgcccgtgaccgactgaccggtcgatgacgctccattgctgttctgctcgccggggatttccctgatccgtcgggagtcgggacccattcctgcctgcgtcaccacgctcaggctgaaaaaattgctattttgtcactctcaatgtgggctatttgctattatgtcgcctgtgggctgtggggtttgcgcctgcggcctgtcggccgctcccgtcgtgtacgcgacctacctggaccggctcaattgtaacgttaatgggccgaaaagctggcgcttgggcccgactagcccatctccgtccgtccccgtccctcacccgcgactccgcgagccaacccgaccaccacttccgccatggccatgctcgctctctcctcccgccccctctcctcctcctccttcctccgctcgaagccgcgcgcgctccacctccaccgccacctcctccccaaacccctcggctccgcctccccgctcacgccgcctactccccgcgccgaccccgccccggcgccggacgcggaccccaccccgctcttcctccgcccagcgtcccaccgggtcccacgcgccgccctcgccgcgttccgccgccgcgcggccgcgctcgtcccgcccaccgcgccgcacctccaccgccacctccgctggctcctcgccgacgccaccggggacccgtccgccgccaccacctcgtcctccgaaggcccagcgctcctccgcgcgccgctcgaggacctcgaggccctgtggctgcgccacgtccgggagcgcacgccgttccagtacgtggtcgggaacgagcactggcgggacctggtggtcgccgtcagggagggcgtcctcatcccgcgcccggagacggaggccatcatcgacatggtgcgcgccgtggaggacttcgccgacgggtggtgggccgacctcggcaccggcagtggcgccatcgccgtggcgctcgccagggagctcgccgggcaagggagggtgttcgccacggatgtcagcgaggtggccatcgacgttgcgaggctcaacgtccagaggtacggtgtgcaggataaagttgaaataaggcatggctcatggtttgaacctctggaagatttgaaaggaaaacttatgggtgtgattagtaaccctccgtacataccaaccgacgacctacctggtctgcaacctgaggttggttggcatgaaccaaagttggcgcttgacggcggcaaggatggccttgaacatctgctgcatctctgtgaagggttatcctcagttctgaaacctggaggcttctttgtttttgagacaaatggcaacaaacagtccgagctccttgttgatttgataagcacaaagtggagttgttcttttcacaatgtcaaagcagttttagactttgcagacatcaagcgttttgtaacgggatatcgaagatgaacaataaagcacagatgtttgtgtaatcatttggagacatgttttgtttccttcttacttaaggacctcccccaattgaaaaaaacgagatcagtctgggctggcttgggcagaaagcgaacaacacatgcagttgccccctttgcagagctcatcgcttggagttaaagcctgctggtggcaacaatatgtctcagagttaatcataaattcatattcgttaaaaaaatgtatcctctaggcatgcgaggtagtaatatgtttgtttggcagagccaagctgcgcatccaactgctcaagaaagctcgacggcagtagacgagagagagtgctgtggcagttgggctttcaggagactgtagctcgtatgtatctggccactagttttctggccgagttgggtggtgattgtgatttaattaaagtggaagcttttgtgcctgccttccaaaattattccgccgtccacacgccaccttgcgtgtttcattattgatggcgtggtccagttttctgtttttatttctttctgtctttctttcttgcttacttatgctgaagccatctccagagctattactgtttatttggggtggaaaaatctgggaatcatgagacgtgatgtgtaaggattgcagcacagggtctcgctggaaaggagtgtcggggccacgagaagccgtctcgtcttgtg

SEQ ID NO: 8790 - DNA, 5541 bp, Zea Mays
tggctggcttgccgctgctcctctcctctcctctcctcgctagctccccccaagcgagcacgccgcccaccacgatgccagcgcgcacgggagccggctgctccgcctccgcctcctctccgctcccgcaccactagcgcgggagcccgatggcgagcagcagggggaggctgaggctctccccgcgcgcggcggcgccgcagctggacgcgggcaagtacgtgcggtacacggcggagcaggtggatgcgctggagcttgcctacggcgagtgccccaagcccagctcgctgcgccggcagcagctcatccgggactgcgccgtcctcaccaacgtcgagcccaggcagatcaaggtctggttccagaaccgcagatgccgggagaagcagcggagggagtcctctcgtctgcagaccgtcaaccggaagctgggtgccatgaacaagctgttgatggaggagaacgaccggctgcagaagcaggtgtcccgtctcgtcttcgacaacgggtatatgaagaatcggctccacagtccttctgtagccaccaccgacacaagctgcgagtctgtggtgacaagtggtcagcacaagcagcagcaaaacccagcagttctgcatcctccacaaagggatgcgaacaacccagcaggtctactcgctattgctgaggagacattggcggagttcatgtccaaggcgaccggaactgctgtcaactgggtgcagatggttgggatgaagcctggtccggattccgttggaatcatcgctgtttcgcacaactgcagcggcgtagcagcacgagcttgcggccttgtgagcctcgagcccacaaaggttgccgagatccttaaggatcgcgcatcgtggtatcgcgattgtcggcgtgttgatatcctccatgttatccctacgggtaacggtggaacgattgagctgatctatatgcagatctgcgaaaggtcattgacccactccactggaggtccttctggacctaaaactccagattttataagagctgaggtgcttcctagtggttatctgattcgaccttgtgatgggggaggttccatgatttacattgtggatcatgttgatctgaatgcttgtagtgtccctgaggttcttcgaccgctctatgaatctcctaagatactggcacaaaagatgactgctgcggcgttgcgtcacattaggcaaattgcacacgaatcaagtggtgaaacgccctatggtgctgggcgacagccagctgttctcagaactttcagtcaaaggctcagcagaggcttcaatgatgctgtgagtggctttccagacgatggctggtcttctttgttgagcagtgatggtgctgaggatatttcaattacaatcaactcatctccaaacaaacttattgggtctgatgtcagcccttccccattcttttctgccatggggggcggcatcatgtgcgcaaaagcgtcaatgctactgcagaatgtgccacctgctctacttgtgcgatttttgagggagcatcgctctgaatgggctgaccctggtgttgatgcttattccgctgcctctctgagggccaacccatataatgttccgggtttaagggctggtgggtttatgggcaaccaggttatactaccccttgcacgcaccgtggagcatgaagagtgcttggaggttattcgacttcaaggacatggctttagccatgacgaggttcttatgtccccggatatgtttcttctgcagttgtgcagcggcatcgatgaggatgcgccgggtgcttgtgcacagcttgtcttcgctcctatcgatgaatcttttgctgacgatgcaccgttgctaccctctggcttccgtgtgataccgcttgatgctaagacggatgtgccatctgccacacgtacccttgaccttgcttctgcgctcgaggtcggatcaggcggaggtctgtgtgctttaagcgatagcgggtcaggcacgcgcagcacgaggtcggtcctgaccatcgccttccagttctcgttcgagaaccacctccgcgagagcgtggcagcgatggccaggcagtatgtcagggcagtgatggcgatcgtgcagagggtggccatggcgatttctccctctcgccttggcccgcatgtcgaactgaagcatccgccaggctctcccgaggcactcgcactagcttcgtggattggcaggagctacagggcgcacactggaacggagatccgctggtcggacactgaagacgcggcgggctctcccctgacgctgttctggaagcacagcgacgccataatctgctgctctctaaagccggctttcacactcaagttcgccaacagcgccggcttcgacatactggagacgacggtcgcgaacgtccaggacctgcagctggaggcggtccttgatgacgggggacagaaggccctggtcgcacagctccccaagatcatgctgcaggtaccgctactaactctgcctgctcgtacgtagccttgacggtgtgggtgtggctaagtaggtaaaagccttgcctttgaccctttgtgagcagggcctggcgtacctccccggcggcgtgtgcaggtcgagcatggggcggcaggcgtcgtacgagcaggcggtggcgtggaaggtggtgggcgacgacggcgcgccgcagtgcctggcgctcatgttcgtcaactggaccttcatctgatgctcctccgctcttgacgttcacagcctcgtgcctcgctcggcagcgctagatcggttgccgcctttatcctatcctatccgactacgtattactagttgctttccgttgcacctgtgtgctacaactgctcgagacaatgcccctgctgtctgtttatggcctaagtctactgtggtggatcgggagttggagaacaatgcccctgctgtctgtttatgtgtgagacttaaccctattactactgctgttatcattgaatctttgtgatcttttgtgtcattgtgtgacctgcaaaggttaatcctaaccacggaaaatttaacattttagcatcatttaggactgatttagtgaccagcggatttagatgagatccctagggtttgaataggaagaggtttctccccagagatcccaccaccaaatcctggtcacaatcatccgttagcgtgagtgacacctggacctgcaactccgatctgacgaggtggacggatttcaggcctgtcaagtcaacgctggcgagctagtaataattacactgatcaatggcgctggccggcggccagcgccgcagaggaacagcggcaactgcagcgacggatggagatggactactcgggctcaccgcgtactgtgctgtcgtcgtctctccgccgctgctccgtggcgtttaaactccgcccgtgaccgactgaccggtcgatgacgctccattgctgttctgctcgccggggatttccctgatccgtcgggagtcgggacccattcctgcctgcgtcaccacgctcaggctgaaaaaattgctattttgtcactctcaatgtgggctatttgctattatgtcgcctgtgggctgtggggtttgcgcctgcggcctgtcggccgctcccgtcgtgtacgcgacctacctggaccggctcaattgtaacgttaatgggccgaaaagctggcgcttgggcccgactagcccatctccgtccgtccccgtccctcacccgcgactccgcgagccaacccgaccaccacttccgccatggccatgctcgctctctcctcccgccccctctcctcctcctccttcctccgctcgaagccgcgcgcgctccacctccaccgccacctcctccccaaacccctcggctccgcctccccgctcacgccgcctactccccgcgccgaccccgccccggcgccggacgcggaccccaccccgctcttcctccgcccagcgtcccaccgggtcccacgcgccgccctcgccgcgttccgccgccgcgcggccgcgctcgtcccgcccaccgcgccgcacctccaccgccacctccgctggctcctcgccgacgccaccggggacccgtccgccgccaccacctcgtcctccgaaggcccagcgctcctccgcgcgccgctcgaggacctcgaggccctgtggctgcgccacgtccgggagcgcacgccgttccagtacgtggtcgggaacgagcactggcgggacctggtggtcgccgtcagggagggcgtcctcatcccgcgcccggagacggaggccatcatcgacatggtgcgcgccgtggaggacttcgccgacgggtggtgggccgacctcggcaccggcagtggcgccatcgccgtggcgctcgccagggagctcgccgggcaagggagggtgttcgccacggatgtcagcgaggtggccatcgacgttgcgaggctcaacgtccagaggtacggtgtgcaggataaagttgaaataaggcatggctcatggtttgaacctctggaagatttgaaaggaaaacttatgggtgtgattagtaaccctccgtacataccaaccgacgacctacctggtctgcaacctgaggttggttggcatgaaccaaagttggcgcttgacggcggcaaggatggccttgaacatctgctgcatctctgtgaagggttatcctcagttctgaaacctggaggcttctttgtttttgagacaaatggcaacaaacagtccgagctccttgttgatttgataagcacaaagtggagttgttcttttcacaatgtcaaagcagttttagactttgcagacatcaagcgttttgtaacgggatatcgaagatgaacaataaagcacagatgtttgtgtaatcatttggagacatgttttgtttccttcttacttaaggacctcccccaattgaaaaaaacgagatcagtctgggctggcttgggcagaaagcgaacaacacatgcagttgccccctttgcagagctcatcgcttggagttaaagcctgctggtggcaacaatatgtctcagagttaatcataaattcatattcgttaaaaaaatgtatcctctaggcatgcgaggtagtaatatgtttgtttggcagagccaagctgcgcatccaactgctcaagaaagctcgacggcagtagacgagagagagtgctgtggcagttgggctttcaggagactgtagctcgtatgtatctggccactagttttctggccgagttgggtggtgattgtgatttaattaaagtggaagcttttgtgcctgccttccaaaattattccgccgtccacacgccaccttgcgtgtttcattattgatggcgtggtccagttttctgtttttatttctttctgtctttctttcttgcttacttatgctgaagccatctccagagctattactgtttatttggggtggaaaaatctgggaatcatgagacgtgatgtgtaaggattgcagcacagggtctcgctggaaaggagtgtcggggccacgagaagccgtctcgtcttgtg

SEQ ID NO: 8791 - DNA, 5535 bp, Zea Mays
ctccttgctgaggcagaggaggactgcagccagcagtactgtacggctattaaacaagcccagagctttgctggctggctggctggcttgccgctgctcctctcctctcctctcctcgctagctccccccaagcgagcacgccgcccaccacgatgccagcgcgcacgggagccggctgctccgcctccgcctcctctccgctcccgcaccactagcgcgggagcccgatggcgagcagcagggggaggctgaggctctccccgcgcgcggcggcgccgcagctggacgcgggcaagtacgtgcggtacacggcggagcaggtggatgcgctggagcttgcctacggcgagtgccccaagcccagctcgctgcgccggcagcagctcatccgggactgcgccgtcctcaccaacgtcgagcccaggcagatcaaggtctggttccagaaccgcagatgccgggagaagcagcggagggagtcctctcgtctgcagaccgtcaaccggaagctgggtgccatgaacaagctgttgatggaggagaacgaccggctgcagaagcaggtgtcccgtctcgtcttcgacaacgggtatatgaagaatcggctccacagtccttctgtagccaccaccgacacaagctgcgagtctgtggtgacaagtggtcagcacaagcagcagcaaaacccagcagttctgcatcctccacaaagggatgcgaacaacccagcaggtctactcgctattgctgaggagacattggcggagttcatgtccaaggcgaccggaactgctgtcaactgggtgcagatggttgggatgaagcctggtccggattccgttggaatcatcgctgtttcgcacaactgcagcggcgtagcagcacgagcttgcggccttgtgagcctcgagcccacaaaggttgccgagatccttaaggatcgcgcatcgtggtatcgcgattgtcggcgtgttgatatcctccatgttatccctacgggtaacggtggaacgattgagctgatctatatgcagacttatgcactgacaactctggcggaaccgcgcgacttttggacactacgatacactagtggtcttgacgatggcagtcttgtgatctgcgaaaggtcattgacccactccactggaggtccttctggacctaaaactccagattttataagagctgaggtgcttcctagtggttatctgattcgaccttgtgatgggggaggttccatgatttacattgtggatcatgttgatctgaatgcttgtagtgtccctgaggttcttcgaccgctctatgaatctcctaagatactggcacaaaagatgactgctgcggcgttgcgtcacattaggcaaattgcacacgaatcaagtggtgaaacgccctatggtgctgggcgacagccagctgttctcagaactttcagtcaaaggctcagcagaggcttcaatgatgctgtgagtggctttccagacgatggctggtcttctttgttgagcagtgatggtgctgaggatatttcaattacaatcaactcatctccaaacaaacttattgggtctgatgtcagcccttccccattcttttctgccatggggggcggcatcatgtgcgcaaaagcgtcaatgctactgcagaatgtgccacctgctctacttgtgcgatttttgagggagcatcgctctgaatgggctgaccctggtgttgatgcttattccgctgcctctctgagggccaacccatataatgttccgggtttaagggctggtgggtttatgggcaaccaggttatactaccccttgcacgcaccgtggagcatgaagagtgcttggaggttattcgacttcaaggacatggctttagccatgacgaggttcttatgtccccggatatgtttcttctgcagttgtgcagcggcatcgatgaggatgcgccgggtgcttgtgcacagcttgtcttcgctcctatcgatgaatcttttgctgacgatgcaccgttgctaccctctggcttccgtgtgataccgcttgatgctaagacggatgtgccatctgccacacgtacccttgaccttgcttctgcgctcgaggtcggatcaggcggaggtctgtgtgctttaagcgatagcgggtcaggcacgcgcagcacgaggtcggtcctgaccatcgccttccagttctcgttcgagaaccacctccgcgagagcgtggcagcgatggccaggcagtatgtcagggcagtgatggcgatcgtgcagagggtggccatggcgatttctccctctcgccttggcccgcatgtcgaactgaagcatccgccaggctctcccgaggcactcgcactagcttcgtggattggcaggagctacagggcgcacactggaacggagatccgctggtcggacactgaagacgcggcgggctctcccctgacgctgttctggaagcacagcgacgccataatctgctgctctctaaagccggctttcacactcaagttcgccaacagcgccggcttcgacatactggagacgacggtcgcgaacgtccaggacctgcagctggaggcggtccttgatgacgggggacagaaggccctggtcgcacagctccccaagatcatgctgcagggcctggcgtacctccccggcggcgtgtgcaggtcgagcatggggcggcaggcgtcgtacgagcaggcggtggcgtggaaggtggtgggcgacgacggcgcgccgcagtgcctggcgctcatgttcgtcaactggaccttcatctgatgctcctccgctcttgacgttcacagcctcgtgcctcgctcggcagcgctagatcggttgccgcctttatcctatcctatccgactacgtattactagttgctttccgttgcacctgtgtgctacaactgctcgagacaatgcccctgctgtctgtttatggcctaagtctactgtggtggatcgggagttggagaacaatgcccctgctgtctgtttatgtgtgagacttaaccctattactactgctgttatcattgaatctttgtgatcttttgtgtcattgtgtgacctgcaaaggttaatcctaaccacggaaaatttaacattttagcatcatttaggactgatttagtgaccagcggatttagatgagatccctagggtttgaataggaagaggtttctccccagagatcccaccaccaaatcctggtcacaatcatccgttagcgtgagtgacacctggacctgcaactccgatctgacgaggtggacggatttcaggcctgtcaagtcaacgctggcgagctagtaataattacactgatcaatggcgctggccggcggccagcgccgcagaggaacagcggcaactgcagcgacggatggagatggactactcgggctcaccgcgtactgtgctgtcgtcgtctctccgccgctgctccgtggcgtttaaactccgcccgtgaccgactgaccggtcgatgacgctccattgctgttctgctcgccggggatttccctgatccgtcgggagtcgggacccattcctgcctgcgtcaccacgctcaggctgaaaaaattgctattttgtcactctcaatgtgggctatttgctattatgtcgcctgtgggctgtggggtttgcgcctgcggcctgtcggccgctcccgtcgtgtacgcgacctacctggaccggctcaattgtaacgttaatgggccgaaaagctggcgcttgggcccgactagcccatctccgtccgtccccgtccctcacccgcgactccgcgagccaacccgaccaccacttccgccatggccatgctcgctctctcctcccgccccctctcctcctcctccttcctccgctcgaagccgcgcgcgctccacctccaccgccacctcctccccaaacccctcggctccgcctccccgctcacgccgcctactccccgcgccgaccccgccccggcgccggacgcggaccccaccccgctcttcctccgcccagcgtcccaccgggtcccacgcgccgccctcgccgcgttccgccgccgcgcggccgcgctcgtcccgcccaccgcgccgcacctccaccgccacctccgctggctcctcgccgacgccaccggggacccgtccgccgccaccacctcgtcctccgaaggcccagcgctcctccgcgcgccgctcgaggacctcgaggccctgtggctgcgccacgtccgggagcgcacgccgttccagtacgtggtcgggaacgagcactggcgggacctggtggtcgccgtcagggagggcgtcctcatcccgcgcccggagacggaggccatcatcgacatggtgcgcgccgtggaggacttcgccgacgggtggtgggccgacctcggcaccggcagtggcgccatcgccgtggcgctcgccagggagctcgccgggcaagggagggtgttcgccacggatgtcagcgaggtggccatcgacgttgcgaggctcaacgtccagaggtacggtgtgcaggataaagttgaaataaggcatggctcatggtttgaacctctggaagatttgaaaggaaaacttatgggtgtgattagtaaccctccgtacataccaaccgacgacctacctggtctgcaacctgaggttggttggcatgaaccaaagttggcgcttgacggcggcaaggatggccttgaacatctgctgcatctctgtgaagggttatcctcagttctgaaacctggaggcttctttgtttttgagacaaatggcaacaaacagtccgagctccttgttgatttgataagcacaaagtggagttgttcttttcacaatgtcaaagcagttttagactttgcagacatcaagcgttttgtaacgggatatcgaagatgaacaataaagcacagatgtttgtgtaatcatttggagacatgttttgtttccttcttacttaaggacctcccccaattgaaaaaaacgagatcagtctgggctggcttgggcagaaagcgaacaacacatgcagttgccccctttgcagagctcatcgcttggagttaaagcctgctggtggcaacaatatgtctcagaagccaagctgcgcatccaactgctcaagaaagctcgacggcagtagacgagagagagtgctgtggcagttgggctttcaggagactgtagctcgtatgtatctggccactagttttctggccgagttgggtggtgattgtgatttaattaaagtggaagcttttgtgcctgccttccaaaattattccgccgtccacacgccaccttgcgtgtttcattattgatggcgtggtccagttttctgtttttatttctttctgtctttctttcttgcttacttatgctgaagccatctccagagctattactgtttatttggggtggaaaaatctgggaatcatgagacgtgatgtgtaaggattgcagcacagggtctcgctggaaaggagtgtcggggccacgagaagccgtctcgtcttgtg

SEQ ID NO: 8792 - DNA, 413 bp, Zea Mays
cataccttaacggttaccccagcccagacaaatggcaacaaacagtccgagctccttgttgatttgataagcacaaagtggagttgttcttttcacaatgtcaaagcagttttagactttgcagacatcaagcgttttgtaacgggatatcgaagatgaacaataaagcacagatgtttgtgtaatcatttggagacatgttttgtttccttcttacttaaggctttcgtaccattatcattagagatttttgtgggtcaggaattgacgaattgtggtgacaaagttcataagaaatcgtgtctttactgtcccagcttgaaatcgtggcaggctttctccggtcctttgaggatgagcgtcacctttggtgttttgttggagcggcgggtctgcgtgctcttggtcaagag

SEQ ID NO: 8793 - DNA, 909 bp, Zea Mays
ctgaggttttcatacggggtttcatctctagcctaccccaacgtgcttgggacaaaaaggctttgttgttgttgttgttgttgttgttcgatgttctctgatatctgaaatttcgacatgccacgttttttttcaatgccttcacgggcgttgcttatcacaaaagcagtaaaggatttatgaacgtaaattgggtgccacacattgacaaagttgcaacatcgaccctatctccatgagtcacgtcatcagcatgccttgaaaagggccaggggagctggaggtcggtttctcaactcaaagtcagatgacaaggaagagaactccgactcgagtcacaaagagaatcagaacggagttgcgccccacaggagcggccaaccgtcaacccctccgtctcccaacggtgcatcgtcagctaatcagggcaggcagtcgtgaatgatggatgattcaaaactcacagctgaagagatttcagcccctgagctagatatggcagcagttttgtacagaaaacgctagcaacatggtgtcggtcggtcggtcggttgttgtaggacatgttccatagaaaaagcatagacgagtctacaggttttggagccttggtttggtcctctgtgtattcacctttctgtacaatcttagtagcgttgtgtaccttcccctggaaggaaggatagcttcagttagcgcttcagaaagtcaagtgtgtagcatattggcttattgtttgctttgcttggacaatggagatttgggagtggagttcataaccctgctgaataaatactcttagctggctatgtgtatgttggacgacaatatgatccctaatgtagtacacgtgaccacctcaaactgaatctggctttgtttaaatgacaccctcacaattggtcacag

SEQ ID NO: 8794 - DNA, 1196 bp, Zea Mays
gaggcccaaagccccgtcggcccccatcgccacgccgccggccacgccccagacgaccccgcccgccgccgccgcctcccgctccctccgcgcgcagccctcgtccggccgcccgggtccgagcgcgctcgctcctcctccccacgtcgtttaagtgtggcttcattgcatgagtagttgcagttagcgtggcttttctccgtgcttgctcctggtcgtgctttgccttgcaaaggaaggaatcatgacatctgttgttcacagtgtttcagggtcaatacgcttatccaaatattgacccatactatggaagcctttatgcagcagcttacggtggacagccattgatgcatccaccgttagttggaatgcatccggctggcttacctttgcctaccgatgcaattgaagagcctgtgtatgtaaatgcaaagcaatacaatgccatattaagacggcgtcaatctcgggctaaagctgaatcagaacgaaagcttatcaaggggcgtaagccctatctccatgagtcacgtcatcagcatgccttgaaaagggccaggggagctggaggtcggtttctcaactcaaagtcagatgacaaggaagagaactccgactcgagtcacaaagagaatcagaacggagttgcgccccacaggagcggccaaccgtcaacccctccgtctcccaacggtgcatcgtcagctaatcagggcaggcagtcgtgaatgatggatgattcaaaactcacagctgaagagatttcagcccctgagctagatatggcagcagttttgtacagaaaacgctagcaacatggtgtcggtcggtcggtcggttgttgtaggacatgttccatagaaaaagcatagacgagtctacaggttttggagccttggtttggtcctctgtgtattcacctttctgtacaatcttagtagcgttgtgtaccttcccctggaaggaaggatagcttcagttagcgcttcagaaagtcaagtgtgtagcatattggcttattgtttgctttgcttggacaatggagatttgggagtggagttcataaccctgctgaataaatactcttagctggctatgtgtatgttggacgacaatatgatccctaatgtagtacacgtgaccacctcaaactgaatctggctttgtttaaatgacaccctcacaattggtcacag

SEQ ID NO: 8795 - DNA, 1352 bp, Zea Mays
gaggcccaaagccccgtcggcccccatcgccacgccgccggccacgccccagacgaccccgcccgccgccgccgcctcccgctccctccgcgcgcagccctcgtccggccgcccgggtccgagcgcgctcgctcctcctccccacgtcggacagtttaagtgtggcttcattgcatgagtagttgcagttagcgtggcttttctccgtgcttgctcctggtcgtgctttgccttgcaaaggaaggaatcatgacatctgttgttcacagtgtttcagggctgaggatcaaaatcaacagaagaagcaagctgaacctggggaccagcaagaagccccagttactagttcagatagccaaccaacagtaggcacaccatcaacagattatgtggcaccctatgcccctcatgacatgagccatgcaatgggtcaatacgcttatccaaatattgacccatactatggaagcctttatgcagcagcttacggtggacagccattgatgcatccaccgttagttggaatgcatccggctggcttacctttgcctaccgatgcaattgaagagcctgtgtatgtaaatgcaaagcaatacaatgccatattaagacggcgtcaatctcgggctaaagctgaatcagaacgaaagcttatcaaggggcgtaagccctatctccatgagtcacgtcatcagcatgccttgaaaagggccaggggagctggaggtcggtttctcaactcaaagtcagatgacaaggaagagaactccgactcgagtcacaaagagaatcagaacggagttgcgccccacaggagcggccaaccgtcaacccctccgtctcccaacggtgcatcgtcagctaatcagggcaggcagtcgtgaatgatggatgattcaaaactcacagctgaagagatttcagcccctgagctagatatggcagcagttttgtacagaaaacgctagcaacatggtgtcggtcggtcggtcggttgttgtaggacatgttccatagaaaaagcatagacgagtctacaggttttggagccttggtttggtcctctgtgtattcacctttctgtacaatcttagtagcgttgtgtaccttcccctggaaggaaggatagcttcagttagcgcttcagaaagtcaagtgtgtagcatattggcttattgtttgctttgcttggacaatggagatttgggagtggagttcataaccctgctgaataaatactcttagctggctatgtgtatgttggacgacaatatgatccctaatgtagtacacgtgaccacctcaaactgaatctggctttgtttaaatgacaccctcacaattggtcacag

SEQ ID NO: 8796 - DNA, 1522 bp, Zea Mays
gggagattaataaaaataaagtctataaaaattggcgctagaaatctgtggctgcgatgcatccaggtccacgcgaccactctgatacaggtcaccagcggtgggccccaccacccagacgggtcctggttcctccccctccaagccggctcccaaatttgaggcccaaagccccgtcggcccccatcgccacgccgccggccacgccccagacgaccccgcccgccgccgccgcctcccgctccctccgcgcgcagccctcgtccggccgcccgggtccgagcgcgctcgctcctcctccccacgtcggacagtttaagtgtggcttcattgcatgagtagttgcagttagcgtggcttttctccgtgcttgctcctggtcgtgctttgccttgcaaaggaaggaatcatgacatctgttgttcacagtgtttcaggtgaccacagggctgaggatcaaaatcaacagaagaagcaagctgaacctggggaccagcaagaagccccagttactagttcagatagccaaccaacagtaggcacaccatcaacagattatgtggcaccctatgcccctcatgacatgagccatgcaatgggtcaatacgcttatccaaatattgacccatactatggaagcctttatgcagcagcttacggtggacagccattgatgcatccaccgttagttggaatgcatccggctggcttacctttgcctaccgatgcaattgaagagcctgtgtatgtaaatgcaaagcaatacaatgccatattaagacggcgtcaatctcgggctaaagctgaatcagaacgaaagcttatcaaggggcgtaagccctatctccatgagtcacgtcatcagcatgccttgaaaagggccaggggagctggaggtcggtttctcaactcaaagtcagatgacaaggaagagaactccgactcgagtcacaaagagaatcagaacggagttgcgccccacaggagcggccaaccgtcaacccctccgtctcccaacggtgcatcgtcagctaatcagggcaggcagtcgtgaatgatggatgattcaaaactcacagctgaagagatttcagcccctgagctagatatggcagcagttttgtacagaaaacgctagcaacatggtgtcggtcggtcggtcggttgttgtaggacatgttccatagaaaaagcatagacgagtctacaggttttggagccttggtttggtcctctgtgtattcacctttctgtacaatcttagtagcgttgtgtaccttcccctggaaggaaggatagcttcagttagcgcttcagaaagtcaagtgtgtagcatattggcttattgtttgctttgcttggacaatggagatttgggagtggagttcataaccctgctgaataaatactcttagctggctatgtgtatgttggacgacaatatgatccctaatgtagtacacgtgaccacctcaaactgaatctggctttgtttaaatgacaccctcacaattggtcacag

SEQ ID NO: 8797 - DNA, 693 bp, Zea Mays
gaggcccaaagccccgtcggcccccatcgccacgccgccggccacgccccagacgaccccgcccgccgccgccgcctcccgctccctccgcgcgcagccctcgtccggccgcccgggtccgagcgcgctcgctcctcctccccacgtcgtttaagtgtggcttcattgcatgagtagttgcagttagcgtggcttttctccgtgcttgctcctggtcgtgctttgccttgcaaaggaaggaatcatgacatctgttgttcacagtgtttcaggtgaccacagggctgaggatcaaaatcaacagaagaagcaagctgaacctggggaccagcaagaagccccagttactagttcagatagccaaccaacagtaggcacaccatcaacagattatgtggcaccctatgcccctcatgacatgagccatgcaatgggtcaatacgcttatccaaatattgacccatactatggaagcctttatgcagcagcttacggtggacagccattgatgcatccaccgttagttggaatgcatccggctggcttacctttgcctaccgatgcaattgaagagcctgtgtatgtaaatgcaaagcaatacaatgccatattaagacggcgtcaatctcgggctaaagctgaatcagaacgaaagcttatcaaggggcgtaaggaagattcgtgaaaggaaga

SEQ ID NO: 8798 - DNA, 1233 bp, Zea Mays
ttatagaggttggctgtggaatctcttgctggtcatgagatccaacctctgcagcacaagcttgagaaagttagtcaccagagtactgtgtctcactgttctggcaccttgccgccactatcagcaagagacggttctagtgcccaggcttgtggtacaaatgttcagagtcacctgcttccatcatcatttgcaatccatgatggattgtcaaccatcaggagtggtggtgttggcagtggaactgatgcgataaccatagcttcgttgagatatagtgatgcgaatttgctacctgaaaactccatagcaacttccagttgtttgggtgaatcaggaaccttcaattctcttgacgatgtttgtggtgtaaacccatcacaaggtggaacctttgtgaaggtttacaaatcagggtccctcgggagatcgctcgacatcaccagattcggcagctactacgagttgcgtgtcgagctcgagcggttatttggtctcgaaggccaactggaggaccctgcaagatcaggctggcagcttgtattcgtcgaccgggaaaacgatgttcttctcctcggcgacgacccgtggcaggagtttgtgaatagcgtagggtgcataaagatcctctcgccgcaagacctgcagcagatggcccgcggcggcggaggtgaccttctgtctgcgcctggagcgaggatgctgcagggcagtgtctgtgacgactattctgcaggccacgacgtgcagaacctcaccggcagcattgcgcctgtggtgcctctggactactgaagaggactgaggcgaaggccgggatctgaagctctgaaccaaaaccggcaatccagcatttgcaggatttgccatccgcaagtcgtttcgttcctgtgttatgatcctctcagtctcaggccctgttgatcgggaataacctagtcgtttaatatagctagatgatgatccatgtatcattatggtaatggacatgctgtacgatagctactgtagctctaaatgcaggcaaggcaagaattgatctatcaaagaacgaatgaatgcaggcactcactgtagaggtgatgtagccctgtactcctaagtcctaagatatattctcatagctaaaactgatggttccatgtggcattggcacccaagctattgaaaccagtcacctttgccgattctttcttcacctcaatttgcggttgttcggtcctgctgcatgcc

SEQ ID NO: 8799 - DNA, 3929 bp, Zea Mays
gtactccactccactctcgtcccctcctcgatccagccatggcggcctagcccccccccctcccctagggttctctgccagcccccacccacccaggcgcctcttgccgctcccacccggtggtcgcgctgcccgcgtcgaatgggaggccacccggcgctcggagtcgggcgtgaccgcgcgctgccggaggttccctgagctcggcggcggcgggagcgtggctggtccggagcgcgccgcgcgtgcaatgggaggttcgagtggggttcctgcgagccgccgcggcggtctcggttctgcgagcgcgtggcccatgcttcgcgaagggtagggttgtctgtctgtctagctagctgctagctgcttggtctgatgagctcagctccggcgccccgcctcggcttccccgcgcgcttgctccgtcggctgcccagaacccagcttgcccgctccggcgcttctcttcgcttcttcggggaaaggttggagctttgaggtggtgcgggtgctcagccgaggactccgggcgatgacgcccgcagtggcgcgcgtttgccgcgacagtcctgggttcgggtagcgagttcctcgagcggatttggctgctgctgcgtcctgcgtgggaaggggaggcggcggcggcggcagcagcagaggaaggggaacggttgctctgaagcggagggggagcgggctgacattgcttctgggagcatggcgagcttctaaggacgcgcagctcccgcagcccagccattctcatcgccgcaccttggtgttcttgcccccaggtcgtactggttggtgggagggaacatgaacctctccccgcccaagatgtcggagccatcacctgaaagtgacggggaacaaaggtgtctgaactcagagctatggcatgcatgcgcagggccccttgtgtccctgcctgtggttgggagccgggtcgtctactttcctcagggccatagtgagcaggttgctgcatcaactaataaagaagttgatgctcaaatcccaaactatccaaacctacctccacagttaatatgccagcttcataatgtcacaatgcatgctgatgcagagactgaagaggtgtatgcccaaatgacactgcaaccattgagcccggaagagcaaaaggatccttttcttccaattgaattgggtgctggtagcaagcagccaaccaattacttctgcaagacgttgactgcaagtgatacgagtacccatggtggattctctgttccgcgccgagcagctgagaaagtcttccctccattggatttttcacaacagcctccagtgcaagagctggttgcaagagatctgcatgataatgaatggaaatttcgtcatatttttcgtggtcagccaaaaaggcatctactgacgactggttggagtgtttttgtaagcgcgaaaagactagtagcaggggattctatcatatttatctggaatgataataaccagcttctcttgggaattcgccgtgcaagtcgtccacagactgtaatgccctcttctgtgctatcaagcgatagcatgcacattggtcttcttgctgcagcagctcatgctgcagccacaaacagtcgtttcactattttctacaaccctcgggctagcccttctgagtttgtcattccactggctaagtatgtgaaagctgtttaccacacgcgcgtatctgttggaatgcggtttcggatgctttttgagacagaggaatcaagtgtcagaagatacatgggtacaatcacaggcataagtgatctggactcagagcgctggccaaactcgcactggcgttctgtgaagctggtgataaacagccaagagtttcactctgggagattgagccactgacaacctttccgatgtacccaactgcttttccattaaggctaaagcgtccgtgggcttcaggactacctatgttcaatggtgggaggagcgacgagttcgctcgttattcttctctcatgtggcttcgagatggaaaccgaggggctcagtcactgaacttccagggacttggagcatcaccatggcttcagccaagaatagataatccattgttgagtctgaagccagatacttaccagcagatggctgccgccgcactagaagaaattagagctggggatcatttgaagcaggcatcttctctcctgccagttcagcagactcaaactttgaatggtggattagatcatttgtatggaaatcctgttctacagcagatgcagttccaatctcagcagtcaacactgcaagctgtgcagcaaggttatggtcagaatgcaaacgactctgggtatgttcaaaatcaactgcagcagctgcagctgcaaaagcagcaggagccaccaccaccacagcagcagcagcagacacaagtccttcagcgacaagcacatcaggaaatgcaacagcacctctcagctagttgtcatgatattgctaatgtagcttctggtgtgtccatgtctggatctgcttgtcaatcacaatcttctctgctttctgggtcatcgttctaccaacagaacatctttgatggaaatggtggtccagatctgcatctgcacaacagtttccacaacttttcaagccaagagtcctccaaccttcttaacctcccaagaagtggccaattaatggcatcagagggatggccttcaaagaggttggctgtggaatctcttgctggtcatgagatccaacctctgcagcacaagcttgagaaagttagtcaccagagtactgtgtctcactgttctggcaccttgccgccactatcagcaagagacggttctagtgcccaggcttgtggtacaaatgttcagagtcacctgcttccatcatcatttgcaatccatgatggattgtcaaccatcaggagtggtggtgttggcagtggaactgatgcgataaccatagcttcgttgagatatagtgatgcgaatttgctacctgaaaactccatagcaacttccagttgtttgggtgaatcaggaaccttcaattctcttgacgatgtttgtggtgtaaacccatcacaaggtggaacctttgtgaaggtttacaaatcagggtccctcgggagatcgctcgacatcaccagattcggcagctactacgagttgcgtgtcgagctcgagcggttatttggtctcgaaggccaactggaggaccctgcaagatcaggctggcagcttgtattcgtcgaccgggaaaacgatgttcttctcctcggcgacgacccgtggcaggagtttgtgaatagcgtagggtgcataaagatcctctcgccgcaagacctgcagcagatggcccgcggcggcggaggtgaccttctgtctgcgcctggagcgaggatgctgcagggcagtgtctgtgacgactattctgcaggccacgacgtgcagaacctcaccggcagcattgcgcctgtggtgcctctggactactgaagaggactgaggcgaaggccgggatctgaagctctgaaccaaaaccggcaatccagcatttgcaggatttgccatccgcaagtcgtttcgttcctgtgttatgatcctctcagtctcaggccctgttgatcgggaataacctagtcgtttaatatagctagatgatgatccatgtatcattatggtaatggacatgctgtacgatagctactgtagctctaaatgcaggcaaggcaagaattgatctatcaaagaacgaatgaatgcaggcactcactgtagaggtgatgtagccctgtactcctaagtcctaagatatattctcatagctaaaactgatggttccatgtggcattggcacccaagctattgaaaccagtcacctttgccgattctttcttcacctcaatttgcggttgttcggtcctgctgcatgcc

SEQ ID NO: 8800 - DNA, 3946 bp, Zea Mays
gtactccactccactctcgtcccctcctcgatccagccatggcggcctagcccccccccctcccctagggttctctgccagcccccacccacccaggcgcctcttgccgctcccacccggtggtcgcgctgcccgcgtcgaatgggaggccacccggcgctcggagtcgggcgtgaccgcgcgctgccggaggttccctgagctcggcggcggcgggagcgtggctggtccggagcgcgccgcgcgtgcaatgggaggttcgagtggggttcctgcgagccgccgcggcggtctcggttctgcgagcgcgtggcccatgcttcgcgaagggtagggttgtctgtctgtctagctagctgctagctgcttggtctgatgagctcagctccggcgccccgcctcggcttccccgcgcgcttgctccgtcggctgcccagaacccagcttgcccgctccggcgcttctcttcgcttcttcggggaaaggttggagctttgaggtggtgcgggtgctcagccgaggactccgggcgatgacgcccgcagtggcgcgcgtttgccgcgacagtcctgggttcgggtagcgagttcctcgagcggatttggctgctgctgcgtcctgcgtgggaaggggaggcggcggcggcggcagcagcagaggaaggggaacggttgctctgaagcggagggggagcgggctgacattgcttctgggagcatggcgagcttctaaggacgcgcagctcccgcagcccagccattctcatcgccgcaccttggtgttcttgcccccaggtcgtactggttggtgggagggaacatgaacctctccccgcccaagatgtcggagccatcacctgaaagtgacggggaacaaaggtgtctgaactcagagctatggcatgcatgcgcagggccccttgtgtccctgcctgtggttgggagccgggtcgtctactttcctcagggccatagtgagcaggttgctgcatcaactaataaagaagttgatgctcaaatcccaaactatccaaacctacctccacagttaatatgccagcttcataatgtcacaatgcatgctgatgcagagactgaagaggtgtatgcccaaatgacactgcaaccattgagcccggaagagcaaaaggatccttttcttccaattgaattgggtgctggtagcaagcagccaaccaattacttctgcaagacgttgactgcaagtgatacgagtacccatggtggattctctgttccgcgccgagcagctgagaaagtcttccctccattggatttttcacaacagcctccagtgcaagagctggttgcaagagatctgcatgataatgaatggaaatttcgtcatatttttcgtgccaaaaaggcatctactgacgactggttggagtgtttttgtaagcgcgaaaagactagtagcaggggattctatcatatttatctggaatgataataaccagcttctcttgggaattcgccgtgcaagtcgtccacagactgtaatgccctcttctgtgctatcaagcgatagcatgcacattggtcttcttgctgcagcagctcatgctgcagccacaaacagtcgtttcactattttctacaaccctcgggctagcccttctgagtttgtcattccactggctaagtatgtgaaagctgtttaccacacgcgcgtatctgttggaatgcggtttcggatgctttttgagacagaggaatcaagtgtcagaagatacatgggtacaatcacaggcataagtgatctggactcagagcgctggccaaactcgcactggcgttctgtgaaggttggttgggatgagtctacagctggtgataaacagccaagagtttcactctgggagattgagccactgacaacctttccgatgtacccaactgcttttccattaaggctaaagcgtccgtgggcttcaggactacctatgttcaatggtgggaggagcgacgagttcgctcgttattcttctctcatgtggcttcgagatggaaaccgaggggctcagtcactgaacttccagggacttggagcatcaccatggcttcagccaagaatagataatccattgttgagtctgaagccagatacttaccagcagatggctgccgccgcactagaagaaattagagctggggatcatttgaagcaggcatcttctctcctgccagttcagcagactcaaactttgaatggtggattagatcatttgtatggaaatcctgttctacagcagatgcagttccaatctcagcagtcaacactgcaagctgtgcagcaaggttatggtcagaatgcaaacgactctgggtatgttcaaaatcaactgcagcagctgcagctgcaaaagcagcaggagccaccaccaccacagcagcagcagcagacacaagtccttcagcgacaagcacatcaggaaatgcaacagcacctctcagctagttgtcatgatattgctaatgtagcttctggtgtgtccatgtctggatctgcttgtcaatcacaatcttctctgctttctgggtcatcgttctaccaacagaacatctttgatggaaatggtggtccagatctgcatctgcacaacagtttccacaacttttcaagccaagagtcctccaaccttcttaacctcccaagaagtggccaattaatggcatcagagggatggccttcaaagaggttggctgtggaatctcttgctggtcatgagatccaacctctgcagcacaagcttgagaaagttagtcaccagagtactgtgtctcactgttctggcaccttgccgccactatcagcaagagacggttctagtgcccaggcttgtggtacaaatgttcagagtcacctgcttccatcatcatttgcaatccatgatggattgtcaaccatcaggagtggtggtgttggcagtggaactgatgcgataaccatagcttcgttgagatatagtgatgcgaatttgctacctgaaaactccatagcaacttccagttgtttgggtgaatcaggaaccttcaattctcttgacgatgtttgtggtgtaaacccatcacaaggtggaacctttgtgaaggtttacaaatcagggtccctcgggagatcgctcgacatcaccagattcggcagctactacgagttgcgtgtcgagctcgagcggttatttggtctcgaaggccaactggaggaccctgcaagatcaggctggcagcttgtattcgtcgaccgggaaaacgatgttcttctcctcggcgacgacccgtggcaggagtttgtgaatagcgtagggtgcataaagatcctctcgccgcaagacctgcagcagatggcccgcggcggcggaggtgaccttctgtctgcgcctggagcgaggatgctgcagggcagtgtctgtgacgactattctgcaggccacgacgtgcagaacctcaccggcagcattgcgcctgtggtgcctctggactactgaagaggactgaggcgaaggccgggatctgaagctctgaaccaaaaccggcaatccagcatttgcaggatttgccatccgcaagtcgtttcgttcctgtgttatgatcctctcagtctcaggccctgttgatcgggaataacctagtcgtttaatatagctagatgatgatccatgtatcattatggtaatggacatgctgtacgatagctactgtagctctaaatgcaggcaaggcaagaattgatctatcaaagaacgaatgaatgcaggcactcactgtagaggtgatgtagccctgtactcctaagtcctaagatatattctcatagctaaaactgatggttccatgtggcattggcacccaagctattgaaaccagtcacctttgccgattctttcttcacctcaatttgcggttgttcggtcctgctgcatgcc

SEQ ID NO: 8801 - DNA, 3448 bp, Zea Mays
gaacgaaagcaagcaaggagcaccgcaccacgccactccagtactccactccactctcgtcccctcctcgatccagccatggcggcctagcccccccccctcccctagggttctctgccagcccccacccacccaggcgcctcttgccgctcccacccggtggtcgcgctgcccgcgtcgaatgggaggccacccggcgctcggagtcgggcgtgaccgcgcgctgccggaggttccctgagctcggcggcggcgggagcgtggctggtccggagcgcgccgcgcgtgcaatgggaggttcgagtggggttcctgcgagccgccgcggcggtctcggttctgcgagcgcgtggcccatgcttcgcgaagggggaacaaaggtgtctgaactcagagctatggcatgcatgcgcagggccccttgtgtccctgcctgtggttgggagccgggtcgtctactttcctcagggccatagtgagcaggttgctgcatcaactaataaagaagttgatgctcaaatcccaaactatccaaacctacctccacagttaatatgccagcttcataatgtcacaatgcatgctgatgcagagactgaagaggtgtatgcccaaatgacactgcaaccattgagcccggaagagcaaaaggatccttttcttccaattgaattgggtgctggtagcaagcagccaaccaattacttctgcaagacgttgactgcaagtgatacgagtacccatggtggattctctgttccgcgccgagcagctgagaaagtcttccctccattggatttttcacaacagcctccagtgcaagagctggttgcaagagatctgcatgataatgaatggaaatttcgtcatatttttcgtgccaaaaaggcatctactgacgactggttggagtgtttttgtaagcgcgaaaagactagtagcaggggattctatcatatttatctggaatgataataaccagcttctcttgggaattcgccgtgcaagtcgtccacagactgtaatgccctcttctgtgctatcaagcgatagcatgcacattggtcttcttgctgcagcagctcatgctgcagccacaaacagtcgtttcactattttctacaaccctcgggctagcccttctgagtttgtcattccactggctaagtatgtgaaagctgtttaccacacgcgcgtatctgttggaatgcggtttcggatgctttttgagacagaggaatcaagtgtcagaagatacatgggtacaatcacaggcataagtgatctggactcagagcgctggccaaactcgcactggcgttctgtgaaggttggttgggatgagtctacagctggtgataaacagccaagagtttcactctgggagattgagccactgacaacctttccgatgtacccaactgcttttccattaaggctaaagcgtccgtgggcttcaggactacctatgttcaatggtgggaggagcgacgagttcgctcgttattcttctctcatgtggcttcgagatggaaaccgaggggctcagtcactgaacttccagggacttggagcatcaccatggcttcagccaagaatagataatccattgttgagtctgaagccagatacttaccagcagatggctgccgccgcactagaagaaattagagctggggatcatttgaagcaggcatcttctctcctgccagttcagcagactcaaactttgaatggtggattagatcatttgtatggaaatcctgttctacagcagatgcagttccaatctcagcagtcaacactgcaagctgtgcagcaaggttatggtcagaatgcaaacgactctgggtatgttcaaaatcaactgcagcagctgcagctgcaaaagcagcaggagccaccaccaccacagcagcagcagcagacacaagtccttcagcgacaagcacatcaggaaatgcaacagcacctctcagctagttgtcatgatattgctaatgtagcttctggtgtgtccatgtctggatctgcttgtcaatcacaatcttctctgctttctgggtcatcgttctaccaacagaacatctttgatggaaatggtggtccagatctgcatctgcacaacagtttccacaacttttcaagccaagagtcctccaaccttcttaacctcccaagaagtggccaattaatggcatcagagggatggccttcaaagaggttggctgtggaatctcttgctggtcatgagatccaacctctgcagcacaagcttgagaaagttagtcaccagagtactgtgtctcactgttctggcaccttgccgccactatcagcaagagacggttctagtgcccaggcttgtggtacaaatgttcagagtcacctgcttccatcatcatttgcaatccatgatggattgtcaaccatcaggagtggtggtgttggcagtggaactgatgcgataaccatagcttcgttgagatatagtgatgcgaatttgctacctgaaaactccatagcaacttccagttgtttgggtgaatcaggaaccttcaattctcttgacgatgtttgtggtgtaaacccatcacaaggtggaacctttgtgaaggtttacaaatcagggtccctcgggagatcgctcgacatcaccagattcggcagctactacgagttgcgtgtcgagctcgagcggttatttggtctcgaaggccaactggaggaccctgcaagatcaggctggcagcttgtattcgtcgaccgggaaaacgatgttcttctcctcggcgacgacccgtggcaggagtttgtgaatagcgtagggtgcataaagatcctctcgccgcaagacctgcagcagatggcccgcggcggcggaggtgaccttctgtctgcgcctggagcgaggatgctgcagggcagtgtctgtgacgactattctgcaggccacgacgtgcagaacctcaccggcagcattgcgcctgtggtgcctctggactactgaagaggactgaggcgaaggccgggatctgaagctctgaaccaaaaccggcaatccagcatttgcaggatttgccatccgcaagtcgtttcgttcctgtgttatgatcctctcagtctcaggccctgttgatcgggaataacctagtcgtttaatatagctagatgatgatccatgtatcattatggtaatggacatgctgtacgatagctactgtagctctaaatgcaggcaaggcaagaattgatctatcaaagaacgaatgaatgcaggcactcactgtagaggtgatgtagccctgtactcctaagtcctaagatatattctcatagctaaaactgatggttccatgtggcattggcacccaagctattgaaaccagtcacctttgccgattctttcttcacctcaatttgcggttgttcggtcctgctgcatgcc

SEQ ID NO: 8802 - DNA, 3119 bp, Zea Mays
atccagccagtcaaagctcaaaaccttccaaagccacacactacagattcatcttcaggggaacaaaggtgtctgaactcagagctatggcatgcatgcgcagggccccttgtgtccctgcctgtggttgggagccgggtcgtctactttcctcagggccatagtgagcaggttgctgcatcaactaataaagaagttgatgctcaaatcccaaactatccaaacctacctccacagttaatatgccagcttcataatgtcacaatgcatgctgatgcagagactgaagaggtgtatgcccaaatgacactgcaaccattgagcccggaagagcaaaaggatccttttcttccaattgaattgggtgctggtagcaagcagccaaccaattacttctgcaagacgttgactgcaagtgatacgagtacccatggtggattctctgttccgcgccgagcagctgagaaagtcttccctccattggatttttcacaacagcctccagtgcaagagctggttgcaagagatctgcatgataatgaatggaaatttcgtcatatttttcgtggtcagccaaaaaggcatctactgacgactggttggagtgtttttgtaagcgcgaaaagactagtagcaggggattctatcatatttatctggaatgataataaccagcttctcttgggaattcgccgtgcaagtcgtccacagactgtaatgccctcttctgtgctatcaagcgatagcatgcacattggtcttcttgctgcagcagctcatgctgcagccacaaacagtcgtttcactattttctacaaccctcgggctagcccttctgagtttgtcattccactggctaagtatgtgaaagctgtttaccacacgcgcgtatctgttggaatgcggtttcggatgctttttgagacagaggaatcaagtgtcagaagatacatgggtacaatcacaggcataagtgatctggactcagagcgctggccaaactcgcactggcgttctgtgaagctggtgataaacagccaagagtttcactctgggagattgagccactgacaacctttccgatgtacccaactgcttttccattaaggctaaagcgtccgtgggcttcaggactacctatgttcaatggtgggaggagcgacgagttcgctcgttattcttctctcatgtggcttcgagatggaaaccgaggggctcagtcactgaacttccagggacttggagcatcaccatggcttcagccaagaatagataatccattgttgagtctgaagccagatacttaccagcagatggctgccgccgcactagaagaaattagagctggggatcatttgaagcaggcatcttctctcctgccagttcagcagactcaaactttgaatggtggattagatcatttgtatggaaatcctgttctacagcagatgcagttccaatctcagcagtcaacactgcaagctgtgcagcaaggttatggtcagaatgcaaacgactctgggtatgttcaaaatcaactgcagcagctgcagctgcaaaagcagcaggagccaccaccaccacagcagcagcagcagacacaagtccttcagcgacaagcacatcaggaaatgcaacagcacctctcagctagttgtcatgatattgctaatgtagcttctggtgtgtccatgtctggatctgcttgtcaatcacaatcttctctgctttctgggtcatcgttctaccaacagaacatctttgatggaaatggtggtccagatctgcatctgcacaacagtttccacaacttttcaagccaagagtcctccaaccttcttaacctcccaagaagtggccaattaatggcatcagagggatggccttcaaagaggttggctgtggaatctcttgctggtcatgagatccaacctctgcagcacaagcttgagaaagttagtcaccagagtactgtgtctcactgttctggcaccttgccgccactatcagcaagagacggttctagtgcccaggcttgtggtacaaatgttcagagtcacctgcttccatcatcatttgcaatccatgatggattgtcaaccatcaggagtggtggtgttggcagtggaactgatgcgataaccatagcttcgttgagatatagtgatgcgaatttgctacctgaaaactccatagcaacttccagttgtttgggtgaatcaggaaccttcaattctcttgacgatgtttgtggtgtaaacccatcacaaggtggaacctttgtgaaggtttacaaatcagggtccctcgggagatcgctcgacatcaccagattcggcagctactacgagttgcgtgtcgagctcgagcggttatttggtctcgaaggccaactggaggaccctgcaagatcaggctggcagcttgtattcgtcgaccgggaaaacgatgttcttctcctcggcgacgacccgtggcaggagtttgtgaatagcgtagggtgcataaagatcctctcgccgcaagacctgcagcagatggcccgcggcggcggaggtgaccttctgtctgcgcctggagcgaggatgctgcagggcagtgtctgtgacgactattctgcaggccacgacgtgcagaacctcaccggcagcattgcgcctgtggtgcctctggactactgaagaggactgaggcgaaggccgggatctgaagctctgaaccaaaaccggcaatccagcatttgcaggatttgccatccgcaagtcgtttcgttcctgtgttatgatcctctcagtctcaggccctgttgatcgggaataacctagtcgtttaatatagctagatgatgatccatgtatcattatggtaatggacatgctgtacgatagctactgtagctctaaatgcaggcaaggcaagaattgatctatcaaagaacgaatgaatgcaggcactcactgtagaggtgatgtagccctgtactcctaagtcctaagatatattctcatagctaaaactgatggttccatgtggcattggcacccaagctattgaaaccagtcacctttgccgattctttcttcacctcaatttgcggttgttcggtcctgctgcatgcc

SEQ ID NO: 8803 - DNA, 3108 bp, Zea Mays
gtccacttgcgacgctttctccaaaacaacccacatggatcctggtttacttcttggaggaagaggatccagccagtcaaagctcaaaaccttccaaagccacacactacagattcatcttcaggggaacaaaggtgtctgaactcagagctatggcatgcatgcgcagggccccttgtgtccctgcctgtggttgggagccgggtcgtctactttcctcagggccatagtgagcaggctgatgcagagactgaagaggtgtatgcccaaatgacactgcaaccattgagcccggaagagcaaaaggatccttttcttccaattgaattgggtgctggtagcaagcagccaaccaattacttctgcaagacgttgactgcaagtgatacgagtacccatggtggattctctgttccgcgccgagcagctgagaaagtcttccctccattggatttttcacaacagcctccagtgcaagagctggttgcaagagatctgcatgataatgaatggaaatttcgtcatatttttcgtggtcagccaaaaaggcatctactgacgactggttggagtgtttttgtaagcgcgaaaagactagtagcaggggattctatcatatttatctggaatgataataaccagcttctcttgggaattcgccgtgcaagtcgtccacagactgtaatgccctcttctgtgctatcaagcgatagcatgcacattggtcttcttgctgcagcagctcatgctgcagccacaaacagtcgtttcactattttctacaaccctcgggctagcccttctgagtttgtcattccactggctaagtatgtgaaagctgtttaccacacgcgcgtatctgttggaatgcggtttcggatgctttttgagacagaggaatcaagtgtcagaagatacatgggtacaatcacaggcataagtgatctggactcagagcgctggccaaactcgcactggcgttctgtgaaggttggttgggatgagtctacagctggtgataaacagccaagagtttcactctgggagattgagccactgacaacctttccgatgtacccaactgcttttccattaaggctaaagcgtccgtgggcttcaggactacctatgttcaatggtgggaggagcgacgagttcgctcgttattcttctctcatgtggcttcgagatggaaaccgaggggctcagtcactgaacttccagggacttggagcatcaccatggcttcagccaagaatagataatccattgttgagtctgaagccagatacttaccagcagatggctgccgccgcactagaagaaattagagctggggatcatttgaagcaggcatcttctctcctgccagttcagcagactcaaactttgaatggtggattagatcatttgtatggaaatcctgttctacagcagatgcagttccaatctcagcagtcaacactgcaagctgtgcagcaaggttatggtcagaatgcaaacgactctgggtatgttcaaaatcaactgcagcagctgcagctgcaaaagcagcaggagccaccaccaccacagcagcagcagcagacacaagtccttcagcgacaagcacatcaggaaatgcaacagcacctctcagctagttgtcatgatattgctaatgtagcttctggtgtgtccatgtctggatctgcttgtcaatcacaatcttctctgctttctgggtcatcgttctaccaacagaacatctttgatggaaatggtggtccagatctgcatctgcacaacagtttccacaacttttcaagccaagagtcctccaaccttcttaacctcccaagaagtggccaattaatggcatcagagggatggccttcaaagaggttggctgtggaatctcttgctggtcatgagatccaacctctgcagcacaagcttgagaaagttagtcaccagagtactgtgtctcactgttctggcaccttgccgccactatcagcaagagacggttctagtgcccaggcttgtggtacaaatgttcagagtcacctgcttccatcatcatttgcaatccatgatggattgtcaaccatcaggagtggtggtgttggcagtggaactgatgcgataaccatagcttcgttgagatatagtgatgcgaatttgctacctgaaaactccatagcaacttccagttgtttgggtgaatcaggaaccttcaattctcttgacgatgtttgtggtgtaaacccatcacaaggtggaacctttgtgaaggtttacaaatcagggtccctcgggagatcgctcgacatcaccagattcggcagctactacgagttgcgtgtcgagctcgagcggttatttggtctcgaaggccaactggaggaccctgcaagatcaggctggcagcttgtattcgtcgaccgggaaaacgatgttcttctcctcggcgacgacccgtggcaggagtttgtgaatagcgtagggtgcataaagatcctctcgccgcaagacctgcagcagatggcccgcggcggcggaggtgaccttctgtctgcgcctggagcgaggatgctgcagggcagtgtctgtgacgactattctgcaggccacgacgtgcagaacctcaccggcagcattgcgcctgtggtgcctctggactactgaagaggactgaggcgaaggccgggatctgaagctctgaaccaaaaccggcaatccagcatttgcaggatttgccatccgcaagtcgtttcgttcctgtgttatgatcctctcagtctcaggccctgttgatcgggaataacctagtcgtttaatatagctagatgatgatccatgtatcattatggtaatggacatgctgtacgatagctactgtagctctaaatgcaggcaaggcaagaattgatctatcaaagaacgaatgaatgcaggcactcactgtagaggtgatgtagccctgtactcctaagtcctaagatatattctcatagctaaaactgatggttccatgtggcattggcacccaagctattgaaaccagtcacctttgccgattctttcttcacctcaatttgcggttgttcggtcctgctgcatgcc

SEQ ID NO: 8804 - DNA, 3212 bp, Zea Mays
aaagcgtccacttgcgacgctttctccaaaacaacccacatggatcctggtttacttcttggaggaagaggatccagccagtcaaagctcaaaaccttccaaagccacacactacagattcatcttcaggggaacaaaggtgtctgaactcagagctatggcatgcatgcgcagggccccttgtgtccctgcctgtggttgggagccgggtcgtctactttcctcagggccatagtgagcaggttgctgcatcaactaataaagaagttgatgctcaaatcccaaactatccaaacctacctccacagttaatatgccagcttcataatgtcacaatgcatgctgatgcagagactgaagaggtgtatgcccaaatgacactgcaaccattgagcccggaagagcaaaaggatccttttcttccaattgaattgggtgctggtagcaagcagccaaccaattacttctgcaagacgttgactgcaagtgatacgagtacccatggtggattctctgttccgcgccgagcagctgagaaagtcttccctccattggatttttcacaacagcctccagtgcaagagctggttgcaagagatctgcatgataatgaatggaaatttcgtcatatttttcgtggtcagccaaaaaggcatctactgacgactggttggagtgtttttgtaagcgcgaaaagactagtagcaggggattctatcatatttatctggaatgataataaccagcttctcttgggaattcgccgtgcaagtcgtccacagactgtaatgccctcttctgtgctatcaagcgatagcatgcacattggtcttcttgctgcagcagctcatgctgcagccacaaacagtcgtttcactattttctacaaccctcgggctagcccttctgagtttgtcattccactggctaagtatgtgaaagctgtttaccacacgcgcgtatctgttggaatgcggtttcggatgctttttgagacagaggaatcaagtgtcagaagatacatgggtacaatcacaggcataagtgatctggactcagagcgctggccaaactcgcactggcgttctgtgaaggttggttgggatgagtctacagctggtgataaacagccaagagtttcactctgggagattgagccactgacaacctttccgatgtacccaactgcttttccattaaggctaaagcgtccgtgggcttcaggactacctatgttcaatggtgggaggagcgacgagttcgctcgttattcttctctcatgtggcttcgagatggaaaccgaggggctcagtcactgaacttccagggacttggagcatcaccatggcttcagccaagaatagataatccattgttgagtctgaagccagatacttaccagcagatggctgccgccgcactagaagaaattagagctggggatcatttgaagcaggcatcttctctcctgccagttcagcagactcaaactttgaatggtggattagatcatttgtatggaaatcctgttctacagcagatgcagttccaatctcagcagtcaacactgcaagctgtgcagcaaggttatggtcagaatgcaaacgactctgggtatgttcaaaatcaactgcagcagctgcagctgcaaaagcagcaggagccaccaccaccacagcagcagcagcagacacaagtccttcagcgacaagcacatcaggaaatgcaacagcacctctcagctagttgtcatgatattgctaatgtagcttctggtgtgtccatgtctggatctgcttgtcaatcacaatcttctctgctttctgggtcatcgttctaccaacagaacatctttgatggaaatggtggtccagatctgcatctgcacaacagtttccacaacttttcaagccaagagtcctccaaccttcttaacctcccaagaagtggccaattaatggcatcagagggatggccttcaaagaggttggctgtggaatctcttgctggtcatgagatccaacctctgcagcacaagcttgagaaagttagtcaccagagtactgtgtctcactgttctggcaccttgccgccactatcagcaagagacggttctagtgcccaggcttgtggtacaaatgttcagagtcacctgcttccatcatcatttgcaatccatgatggattgtcaaccatcaggagtggtggtgttggcagtggaactgatgcgataaccatagcttcgttgagatatagtgatgcgaatttgctacctgaaaactccatagcaacttccagttgtttgggtgaatcaggaaccttcaattctcttgacgatgtttgtggtgtaaacccatcacaaggtggaacctttgtgaaggtttacaaatcagggtccctcgggagatcgctcgacatcaccagattcggcagctactacgagttgcgtgtcgagctcgagcggttatttggtctcgaaggccaactggaggaccctgcaagatcaggctggcagcttgtattcgtcgaccgggaaaacgatgttcttctcctcggcgacgacccgtggcaggagtttgtgaatagcgtagggtgcataaagatcctctcgccgcaagacctgcagcagatggcccgcggcggcggaggtgaccttctgtctgcgcctggagcgaggatgctgcagggcagtgtctgtgacgactattctgcaggccacgacgtgcagaacctcaccggcagcattgcgcctgtggtgcctctggactactgaagaggactgaggcgaaggccgggatctgaagctctgaaccaaaaccggcaatccagcatttgcaggatttgccatccgcaagtcgtttcgttcctgtgttatgatcctctcagtctcaggccctgttgatcgggaataacctagtcgtttaatatagctagatgatgatccatgtatcattatggtaatggacatgctgtacgatagctactgtagctctaaatgcaggcaaggcaagaattgatctatcaaagaacgaatgaatgcaggcactcactgtagaggtgatgtagccctgtactcctaagtcctaagatatattctcatagctaaaactgatggttccatgtggcattggcacccaagctattgaaaccagtcacctttgccgattctttcttcacctcaatttgcggttgttcggtcctgctgcatgcc

SEQ ID NO: 8805 - DNA, 2316 bp, Zea Mays
atagtgattatacgtgtgacaaatcacgcaaaagctggcaacacgatccaataaccatactttgaaacacaggatcgtcaatttgacaccaattcattacatgtggatcaactccggttattggcacacgaaagcacagttgccgtggagtaaatgaacatggaactggctactaacatttgctagtggttaaacagtaaatcatcctaccctacaaatcaaggtcgatgggggcacgaaattattcccaattccctgccctcactgcacatccctagaccacaaactgtataaccatccacagctactcagggtactcatgcacgctacatcgaaacaatctcattgcacatcctttcaagcgcaccctacaaccaatgcttcagggaggaacacagttgatttgcacagttggaaggattagacctatattaacaaattcaattctcttcacaatggactctgcaaaaataagagctcccattcatgatacccactattctgcacagggttttgatagcagagaccgtctgtctccttttaagttttaacagcaaattacaaggattggaggtagagctaggaagtgttaactaactccattccccatctcatcggttttggagctcttgtgctgccgtaagttgaccatccatgttaaaaacaaagaggcaaattttctctatgaaagctattgtatcagcaagaaaataatagcagtgtgctaccttactcttcttgtgcttatgcacatctactgaatcttctgttccctcatgcttcctcttcttttcatgatggccacttttatcttttttcttatccttgtctttgtctttatctttgtccttactccgatccttatgccgatgtttgtgcttcttgtgttccttgtctttgtctttgtgccttttatgcttcttctctttgtccttggactcactttttggtttacccgaaatagtcggtatacctttttcagtctaaggcaaatccacaagagctgtttctcgaagttggaacgcttgccccagagtttccatatcaaagggctgaatataagcaggtttatccctcagatatgcattatgaacaagttgatctaactccattccttctcctttgcgaatttcagtgtctcccacaacattgtgaagataatgtgtatctgatattgccagcggcaaaggtttcttgcaaaagaaatcatggtgtggcagcagtttgtagtggctgatcaaatcaacagcaccagtgagctcccttggtcctgaaatacagagatcgtattatcaatcaaccacatagcagacaaataaggtttcagaaaagataggtgcactgatatatctatgatacaaaatttattctagcatacaatagacattagatgcagtaatgcggctcataaaacaactttgtgcactatgacacaaaatattaaccgtccaagttccaactaacgcattgtgaactgtaaataagtaaataaaacagttaaaattttgccattgtaaaaagaactgtagtaaacagctgactacaagacatactggcctcaactggcaaaaccgcaaaagaatcagcaccagaagtttgtatttaaaattccaagcatataattattactaatttttttgcaaactaatgacgataactaataatcaagcaagctgtgatactaatataactctgttgctttgtgcccacatgaattaggatttagcatttcagatttgcatactgaataattggcatataaggggaactgggaaacatagggatcacaaataatacttacctgcttccatcaaacagattcatttttgttcctttccagcactaaccattaaccaaccattctggttgataataccagccacacaatcaaaatttcagatagtgctacttgattggcataatactgataatggtaacttggaggcaaactatgatataccatgttgtatatgcacctggtgatcaggaaataagaccccaacaaaagataaccacccattttaacaatttcatctctgaaaattgcttgtccaccaaataaatatttagagtgaaatgaaccacaggggggggggggggtaaacttccccatattcccatttgggtccatgaactctcaaagtaatcagctaggtcctccggcttttcaagtgattcgtttgaagtgtaaattcaagtccatggttggacctagagtgaccataaaatgaaccacttgaaaagttgaaggatccggatgataaatttcagagttcatgggcttagatgacaatgcagaaatagtttaaggacccg

SEQ ID NO: 8806 - DNA, 952 bp, Zea Mays
atggcgtgtagtacgtggccggccggggcctgctggattggagggccctgtggtgcctgcctgcgaggtgcgagctgccgctgccgtgctgggatgagcgagccacaggtcacgtcagtcgtcctgttgaagcctgtgccgactgccgcgcatgtgctccacgcctccatccgcccatcctcagctctgatcctcccgatcgagctgggtctgggtgttctgcgctctgggctctggattaatggcgagttcggcgtcagagagcatcgcgcctcctcgcgagtgccgccaatgtctgtcacatgtgtgagtacgtagtccagggcgtggcgtggagccgacgtcgcaaacgacgctacatgtttgtgttggaggatcccattccagtccagccggcgacggcgaggggcggcgagccatgtagccatccccccggccgacaacgatggacacaggcagcgatcgatccatgggcccggaagtaccagtaaaggctctgcgacggcgacacaagcacccaccggcagcggcaaccgcgcgctctcgatccgtccagtccggcggtcggcggtcgcgtccttcgcgggcgcctctgcctgacttctgctcaactctggaaccaacatgcaacaagcaagcacaagcagcacggcaaagctggtgcaacaccacacgccacgccgctgccggcctgccgcgccgtgcttggctgcttgcggtgccactgccaactgccgaaggcatgttgacatgtgatgggagtcccccgacgtaaatacatgtccgttgtaacgggaaaaaaataatgcaaaaataacatatgtacgaccatatgttgcaacagaaatttataataaaatagatagatgtccatttattgttatagtttctatatatcacataaataatattgaacacatttcaaacctttataataatagtaacaatgaag

SEQ ID NO: 8807 - DNA, 1772 bp, Zea Mays
ctcaatcaggagcttcacggtgccagtttgatcatctgctttactgcagtcgagcagcggaggaacccggcgctcaggggacagccaactgtcgtggtgcagtacaatggctggaaaggcggcggcttgattgccgtcagctacgaggctcgtggatttggtgtgaagaggtccatgcacggagatgaggccaagagggtctgtcctggtattaatcttgttcaggtcccagtggcgcgtggcaaggctaaccttaatctttacagaagtgctggtgctgaggttgttgtaatccttgcaagcaaagggaagtgcgagcgggcatccatcgacgaagtttatcttgaccttactgatgcagcaaaggaaatgctcttacaagctcccccagattcaccagaggggatttttatggaggcgacaaagtcaaatatcttgggccttccggctgatgccagcgagaaggaaaagaatgtgagggcatggctttgtcaatcagaagctgattaccaggacaagttactggcatgtggagctataattgttgcacagttacgagtcagagttctggaggaaacccaattcacatgctctgctgggattgctcacaataagatgttagctaaacttgtcagtggaatgtacaagcctgctcagcaaacagttgtcccttcttcatcagttcaagacttactagcatcactacctgtgaaaaagatgaaacaacttggtggtaagcttggaagttccttgcaggataatcttggggttgagacaattggtgatctcctaagttttacagaggaaaaattacaagagcagtatggagtaaatactgggtttgaccatataatatatctccctactactatataagcatggtgtgtaatgggtttggaaaaggttctggacggacacatggtcaaagtctgcaatgatcagtacagtttgactgacaaatatactgatggttggctgtcttcagattgtagaacaactctttttaaataaacacctcaaggagtaaagctgacacccatccacgatcatcacgctgcttgtgacgatcgtcgttctcttctgtcgctaaaacgtagtgagttctctgcttcgtcgagtcacgccctcatgggctgctcgtgttcattgttgtttgatctgtcagaaaaatcccacatgtatttgtttatagatagattacactaattattaaaacggatgaaattcattcacgctgcaaagttgtacatagtgcgttggaatttatttgaaagtaaagctgtacatagtttttgacttggtcaattgtttggtccttatgggcgatgtctctggacaagtctataaattctctcgaggtgaatgctaggattctaatattgaatgaatacatttttatttatttaccacatcgcaactttcacaatggtatcaccttttttaattgtgcttatgcacttgattgcttaatcgttcaccgccttaccggtgcctagcaacaactatagctcttgacccgtacgagtcatagcaggtccctctcaaataatttatgtgtcgtcgcaacacacgaatattgtattagttatatatagaagtctgtatgatactgatggttgcaatgtagtggacatttgtacataaaatatcatagtattatatgtttccgttgtaacgcacgggcactcacctagtatatattatatagctatatagtctaaactgaagtttgaactaagctgaactgaagtttgaactaaactaaactgaat

SEQ ID NO: 8808 - DNA, 3069 bp, Zea Mays
atgggcggaggagggccgcacagtgcagaactatcagctcaatcacgtcgtcagggagcttcggaagtacagtcgcttgaaacacaccatggagatggtccaggaatccaggattactccaatgccaatgatatgcagcttgcacttgcacatagaagaaactgcacttacctcgatgggaaggattttgttgattttggaagcattgattggggaagactattgagaaatcatggcatttctgattctgaaaaggtgctcattttctttgatgaccaccaaagtgagttgaaaaggttaaagcaagcgctaaaggctggattcaggcatctcatatttgaggacaactatgatactggtacatgtgaccattatttcttgaggcatatctatgatccgtcatatatcagaggctgccggcgtgaagcattagccaccgagtgctgcacgccaacagccaacagggggtaccgtgcaggtgggcagaagcagccagcgacaacagtagggcacagggatttatatggaccttccaaatacactagacatttgcaagcaaccaaagatactctcagagaagaaggggacataactcctccaacagggattaggcaggctatggagatgcaggctgaagtagaaaggagaatatgtgcccaagtccttgaatcagaagggaagaaacaagcccaaatccttgaattagaagggaagaaaactgcccagatcctttaatccgaaggcgacgacttcataaccctttttatcttttagctcaatcaggagcttcacggtgccaggtcttcatttgagcaagctcatttcaatctggtgtataatccctccttttttgaaactgctactcttagccactactaactgaaactgctactaactgaagcctctaacacaaatgccttgagaataccagagagaaagtaggagctgacatttctcacactggtcaggcatttccattgaattttactctatatttaattgttttttcctgggctcacaaagagcagaagacatatcttaatgagctccaaaagaaaacaccactagagagatgatattttattaaacacatgcccacacaaaagaactccatatgtacctcatccctatatgacaacagtgatgtggctgaccctgaaattcatgctgtttttttgaccatatcctagccaaaaaacatcactattacttttaactaccctccttttggtgcttttcagtttgatcatctgctttactgcagtcgagcagcggaggaacccggcgctcaggggacagccaactgtcgtggtgcagtacaatggctggaaaggcggcggcttgattgccgtcagctacgaggctcgtggatttggtccatgcacggagatgaggccaagagggtctgtcctggtattaatcttgttcaggtcccagtggcgcgtggcaaggctaaccttaatctttacagaagtgctggtgctgaggttgttgtaatccttgcaagcaaagggaagtgcgagcgggcatccatcgacgaagtttatcttgaccttactgatgcagcaaaggaaatgctcttacaagctcccccagattcaccagaggggatttttatggaggcgacaaagtcaaatatcttgggccttccggctgatgccagcgagaaggaaaagaatgtgagggcatggctttgtcaatcagaagctgattaccaggacaagttactggcatgtggagctataattgttgcacagttacgagtcagagttctggaggaaacccaattcacatgctctgctgggattgctcacaataagatgttagctaaacttgtcagtggaatgtacaagcctgctcagcaaacagttgtcccttcttcatcagttcaagacttactagcatcactacctgtgaaaaagatgataatcttggggttgagacaattggtgatctcctaagttttacagaggaaaaattacaagagcagtatggagtaaatactgggtaattatgttcatgctttattaatgtgttattatttggtttaccttgattacttggcttcttcgatattatcaaatctggccatatgaatgtaatgtatgttctccagggcagaaagttgcacattaggtttgaccatataatatatctccctactactatataagcatggtgtgtaatgggtttggaaaaggttctggacggacacatggtcaaagtctgcaatgatcagtacagtttgactgacaaatatactgatggttggctgtcttcagattgtagaacaactctttttaaataaacacctcaaggagtaaagctgacacccatccacgatcatcacgctgcttgtgacgatcgtcgttctcttctgtcgctaaaacgtagtgagttctctgcttcgtcgagtcacgccctcatgggctgctcgtgttcattgttgtttgatctgtcagaaaaatcccacatgtatttgtttatagatagattacactaattattaaaacggatgaaattcattcacgctgcaaagttgtacatagtgcgttggaatttatttgaaagtaaagctgtacatagtttttgacttggtcaattgtttggtccttatgggcgatgtctctggacaagtctataaattctctcgaggtgaatgctaggattctaatattgaatgaatacatttttatttatttaccacatcgcaactttcacaatggtatcaccttttttaattgtgcttatgcacttgattgcttaatcgttcaccgccttaccggtgcctagcaacaactatagctcttgacccgtacgagtcatagcaggtccctctcaaataatttatgtgtcgtcgcaacacacgaatattgtattagttatatatagaagtctgtatgatactgatggttgcaatgtagtggacatttgtacataaaatatcatagtattatatgtttccgttgtaacgcacgggcactcacctagtatatattatatagctatatagtctaaactgaagtttgaactaagctgaactgaagtttgaactaaactaaactgaat

SEQ ID NO: 8809 - DNA, 2940 bp, Zea Mays
atgggcggaggagggccgcacagtgcagaactatcagctcaatcacgtcgtcagggagcttcggaagtacagtcgcttgaaacacaccatggagatggtccaggaatccaggattactccaatgccaatgatatgcagcttgcacttgcacatagaagaaactgcacttacctcgatgggaaggattttgttgattttggaagcattgattggggaagactattgagaaatcatggcatttctgattctgaaaaggtgctcattttctttgatgaccaccaaagtgagttgaaaaggttaaagcaagcgctaaaggctggattcaggcatctcatatttgaggacaactatgatactggtacatgtgaccattatttcttgaggcatatctatgatccgtcatatatcagaggctgccggcgtgaagcattagccaccgagtgctgcacgccaacagccaacagggggtaccgtgcaggtgggcagaagcagccagcgacaacagtagggcacagggatttatatggaccttccaaatacactagacatttgcaagcaaccaaagatactctcagagaagaaggggacataactcctccaacagggattaggcaggctatggagatgcaggctgaagtagaaaggagaatatgtgcccaagtccttgaatcagaagggaagaaacaagcccaaatccttgaattagaagggaagaaaactgcccagatcctttaatccgaaggcgacgacttcataaccctttttatcttttagctcaatcaggagcttcacggtgccaggtcttcatttgagcaagctcatttcaatctggtgtataatccctccttttttgaaactgctactcttagccactactaactgaaactgctactaactgaagcctctaacacaaatgccttgagaataccagagagaaagtaggagctgacatttctcacactggtcaggcatttccattgaattttactctatatttaattgttttttcctgggctcacaaagagcagaagacatatcttaatgagctccaaaagaaaacaccactagagagatgatattttattaaacacatgcccacacaaaagaactccatatgtacctcatccctatatgacaacagtgatgtggctgaccctgaaattcatgctgtttttttgaccatatcctagccaaaaaacatcactattacttttaactaccctccttttggtgcttttcagtttgatcatctgctttactgcagtcgagcagcggaggaacccggcgctcaggggacagccaactgtcgtggtgcagtacaatggctggaaaggcggcggcttgattgccgtcagctacgaggctcgtggatttggtccatgcacggagatgaggccaagagggtctgtcctggtattaatcttgttcaggtcccagtggcgcgtggcaaggctaaccttaatctttacagaagtgctggtgctgaggttgttgtaatccttgcaagcaaagggaagtgcgagcgggcatccatcgacgaagtttatcttgaccttactgatgcagcaaaggaaatgctcttacaagctcccccagattcaccagaggggatttttatggaggcgacaaagtcaaatatcttgggccttccggctgatgccagcgagaaggaaaagaatgtgagggcatggctttgtcaatcagaagctgattaccaggacaagttactggcatgtggagctataattgttgcacagttacgagtcagagttctggaggaaacccaattcacatgctctgctgggattgctcacaataagatgttagctaaacttgtcagtggaatgtacaagcctgctcagcaaacagttgtcccttcttcatcagttcaagacttactagcatcactacctgtgaaaaagatgataatcttggggttgagacaattggtgatctcctaagttttacagaggaaaaattacaagagcagtatggagtaaatactgggtttgaccatataatatatctccctactactatataagcatggtgtgtaatgggtttggaaaaggttctggacggacacatggtcaaagtctgcaatgatcagtacagtttgactgacaaatatactgatggttggctgtcttcagattgtagaacaactctttttaaataaacacctcaaggagtaaagctgacacccatccacgatcatcacgctgcttgtgacgatcgtcgttctcttctgtcgctaaaacgtagtgagttctctgcttcgtcgagtcacgccctcatgggctgctcgtgttcattgttgtttgatctgtcagaaaaatcccacatgtatttgtttatagatagattacactaattattaaaacggatgaaattcattcacgctgcaaagttgtacatagtgcgttggaatttatttgaaagtaaagctgtacatagtttttgacttggtcaattgtttggtccttatgggcgatgtctctggacaagtctataaattctctcgaggtgaatgctaggattctaatattgaatgaatacatttttatttatttaccacatcgcaactttcacaatggtatcaccttttttaattgtgcttatgcacttgattgcttaatcgttcaccgccttaccggtgcctagcaacaactatagctcttgacccgtacgagtcatagcaggtccctctcaaataatttatgtgtcgtcgcaacacacgaatattgtattagttatatatagaagtctgtatgatactgatggttgcaatgtagtggacatttgtacataaaatatcatagtattatatgtttccgttgtaacgcacgggcactcacctagtatatattatatagctatatagtctaaactgaagtttgaactaagctgaactgaagtttgaactaaactaaactgaat

SEQ ID NO: 8810 - DNA, 1747 bp, Zea Mays
ctggaatgctgtgaaaagggaaatattaggatgtaccagattagatgatcaaatatgtgggtatgcgataggccagagtcaacttagaattctccatggactggcaaatatatttgagatcaaatgaattggattcacaggttatgcacatttttatttttacacacttcttggccgggcttcctatttcatctataagatgtggtaattgatatcttattgacttgcttatttccagtttttgtttctacattggactgctaggcgccatggcagaaatcacggttcaccttttccactctgtttttcctttgtactgtatacaggagacacagtagtattgtggaggcttagattatatgtgattaagtgaggtgcaacacttctcttttgattgactattgccaagatgaacgtgcacataagtatattataatagatgttgggaagacattcagagaacaagttctgagatggtttgttcgccacaaaatcccttgcgttgattctattcttctgactcatgagcatgcagatgcgatcttgggccttgatgatgttcgggtcgtacagccatttagtcccacaaatgatattgatccaaccccaatttatctctctcaattcgctatggacagcatctgccaaaagttcccctatttggtcaaaaagaaattaaaggaaggggaggaggttagacgagttgctcaacttgaatggaagataattgagagtgatattcagaaaccattcacaacttcagggctagagtttgttcccttgccggtgatccatggtgaagactacatttgtttgggtttccttttcggaaggaaatcaaaagttgcttacatatcagatgtttcacggtttcccccaagcacagaatatgcaatttcaaaatctggaggagggcaacttgatttgctcatcttggattgcctatacaggacgggttctcacaatgtgcacttgtgttgggaccagacactagatgctgttaggaggatttgccccaaaagagcactgcttattgggatgacccacgagatggatcatcacaaggacaaccaaacattggaagaatggtccaggagggaggggattgacgtgcagttagctcgtgatggcttgcgtgtctacattgatctgtagccgtgaaaggaaaatatgccatactcagcgaaccgcgccaggctttctggctgatgtaacatccattcccacttgtgaagaaagtgcaaactgactaaaaaggcgagcctatttggtgcatcattttacgtttcgctagtttatacgtgaatctctgaataaaaaagagaaaaagaaaagaaaagagagagagtagccacttgctagtagctggttcagtgccccggcaaattaatggccatctccctggtaaaggtagtcgaatgttcttgtaatcttgtcaattggaagctacactgcactggatgcatgcccaccagtcgaactgagcatgcgattttttttccctcggtcgcgcccgggtcatgtattgtagtataccgtaagaggaaagtcgattgagcatgttcgtggcgccagaccgagccacacgatctccaagactcttgcttgtgaagagcacgcagatgactcctactctaggttcaccaatgtttgtcgctcaaactttttaagtttgactagatttataaaatatattagtaatatttatatcttcaaataactttactataaaaataaattcaaaaat

SEQ ID NO: 8811 - DNA, 1657 bp, Zea Mays
ctggaatgctgtgaaaagggaaatattaggatgtaccagattagatgatcaaatatgtgggtatgcgataggccagagtcaacttagaattctccatggactggcaaatatatttgagatcaaatgaattggattcacaggttatgcacatttttatttttacacacttcttggccgggcttcctatttcatctataagatgtggtaattgatatcttattgacttgcttatttccagtttttgtttctacattggactgctaggcgccatggcagaaatcacggtgcaacacttctcttttgattgactattgccaagatgaacgtgcacataagtatattataatagatgttgggaagacattcagagaacaagttctgagatggtttgttcgccacaaaatcccttgcgttgattctattcttctgactcatgagcatgcagatgcgatcttgggccttgatgatgttcgggtcgtacagccatttagtcccacaaatgatattgatccaaccccaatttatctctctcaattcgctatggacagcatctgccaaaagttcccctatttggtcaaaaagaaattaaaggaaggggaggaggttagacgagttgctcaacttgaatggaagataattgagagtgatattcagaaaccattcacaacttcagggctagagtttgttcccttgccggtgatccatggtgaagactacatttgtttgggtttccttttcggaaggaaatcaaaagttgcttacatatcagatgtttcacggtttcccccaagcacagaatatgcaatttcaaaatctggaggagggcaacttgatttgctcatcttggattgcctatacaggacgggttctcacaatgtgcacttgtgttgggaccagacactagatgctgttaggaggatttgccccaaaagagcactgcttattgggatgacccacgagatggatcatcacaaggacaaccaaacattggaagaatggtccaggagggaggggattgacgtgcagttagctcgtgatggcttgcgtgtctacattgatctgtagccgtgaaaggaaaatatgccatactcagcgaaccgcgccaggctttctggctgatgtaacatccattcccacttgtgaagaaagtgcaaactgactaaaaaggcgagcctatttggtgcatcattttacgtttcgctagtttatacgtgaatctctgaataaaaaagagaaaaagaaaagaaaagagagagagtagccacttgctagtagctggttcagtgccccggcaaattaatggccatctccctggtaaaggtagtcgaatgttcttgtaatcttgtcaattggaagctacactgcactggatgcatgcccaccagtcgaactgagcatgcgattttttttccctcggtcgcgcccgggtcatgtattgtagtataccgtaagaggaaagtcgattgagcatgttcgtggcgccagaccgagccacacgatctccaagactcttgcttgtgaagagcacgcagatgactcctactctaggttcaccaatgtttgtcgctcaaactttttaagtttgactagatttataaaatatattagtaatatttatatcttcaaataactttactataaaaataaattcaaaaat

SEQ ID NO: 8812 - DNA, 1399 bp, Zea Mays
atctgtgatggtatgagatcggagaggtgcaacacttctcttttgattgactattgccaagatgaacgtgcacataagtatattataatagatgttgggaagacattcagagaacaagttctgagatggtttgttcgccacaaaatcccttgcgttgattctattcttctgactcatgagcatgcagatgcgatcttgggccttgatgatgttcgggtcgtacagccatttagtcccacaaatgatattgatccaaccccaatttatctctctcaattcgctatggacagcatctgccaaaagttcccctatttggtcaaaaagaaattaaaggaaggggaggaggttagacgagttgctcaacttgaatggaagataattgagagtgatattcagaaaccattcacaacttcagggctagagtttgttcccttgccggtgatccatggtgaagactacatttgtttgggtttccttttcggaaggaaatcaaaagttgcttacatatcagatgtttcacggtttcccccaagcacagaatatgcaatttcaaaatctggaggagggcaacttgatttgctcatcttggattgcctatacaggacgggttctcacaatgtgcacttgtgttgggaccagacactagatgctgttaggaggatttgccccaaaagagcactgcttattgggatgacccacgagatggatcatcacaaggacaaccaaacattggaagaatggtccaggagggaggggattgacgtgcagttagctcgtgatggcttgcgtgtctacattgatctgtagccgtgaaaggaaaatatgccatactcagcgaaccgcgccaggctttctggctgatgtaacatccattcccacttgtgaagaaagtgcaaactgactaaaaaggcgagcctatttggtgcatcattttacgtttcgctagtttatacgtgaatctctgaataaaaaagagaaaaagaaaagaaaagagagagagtagccacttgctagtagctggttcagtgccccggcaaattaatggccatctccctggtaaaggtagtcgaatgttcttgtaatcttgtcaattggaagctacactgcactggatgcatgcccaccagtcgaactgagcatgcgattttttttccctcggtcgcgcccgggtcatgtattgtagtataccgtaagaggaaagtcgattgagcatgttcgtggcgccagaccgagccacacgatctccaagactcttgcttgtgaagagcacgcagatgactcctactctaggttcaccaatgtttgtcgctcaaactttttaagtttgactagatttataaaatatattagtaatatttatatcttcaaataactttactataaaaataaattcaaaaat

SEQ ID NO: 8813 - DNA, 1274 bp, Zea Mays
ctatcatcacggggtcggtgcggatctgtgatggtatgagatcggagaggtgcaacacttctcttttgattgactattgccaagatgaacgtgcacataagtatattataatagatgttgggaagacattcagagaacaagttctgagatggtttgttcgccacaaaatcccttgcgttgattctattcttctgactcatgagcatgcagatgcgatcttgggccttgatgatgttcgggtcgtacagccatttagtcccacaaatgatattgatccaaccccaatttatctctctcaattcgctatggacaggtgatccatggtgaagactacatttgtttgggtttccttttcggaaggaaatcaaaagttgcttacatatcagatgtttcacggtttcccccaagcacagaatatgcaatttcaaaatctggaggagggcaacttgatttgctcatcttggattgcctatacaggacgggttctcacaatgtgcacttgtgttgggaccagacactagatgctgttaggaggatttgccccaaaagagcactgcttattgggatgacccacgagatggatcatcacaaggacaaccaaacattggaagaatggtccaggagggaggggattgacgtgcagttagctcgtgatggcttgcgtgtctacattgatctgtagccgtgaaaggaaaatatgccatactcagcgaaccgcgccaggctttctggctgatgtaacatccattcccacttgtgaagaaagtgcaaactgactaaaaaggcgagcctatttggtgcatcattttacgtttcgctagtttatacgtgaatctctgaataaaaaagagaaaaagaaaagaaaagagagagagtagccacttgctagtagctggttcagtgccccggcaaattaatggccatctccctggtaaaggtagtcgaatgttcttgtaatcttgtcaattggaagctacactgcactggatgcatgcccaccagtcgaactgagcatgcgattttttttccctcggtcgcgcccgggtcatgtattgtagtataccgtaagaggaaagtcgattgagcatgttcgtggcgccagaccgagccacacgatctccaagactcttgcttgtgaagagcacgcagatgactcctactctaggttcaccaatgtttgtcgctcaaactttttaagtttgactagatttataaaatatattagtaatatttatatcttcaaataactttactataaaaataaattcaaaaat

SEQ ID NO: 8814 - DNA, 1671 bp, Zea Mays
attctgcgcacctcctcccagtgatcccgttcctattctgctgttactttgtctccgcaggccccacattctccgtctcgccacggtcgcggtcgtggtctcgctccggcaaacccaatggccgccgccgtccccaacggccacaccgccgccgccggagacgacgacgcaccacccgccgcttcgtcgtcgttggtgttcctgggcacggggtgctcgagcgcggtcccgaacgcgcggtgcctgatccagccccccgacccaccctgccccgtctgctcccagtccctttccgtcccgcccgagttaaaccctaactacaggtgcaacacttctcttttgattgactattgccaagatgaacgtgcacataagtatattataatagatgttgggaagacattcagagaacaagttctgagatggtttgttcgccacaaaatcccttgcgttgattctatgcgatcttgggccttgatgatgttcgggtcgtacagccatttagtcccacaaatgatattgatccaaccccaatttatctctctcaattcgctatggacagcatctgccaaaagttcccctatttggtcaaaaagaaattaaaggaaggggaggaggttagacgagttgctcaacttgaatggaagataattgagagtgatattcagaaaccattcacaacttcagggctagagtttgttcccttgccggtgatccatggtgaagactacatttgtttgggtttccttttcggaaggaaatcaaaagttgcttacatatcagatgtttcacggtttcccccaagcacagaatatgcaatttcaaaatctggaggagggcaacttgatttgctcatcttggattgcctatacaggacgggttctcacaatgtgcacttgtgttgggaccagacactagatgctgttaggaggatttgccccaaaagagcactgcttattgggatgacccacgagatggatcatcacaaggacaaccaaacattggaagaatggtccaggagggaggggattgacgtgcagttagctcgtgatggcttgcgtgtctacattgatctgtagccgtgaaaggaaaatatgccatactcagcgaaccgcgccaggctttctggctgatgtaacatccattcccacttgtgaagaaagtgcaaactgactaaaaaggcgagcctatttggtgcatcattttacgtttcgctagtttatacgtgaatctctgaataaaaaagagaaaaagaaaagaaaagagagagagtagccacttgctagtagctggttcagtgccccggcaaattaatggccatctccctggtaaaggtagtcgaatgttcttgtaatcttgtcaattggaagctacactgcactggatgcatgcccaccagtcgaactgagcatgcgattttttttccctcggtcgcgcccgggtcatgtattgtagtataccgtaagaggaaagtcgattgagcatgttcgtggcgccagaccgagccacacgatctccaagactcttgcttgtgaagagcacgcagatgactcctactctaggttcaccaatgtttgtcgctcaaactttttaagtttgactagatttataaaatatattagtaatatttatatcttcaaataactttactataaaaataaattcaaaaat

SEQ ID NO: 8815 - DNA, 1637 bp, Zea Mays
attctgcgcacctcctcccagtgatcccgttcctattctgctgttactttgtctccgcaggccccacattctccgtctcgccacggtcgcggtcgtggtctcgctccggcaaacccaatggccgccgccgtccccaacggccacaccgccgccgccggagacgacgacgcaccacccgccgcttcgtcgtcgttggtgttcctgggcacggggtgctcgagcgcggtcccgaacgcgcggtgcctgatccagccccccgacccaccctgccccgtctgctcccagtccctttccgtcccgcccgagttaaaccctaactacaggtgcaacacttctcttttgattgactattgccaagatgaacgtgcacataagtatattataatagatgttgggaagacattcagagaacaagttctgagatggtttgttcgccacaaaatcccttgcgttgattctattcttctgactcatgagcatgcagatgcgatcttgggccttgatgatgttcgggtcgtacagccatttagtcccacaaatgatattgatccaaccccaatttatctctctcaattcgctatggacagcatctgccaaaagttcccctatttggtcaaaaagaaattaaaggaaggggaggaggttagacgagttgctcaacttgaatggaagataattgagagtgatattcagaaaccattcacaacttcagggctagagtttgttcccttgccggtgatccatggtgaagactacatttgtttgggtttccttttcggaaggaaatcaaaagttgcttacatatcagatgtttcacggtttcccccaagcacagaatatgacgggttctcacaatgtgcacttgtgttgggaccagacactagatgctgttaggaggatttgccccaaaagagcactgcttattgggatgacccacgagatggatcatcacaaggacaaccaaacattggaagaatggtccaggagggaggggattgacgtgcagttagctcgtgatggcttgcgtgtctacattgatctgtagccgtgaaaggaaaatatgccatactcagcgaaccgcgccaggctttctggctgatgtaacatccattcccacttgtgaagaaagtgcaaactgactaaaaaggcgagcctatttggtgcatcattttacgtttcgctagtttatacgtgaatctctgaataaaaaagagaaaaagaaaagaaaagagagagagtagccacttgctagtagctggttcagtgccccggcaaattaatggccatctccctggtaaaggtagtcgaatgttcttgtaatcttgtcaattggaagctacactgcactggatgcatgcccaccagtcgaactgagcatgcgattttttttccctcggtcgcgcccgggtcatgtattgtagtataccgtaagaggaaagtcgattgagcatgttcgtggcgccagaccgagccacacgatctccaagactcttgcttgtgaagagcacgcagatgactcctactctaggttcaccaatgtttgtcgctcaaactttttaagtttgactagatttataaaatatattagtaatatttatatcttcaaataactttactataaaaataaattcaaaaat

SEQ ID NO: 8816 - DNA, 2525 bp, Zea Mays
attctgcgcacctcctcccagtgatcccgttcctattctgctgttactttgtctccgcaggccccacattctccgtctcgccacggtcgcggtcgtggtctcgctccggcaaacccaatggccgccgccgtccccaacggccacaccgccgccgccggagacgacgacgcaccacccgccgcttcgtcgtcgttggtgttcctgggcacggggtgctcgagcgcggtcccgaacgcgcggtgcctgatccagccccccgacccaccctgccccgtctgctcccagtccctttccgtcccgcccgagttaaaccctaactacagtatgaagctggaatgctgtgaaaagggaaatattaggatgtaccagattagatgatcaaatatgtgggtatgcgataggccagagtcaacttagaattctccatggactggcaaatatatttgagatcaaatgaattggattcacaggttatgcacatttttatttttacacacttcttggccgggcttcctatttcatctataagatgtggtaattgatatcttattgacttgcttatttccagtttttgtttctacattggactgctaggcgccatggcagaaatcacggttcaccttttccactctgtttttcctttgtactgtatacaggagacacagtagtattgtggaggcttagattatatgtgattaagtgaggttagaacattattcctttttgttcaagaaagataatgtatatgatgaaaccagtacctacgcaaaagaagaaggcacatacattagatgcaattgcacaatgtcgtgaaagcaggatatgtgaacccaggatatcttaacctttagattacaaaaagaagttgtatatggtattttacatcttctggtaaatcaaacgtacttttatgtatttttagattatgatgaaactttgaaatgtttgatctctgttcatgctcatacttttggctgataccttctctaggatcatgttaaactcttctagtgacttaggattgtatcgtgcttgtttatgttttacttgaggggaaagaaatcaaaacttcattctgaaatgtttctagaatgatgttgtacctgaacaaggttggtagataatttatgcttatatgtgtatttcatgcaggtgcaacacttctcttttgattgactattgccaagatgaacgtgcacataagtatattataatagatgttgggaagacattcagagaacaagttctgagatggtttgttcgccacaaaatcccttgcgttgattctattcttctgactcatgagcatgcagatgcgatcttgggccttgatgatgttcgggtcgtacagccatttagtcccacaaatgatattgatccaaccccaatttatctctctcaattcgctatggacagcatctgccaaaagttcccctatttggtcaaaaagaaattaaaggaaggggaggaggttagacgagttgctcaacttgaatggaagataattgagagtgatattcagaaaccattcacaacttcagggctagagtttgttcccttgccggtgatccatggtgaagactacatttgtttgggtttccttttcggaaggaaatcaaaagttgcttacatatcagatgtttcacggtttcccccaagcacagaatatgcaatttcaaaatctggaggagggcaacttgatttgctcatcttggattgcctatacaggacgggttctcacaatgtgcacttgtgttgggaccagacactagatgctgttaggaggatttgccccaaaagagcactgcttattgggatgacccacgagatggatcatcacaaggacaaccaaacattggaagaatggtccaggagggaggggattgacgtgcagttagctcgtgatggcttgcgtgtctacattgatctgtagccgtgaaaggaaaatatgccatactcagcgaaccgcgccaggctttctggctgatgtaacatccattcccacttgtgaagaaagtgcaaactgactaaaaaggcgagcctatttggtgcatcattttacgtttcgctagtttatacgtgaatctctgaataaaaaagagaaaaagaaaagaaaagagagagagtagccacttgctagtagctggttcagtgccccggcaaattaatggccatctccctggtaaaggtagtcgaatgttcttgtaatcttgtcaattggaagctacactgcactggatgcatgcccaccagtcgaactgagcatgcgattttttttccctcggtcgcgcccgggtcatgtattgtagtataccgtaagaggaaagtcgattgagcatgttcgtggcgccagaccgagccacacgatctccaagactcttgcttgtgaagagcacgcagatgactcctactctaggttcaccaatgtttgtcgctcaaactttttaagtttgactagatttataaaatatattagtaatatttatatcttcaaataactttactataaaaataaattcaaaaat

SEQ ID NO: 8817 - DNA, 3127 bp, Zea Mays
cgaaccttgacgcgctccctctcgtactgggaagcggtccctaccaactggcggcggcggttcataccctcgcgaagaccactagggccgccgccggcgaatctcaagttctcaacacctggcagaagcaaatcggcgtggcactcgccgggcaccgctcccttctccctcctcccacttcccagttctcgatcgtctcaactctgcgggctgcggttccgcctccgcctcctgacgacctcgcccacacgaccgctgcccgcttcgctcgtcgcccacaccgccgttctctcccccgggtgcccataaacccccttctccgcgccatcgttggcccggcgtaaccatctccgctgcggggacgaggaggagcaagcaaacaggaagcagccgagtatcttgccagtatattatatgcgttgaggtggcattgctgatgaaagtgaagacatgaggcttgaatgaaccctaactgcccccgccaaccgccgccgccgcagcagtcaccgactcctccagtcaaatcagccatgtcgccgccgccctgtgacgccctgcccaccgctgccaacaacatccagccatttcttgtccttcacaaggctgctgcctcctcggtgccatcttcccggtctcagcgccagattcagacctcacagccatcctcacccaaccgcaaatcagcaaacagatgtcgtcaaccagcgggtgaggagtgtgaggacgaaggggattcggagctatatgagcagctgcgtgctgaggccttccaccgaacttggtccaagatccagtccaccatcgacgaggtcctcagggccatcaacctcaagctgttcgaccaggtgctgcagtgggcgaaggagtccttcgcttcggcccatgccatcacgaaaaagcaccacactgaagtccagcagccataccctctcctgactgatgtgatctgcagaaggatcccgacggtattcgtcctcaccaagaatgcagagtttgttgatgatatcacaacgtttcatgaccttgcagggcatatgaagtccaatggatgtcacatagtcaagctgtcagcggctgagttatcagcaaaacatggagttggtggttgcttcaggagcctgttgggacagctattatccgatgttccagatgttgctgatgtatctgcgctagcatcatggtattgtgaagctgagaactttgatcagcctatcattgtcataattgatgatttggagcaatgttctggcgatgtgcttggagagtttgtgatgatgctgagtgagtgggtgtttaaaattccagtcttctttgtaatggggatagcaactacccttgatgctccaaagaagcttctctcgtcagaggctcttcaacgattagagccctgcaaacttaccttggggtctccctcagatagattgaatgcacttgttgaggctgtccttgttaaaccatgcgctggattttgcatcagtcatgaagtcgcactgttcgtcagaaattacttttttaggcatgatgggacaataacttcttttattactgctctcaagcttgcatgcagtaagcacttctccatggaacctctaagctttttgtgcttaggaatggtggaggaagattctgaggaattttggcatgataagcttgaatcgctccctcaaacaatatggaaacatgctttcgatctaccctcaaacaaaaatgcaaggaattcttgcaacatggtagaaggattgtctaggctgctgaaatcgcaaaaggattggagttctgttctcttgtgcctgtatgaagctggaaggcatgacaaagtgcagcttttggatatcttctgtgaggcagccagcccagattggcaaactgaaaatgcaccagatagttacctatttgcttctaaagtggctttattaggagtaaagtcagggtctgctagaagatttatagcccaagtaatgaatacaataaggtacttgcctacggaaattttgttacacgtccttgaggtttggagcatccatttaaaaggaatgagtgagatcaacgacagagtgaaggagcttcggtcaaaaggttgtggtgcagatagtgttagggccaaaaggaaatcaaccgccaatactggaaatggagtggttctaataaacgaggaagcggctgcgctgttacaggatgttatcaggaaatatttggtacctgctgaatgcttacctttccatgaaatagtctgcttcaagaatgttgacatcctccgatctgcgctgattggaaacccaagaagaatgattcaactcgatcttctgaggtcacagagccatctgaaatgctcttgttgcagtaggagtggtgctgccgtgtcaggatcgttgcacgacacatcaatcctgtgcagtctagcccaagagtatggtgacatgattaacctccatgactggtacacggcctttgaagggattataaagagcacaaactcaaaagccaaagggaaatcttgcagctctccctcgaagaagaagaagaaatcaaaccccacgcctctggagggtgatggcatgatccaagcaaggttctgcagcgccgttactgagatgcaggtcactggccttgttcggatgccgagcaagagaaggcccgatcttgtgcagagaatcgcgttcggtccttaacagctcggtgattacatgcatgctatacagacgaaacgttttgtgcacgtaagggtttccagttgttgaatcggagcaaggctgacgataatcccaccatgtggtaaattgggcagccgtggaaggaaggtttggttacttgtatcggtgcttcgaagagagctgtgagatggagcagcagccgccgcttcagatatgcagtgctgatgttgcgtctgatggctaagctatgtcgttatttttttcctcttaagagcagtattaaacatgttttagctattgattcggctctctgtagagctgacatgggctcatgtagcccaaggggtacatttgagaaatttttatccttgaaacaaagggcatttcgaattatttccccttttactgatctgttttcagttgcagcacagcatggaacaacgtatgaaaagcaaagcatagctgctgcctgcaaa

SEQ ID NO: 8818 - DNA, 784 bp, Zea Mays
cgaaccttgacgcgctccctctcgtactgggaagcggtccctaccaactggcggcggcggttcataccctcgcgaagaccactagggccgccgccggcgaatctcaagttctcaacacctggcagaagcaaatcggcgtggcactcgccgggcaccgctcccttctccctcctcccacttcccagttctcgatcgtctcaactctgcgggctgcggttccgcctccgcctcctgacgacctcgcccacacgaccgctgcccgcttcgctcgtcgcccacaccgccgttctctcccccgggtgcccataaacccccttctccgcgccatcgttggcccggcgtaaccatctccgctgcggggacgaggaggagcaagcaaacaggaagcagccgagtatcttgccaggctgacgataatcccaccatgtggtaaattgggcagccgtggaaggaaggtttggttacttgtatcggtgcttcgaagagagctgtgagatggagcagcagccgccgcttcagatatgcagtgctgatgttgcgtctgatggctaagctatgtcgttatttttttcctcttaagagcagtattaaacatgttttagctattgattcggctctctgtagagctgacatgggctcatgtagcccaaggggtacatttgagaaatttttatccttgaaacaaagggcatttcgaattatttccccttttactgatctgttttcagttgcagcacagcatggaacaacgtatgaaaagcaaagcatagctgctgcctgcaaa

SEQ ID NO: 8819 - DNA, 1083 bp, Zea Mays
ccggatcaaagagctggaatcacagctcctagttgaaagaaagatagcacggcagcatgtcgacaacaagattgcccaagaccatctgcagaagcagcacggcatgaaagaagagaactcgtactcgagaagcccgatggccgagaggaacctcaactccacagcagagaaagcagcagcgcctaaagacttggggggcatctcgaagcagatgttctccgacagcaacactgacacttacagcttcaagcagctgatgtcactaggggacgagaaggagaacgaccctgaagctgctgtgcagctgccgccgacaacgaaggccaggcgagtgtcactctgcaacggtggagctcaccagcggccgttgaacccagcttcacgcaggacgtccctcataccgctgccacggcgcaactcgctgctgccaatgcccgtagcaaagcctgcagcagcagcagcagcggtgttgccgcttgacaagatcactgagaacctgtcctcgcccccgctgtgctctcctccggctgtatccaacgacaagggcagccggagtaggaggatcaacagcatactgcggcgaagcctgcagaagaaggtagtcatccggccgtcgctggcagcgcaggcagggaagaaagccgccggtgctgctgctgcccggggtactgacagcgcacgcagggcggcgcggcgggtgcctgtgagcgacggcgctggcgggcaaaggtacagcagaacagggacaaggagcgggggtggagcaacttctgaccagaacatcgcggcacctctattgttaaagaagcctgtggagatttaggtgtttattttgtacaaaatttaggtgttattatttggttgggtttgtgagttctcgcgtattgtgagagaactcgaccgtttgctgctgaccccgatcaggtcaggtttttacaatgcttccagggactttgtgggaggctgggagtgttcatgtaacgatctcttatgctgattactgacacagtggacagtgctttcccgatgcgagaagaaaatttgcagggattttttttcgggtaaaaaaaaagtaagagaaca

SEQ ID NO: 8820 - DNA, 1727 bp, Zea Mays
agtcgatctcactgggttcgtaccctttgtgtcaaagatgttttgtcacgtgttacgagttcgatcacaaattatatgctaattgatttctaatttcagtatacattgtgtaatcgtcaaaggagaaaacttgatgaatggagaatgtacaaagagcaaattatggctaattgaccttgctggaagtgaacgggtagcaaagacagatgcacaaggagaaagattgaaagaagcacagaacataaacaaatcactttctgcacttggtgatgttatatctgctcttgcaacgaagacctcgcacataccctttagtacaggaattcgaagctaacgcacttgctccaagactcactaagtggagattccaaaaccttgatgttcgttcaaatcagtcctaatgagaacgacgtgggtgaaactctttgttcgttgaacttcgcgagcagagtgcgaggcatagagcttggacaagctaaaaagcaagtcgatattggagaattgtcaagatacaagctcatggttgggagggccaaacaggacagcaagaacaaagatgctcagattaaaagcatggaagaaaggatacagatacttgaagcgaagaataagaccaaagacttgctcacaatgaatctccaagagaagatcaaagagctggaatcacagctcctagttgaaagaaagatagcacggcagcatgtcgacaacaagattgcccaagaccatctgcagaagcagcacggcatgaaagaagagaactcgtactcgagaagcccgatggccgagaggaacctcaactccacagcagagaaagcagcagcgcctaaagacttggggggcatctcgaagcagatgttctccgacagcaacactgacacttacagcttcaagcagctgatgtcactaggggacgagaaggagaacgaccctgaagctgctgtgcagctgccgccgacaacgaaggccaggcgagtgtcactctgcaacggtggagctcaccagcggccgttgaacccagcttcacgcaggacgtccctcataccgctgccacggcgcaactcgctgctgccaatgcccgtagcaaagcctgcagcagcagcagcagcggtgttgccgcttgacaagatcactgagaacctgtcctcgcccccgctgtgctctcctccggctgtatccaacgacaagggcagccggagtaggaggatcaacagcatactgcggcgaagcctgcagaagaaggtagtcatccggccgtcgctggcagcgcaggcagggaagaaagccgccggtgctgctgctgcccggggtactgacagcgcacgcagggcggcgcggcgggtgcctgtgagcgacggcgctggcgggcaaaggtacagcagaacagggacaaggagcgggggtggagcaacttctgaccagaacatcgcggcacctctattgttaaagaagcctgtggagatttaggtgtttattttgtacaaaatttaggtgttattatttggttgggtttgtgagttctcgcgtattgtgagagaactcgaccgtttgctgctgaccccgatcaggtcaggtttttacaatgcttccagggactttgtgggaggctgggagtgttcatgtaacgatctcttatgctgattactgacacagtggacagtgctttcccgatgcgagaagaaaatttgcagggattttttttcgggtaaaaaaaaagtaagagaaca

SEQ ID NO: 8821 - DNA, 1684 bp, Zea Mays
agtcgatctcactgggttcgtaccctttgtgtcaaagatgttttgtcacgtgttacgagttcgatcacaaattatatgctaattgatttctaatttcagtatacattgtgtaatcgtcaaaggagaaaacttgatgaatggagaatgtacaaagagcaaattatggctaattgaccttgctggaagtgaacgggtagcaaagacagatgcacaaggagaaagattgaaagaagcacagaacataaacaaatcactttctgcacttggtgatgttatatctgctcttgcaacgaagacctcgcacataccctttaggtggagattccaaaaccttgatgttcgttcaaatcagtcctaatgagaacgacgtgggtgaaactctttgttcgttgaacttcgcgagcagagtgcgaggcatagagcttggacaagctaaaaagcaagtcgatattggagaattgtcaagatacaagctcatggttgggagggccaaacaggacagcaagaacaaagatgctcagattaaaagcatggaagaaaggatacagatacttgaagcgaagaataagaccaaagacttgctcacaatgaatctccaagagaagatcaaagagctggaatcacagctcctagttgaaagaaagatagcacggcagcatgtcgacaacaagattgcccaagaccatctgcagaagcagcacggcatgaaagaagagaactcgtactcgagaagcccgatggccgagaggaacctcaactccacagcagagaaagcagcagcgcctaaagacttggggggcatctcgaagcagatgttctccgacagcaacactgacacttacagcttcaagcagctgatgtcactaggggacgagaaggagaacgaccctgaagctgctgtgcagctgccgccgacaacgaaggccaggcgagtgtcactctgcaacggtggagctcaccagcggccgttgaacccagcttcacgcaggacgtccctcataccgctgccacggcgcaactcgctgctgccaatgcccgtagcaaagcctgcagcagcagcagcagcggtgttgccgcttgacaagatcactgagaacctgtcctcgcccccgctgtgctctcctccggctgtatccaacgacaagggcagccggagtaggaggatcaacagcatactgcggcgaagcctgcagaagaaggtagtcatccggccgtcgctggcagcgcaggcagggaagaaagccgccggtgctgctgctgcccggggtactgacagcgcacgcagggcggcgcggcgggtgcctgtgagcgacggcgctggcgggcaaaggtacagcagaacagggacaaggagcgggggtggagcaacttctgaccagaacatcgcggcacctctattgttaaagaagcctgtggagatttaggtgtttattttgtacaaaatttaggtgttattatttggttgggtttgtgagttctcgcgtattgtgagagaactcgaccgtttgctgctgaccccgatcaggtcaggtttttacaatgcttccagggactttgtgggaggctgggagtgttcatgtaacgatctcttatgctgattactgacacagtggacagtgctttcccgatgcgagaagaaaatttgcagggattttttttcgggtaaaaaaaaagtaagagaaca

SEQ ID NO: 8822 - DNA, 1041 bp, Zea Mays
gcagcgttgccccttttcctaaaaaaaaatcgaaccgcgctggcgcgccgccgtcacgcgagcgacgtgatcagtacagtcagtcaccggccgtcacagcgcacgcgtcgtccgtccgtccgtacttcctcgccgagttgacctgggtaagtgggcgagatggaggacgaggggagcggcgaccggcgccgcgccgcggaggcactcgtctcgccgccgccgagggcgaagacggtgacgatccccgtggcccgcgacttcatcatcccccacgccgctgaccagtgccgctgctccggcttcgaagtcgccgaggagggttcgccgacgggttcgtcggcgctcggaccagccagcgctggcggtggcgtcccgtgcgagggcgcgctgcaggacacgccggactacatccggaggagcgccgcgcggcacagggtcgcgccgctcgagctcttctcctccgcctcgccaccgcccgcgggacttggcgccgctgatgcggtggcttctagtgcgaaatgccatgccacggagggcgaggccgtgggcggtcggcagccgcaagagactcgagtggataaatccgattgctggggtatctccgaacaacagtatggtgtccttctgcgggaggaggaggaatgcaggaagctgttagatgacctcatggcagagaatgagctcaagaccagggagtgccgtgaagcccaggagtcgctccgtgatctgcggatggagctgatgaggaagtccatgcacgttggctcactagcctctgctgttgaagggcaagtgaaggagaagagtcgtttgtgtcaattactgaaggcattgggcgaaaaattgaaggtattaaagtcagagcaccagaacctaagacaagaatcgctagagtacagaaagtgtgtgttagatgcttcacaaatgtctgcaacaattcagcgatatgtgaatcaatatgtaagtttagagtgcgagtttaaagatctcaaagagaagttcaatgaggaggcaaaggagcgtaaagacttatacaacaag

SEQ ID NO: 8823 - DNA, 1405 bp, Zea Mays
ctaaatatgagatttgagtattcagatagcgatatggttggacttcaatatttgtctggtgacatatctggtggcaatgctcgctgtatagcaatgcttcttgcattcagagaggcaataaatgattactccatgccttctgaaaaaattctgaatagagatcttactgctaaaatcagtagctatgtgtcatttctcatcgagtgcagaccactttcaatcagcatgggcaacgcaattagatttttgaagaacaggattaccaagctaccacttgcattttcagagtcagaagctaaagttagtcttcaatctgatattgatcgctttataaatgagaagataatagttgcggataaggtcattgttagtcatgctgtcacaaaaatcagagatggtgatgttctattgacatttgggtcagcctctgtcgttgaaatgatttttgataatgctcatgaacttggaaagaaatttcgtgttgtggtggtcgactctcgtccaaaccatgagggacaaggattgttgcgccgattagttgcaaagggtatcagttgcacatatacacacataaatgctgtatcttacatcatgcatgaggttacaagagtgtttttgggtgcctcttcagtactatcgaatggtactgtctactccagagttgggacagctttggttgcgatggttgcacatgcttttggagttcctgttctagtgtgttgtgaagcgtacaagtttcatgagagggttcaactcgattctatatgctttaatgaacttggtgacccagatgctatttcaagagttcctagggatgaaagtttgagcaatctcaaaaactgggctgagaatgaaaatcttcatcttctgaatcttaagtatgatatcaccccttccgattatgtttcaatgctcataacagattatggaatgctcccacctactagtgtaccagtcattgtaagagagtaccggagggagcacgtttggatatagaagccaccgttttcctttctggttttgtttgaggaggatttgtctgcgatgaacactgatccttgtattcggtatataactactcccaaccacgtcttgtagaaaagctgcaagttcttgaagatttagacacaaaaaaatgactagcaaattgtcagagctgttgttcctaagggcgaaccggcgaagccttaatacttgtatgaggtttccgtgtgagggtactgattcaatggttgagtgtgtaaaagctctgcaagcgtcaagatgcttacatgtaatgatgtatggacattttcatcgaaatgatcaaatttgtcctgggtctctagcatttctctcatcttagtggcatctagatcgaagtgtaagagtatatcatctgaatatttttatctttaagaattac

SEQ ID NO: 8824 - DNA, 1913 bp, Zea Mays
ctcatgttaagaatggagggatattacagccaccaattgttctacagaaccaaacaagagacaccttactgaaagaaagaatgagcatgctcctccgactccagtttcgcagaaaccaaagctttctaaagcagagagacgtgccattcaggagtcccagcgtgctgccaaagccgctgccaaggaggcaggtttgaaatcaacagccatggcttctgatgctaacaccaagcaacccaaaacagcaaagatatctctgaagaaagatgtcaaccaagttaactctccagttgcttctgataagaagactggtgaacgaccgcctgacaaagatagaaaaaaagatgctcctcaaccccgcatgcaatttgacgatacacatcgggtggtgaaagcaaagaagcgttcagttgttagacaatcagaagctcaaaacagggtcgaactgttcagacatctgcctcaatatgcacatggcactcaactacctgaccttgagtcaaaattttttcaacctgatctgatgcatccttctgtgtacaaggttggacttcaatatttgtctggtgacatatctggtggcaatgctcgctgtatagcaatgcttcttgcattcagagaggcaataaatgattactccatgccttctgaaaaaattctgaatagagatcttactgctaaaatcagtagctatgtgtcatttctcatcgagtgcagaccactttcaatcagcatgggcaacgcaattagatttttgaagaacaggattaccaagctaccacttgcattttcagagtcagaagctaaagttagtcttcaatctgatattgatcgctttataaatgagaagataatagttgcggataaggtcattgttagtcatgctgtcacaaaaatcagagatggtgatgttctattgacatttgggtcagcctctgtcgttgaaatgatttttgataatgctcatgaacttggaaagaaatttcgtgttgtggtggtcgactctcgtccaaaccatgagggacaaggattgttgcgccgattagttgcaaagggtatcagttgcacatatacacacataaatgctgtatcttacatcatgcatgaggttacaagagtgtttttgggtgcctcttcagtactatcgaatggtactgtctactccagagttgggacagctttggttgcgatggttgcacatgcttttggagttcctgttctagtgtgttgtgaagcgtacaagtttcatgagagggttcaactcgattctatatgctttaatgaacttggtgacccagatgctatttcaagagttcctagggatgaaagtttgagcaatctcaaaaactgggctgagaatgaaaatcttcatcttctgaatcttaagtatgatatcaccccttccgattatgtttcaatgctcataacagattatggaatgctcccacctactagtgtaccagtcattgtaagagagtaccggagggagcacgtttggatatagaagccaccgttttcctttctggttttgtttgaggaggatttgtctgcgatgaacactgatccttgtattcggtatataactactcccaaccacgtcttgtagaaaagctgcaagttcttgaagatttagacacaaaaaaatgactagcaaattgtcagagctgttgttcctaagggcgaaccggcgaagccttaatacttgtatgaggtttccgtgtgagggtactgattcaatggttgagtgtgtaaaagctctgcaagcgtcaagatgcttacatgtaatgatgtatggacattttcatcgaaatgatcaaatttgtcctgggtctctagcatttctctcatcttagtggcatctagatcgaagtgtaagagtatatcatctgaatatttttatctttaagaattac

SEQ ID NO: 8825 - DNA, 1902 bp, Zea Mays
cccagtccagacgtcgccgtcgtcgccgcccgaacccgatggacatccgccgcgggccgccgccgccgcgcaccgcgtcgggcggggtggagccgcggttccgccaggtgggattcgtcacggccgccgagcccgcgcggggggccgccacgccggcgcccgcgtcgcccgccgcgtccgacggcctctcccccgtcatgatcccgcccccgctcatccccgtccccgtccccgtccctgtcgcgcccgcttccgagtccctcgcgccttcttccccgcccccggactcctcgtctcgccccgacgccgtctccgaccttgacgacgacgacgacatcgacgtgtcctgggcgcgcccacccccgcccgccttcccagaaccaaacaagagacaccttactgaaagaaagaatgagcatgctcctccgactccagtttcgcagaaaccaaagctttctaaagcagagagacgtgccattcaggagtcccagcgtgctgccaaagccgctgccaaggaggcaggtttgaaatcaacagccatggcttctgatgctaacaccaagcaacccaaaacagcaaagatatctctgaagaaagatgtcaaccaagttaactctccagttgcttctgataagaagactggtgaacgaccgcctgacaaagatagaaaaaaagatgctcctcaaccccgcatgcaatttgacgatacacatcgggtggtgaaagcaaagaagcgttcagttgttagacaatcagaagctcaaaacagggtcgaactgttcagacatctgcctcaatatgcacatggcactcaactacctgaccttgagtcaaaattttttcaacctgatctgatgcatccttctgtgtacaaggttggacttcaatatttgtctggtgacatatctggtggcaatgctcgctgtatagcaatgcttcttgcattcagagaggcaataaatgattactccatgccttctgaaaaaattctgaatagagatcttactgctaaaatcagtagctatgtgtcatttctcatcgagtgcagaccactttcaatcagcatgggcaacgcaattagatttttgaagaacaggattaccaagctaccacttgcattttcagagtcagaagctaaagttagtcttcaatctgatattgatcgctttataaatgagaagataatagttgcggataaggtcattgttagtcatgctgtcacaaaaatcagagatggtgatgttctattgacatttgggtcagcctctgtcgttgaaatgatttttgataatgctcatgaacttggaaagaaatttcgtgttgtggtggtcgactctcgtccaaaccatgagggacaaggattgttgcgccgattagttgcaaagggtatcagttgcacatatacacacataaatgctgtatcttacatcatgcatgaggttacaagagtgtttttgggtgcctcttcagtactatcgaatggtactgtctactccagagttgggacagctttggttgcgatggttgcacatgcttttggagttcctgttctagtgtgttgtgaagcgtacaagtttcatgagagggttcaactcgattctatatgctttaatgaacttggtgacccagatgctatttcaagagttcctagggatgaaagtttgagcaatctcaaaaactgggctgagaatgaaaatcttcatcttctgaatcttaagtatgatatcaccccttccgattatgtttcaatgctcataacagattatggaatgctcccacctactagtgtaccagtcattgtaagagagtaccggagggagcacgtttggatatagaagccaccgttttcctttctggttttgtttgagatcaaggacccttcaagaggaggatgctttttag

SEQ ID NO: 8826 - DNA, 1931 bp, Zea Mays
cccagtccagacgtcgccgtcgtcgccgcccgaacccgatggacatccgccgcgggccgccgccgccgcgcaccgcgtcgggcggggtggagccgcggttccgccaggtgggattcgtcacggccgccgagcccgcgcggggggccgccacgccggcgcccgcgtcgcccgccgcgtccgacggcctctcccccgtcatgatcccgcccccgctcatccccgtccccgtccccgtccctgtcgcgcccgcttccgagtccctcgcgccttcttccccgcccccggactcctcgtctcgccccgacgccgtctccgaccttgacgacgacgacgacatcgacgtgtcctgggcgcgcccacccccgcccgccttcccagaaccaaacaagagacaccttactgaaagaaagaatgagcatgctcctccgactccagtttcgcagaaaccaaagctttctaaagcagagagacgtgccattcaggagtcccagcgtgctgccaaagccgctgccaaggaggcaggtttgaaatcaacagccatggcttctgatgctaacaccaagcaacccaaaacagcaaagatatctctgaagaaagatgtcaaccaagttaactctccagttgcttctgataagaagactggtgaacgaccgcctgacaaagatagaaaaaaagatgctcctcaaccccgcatgcaatttgacgatacacatcgggtggtgaaagcaaagaagcgttcagttgttagacaatcagaagctcaaaacagggtcgaactgttcagacatctgcctcaatatgcacatggcactcaactacctgaccttgagtcaaaattttttcaacctgatctgatgcatccttctgtgtacaaggttggacttcaatatttgtctggtgacatatctggtggcaatgctcgctgtatagcaatgcttcttgcattcagagaggcaataaatgattactccatgccttctgaaaaaattctgaatagagatcttactgctaaaatcagtagctatgtgtcatttctcatcgagtgcagaccactttcaatcagcatgggcaacgcaattagatttttgaagaacaggattaccaagctaccacttgcattttcagagtcagaagctaaagttagtcttcaatctgatattgatcgctttataaatgagaagataatagttgcggataaggtcattgttagtcatgctgtcacaaaaatcagagatggtgatgttctattgacatttgggtcagcctctgtcgttgaaatgatttttgataatgctcatgaacttggaaagaaatttcgtgttgtggtggtcgactctcgtccaaaccatgagggacaaggattgttgcgccgattagttgcaaagggtatcagttgcacatatacacacataaatgctgtatcttacatcatgcatgaggttacaagagtgtttttgggtgcctcttcagtactatcgaatggtactgtctactccagagttgggacagctttggttgcgatggttgcacatgcttttggagttcctgttctagtgtgttgtgaagcgtacaagtttcatgagagggttcaactcgattctatatgctttaatgaacttggtgacccagatgctatttcaagagttcctagggatgaaagtttgagcaatctcaaaaactgggctgagaatgaaaatcttcatcttctgaatcttaagtatgatatcaccccttccgattatgtttcaatgctcataacagattatggaatgctcccacctactagtgtaccagtcattgtaagagagtaccggagggagcacgtttggatatagaagccaccgttttcctttctggttttgtttgaggccactgttgggcgtccatgccctggactggactggagcgtggcttggctgttggctcggccc

SEQ ID NO: 8827 - DNA, 2234 bp, Zea Mays
cccagtccagacgtcgccgtcgtcgccgcccgaacccgatggacatccgccgcgggccgccgccgccgcgcaccgcgtcgggcggggtggagccgcggttccgccaggtgggattcgtcacggccgccgagcccgcgcggggggccgccacgccggcgcccgcgtcgcccgccgcgtccgacggcctctcccccgtcatgatcccgcccccgctcatccccgtccccgtccccgtccctgtcgcgcccgcttccgagtccctcgcgccttcttccccgcccccggactcctcgtctcgccccgacgccgtctccgaccttgacgacgacgacgacatcgacgtgtcctgggcgcgcccacccccgcccgccttcccagaaccaaacaagagacaccttactgaaagaaagaatgagcatgctcctccgactccagtttcgcagaaaccaaagctttctaaagcagagagacgtgccattcaggagtcccagcgtgctgccaaagccgctgccaaggaggcaggtttgaaatcaacagccatggcttctgatgctaacaccaagcaacccaaaacagcaaagatatctctgaagaaagatgtcaaccaagttaactctccagttgcttctgataagaagactggtgaacgaccgcctgacaaagatagaaaaaaagatgctcctcaaccccgcatgcaatttgacgatacacatcgggtggtgaaagcaaagaagcgttcagttgttagacaatcagaagctcaaaacagggtcgaactgttcagacatctgcctcaatatgcacatggcactcaactacctgaccttgagtcaaaattttttcaacctgatctgatgcatccttctgtgtacaaggttggacttcaatatttgtctggtgacatatctggtggcaatgctcgctgtatagcaatgcttcttgcattcagagaggcaataaatgattactccatgccttctgaaaaaattctgaatagagatcttactgctaaaatcagtagctatgtgtcatttctcatcgagtgcagaccactttcaatcagcatgggcaacgcaattagatttttgaagaacaggattaccaagctaccacttgcattttcagagtcagaagctaaagttagtcttcaatctgatattgatcgctttataaatgagaagataatagttgcggataaggtcattgttagtcatgctgtcacaaaaatcagagatggtgatgttctattgacatttgggtcagcctctgtcgttgaaatgatttttgataatgctcatgaacttggaaagaaatttcgtgttgtggtggtcgactctcgtccaaaccatgagggacaaggattgttgcgccgattagttgcaaagggtatcagttgcacatatacacacataaatgctgtatcttacatcatgcatgaggttacaagagtgtttttgggtgcctcttcagtactatcgaatggtactgtctactccagagttgggacagctttggttgcgatggttgcacatgcttttggagttcctgttctagtgtgttgtgaagcgtacaagtttcatgagagggttcaactcgattctatatgctttaatgaacttggtgacccagatgctatttcaagagttcctagggatgaaagtttgagcaatctcaaaaactgggctgagaatgaaaatcttcatcttctgaatcttaagtatgatatcaccccttccgattatgtttcaatgctcataacagattatggaatgctcccacctactagtgtaccagtcattgtaagagagtaccggagggagcacgtttggatatagaagccaccgttttcctttctggttttgtttgagctccagcggaacagttttcgtcagcgatctacctcatgtcatctggtgatgattttatttccttgtagtttgtaatttgttggagttcatcaccggcacagctgatcggtttggactttggaccacttgaacattatggccggtttcaagatcctgccaacaagtattactgttttgactgttcataggacaggatatggagcacaagctcacaagtgcacatatgctaaatccaaggctttatagcaacaatggtatttttttttgcagcccaagtgaaaatagcattttgggtatccaaggaccggttggttggtagtaaccatataatcgttatcctacctcgaacaaggtgaccagacatga

SEQ ID NO: 8828 - DNA, 2225 bp, Zea Mays
cccagtccagacgtcgccgtcgtcgccgcccgaacccgatggacatccgccgcgggccgccgccgccgcgcaccgcgtcgggcggggtggagccgcggttccgccaggtgggattcgtcacggccgccgagcccgcgcggggggccgccacgccggcgcccgcgtcgcccgccgcgtccgacggcctctcccccgtcatgatcccgcccccgctcatccccgtccccgtccccgtccctgtcgcgcccgcttccgagtccctcgcgccttcttccccgcccccggactcctcgtctcgccccgacgccgtctccgaccttgacgacgacgacgacatcgacgtgtcctgggcgcgcccacccccgcccgccttcccagaaccaaacaagagacaccttactgaaagaaagaatgagcatgctcctccgactccagtttcgcagaaaccaaagctttctaaagcagagagacgtgccattcaggagtcccagcgtgctgccaaagccgctgccaaggaggcaggtttgaaatcaacagccatggcttctgatgctaacaccaagcaacccaaaacagcaaagatatctctgaagaaagatgtcaaccaagttaactctccagttgcttctgataagaagactggtgaacgaccgcctgacaaagatagaaaaaaagatgctcctcaaccccgcatgcaatttgacgatacacatcgggtggtgaaagcaaagaagcgttcagttgttagacaatcagaagctcaaaacagggtcgaactgttcagacatctgcctcaatatgcacatggcactcaactacctgaccttgagtcaaaattttttcaacctgatctgatgcatccttctgtgtacaaggttggacttcaatatttgtctggtgacatatctggtggcaatgctcgctgtatagcaatgcttcttgcattcagagaggcaataaatgattactccatgccttctgaaaaaattctgaatagagatcttactgctaaaatcagtagctatgtgtcatttctcatcgagtgcagaccactttcaatcagcatgggcaacgcaattagatttttgaagaacaggattaccaagctaccacttgcattttcagagtcagaagctaaagttagtcttcaatctgatattgatcgctttataaatgagaagataatagttgcggataaggtcattgttagtcatgctgtcacaaaaatcagagatggtgatgttctattgacatttgggtcagcctctgtcgttgaaatgatttttgataatgctcatgaacttggaaagaaatttcgtgttgtggtggtcgactctcgtccaaaccatgagggacaaggattgttgcgccgattagttgcaaagggtatcagttgcacatatacacacataaatgctgtatcttacatcatgcatgaggttacaagagtgtttttgggtgcctcttcagtactatcgaatggtactgtctactccagagttgggacagctttggttgcgatggttgcacatgcttttggagttcctgttctagtgtgttgtgaagcgtacaagtttcatgagagggttcaactcgattctatatgctttaatgaacttgatgctatttcaagagttcctagggatgaaagtttgagcaatctcaaaaactgggctgagaatgaaaatcttcatcttctgaatcttaagtatgatatcaccccttccgattatgtttcaatgctcataacagattatggaatgctcccacctactagtgtaccagtcattgtaagagagtaccggagggagcacgtttggatatagaagccaccgttttcctttctggttttgtttgagctccagcggaacagttttcgtcagcgatctacctcatgtcatctggtgatgattttatttccttgtagtttgtaatttgttggagttcatcaccggcacagctgatcggtttggactttggaccacttgaacattatggccggtttcaagatcctgccaacaagtattactgttttgactgttcataggacaggatatggagcacaagctcacaagtgcacatatgctaaatccaaggctttatagcaacaatggtatttttttttgcagcccaagtgaaaatagcattttgggtatccaaggaccggttggttggtagtaaccatataatcgttatcctacctcgaacaaggtgaccagacatga

SEQ ID NO: 8829 - DNA, 2166 bp, Zea Mays
cccagtccagacgtcgccgtcgtcgccgcccgaacccgatggacatccgccgcgggccgccgccgccgcgcaccgcgtcgggcggggtggagccgcggttccgccaggtgggattcgtcacggccgccgagcccgcgcggggggccgccacgccggcgcccgcgtcgcccgccgcgtccgacggcctctcccccgtcatgatcccgcccccgctcatccccgtccccgtccccgtccctgtcgcgcccgcttccgagtccctcgcgccttcttccccgcccccggactcctcgtctcgccccgacgccgtctccgaccttgacgacgacgacgacatcgacgtgtcctgggcgcgcccacccccgcccgccttcccagaaccaaacaagagacaccttactgaaagaaagaatgagcatgctcctccgactccagtttcgcagaaaccaaagctttctaaagcagagagacgtgccattcaggagtcccagcgtgctgccaaagccgctgccaaggaggcaggtttgaaatcaacagccatggcttctgatgctaacaccaagcaacccaaaacagcaaagatatctctgaagaaagatgtcaaccaagttaactctccagttgcttctgataagaagactggtgaacgaccgcctgacaaagatagaaaaaaagatgctcctcaaccccgcatgcaatttgacgatacacatcgggtggtgaaagcaaagaagcgttcagttgttagacaatcagaagctcaaaacagggtcgaactgttcagacatctgcctcaatatgcacatggcactcaactacctgaccttgagtcaaaattttttcaacctgatctgatgcatccttctgtgtacaaggttggacttcaatatttgtctggtgacatatctggtggcaatgctcgctgtatagcaatgcttcttgcattcagagaggcaataaatgattactccatgccttctgaaaaaattctgaatagagatcttactgctaaaatcagtagctatgtgtcatttctcatcgagtgcagaccactttcaatcagcatgggcaacgcaattagatttttgaagaacaggattaccaagctaccacttgcattttcagagtcagaagctaaagttagtcttcaatctgatattgatcgctttataaatgagaagataatagttgcggataaggtcattgttagtcatgctgtcacaaaaatcagagatggtgatgttctattgacatttgggtcagcctctgtcgttgaaatgatttttgataatgctcatgaacttggaaagaaatttcgtgttgtggtggtcgactctcgtccaaaccatgagggacaaggattgttgcgccgattagttgcaaagggtatcagttgcacatatacacacataaatgctgtatcttacatcatgcatgaggttacaagagtgtttttgggtgcctcttcagtactatcgaatggtactgtctactccagagttgggacagctttggttgcgatggttgcacatgcttttggagttcctgttctagtgtgttgtgaagcgtacaagtttcatgagagggttcaactcgattctatatgctttaatgaacttggtgacccagatgctatttcaagagttcctagggatgaaagtttgagcaatctcaaaaactgggctgagaatgaaaatcttcatcttctgaatcttaagtatgatatcaccccttccgattatgtttcaatgctcataacagattatggaatgctcccacctactagtgtaccagtcattgtaagagagtaccggagggagcacgtttggatatagaagccaccgttttcctttctggttttgtttgagtttgtaatttgttggagttcatcaccggcacagctgatcggtttggactttggaccacttgaacattatggccggtttcaagatcctgccaacaagtattactgttttgactgttcataggacaggatatggagcacaagctcacaagtgcacatatgctaaatccaaggctttatagcaacaatggtatttttttttgcagcccaagtgaaaatagcattttgggtatccaaggaccggttggttggtagtaaccatataatcgttatcctacctcgaacaaggtgaccagacatga

SEQ ID NO: 8830 - DNA, 835 bp, Zea Mays
ccatggtgcaggaatgagagggtagagctgataagcataatacatgtacggatttatgctcggatgtggagacaagtagaaagtggtttgtggagcattgagttgtcttcatgagattcagcctattcaggtcatgtactcatgtgggcacagcctagaggactaactaaccaagaatactaaagcacataagatgtttaatttttctgattttaatttttgaatttctatccaaatatagactctttagtatgacaaccttgcattggtttctttgataacatactagacatggatgactgttgaatatgttattatagtctggagaatctaattgtatgatcattatgaaacctatgagtgatcatcttactaagaacaagatatttaagcatcatgtttccatctatgtccatattcagcatgttaattttacctataacacgggagataacaccatgtaccttttacggagatactattgcaaaatacagccacagcatgaaggacctttctcaacaaattgttgtgcatcatctcagaaaatctgagcctgccaccatcttatatacaagaggcggttggagaagttttccagaacattactattagctactattctccgtgtccacaacctgatcttgctcttgggttacaatctcatgataaacaatgcttgtggtagtttcaattctttagtgtttttatgattatatctatattgtttaattatgaacaacttgtatctgaatctgaatgtaacagattactaaattttacgacacttcttattgtgttttatgcttccattaaaaacagtcttactgcgttttac

SEQ ID NO: 8831 - DNA, 195 bp, Zea Mays
cgaagtcaaagccacccgatgagatacccagcaagctgctgcggtcggcgttctcggcttccgccccacctccaccttcaacgactcggcatcccaaagccatgaaggcccgcattctcgtcagaggcttcggcatccgcctgcgcctgttgacgctcagtgtgcccaagccgttggtggatttcagcgacaagc

SEQ ID NO: 8832 - DNA, 1677 bp, Zea Mays
gcggcttgatttcacttggtcctgtagcgttgtttggtcaagcctctctctcccttccccatctcgccgtaccccaaaccctaggacgcagcgccgccgccgtagcacccccacacgcagcaagatgaggccgcgcggcaggggcgacaacatcaaagacgacgaggatgagtacgaggacatcacgccccctcgaagaacgccagagcctgagaccgaccccgtccgctcgccctcgcccgctcctgcccccgccccaccacatcccgcgcgtgcccctctcagcagtctcgttgtcaggccgccaccgcagcagcaggagaacgacggcggatcctccccgccctcatcctccgcccgctcgccttctcccagcaccggcggacaccgaggccgcggggcctcgcccccgcggcgacgacgggacttctcaccgccgcctccccgtggttgggtgaggcactggtcgccgctgccgccaccgccggagaggcggcatcctgggagcccgcagccccagcgccgacgcttcagcccaccgccccggtcccacctaccacggcatccgcgcttccacgatgagcagcaagatctttgatgaaggcaaagagctagacaaagagttgtggcagataaccaagcacaagcagaaaaaatcaggttgtatgcatccaacattttaatttcacattcgctgaagatgtcaataaataaaatagacaagtagtaagtgtggcactgctttccacgtggtaataagatggtgaaagggaaatggacttaaacatttcctataattgattttggtgtttgacgtccatcacaaaccacgtggactaactagtttgcctagttgtcatttatctcaagtacataaagttcaacataaaccaacaaagaaaatgagttgtggaactctacaaagtttggagcaaaaaagagtaaaggtgcaaccaatggcgcaccagacactgtccggtgcccaggccaaggcacctcgcgaactggccgctctcggggtttctcaaagtcacttcgctataatcactggactgtcgggtgtgcaccgaactatctagtgagccaacgaagcaacggtcaactgcgcccaacggtcgactgcactgacgatggtacagtgaacagagcataagttagaagtcaaacactacaacaaaatcatacacttcctacgggtttttaacttcctacagcttttatatcaaaccgtaggaaataaataacttccgagaggcaactggtagctctagtaaataaacataacttcctacggtattctataaaagctgtaggaagttagctttcacaggctgacccgcgcgttcgaccaaacgagccgctaacttcctagaggcagccataggaagttagcatggacagctaacttcctacagcctcctctaagaagttagatttcagcttttgaccagtcaaacgaaaagctaacttcctacggccggctctaggaagttagctgcccagctaacttcctacggcctcctttaggaagttagatttcagcttttgaccagtcaaacgaaaagctaacttcctacgaccggctctaggaagttacttaacttcctagagtaaatgtacaaactctaggaagttatgtaacttcctacggctgtactctaggaagttatatttttt

SEQ ID NO: 8833 - DNA, 1600 bp, Zea Mays
ggaactcaaattattttggattccaagagtccctaaatgcctattctctaaaagaaacaatagaaagatgttaagttttacatcgattatcttttcttgggagattatgtcgatcgtggtcagcatagtctggagacaatcagtcttctccttgcactgaaggttgaatatcctcacaatgtacacttaatccgagggaatcatgaagcagcggatatcaatgctctatttgggttccgaatcgagtgcatagaaagaatgggtgagcgggatggaatctggacctggcaccgtgtgaacaggttatttaattggcttcctttggctgcactaatagaaaagaagataatctgtatgcacggtggtattggtcggtccatcaaccatatagagcaaatagaaaatcttcatagaccaattaccatggaagcaggctcagttgttctgatggatcttctatggtctgatccgactgagaacgatagtgtagagggtctcaggccaaatgcacggggccctggtcttgttaccttcgggcccgacagagttatggagttctgcaacaacaatgacctgcagttgattgtgcgagcacacgagtgcgtgatggatggcttcgagcgtttcgctcaaggtcacctgatcactcttttctcagcgacaaattactgcggaacggcaaacaacgcaggagcgatcttagttctcggaagggatctggtcgttgttccaaagctcatccatcctttgccgcctgccattacgtcacctgagacctcaccagagcaccacattgaggacacatggatgcaggagttgaatgccaatagaccgccaacaccaaccaggggccgccctcaagcgcccaataacgaccgaggctctgttgcttggatatagcggcctggccatattatgaaacagtcagatttctcgcctcccaccagtggcttgaggcttatattatccatccatcttgggcacatgcaggcggtctgtgctgaaagcacatgcttagcccaaaacaacatcgaaagggaactgttcagggagcgagactaagcggtgctctgaagacagaaggccagagaagactcaccagtcaccgtcgacagtgctctccaaatccttcccctccaaatgacatgagaagtagaagaacagaaccaagtgttggcaaaccacagggtcttgcctgaggtcacgcctgtacatactcagatgccagcagataggcggggttgtgtactgtgttctttttgtcgagcgtccaaagtggtagcagcagtccattgtgctaggtattcatttgctgtagggtttttgtttcttgtccctcatgttgcagagtatggaagtgataaaaatgggtcgttctgtcaggtcgtgtataatagcgttgtcgcttgtttatgggtagtagcagcgagtcagctgtcagcacgccttacacctccctcgtgttgtaattcccgtcacctgtgctgagagtgtgcacaatatatcgtcgtctgttgtccaaagttttgggtcatggacgggtttggtgatttgagttgatttattagagaagcaatgtgttgttcgattttgagcttta

SEQ ID NO: 8834 - DNA, 2559 bp, Zea Mays
ctcttgtttgcatgaaattgattactgaattggattgcttcaaattttctggagcatatatattgaaggaacaattcttaatatagattcctgcagataaataaatcaagggtgtgctgttagatgacctcctagttgctgaagatcttgctgctgctgaaacaaccagtgcagctaatcatgcagcagcagcagctgctgcatcctcaaatgtacaaagagaaccgggtagatatgcctacaacgatgaacaatcaggacaaacagttacagtttcaagtcctgatggagctgttgttcttgggactccagttgctcctccagtcaatggggacatgtatactgatattagtcctgagaatgccattatccagggacagagaagattgagcaaaggtgttgattacttggttgaagcatcagctgcagaggctgaggcaatcagtgctactttagctgctgtaaaggctaggcaagttaacggtgagatggagcattcacctgacagggaacaatctccagatgctgcaccaagtgccaagcaaaattcaagccttataaaaccagatcctgctcttatgaacaattcaacaccaccacctggggttcggttgcaccatagagcagttgtggtagcagcagaaactggaggtgccttaggtggcatggttagacagctctcgattgaccagtttgagaatgaaggtagaagggtcatttatggcacccctgagaatgcaactgcggcaaggaaattgctggatcgacaaatgtctattaatagcgtgcccaaaaaggtaattgcttctctgctgaaacctcgtggttggaagccccctgtgcgaaggcagttctttcttgactgcaatgagattgcagatctatgtgataatgctgaaagaatattttcaagtgaacctagtgtcttacagcttaaggctcccattaagatatttggtgatctgcacggtcaatttggtgacctcatgcgcttgtttgatgaatacggtgctccttcaactgctggagacattgcttacatcgattatcttttcttgggagattatgtcgatcgtggtcagcatagtctggagacaatcagtcttctccttgcactgaaggttgaatatcctcacaatgtacacttaatccgagggaatcatgaagcagcggatatcaatgctctatttgggttccgaatcgagtgcatagaaagaatgggtgagcgggatggaatctggacctggcaccgtgtgaacaggttatttaattggcttcctttggctgcactaatagaaaagaagataatctgtatgcacggtggtattggtcggtccatcaaccatatagagcaaatagaaaatcttcatagaccaattaccatggaagcaggctcagttgttctgatggatcttctatggtctgatccgactgagaacgatagtgtagagggtctcaggccaaatgcacggggccctggtcttgttaccttcgggcccgacagagttatggagttctgcaacaacaatgacctgcagttgattgtgcgagcacacgagtgcgtgatggatggcttcgagcgtttcgctcaaggtcacctgatcactcttttctcagcgacaaattactgcggaacggcaaacaacgcaggagcgatcttagttctcggaagggatctggtcgttgttccaaagctcatccatcctttgccgcctgccattacgtcacctgagacctcaccagagcaccacattgaggacacatggatgcaggagttgaatgccaatagaccgccaacaccaaccaggggccgccctcaagcgcccaataacgaccgaggctctgttgcttggatatagcggcctggccatattatgaaacagtcagatttctcgcctcccaccagtggcttgaggcttatattatccatccatcttgggcacatgcaggcggtctgtgctgaaagcacatgcttagcccaaaacaacatcgaaagggaactgttcagggagcgagactaagcggtgctctgaagacagaaggccagagaagactcaccagtcaccgtcgacagtgctctccaaatccttcccctccaaatgacatgagaagtagaagaacagaaccaagtgttggcaaaccacagggtcttgcctgaggtcacgcctgtacatactcagatgccagcagataggcggggttgtgtactgtgttctttttgtcgagcgtccaaagtggtagcagcagtccattgtgctaggtattcatttgctgtagggtttttgtttcttgtccctcatgttgcagagtatggaagtgataaaaatgggtcgttctgtcaggtcgtgtataatagcgttgtcgcttgtttatgggtagtagcagcgagtcagctgtcagcacgccttacacctccctcgtgttgtaattcccgtcacctgtgctgagagtgtgcacaatatatcgtcgtctgttgtccaaagttttgggtcatggacgggtttggtgatttgagttgatttattagagaagcaatgtgttgttcgattttgagcttta

SEQ ID NO: 8835 - DNA, 2917 bp, Zea Mays
ctgcttttgattcacgttaaattgcttcataatttgtatgcaactgctagtgcccgttctgatggcctccttttgctttgtggtggaagggatgccaatagtgtgccactatcaagtgcatatgggcttgctaagcatagagatggacgctgggagtgggcaattgcccctggtgtgtctccatcacccagatatcaacatgcagctgtttttgtcaatgcacggcttcatgtctcaggaggggctcttgggggtggtcgcatggtagaagactcctcaagcgttgcagtattggacactgctgctggagtttggtgtgataccaaatcagtagttacaactccaaggacaggaaggtatagtgcagatgcagcaggtggtgatgcttctgtagagcttacacggcggtgcaggcacgcagctgccgcggttggtgatttgatatttgtgtatggaggtttacgtggaggtgtgctgttagatgacctcctagttgctgaagatcttgctgctgctgaaacaaccagtgcagctaatcatgcagcagcagcagctgctgcatcctcaaatgtacaaagagaaccgggtagatatgcctacaacgatgaacaatcaggacaaacagttacagtttcaagtcctgatggagctgttgttcttgggactccagttgctcctccagtcaatggggacatgtatactgatattagtcctgagaatgccattatccagggacagagaagattgagcaaaggtgttgattacttggttgaagcatcagctgcagaggctgaggcaatcagtgctactttagctgctgtaaaggctaggcaagttaacggtgagatggagcattcacctgacagggaacaatctccagatgctgcaccaagtgccaagcaaaattcaagccttataaaaccagatcctgctcttatgaacaattcaacaccaccacctggggttcggttgcaccatagagcagttgtggtagcagcagaaactggaggtgccttaggtggcatggttagacagctctcgattgaccagtttgagaatgaaggtagaagggtcatttatggcacccctgagaatgcaactgcggcaaggaaattgctggatcgacaaatgtctattaatagcgtgcccaaaaaggtaattgcttctctgctgaaacctcgtggttggaagccccctgtgcgaaggcagttctttcttgactgcaatgagattgcagatctatgtgataatgctgaaagaatattttcaagtgaacctagtgtcttacagcttaaggctcccattaagatatttggtgatctgcacggtcaatttggtgacctcatgcgcttgtttgatgaatacggtgctccttcaactgctggagacattgcttacatcgattatcttttcttgggagattatgtcgatcgtggtcagcatagtctggagacaatcagtcttctccttgcactgaaggttgaatatcctcacaatgtacacttaatccgagggaatcatgaagcagcggatatcaatgctctatttgggttccgaatcgagtgcatagaaagaatgggtgagcgggatggaatctggacctggcaccgtgtgaacaggttatttaattggcttcctttggctgcactaatagaaaagaagataatctgtatgcacggtggtattggtcggtccatcaaccatatagagcaaatagaaaatcttcatagaccaattaccatggaagcaggctcagttgttctgatggatcttctatggtctgatccgactgagaacgatagtgtagagggtctcaggccaaatgcacggggccctggtcttgttaccttcgggcccgacagagttatggagttctgcaacaacaatgacctgcagttgattgtgcgagcacacgagtgcgtgatggatggcttcgagcgtttcgctcaaggtcacctgatcactcttttctcagcgacaaattactgcggaacggcaaacaacgcaggagcgatcttagttctcggaagggatctggtcgttgttccaaagctcatccatcctttgccgcctgccattacgtcacctgagacctcaccagagcaccacattgaggacacatggatgcaggagttgaatgccaatagaccgccaacaccaaccaggggccgccctcaagcgcccaataacgaccgaggctctgttgcttggatatagcggcctggccatattatgaaacagtcagatttctcgcctcccaccagtggcttgaggcttatattatccatccatcttgggcacatgcaggcggtctgtgctgaaagcacatgcttagcccaaaacaacatcgaaagggaactgttcagggagcgagactaagcggtgctctgaagacagaaggccagagaagactcaccagtcaccgtcgacagtgctctccaaatccttcccctccaaatgacatgagaagtagaagaacagaaccaagtgttggcaaaccacagggtcttgcctgaggtcacgcctgtacatactcagatgccagcagataggcggggttgtgtactgtgttctttttgtcgagcgtccaaagtggtagcagcagtccattgtgctaggtattcatttgctgtagggtttttgtttcttgtccctcatgttgcagagtatggaagtgataaaaatgggtcgttctgtcaggtcgtgtataatagcgttgtcgcttgtttatgggtagtagcagcgagtcagctgtcagcacgccttacacctccctcgtgttgtaattcccgtcacctgtgctgagagtgtgcacaatatatcgtcgtctgttgtccaaagttttgggtcatggacgggtttggtgatttgagttgatttattagagaagcaatgtgttgttcgattttgagcttta

SEQ ID NO: 8836 - DNA, 2912 bp, Zea Mays
atttttctctctccaaatgatgatttagagagtatgcaactgctagtgcccgttctgatggcctccttttgctttgtggtggaagggatgccaatagtgtgccactatcaagtgcatatgggcttgctaagcatagagatggacgctgggagtgggcaattgcccctggtgtgtctccatcacccagatatcaacatgcagctgtttttgtcaatgcacggcttcatgtctcaggaggggctcttgggggtggtcgcatggtagaagactcctcaagcgttgcagtattggacactgctgctggagtttggtgtgataccaaatcagtagttacaactccaaggacaggaaggtatagtgcagatgcagcaggtggtgatgcttctgtagagcttacacggcggtgcaggcacgcagctgccgcggttggtgatttgatatttgtgtatggaggtttacgtggaggtgtgctgttagatgacctcctagttgctgaagatcttgctgctgctgaaacaaccagtgcagctaatcatgcagcagcagcagctgctgcatcctcaaatgtacaaagagaaccgggtagatatgcctacaacgatgaacaatcaggacaaacagttacagtttcaagtcctgatggagctgttgttcttgggactccagttgctcctccagtcaatggggacatgtatactgatattagtcctgagaatgccattatccagggacagagaagattgagcaaaggtgttgattacttggttgaagcatcagctgcagaggctgaggcaatcagtgctactttagctgctgtaaaggctaggcaagttaacggtgagatggagcattcacctgacagggaacaatctccagatgctgcaccaagtgccaagcaaaattcaagccttataaaaccagatcctgctcttatgaacaattcaacaccaccacctggggttcggttgcaccatagagcgttgtggtagcagcagaaactggaggtgccttaggtggcatggttagacagctctcgattgaccagtttgagaatgaaggtagaagggtcatttatggcacccctgagaatgcaactgcggcaaggaaattgctggatcgacaaatgtctattaatagcgtgcccaaaaaggtaattgcttctctgctgaaacctcgtggttggaagccccctgtgcgaaggcagttctttcttgactgcaatgagattgcagatctatgtgataatgctgaaagaatattttcaagtgaacctagtgtcttacagcttaaggctcccattaagatatttggtgatctgcacggtcaatttggtgacctcatgcgcttgtttgatgaatacggtgctccttcaactgctggagacattgcttacatcgattatcttttcttgggagattatgtcgatcgtggtcagcatagtctggagacaatcagtcttctccttgcactgaaggttgaatatcctcacaatgtacacttaatccgagggaatcatgaagcagcggatatcaatgctctatttgggttccgaatcgagtgcatagaaagaatgggtgagcgggatggaatctggacctggcaccgtgtgaacaggttatttaattggcttcctttggctgcactaatagaaaagaagataatctgtatgcacggtggtattggtcggtccatcaaccatatagagcaaatagaaaatcttcatagaccaattaccatggaagcaggctcagttgttctgatggatcttctatggtctgatccgactgagaacgatagtgtagagggtctcaggccaaatgcacggggccctggtcttgttaccttcgggcccgacagagttatggagttctgcaacaacaatgacctgcagttgattgtgcgagcacacgagtgcgtgatggatggcttcgagcgtttcgctcaaggtcacctgatcactcttttctcagcgacaaattactgcggaacggcaaacaacgcaggagcgatcttagttctcggaagggatctggtcgttgttccaaagctcatccatcctttgccgcctgccattacgtcacctgagacctcaccagagcaccacattgaggacacatggatgcaggagttgaatgccaatagaccgccaacaccaaccaggggccgccctcaagcgcccaataacgaccgaggctctgttgcttggatatagcggcctggccatattatgaaacagtcagatttctcgcctcccaccagtggcttgaggcttatattatccatccatcttgggcacatgcaggcggtctgtgctgaaagcacatgcttagcccaaaacaacatcgaaagggaactgttcagggagcgagactaagcggtgctctgaagacagaaggccagagaagactcaccagtcaccgtcgacagtgctctccaaatccttcccctccaaatgacatgagaagtagaagaacagaaccaagtgttggcaaaccacagggtcttgcctgaggtcacgcctgtacatactcagatgccagcagataggcggggttgtgtactgtgttctttttgtcgagcgtccaaagtggtagcagcagtccattgtgctaggtattcatttgctgtagggtttttgtttcttgtccctcatgttgcagagtatggaagtgataaaaatgggtcgttctgtcaggtcgtgtataatagcgttgtcgcttgtttatgggtagtagcagcgagtcagctgtcagcacgccttacacctccctcgtgttgtaattcccgtcacctgtgctgagagtgtgcacaatatatcgtcgtctgttgtccaaagttttgggtcatggacgggtttggtgatttgagttgatttattagagaagcaatgtgttgttcgattttgagcttta

SEQ ID NO: 8837 - DNA, 2949 bp, Zea Mays
gaaaaactgttggaagatgaaaagatatagagagggatttttctctctccaaatgatgatttagagagtatgcaactgctagtgcccgttctgatggcctccttttgctttgtggtggaagggatgccaatagtgtgccactatcaagtgcatatgggcttgctaagcatagagatggacgctgggagtgggcaattgcccctggtgtgtctccatcacccagatatcaacatgcagctgtttttgtcaatgcacggcttcatgtctcaggaggggctcttgggggtggtcgcatggtagaagactcctcaagcgttgcagtattggacactgctgctggagtttggtgtgataccaaatcagtagttacaactccaaggacaggaaggtatagtgcagatgcagcaggtggtgatgcttctgtagagcttacacggcggtgcaggcacgcagctgccgcggttggtgatttgatatttgtgtatggaggtttacgtggaggtgtgctgttagatgacctcctagttgctgaagatcttgctgctgctgaaacaaccagtgcagctaatcatgcagcagcagcagctgctgcatcctcaaatgtacaaagagaaccgggtagatatgcctacaacgatgaacaatcaggacaaacagttacagtttcaagtcctgatggagctgttgttcttgggactccagttgctcctccagtcaatggggacatgtatactgatattagtcctgagaatgccattatccagggacagagaagattgagcaaaggtgttgattacttggttgaagcatcagctgcagaggctgaggcaatcagtgctactttagctgctgtaaaggctaggcaagttaacggtgagatggagcattcacctgacagggaacaatctccagatgctgcaccaagtgccaagcaaaattcaagccttataaaaccagatcctgctcttatgaacaattcaacaccaccacctggggttcggttgcaccatagagcagttgtggtagcagcagaaactggaggtgccttaggtggcatggttagacagctctcgattgaccagtttgagaatgaaggtagaagggtcatttatggcacccctgagaatgcaactgcggcaaggaaattgctggatcgacaaatgtctattaatagcgtgcccaaaaaggtaattgcttctctgctgaaacctcgtggttggaagccccctgtgcgaaggcagttctttcttgactgcaatgagattgcagatctatgtgataatgctgaaagaatattttcaagtgaacctagtgtcttacagcttaaggctcccattaagatatttggtgatctgcacggtcaatttggtgacctcatgcgcttgtttgatgaatacggtgctccttcaactgctggagacattgcttacatcgattatcttttcttgggagattatgtcgatcgtggtcagcatagtctggagacaatcagtcttctccttgcactgaaggttgaatatcctcacaatgtacacttaatccgagggaatcatgaagcagcggatatcaatgctctatttgggttccgaatcgagtgcatagaaagaatgggtgagcgggatggaatctggacctggcaccgtgtgaacaggttatttaattggcttcctttggctgcactaatagaaaagaagataatctgtatgcacggtggtattggtcggtccatcaaccatatagagcaaatagaaaatcttcatagaccaattaccatggaagcaggctcagttgttctgatggatcttctatggtctgatccgactgagaacgatagtgtagagggtctcaggccaaatgcacggggccctggtcttgttaccttcgggcccgacagagttatggagttctgcaacaacaatgacctgcagttgattgtgcgagcacacgagtgcgtgatggatggcttcgagcgtttcgctcaaggtcacctgatcactcttttctcagcgacaaattactgcggaacggcaaacaacgcaggagcgatcttagttctcggaagggatctggtcgttgttccaaagctcatccatcctttgccgcctgccattacgtcacctgagacctcaccagagcaccacattgaggacacatggatgcaggagttgaatgccaatagaccgccaacaccaaccaggggccgccctcaagcgcccaataacgaccgaggctctgttgcttggatatagcggcctggccatattatgaaacagtcagatttctcgcctcccaccagtggcttgaggcttatattatccatccatcttgggcacatgcaggcggtctgtgctgaaagcacatgcttagcccaaaacaacatcgaaagggaactgttcagggagcgagactaagcggtgctctgaagacagaaggccagagaagactcaccagtcaccgtcgacagtgctctccaaatccttcccctccaaatgacatgagaagtagaagaacagaaccaagtgttggcaaaccacagggtcttgcctgaggtcacgcctgtacatactcagatgccagcagataggcggggttgtgtactgtgttctttttgtcgagcgtccaaagtggtagcagcagtccattgtgctaggtattcatttgctgtagggtttttgtttcttgtccctcatgttgcagagtatggaagtgataaaaatgggtcgttctgtcaggtcgtgtataatagcgttgtcgcttgtttatgggtagtagcagcgagtcagctgtcagcacgccttacacctccctcgtgttgtaattcccgtcacctgtgctgagagtgtgcacaatatatcgtcgtctgttgtccaaagttttgggtcatggacgggtttggtgatttgagttgatttattagagaagcaatgtgttgttcgattttgagcttta

SEQ ID NO: 8838 - DNA, 3941 bp, Zea Mays
cacctcccccgcatttcacactcccacttccagcctcccccacaacccccatcctcaccaccaccactcgcccgcgcaattcccaaatctcccaggggcctcttcgcttacctcccgcccgactcctcgcgaccccatcgcctcgcctcgacccgtcccgagccttgctcgtcgcggagcgccacaaccacgcctcgccgccgccggcgagcggtcaagcctaggggctatctccgtgtgatggctaccgcgccggcctccgaaagctcgaccgcctcctagggcggcagttacccgaggctgagctcgtgcgcgcgcgtggggacccccgtgctcagctcgcgaaaccctaggagcagcaggaggcgaggcttggctggcggcgatggacgtggactcacgcatggcgacggagtccgactccgactccgacgcgcgcggcggcagcgggtccgggagcgagacccccacggcgtccccgtccccgtctgcatccccgtccccatccgcgcccgggacgcccacggccgcggtcgcgtctccggcgccggttgcggggcccaggccggcgccggggtatacggtggtggacgccgcgatggacaagaaggaggacggaccggggtcccggtgcggccacacgctcacggcagtgccggcagccggggaggagggctcgcccgggtacgtgggcccgcggctgatactctttggtggtgccaccgcgctcgagggcaactccgccacaccgccctcgtcggctgggagcgctgggatccgtcttgctggtgccactgcagatgtccactgttatgacgtgttatcaaataagtggaccaggcttactcctcttggcgaacctccttcaccaagagctgcacatgtagcaactgctgttggaaccatggtggtcattcagggtggaattggtcctactggcttatccgctgaggaccttcatgttcttgatcttacacaacaacgaccgcggtggcatagagtggtggttcaaggtcctggtcctggtccacggtatggacatgtgatggccttggttggtcaacgattcttattgacaattggtggcaatgatggaaaacgacccctggcagatgtatgggcccttgatactgcggccaagccatatgaatggagaaaacttgaaccggaaggtgaagggccaccaccatgcatgtatgcaactgctagtgcccgttctgatggcctccttttgctttgtggtggaagggatgccaatagtgtgccactatcaagtgcatatgggcttgctaagcatagagatggacgctgggagtgggcaattgcccctggtgtgtctccatcacccagatatcaacatgcagctgtttttgtcaatgcacggcttcatgtctcaggaggggctcttgggggtggtcgcatggtagaagactcctcaagcgttgcagtattggacactgctgctggagtttggtgtgataccaaatcagtagttacaactccaaggacaggaaggtatagtgcagatgcagcaggtggtgatgcttctgtagagcttacacggcggtgcaggcacgcagctgccgcggttggtgatttgatatttgtgtatggaggtttacgtggaggtgtgctgttagatgacctcctagttgctgaagatcttgctgctgctgaaacaaccagtgcagctaatcatgcagcagcagcagctgctgcatcctcaaatgtacaaagagaaccgggtagatatgcctacaacgatgaacaatcaggacaaacagttacagtttcaagtcctgatggagctgttgttcttgggactccagttgctcctccagtcaatggggacatgtatactgatattagtcctgagaatgccattatccagggacagagaagattgagcaaaggtgttgattacttggttgaagcatcagctgcagaggctgaggcaatcagtgctactttagctgctgtaaaggctaggcaagttaacggtgagatggagcattcacctgacagggaacaatctccagatgctgcaccaagtgccaagcaaaattcaagccttataaaaccagatcctgctcttatgaacaattcaacaccaccacctggggttcggttgcaccatagagcagttgtggtagcagcagaaactggaggtgccttaggtggcatggttagacagctctcgattgaccagtttgagaatgaaggtagaagggtcatttatggcacccctgagaatgcaactgcggcaaggaaattgctggatcgacaaatgtctattaatagcgtgcccaaaaagcttaaggctcccattaagatatttggtgatctgcacggtcaatttggtgacctcatgcgcttgtttgatgaatacggtgctccttcaactgctggagacattgcttacatcgattatcttttcttgggagattatgtcgatcgtggtcagcatagtctggagacaatcagtcttctccttgcactgaaggttgaatatcctcacaatgtacacttaatccgagggaatcatgaagcagcggatatcaatgctctatttgggttccgaatcgagtgcatagaaagaatgggtgagcgggatggaatctggacctggcaccgtgtgaacaggttatttaattggcttcctttggctgcactaatagaaaagaagataatctgtatgcacggtggtattggtcggtccatcaaccatatagagcaaatagaaaatcttcatagaccaattaccatggaagcaggctcagttgttctgatggatcttctatggtctgatccgactgagaacgatagtgtagagggtctcaggccaaatgcacggggccctggtcttgttaccttcgggcccgacagagttatggagttctgcaacaacaatgacctgcagttgattgtgcgagcacacgagtgcgtgatggatggcttcgagcgtttcgctcaaggtcacctgatcactcttttctcagcgacaaattactgcggaacggcaaacaacgcaggagcgatcttagttctcggaagggatctggtcgttgttccaaagctcatccatcctttgccgcctgccattacgtcacctgagacctcaccagagcaccacattgaggacacatggatgcaggagttgaatgccaatagaccgccaacaccaaccaggggccgccctcaagcgcccaataacgaccgaggctctgttgcttggatatagcggcctggccatattatgaaacagtcagatttctcgcctcccaccagtggcttgaggcttatattatccatccatcttgggcacatgcaggcggtctgtgctgaaagcacatgcttagcccaaaacaacatcgaaagggaactgttcagggagcgagactaagcggtgctctgaagacagaaggccagagaagactcaccagtcaccgtcgacagtgctctccaaatccttcccctccaaatgacatgagaagtagaagaacagaaccaagtgttggcaaaccacagggtcttgcctgaggtcacgcctgtacatactcagatgccagcagataggcggggttgtgtactgtgttctttttgtcgagcgtccaaagtggtagcagcagtccattgtgctaggtattcatttgctgtagggtttttgtttcttgtccctcatgttgcagagtatggaagtgataaaaatgggtcgttctgtcaggtcgtgtataatagcgttgtcgcttgtttatgggtagtagcagcgagtcagctgtcagcacgccttacacctccctcgtgttgtaattcccgtcacctgtgctgagagtgtgcacaatatatcgtcgtctgttgtccaaagttttgggtcatggacgggtttggtgatttgagttgatttattagagaagcaatgtgttgttcgattttgagcttta

SEQ ID NO: 8839 - DNA, 2818 bp, Zea Mays
cgcaaacacaccctgaatctctccgtcactgcacacgtcttcgacgagtgggtcccacacgcagaggcccattcggtggagaaaacgtatagtcgaagtccccccacctttccgccgcgtcgtctccttcctccacccactgcaaatgcaaaaaccctagccgcaactccctccgcctccacggttctcatccgcgacctatctctatctctccaaggcatcggccacgggctcgaaggtgatggcgggcggcggaaagaaggagaagggtgaggggctcgggcgcgcgctgatccggcagcggaacaaggcggccgcggccgctaaggaacggggcgaggcgctcgcctttggccaccgccgcgcgatgccgctcgagtctgtcattgacgtcagtgacatcgatgccgtgctccagcgggccgcggaggccgaccagctcgctgaggccgcgtccgtctcttccgactccgacctcgtcatcgacctggatgcgacgggggagacggaagacgacaggcggcggcttcgcaaggagcaggaggccctgcacgccagcagcctcagggtccccaggcgaccgccatggcatagtcagatgactgtggaggagcttgatgtgaacgagcgtcgggcctttctggtgtggcgcaggaatcttgcaaggttggtccagagacgtacacatactctactgtttagtgggattgtatttttctgtagaattacatgtttgggtgctaagctataacttctgaattctctatgattgtcaatcaaataacataagtgggttcatgctttgtgatgcacctgtagttgatattattggtaccacgaatgttacttagttacttttataacattcctgtcacgaatttaccttctgcataatttaaagatgagacttgcattcttacacagaacagttgacacagtgtttaatgcattttcaagcgtcatttttccaaattaatgcttagagcatgtatgtttgagcaatattctgtgcagattggaagagaatgataagcttatcctgactccctttgagaagaatattgacatttggagacaactctggagagtgcttgaacgcagtgatttgttggttatggtggttgatgctcgggatcctttgttctaccgctgccctgaccttgaggcatatgcaaaggaaattgatgaacacaagagaacaatactccttgttaacaaggctgatctgttgccgttaaatatcaggaagagatgggctgattattttaaggcacatgacattctctatgtgttctggtcggctaaggctgccactgccacattagaaggcaaaaagttaagtggatactctgaaggagaatctgcttcacttgatttggataccaagatatatgaaagggatgaactcttgatgaagctgcaagctgaggcagaatctattgtagctcagaggaggatctcacctactgtagatgatcacgaagccagttcttcagattctgtttcttcagtgactaagcatgtagttgttggatttgttggctatccaaatgttgggaagagttcaactataaatgctttggttggcgagaagaggactggtgttactcacacacctggcaagacaaaacatttccagacactgataatctctgaagagctcactctttgtgattgccctggtctggtcttcccttccttttcaagctcaaggcatgagatggtggcatgtggtgtgttgccgattgataggatgacaaagcaccgggaagctattcaagtggtggcagatcgtgtcccaagggacatccttgagcagatttacaaaattgcattgccaaagccaaagccatatgaaccccagtcccggccgccaactgctgctgagctgttgcgggcctactgcgcgtctcgtgggcatgtcagccatgctgggctgcctgatgagaccagggctgctcgacagatactgaaggattacattgatggtaaaatcccacactttgagctccctcctggcgtgacaggccctgaggtggactttgaacaaatcgctggatcagaaagtccaactacttcagcagctaatgaatcagttactgatgatctcgatgaagaggatgatgatgcagttgatcctgctgaatcaaacatgagagatgtcctagatgaccttgaatcttttgacttgggtaatggagggtccaaaactacagcaaagaagaaagaggcgtcccacaagcaccacaagaagccccagcggaagaaggatcggtcctggagggttggcaatgatggtggcgacggaacagcagttgtaagagtgtaccagaaacccgcagttaatttgtccacggtctctttaagtggcagggtctgatgccccaacttttactgctcgcacaaccccggcacacatgggcaagggcatgggacctcttactgtagcaacggctgaactctgaagctacttcgatggaaggaagaaaggagtactgagcatacgagagtttgaaaaccttagaaacaacattggtagtcgttgccggaacttgtgctgcccttccggcctttctcgtatgtatatgctgtgagttgtagcacggttgattcatactaaacgtggtggtatgtgttgttttgttttttcatgtctcacatagctgcagatacagctttgggatgcagatttgacgtggaaaaaatatgtagacgatttatacttgctaagttgctacatttttattttttacgctccttccatttccattttgtatggatttgttcgcttcagattaaagctagctccagattaaag

SEQ ID NO: 8840 - DNA, 2875 bp, Zea Mays
cctcactttcgtccaccgccttctcccgccgccgcggcgttttcccgtctccgtcttcgctcaccgacctctgggccaggagtttgcgctccgattccccgccaatgctcgggccagggcgttctgctaccgccttgctgtttctggcggcgacggcgggagatgtcaagtttgtcatggataggccgcgagctggtcaggctgcggagaggacatgggcacagggcacagggcgggcttgcggcggtacggagagcgcgcgggtgcttaccaccatcatggcgcctgatcagtgcgctattgtgcatttgtgctcttgggattggctaggtggataaggaggagtggcggatgcggctaggggtcgagccggactccgagcgcgagggtctccggtatccatgactctctgccatgccacggaatgcttgcatgatcacggatgtgattaccaccattaaactgcggtcctgcctcgatcgatggatgaaatttgcaaggttagcggggagctgagattctactgtatctgcacttttctgcctcattttgtgcatttgcgtgatattggtttccatgtaactcttgacaactgaaaaaaggctgtatgttattaagcctccgcgctgtattgacctgccagctggtcattccagagctacactatgacggaactagagtgattttccttgttgtccatgcacagctagactgtaatgtattgcaacttgtggaaaggtgaacaccaggaaagaactgttctgcaaagagaacatatattgccaagcggttcataagaaaacaggcaatttgggaaccataccttggtatttaagacctcttgacgacttatttttatgtgggaaattttagttccgcttgcaatcatacatccaatatctcaaacagttttttacgatcgcaatggcctgaatgtgttattgtttgttacgattaagaatgagcgatcggtgatagtggtgggacagtatatgctgtaaaaaccgcccgctcgaggaacatgatggtacttgtagtggtcaccgagcagcatggtaacttgatcctcaactaaggatgccacaaacaagtgaagttgtcatttaccgttgttgttttgacaggaataagagtataatggttgggtactataggtaacattgttcattgagatgaatatctgggaggattcatgggtgtggctctggaagcatagaaatgtctgtgtgttcaatggagcctccccgaacatcttcaccattctccaaaatatccatgatgatgctaatctttgggggctggctggggcaatagcccttaggagattatggccttagatcttcagggtgttctccctgggcttgtggtttttctgttttatttggctgccaatctggcgccttgtatttggtctattttagacctttccctttcttcttaatatatttaatgcgcagttctcctgcgcgttcgtgaaaaaagtcagctgaaaagattatacgtcagtatgttccattttgtaagcttgataaaatcgttaatggctattcaggttttttttaaaaattaaaccaactcctgtaccaaatactgaattcatcatatactactcagttaagtttcagtacattgttggatacaataaatgggtatttgtcactttggcgaacgttaccgctcctatgcatctgctggctatttatatccgccgtgctagtgtcctctctcagttgcctcataatctccttgttgctccttcacctggaaagatatggaaaaatccgcatggtgtacttttagctgatttgaggcatttatatccagggaacacaacaaaggcatctgagtgctctactcctgcaattctgaatatgtccgatgataatggtccgtctgagatgggtgttggtcagccaatggttgttggcaggaagctgcttccaccaattgtaccaggtggtgaaccaatttttgtgtgtgaaaagcagtatgctgctatccttcgtctgcgtgaacgccggcttcgtgccaaagaagcaagggagcgaaggttgctccaagccaaggaagagcccaatggaggaagcatggtggaatgcaaccctgccccaggagacagtcatcagcacttaatcacaaccagtggataccagcaagtgaccactggtggcagtgaggcgcaaagcagcatcccattaggtttctattggtatgttttcacaaccagtgaaggtgggcaaagcagcacccctgctggaatgggtttctactatcccttcaacacaaccaatggcggggaaaatgtcggtggcgtcgcctctggcagtgaggtgccaagcagcaatgccccaagcggcttcttttggcccctcatcatggccagcagcgaggaaaacaatggtgaggtcacctacggcagcatggtaccgatcagcaaccctgcaggatacttctgttggcccgtggctgtgaccaatgaacacggggaagacactggtgagtctgccgatgggggcgaggcgccaataagcaaccctgcaggagacttctgcagttggcctgttgtcgcaaccaacgacgatgaggaaaatgtcggcgaggtcgcctacaacagcgtcctgaacctcgaatcacctgaccacaccgacctcctcaggatcatgatgggcaacaggtacagcactgatgaagcctcggagcagttccagaacgtggcccgcctccaggctcctggcttcaccgccctcctaaccgtcatgaacaacgcagggtacggtccggctgcggactgtggcccccacgatgcgcacaaagtgatgacaaggttagaagggtggtagaggtagaccagcggcaggccacacttaggcctgcc

SEQ ID NO: 8841 - DNA, 2052 bp, Zea Mays
cctcactttcgtccaccgccttctcccgccgccgcggcgttttcccgtctccgtcttcgctcaccgacctctgggccaggagtttgcgctccgattccccgccaatgctcgggccagggcgttctgctaccgccttgctgtttctggcggcgacggcgggagatgtcaagtttgtcatggataggccgcgagctggtcaggctgcggagaggacatgggcacagggcacagggcgggcttgcggcggtacggagagcgcgcgggtgcttaccaccatcatggcgcctgatcaactctctgccatgccacggaatgcttgcatgatcacggatgtgattaccaccattaaactgcggtcctgcctcgatcgatggatgaaatttgcaaggttttttttaaaaattaaaccaactcctgtaccaaatactgaattcatcatatactactcagttaagtttcagtacattgttggatacaataaatgggtatttgtcactttggcgaacgttaccgctcctatgcatctgctggctatttatatccgccgtgctagtgtcctctctcagttgcctcataatctccttgttgctccttcacctggaaaggtatgtgttttcttaacctcctttcatgcatcttagatatcttctgtttctgatgtgtgcggctattgttctgatatgtcgcatagcaaggccttgttcttggtttctactttccagactatctgatccttttatgctaggacaacccccatacttcaacctagtttgttgtgttccttccgagttttaaattcattctctttgttctaatactatatgatgcccccaccctcttttttgcatgctcctgatgattatgcaataactatgatctatctcagcgaggtagcgggtgagcttcacgggttggatttgaattggttacttcatcgatgtctcaagggaacacaacaaaggcatctgagtgctctactcctgcaattctgaatatgtccgatgataatggtccgtctgagatgggtgttggtcagccaatggttgttggcaggaagctgcttccaccaattgtaccaggtggtgaaccaatttttgtgtgtgaaaagcagtatgctgctatccttcgtctgcgtgaacgccggcttcgtgccaaagaagcaagggagcgaaggttgctccaagccaagaagaaccgtccaagaggtcctaatgggcgttttgtcatgatcaaggacaatcaggaagagcccaatggaggaagcatggtggaatgcaaccctgccccaggagacagtcatcagcacttaatcacaaccagtggataccagcaagtgaccactggtggcagtgaggcgcaaagcagcatcccattaggtttctattggtatgttttcacaaccagtgaaggtgggcaaagcagcacccctgctggaatgggtttctactatcccttcaacacaaccaatggcggggaaaatgtcggtggcgtcgcctctggcagtgaggtgccaagcagcaatgccccaagcggcttcttttggcccctcatcatggccagcagcgaggaaaacaatggtgaggtcacctacggcagcatggtaccgatcagcaaccctgcaggatacttctgttggcccgtggctgtgaccaatgaacacggggaagacactggtgagtctgccgatgggggcgaggcgccaataagcaaccctgcaggagacttctgcagttggcctgttgtcgcaaccaacgacgatgaggaaaatgtcggcgaggtcgcctacaacagcgtcctgaacctcgaatcacctgaccacaccgacctcctcaggatcatgatgggcaacaggtacagcactgatgaagcctcggagcagttccagaacgtggcccgcctccaggctcctggcttcaccgccctcctaaccgtcatgaacaacgcagggtacggtccggctgcggactgtggcccccacgatgcgcacaaagtgatgacaaggttagaagggtggtagaggtagaccagcggcaggccacacttaggcctgcc

SEQ ID NO: 8842 - DNA, 1653 bp, Zea Mays
cctcactttcgtccaccgccttctcccgccgccgcggcgttttcccgtctccgtcttcgctcaccgacctctgggccaggagtttgcgctccgattccccgccaatgctcgggccagggcgttctgctaccgccttgctgtttctggcggcgacggcgggagatgtcaagtttgtcatggataggccgcgagctggtcaggctgcggagaggacatgggcacagggcacagggcgggcttgcggcggtacggagagcgcgcgggtgcttaccaccatcatggcgcctgatcaactctctgccatgccacggaatgcttgcatgatcacggatgtgattaccaccattaaactgcggtcctgcctcgatcgatggatgaaatttgcaaggcgaacgttaccgctcctatgcatctgctggctatttatatccgccgtgctagtgtcctctctcagttgcctcataatctccttgttgctccttcacctggaaagatatggaaaaatccgcatggtgtacttttagctgatttgaggcatttatatccagggaacacaacaaaggcatctgagtgctctactcctgcaattctgaatatgtccgatgataatggtccgtctgagatgggtgttggtcagccaatggttgttggcaggaagctgcttccaccaattgtaccaggtggtgaaccaatttttgtgtgtgaaaagcagtatgctgctatccttcgtctgcgtgaacgccggcttcgtgccaaagaagcaagggagcgaaggttgctccaagccaagaagaaccgtccaagaggtcctaatgggcgttttgtcatgatcaaggacaatcaggaagagcccaatggaggaagcatggtggaatgcaaccctgccccaggagacagtcatcagcacttaatcacaaccagtggataccagcaagtgaccactggtggcagtgaggcgcaaagcagcatcccattaggtttctattggtatgttttcacaaccagtgaaggtgggcaaagcagcacccctgctggaatgggtttctactatcccttcaacacaaccaatggcggggaaaatgtcggtggcgtcgcctctggcagtgaggtgccaagcagcaatgccccaagcggcttcttttggcccctcatcatggccagcagcgaggaaaacaatggtgaggtcacctacggcagcatggtaccgatcagcaaccctgcaggatacttctgttggcccgtggctgtgaccaatgaacacggggaagacactggtgagtctgccgatgggggcgaggcgccaataagcaaccctgcaggagacttctgcagttggcctgttgtcgcaaccaacgacgatgaggaaaatgtcggcgaggtcgcctacaacagcgtcctgaacctcgaatcacctgaccacaccgacctcctcaggatcatgatgggcaacaggtacagcactgatgaagcctcggagcagttccagaacgtggcccgcctccaggctcctggcttcaccgccctcctaaccgtcatgaacaacgcagggtacggtccggctgcggactgtggcccccacgatgcgcacaaagtgatgacaaggttagaagggtggtagaggtagaccagcggcaggccacacttaggcctgcc

SEQ ID NO: 8843 - DNA, 1979 bp, Zea Mays
cctcactttcgtccaccgccttctcccgccgccgcggcgttttcccgtctccgtcttcgctcaccgacctctgggccaggagtttgcgctccgattccccgccaatgctcgggccagggcgttctgctaccgccttgctgtttctggcggcgacggcgggagatgtcaagtttgtcatggataggccgcgagctggtcaggctgcggagaggacatgggcacagggcacagggcgggcttgcggcggtacggagagcgcgcgggtgcttaccaccatcatggcgcctgatcaactctctgccatgccacggaatgcttgcatgatcacggatgtgattaccaccattaaactgcggtcctgcctcgatcgatggatgaaatttgcaagactctagcatttaatcagccatgcagaagtttctcttgccacagcaatacaggagcgaatctgcattaaatcttggatatcatttttgaaaaggcgaacgttaccgctcctatgcatctgctggctatttatatccgccgtgctagtgtcctctctcagttgcctcataatctccttgttgctccttcacctggaaaggtatgtgttttcttaacctcctttcatgcatcttagatatcttctgtttctgatgtgtgcggctattgttctgatatgtcgcatagcaaggccttgttcttggtttctactttccagactatctgatccttttatgctaggacaacccccatacttcaacctagtttgttgtgttccttccgagttttaaattcattctctttgttctaatactatatgatgcccccaccctcttttttgcatgctcctgatgattatgcaataactatgatctatctcagcgaggtagcgggtgagcttcacgggttggatttgaattggttacttcatcgatgtctcaagggaacacaacaaaggcatctgagtgctctactcctgcaattctgaatatgtccgatgataatggtccgtctgagatgggtgttggtcagccaatggttgttggcaggaagctgcttccaccaattgtaccaggtggtgaaccaatttttgtgtgtgaaaagcagtatgctgctatccttcgtctgcgtgaacgccggcttcgtgccaaagaagcaagggagcgaaggttgctccaagccaaggaagagcccaatggaggaagcatggtggaatgcaaccctgccccaggagacagtcatcagcacttaatcacaaccagtggataccagcaagtgaccactggtggcagtgaggcgcaaagcagcatcccattaggtttctattggtatgttttcacaaccagtgaaggtgggcaaagcagcacccctgctggaatgggtttctactatcccttcaacacaaccaatggcggggaaaatgtcggtggcgtcgcctctggcagtgaggtgccaagcagcaatgccccaagcggcttcttttggcccctcatcatggccagcagcgaggaaaacaatggtgaggtcacctacggcagcatggtaccgatcagcaaccctgcaggatacttctgttggcccgtggctgtgaccaatgaacacggggaagacactggtgagtctgccgatgggggcgaggcgccaataagcaaccctgcaggagacttctgcagttggcctgttgtcgcaaccaacgacgatgaggaaaatgtcggcgaggtcgcctacaacagcgtcctgaacctcgaatcacctgaccacaccgacctcctcaggatcatgatgggcaacaggtacagcactgatgaagcctcggagcagttccagaacgtggcccgcctccaggctcctggcttcaccgccctcctaaccgtcatgaacaacgcagggtacggtccggctgcggactgtggcccccacgatgcgcacaaagtgatgacaaggttagaagggtggtagaggtagaccagcggcaggccacacttaggcctgcc

SEQ ID NO: 8844 - DNA, 1832 bp, Zea Mays
cctcactttcgtccaccgccttctcccgccgccgcggcgttttcccgtctccgtcttcgctcaccgacctctgggccaggagtttgcgctccgattccccgccaatgctcgggccagggcgttctgctaccgccttgctgtttctggcggcgacggcgggagatgtcaagtttgtcatggataggccgcgagctggtcaggctgcggagaggacatgggcacagggcacagggcgggcttgcggcggtacggagagcgcgcgggtgcttaccaccatcatggcgcctgatcagtgcgctattgtgcatttgtgctcttgggattggctaggtggataaggaggagtggcggatgcggctaggggtcgagccggactccgagcgcgagggtctccggtatccatgactctctgccatgccacggaatgcttgcatgatcacggatgtgattaccaccattaaactgcggtcctgcctcgatcgatggatgaaatttgcaaggttttttttaaaaattaaaccaactcctgtaccaaatactgaattcatcatatactactcagttaagtttcagtacattgttggatacaataaatgggtatttgtcactttggcgaacgttaccgctcctatgcatctgctggctatttatatccgccgtgctagtgtcctctctcagttgcctcataatctccttgttgctccttcacctggaaagatatggaaaaatccgcatggtgtacttttagctgatttgaggcatttatatccagggaacacaacaaaggcatctgagtgctctactcctgcaattctgaatatgtccgatgataatggtccgtctgagatgggtgttggtcagccaatggttgttggcaggaagctgcttccaccaattgtaccaggtggtgaaccaatttttgtgtgtgaaaagcagtatgctgctatccttcgtctgcgtgaacgccggcttcgtgccaaagaagcaagggagcgaaggttgctccaagccaaggacaatcaggaagagcccaatggaggaagcatggtggaatgcaaccctgccccaggagacagtcatcagcacttaatcacaaccagtggataccagcaagtgaccactggtggcagtgaggcgcaaagcagcatcccattaggtttctattggtatgttttcacaaccagtgaaggtgggcaaagcagcacccctgctggaatgggtttctactatcccttcaacacaaccaatggcggggaaaatgtcggtggcgtcgcctctggcagtgaggtgccaagcagcaatgccccaagcggcttcttttggcccctcatcatggccagcagcgaggaaaacaatggtgaggtcacctacggcagcatggtaccgatcagcaaccctgcaggatacttctgttggcccgtggctgtgaccaatgaacacggggaagacactggtgagtctgccgatgggggcgaggcgccaataagcaaccctgcaggagacttctgcagttggcctgttgtcgcaaccaacgacgatgaggaaaatgtcggcgaggtcgcctacaacagcgtcctgaacctcgaatcacctgaccacaccgacctcctcaggatcatgatgggcaacaggtacagcactgatgaagcctcggagcagttccagaacgtggcccgcctccaggctcctggcttcaccgccctcctaaccgtcatgaacaacgcagggtacggtccggctgcggactgtggcccccacgatgcgcacaaagtgatgacaaggttagaagggtggtagaggtagaccagcggcaggccacacttaggcctgcc

SEQ ID NO: 8845 - DNA, 1767 bp, Zea Mays
cctcactttcgtccaccgccttctcccgccgccgcggcgttttcccgtctccgtcttcgctcaccgacctctgggccaggagtttgcgctccgattccccgccaatgctcgggccagggcgttctgctaccgccttgctgtttctggcggcgacggcgggagatgtcaagtttgtcatggataggccgcgagctggtcaggctgcggagaggacatgggcacagggcacagggcgggcttgcggcggtacggagagcgcgcgggtgcttaccaccatcatggcgcctgatcagtgcgctattgtgcatttgtgctcttgggattggctaggtggataaggaggagtggcggatgcggctaggggtcgagccggactccgagcgcgagggtctccggtatccatgactctctgccatgccacggaatgcttgcatgatcacggatgtgattaccaccattaaactgcggtcctgcctcgatcgatggatgaaatttgcaaggagcgaatctgcattaaatcttggatatcatttttgaaaaggcgaacgttaccgctcctatgcatctgctggctatttatatccgccgtgctagtgtcctctctcagttgcctcataatctccttgttgctccttcacctggaaagcgaggtagcgggtgagcttcacgggttggatttgaattggttacttcatcgatgtctcaagggaacacaacaaaggcatctgagtgctctactcctgcaattctgaatatgtccgatgataatggtccgtctgagatgggtgttggtcagccaatggttgttggcaggaagctgcttccaccaattgtaccaggtggtgaaccaatttttgtgtgtgaaaagcagtatgctgctatccttcgtctgcgtgaacgccggcttcgtgccaaagaagcaagggagcgaaggttgctccaagccaaggacaatcaggaagagcccaatggaggaagcatggtggaatgcaaccctgccccaggagacagtcatcagcacttaatcacaaccagtggataccagcaagtgaccactggtggcagtgaggcgcaaagcagcatcccattaggtttctattggtatgttttcacaaccagtgaaggtgggcaaagcagcacccctgctggaatgggtttctactatcccttcaacacaaccaatggcggggaaaatgtcggtggcgtcgcctctggcagtgaggtgccaagcagcaatgccccaagcggcttcttttggcccctcatcatggccagcagcgaggaaaacaatggtgaggtcacctacggcagcatggtaccgatcagcaaccctgcaggatacttctgttggcccgtggctgtgaccaatgaacacggggaagacactggtgagtctgccgatgggggcgaggcgccaataagcaaccctgcaggagacttctgcagttggcctgttgtcgcaaccaacgacgatgaggaaaatgtcggcgaggtcgcctacaacagcgtcctgaacctcgaatcacctgaccacaccgacctcctcaggatcatgatgggcaacaggtacagcactgatgaagcctcggagcagttccagaacgtggcccgcctccaggctcctggcttcaccgccctcctaaccgtcatgaacaacgcagggtacggtccggctgcggactgtggcccccacgatgcgcacaaagtgatgacaaggttagaagggtggtagaggtagaccagcggcaggccacacttaggcctgcc

SEQ ID NO: 8846 - DNA, 2178 bp, Zea Mays
cctcactttcgtccaccgccttctcccgccgccgcggcgttttcccgtctccgtcttcgctcaccgacctctgggccaggagtttgcgctccgattccccgccaatgctcgggccagggcgttctgctaccgccttgctgtttctggcggcgacggcgggagatgtcaagtttgtcatggataggccgcgagctggtcaggctgcggagaggacatgggcacagggcacagggcgggcttgcggcggtacggagagcgcgcgggtgcttaccaccatcatggcgcctgatcaactctctgccatgccacggaatgcttgcatgatcacggatgtgattaccaccattaaactgcggtcctgcctcgatcgatggatgaaatttgcaaggttttttttaaaaattaaaccaactcctgtaccaaatactgaattcatcatatactactcagttaagtttcagtacattgttggatacaataaatgggtatttgtcactttggtgtgattaccagcatttttttcgagtaattgcctaggcggcaaggcgtacccgaggtgccactggacggcacaaggttttagttacgccatatcgcctaggcttagcctagaaggcacctaggtgtccaggcgtactccagtgtgcgtgacaccgcaactccacaaaaacataattttttattaacttttcattttttatgcgtatcttgtattctagactctagcatttaatcagccatgcagaagtttctcttgccacagcaatacaggtacagcttcattctagccataacatttatatcccgatgatacaacggtgttctacccgatgcatttatatactgataatataatgttcttctacattaaggagcgaatctgcattaaatcttggatatcatttttgaaaaggcgaacgttaccgctcctatgcatctgctggctatttatatccgccgtgctagtgtcctctctcagttgcctcataatctccttgttgctccttcacctggaaagatatggaaaaatccgcatggtgtacttttagctgatttgaggcatttatatccagggaacacaacaaaggcatctgagtgctctactcctgcaattctgaatatgtccgatgataatggtccgtctgagatgggtgttggtcagccaatggttgttggcaggaagctgcttccaccaattgtaccaggtggtgaaccaatttttgtgtgtgaaaagcagtatgctgctatccttcgtctgcgtgaacgccggcttcgtgccaaagaagcaagggagcgaaggttgctccaagccaagaagaaccgtccaagaggtcctaatgggcgttttgtcatgatcaaggacaatcaggaagagcccaatggaggaagcatggtggaatgcaaccctgccccaggagacagtcatcagcacttaatcacaaccagtggataccagcaagtgaccactggtggcagtgaggcgcaaagcagcatcccattaggtttctattggtatgttttcacaaccagtgaaggtgggcaaagcagcacccctgctggaatgggtttctactatcccttcaacacaaccaatggcggggaaaatgtcggtggcgtcgcctctggcagtgaggtgccaagcagcaatgccccaagcggcttcttttggcccctcatcatggccagcagcgaggaaaacaatggtgaggtcacctacggcagcatggtaccgatcagcaaccctgcaggatacttctgttggcccgtggctgtgaccaatgaacacggggaagacactggtgagtctgccgatgggggcgaggcgccaataagcaaccctgcaggagacttctgcagttggcctgttgtcgcaaccaacgacgatgaggaaaatgtcggcgaggtcgcctacaacagcgtcctgaacctcgaatcacctgaccacaccgacctcctcaggatcatgatgggcaacaggtacagcactgatgaagcctcggagcagttccagaacgtggcccgcctccaggctcctggcttcaccgccctcctaaccgtcatgaacaacgcagggtacggtccggctgcggactgtggcccccacgatgcgcacaaagtgatgacaaggttagaagggtggtagaggtagaccagcggcaggccacacttaggcctgcc

SEQ ID NO: 8847 - DNA, 1726 bp, Zea Mays
ctcagtcctcactttcgtccaccgccttctcccgccgccgcggcgttttcccgtctccgtcttcgctcaccgacctctgggccaggagtttgcgctccgattccccgccaatgctcgggccagggcgttctgctaccgccttgctgtttctggcggcgacggcgggagatgtcaagtttgtcatggataggccgcgagctggtcaggctgcggagaggacatgggcacagggcacagggcgggcttgcggcggtacggagagcgcgcgggtgcttaccaccatcatggcgcctgatcaactctctgccatgccacggaatgcttgcatgatcacggatgtgattaccaccattaaactgcggtcctgcctcgatcgatggatgaaatttgcaaggttttttttaaaaattaaaccaactcctgtaccaaatactgaattcatcatatactactcagttaagtttcagtacattgttggatacaataaatgggtatttgtcactttggcgaacgttaccgctcctatgcatctgctggctatttatatccgccgtgctagtgtcctctctcagttgcctcataatctccttgttgctccttcacctggaaagatatggaaaaatccgcatggtgtacttttagctgatttgaggcatttatatccagggaacacaacaaaggcatctgagtgctctactcctgcaattctgaatatgtccgatgataatggtccgtctgagatgggtgttggtcagccaatggttgttggcaggaagctgcttccaccaattgtaccaggtggtgaaccaatttttgtgtgtgaaaagcagtatgctgctatccttcgtctgcgtgaacgccggcttcgtgccaaagaagcaagggagcgaaggttgctccaagccaaggacaatcaggaagagcccaatggaggaagcatggtggaatgcaaccctgccccaggagacagtcatcagcacttaatcacaaccagtggataccagcaagtgaccactggtggcagtgaggcgcaaagcagcatcccattaggtttctattggtatgttttcacaaccagtgaaggtgggcaaagcagcacccctgctggaatgggtttctactatcccttcaacacaaccaatggcggggaaaatgtcggtggcgtcgcctctggcagtgaggtgccaagcagcaatgccccaagcggcttcttttggcccctcatcatggccagcagcgaggaaaacaatggtgaggtcacctacggcagcatggtaccgatcagcaaccctgcaggatacttctgttggcccgtggctgtgaccaatgaacacggggaagacactggtgagtctgccgatgggggcgaggcgccaataagcaaccctgcaggagacttctgcagttggcctgttgtcgcaaccaacgacgatgaggaaaatgtcggcgaggtcgcctacaacagcgtcctgaacctcgaatcacctgaccacaccgacctcctcaggatcatgatgggcaacaggtacagcactgatgaagcctcggagcagttccagaacgtggcccgcctccaggctcctggcttcaccgccctcctaaccgtcatgaacaacgcagggtacggtccggctgcggactgtggcccccacgatgcgcacaaagtgatgacaaggttagaagggtggtagaggtagaccagcggcaggccacacttaggcctgcc

SEQ ID NO: 8848 - DNA, 2219 bp, Zea Mays
gaaaatcgccgtaaaatccacctgccgtcctcagtcctcactttcgtccaccgccttctcccgccgccgcggcgttttcccgtctccgtcttcgctcaccgacctctgggccaggagtttgcgctccgattccccgccaatgctcgggccagggcgttctgctaccgccttgctgtttctggcggcgacggcgggagatgtcaagtttgtcatggataggccgcgagctggtcaggctgcggagaggacatgggcacagggcacagggcgggcttgcggcggtacggagagcgcgcgggtgcttaccaccatcatggcgcctgatcaactctctgccatgccacggaatgcttgcatgatcacggatgtgattaccaccattaaactgcggtcctgcctcgatcgatggatgaaatttgcaaggttttttttaaaaattaaaccaactcctgtaccaaatactgaattcatcatatactactcagttaagtttcagtacattgttggatacaataaatgggtatttgtcactttggtgtgattaccagcatttttttcgagtaattgcctaggcggcaaggcgtacccgaggtgccactggacggcacaaggttttagttacgccatatcgcctaggcttagcctagaaggcacctaggtgtccaggcgtactccagtgtgcgtgacaccgcaactccacaaaaacataattttttattaacttttcattttttatgcgtatcttgtattctagactctagcatttaatcagccatgcagaagtttctcttgccacagcaatacaggtacagcttcattctagccataacatttatatcccgatgatacaacggtgttctacccgatgcatttatatactgataatataatgttcttctacattaaggagcgaatctgcattaaatcttggatatcatttttgaaaaggcgaacgttaccgctcctatgcatctgctggctatttatatccgccgtgctagtgtcctctctcagttgcctcataatctccttgttgctccttcacctggaaagcgaggtagcgggtgagcttcacgggttggatttgaattggttacttcatcgatgtctcaagggaacacaacaaaggcatctgagtgctctactcctgcaattctgaatatgtccgatgataatggtccgtctgagatgggtgttggtcagccaatggttgttggcaggaagctgcttccaccaattgtaccaggtggtgaaccaatttttgtgtgtgaaaagcagtatgctgctatccttcgtctgcgtgaacgccggcttcgtgccaaagaagcaagggagcgaaggttgctccaagccaagaagaaccgtccaagaggtcctaatgggcgttttgtcatgatcaaggacaatcaggaagagcccaatggaggaagcatggtggaatgcaaccctgccccaggagacagtcatcagcacttaatcacaaccagtggataccagcaagtgaccactggtggcagtgaggcgcaaagcagcatcccattaggtttctattggtatgttttcacaaccagtgaaggtgggcaaagcagcacccctgctggaatgggtttctactatcccttcaacacaaccaatggcggggaaaatgtcggtggcgtcgcctctggcagtgaggtgccaagcagcaatgccccaagcggcttcttttggcccctcatcatggccagcagcgaggaaaacaatggtgaggtcacctacggcagcatggtaccgatcagcaaccctgcaggatacttctgttggcccgtggctgtgaccaatgaacacggggaagacactggtgagtctgccgatgggggcgaggcgccaataagcaaccctgcaggagacttctgcagttggcctgttgtcgcaaccaacgacgatgaggaaaatgtcggcgaggtcgcctacaacagcgtcctgaacctcgaatcacctgaccacaccgacctcctcaggatcatgatgggcaacaggtacagcactgatgaagcctcggagcagttccagaacgtggcccgcctccaggctcctggcttcaccgccctcctaaccgtcatgaacaacgcagggtacggtccggctgcggactgtggcccccacgatgcgcacaaagtgatgacaaggttagaagggtggtagaggtagaccagcggcaggccacacttaggcctgcc

SEQ ID NO: 8849 - DNA, 1814 bp, Zea Mays
caaaatccgaaaatcgccgtaaaatccacctgccgtcctcagtcctcactttcgtccaccgccttctcccgccgccgcggcgttttcccgtctccgtcttcgctcaccgacctctgggccaggagtttgcgctccgattccccgccaatgctcgggccagggcgttctgctaccgccttgctgtttctggcggcgacggcgggagatgtcaagtttgtcatggataggccgcgagctggtcaggctgcggagaggacatgggcacagggcacagggcgggcttgcggcggtacggagagcgcgcgggtgcttaccaccatcatggcgcctgatcaactctctgccatgccacggaatgcttgcatgatcacggatgtgattaccaccattaaactgcggtcctgcctcgatcgatggatgaaatttgcaaggttttttttaaaaattaaaccaactcctgtaccaaatactgaattcatcatatactactcagttaagtttcagtacattgttggatacaataaatgggtatttgtcactttggcgaacgttaccgctcctatgcatctgctggctatttatatccgccgtgctagtgtcctctctcagttgcctcataatctccttgttgctccttcacctggaaagcgaggtagcgggtgagcttcacgggttggatttgaattggttacttcatcgatgtctcaagggaacacaacaaaggcatctgagtgctctactcctgcaattctgaatatgtccgatgataatggtccgtctgagatgggtgttggtcagccaatggttgttggcaggaagctgcttccaccaattgtaccaggtggtgaaccaatttttgtgtgtgaaaagcagtatgctgctatccttcgtctgcgtgaacgccggcttcgtgccaaagaagcaagggagcgaaggttgctccaagccaagaagaaccgtccaagaggtcctaatgggcgttttgtcatgatcaaggacaatcaggaagagcccaatggaggaagcatggtggaatgcaaccctgccccaggagacagtcatcagcacttaatcacaaccagtggataccagcaagtgaccactggtggcagtgaggcgcaaagcagcatcccattaggtttctattggtatgttttcacaaccagtgaaggtgggcaaagcagcacccctgctggaatgggtttctactatcccttcaacacaaccaatggcggggaaaatgtcggtggcgtcgcctctggcagtgaggtgccaagcagcaatgccccaagcggcttcttttggcccctcatcatggccagcagcgaggaaaacaatggtgaggtcacctacggcagcatggtaccgatcagcaaccctgcaggatacttctgttggcccgtggctgtgaccaatgaacacggggaagacactggtgagtctgccgatgggggcgaggcgccaataagcaaccctgcaggagacttctgcagttggcctgttgtcgcaaccaacgacgatgaggaaaatgtcggcgaggtcgcctacaacagcgtcctgaacctcgaatcacctgaccacaccgacctcctcaggatcatgatgggcaacaggtacagcactgatgaagcctcggagcagttccagaacgtggcccgcctccaggctcctggcttcaccgccctcctaaccgtcatgaacaacgcagggtacggtccggctgcggactgtggcccccacgatgcgcacaaagtgatgacaaggttagaagggtggtagaggtagaccagcggcaggccacacttaggcctgcc

SEQ ID NO: 8850 - DNA, 956 bp, Zea Mays
cctcagtcctcactttcgtccaccgccttctcccgccgccgcggcgttttcccgtctccgtcttcgctcaccgacctctgggccaggagtttgcgctccgattccccgccaatgctcgggccagggcgttctgctaccgccttgctgtttctggcggcgacggcgggagatgtcaagtttgtcatggataggccgcgagctggtcaggctgcggagaggacatgggcacagggcacagggcgggcttgcggcggtacggagagcgcgcgggtgcttaccaccatcatggcgcctgatcaactctctgccatgccacggaatgcttgcatgatcacggatgtgattaccaccattaaactgcggtcctgcctcgatcgatggatgaaatttgcaaggttagcggggagctgagattctactgtatctgcacttttctgcctcattttgtgcatttgcgtgatattggtttccatgtaactcttgacaactgaaaaaaggctgtatgttattaagcctccgcgctgtattgacctgccagctggtcattccagagctacactatgacggaactagagtgattttccttgttgtccatgcacagctagactgtaatgtattgcaacttgtggaaaggtgaacaccaggaaagaactgttctgcaaagagaacatatattgccaagcggttcataagaaaacaggcaatttgggaaccataccttggtatttaagacctcttgacgacttatttttatgtgggaaattttagttccgcttgcaatcatacatccaatatctcaaacagttttttacgatcgcaatggcctgaatgtgttattgtttgttacgattaagaatgagcgatcggtgatagtggtgggacagtatatgctgtaaaaaccgcccgctcgaggaacatgatggtacttgtagtggtcaccgagcagcatggtaact

SEQ ID NO: 8851 - DNA, 117 bp, Zea Mays
ccaccaacagcagcaaagaagcagaaagaagaagaaaaagaagaaagaagtgaaactgtggggaaaaaagggatttggagggtgaaaactggttagcggaggctggagcagcgcgcg

SEQ ID NO: 8852 - DNA, 457 bp, Zea Mays
gtgcatgctgatggcgtgactcatggagatatggctgcatcatgaaggcggtaacatggatgtagcggtagaagacaacagaagatatgttgcatggcatggtgacggcgtcatttagtcaaaaaggtgacaattgagggtttcagttcatagttttgagatgagtgagagtgattcatgggagatatggctgcgccaacaaatgcaggactgacagaaaaatatgatgcagggcaggccacggtcatatagcatcattcagtcataggtgacagttaagtagttcaattaatagttctagatttgagatcgtgactcatagagacagctgactaacataaatgtaactaagacaacagaagatttgttgcaaggcatggtgatatagctagcaccagtagaaggtgacagttaaggtgttcaatttgatagtttgagaaagtgcaaggtaccttcc

SEQ ID NO: 8853 - DNA, 1766 bp, Zea Mays
aaaacagtggtggagctcaatcaatccaaagtgcgggcgaaaccgaaagcgagaggggggagactgggagagagagggacgagcggcgcggtctgctggtccgtcggcggcgaccgcgacgcctcgctgcagcggccgacgcatccgccgcgggcgtggagctcgccctctcctggctcgcaggagctcgcgagttgtttcgggtgcgagctgtcgaaggcaacgaggaaaagactgccatggggatttcagctaagtggatcaaatcacttgttgggataaaaaagcacgaaaaagggcgaaatgctgaatgcagcgatgcgaggagctctgctgtccagttgctacgcaaacgggaacattctgttgatacagaaagtgttcctgcggctgaagaactcagagtacaggccgaaccattggcaggtgacacaaatacagaaacaatatcaaattctgcctcctcaccgagcacatctcttcaagcttctcagaccgaacttggtacaaaggagcatcaggctgctgtagttatccaatctgcctttcgagcattcttggctaggcgggccttgcgggcgttaaaaggactagttagactccaggcacttgttcggggtcatgctgtaagaaaacaagcagcagaaacacttcagtgcatgcaagcgctagtaagagctcaagctcgtgtcagagcgagacgagtccgtgtttctttggaaagccaagggactcaaaagaaacctcctgaagaaaatgttcatgaggatcatgttcgagatattgaggaagactggtgtggcagtataggctcggtagaagaaatgaaagctaagacattaaaaaggcaagaggctgctgctaagcgggaaagggcgatggcatatgctttaacccatcagtggcaggcaagttcaaggaaacagaaagcagcaagcctccaaggccaaggactcgccggggacgagaaccagtggggacgaaactggctcgagaggtggatggccgcgcgcccgtgggagaacaggttacttgacagcaacgccagggacagtgtcactgccggcgacgacgacgacaaaccagcggaggaaggcaaggcaaaagctccggacctgagcaaaccaaaaggaaaagctcccgttttggcctctcagtctaacgggtcgcggcaggagaaagctgcagaccacgagaagtcgcattctgatgtcagcggctgtggctcttcgtcggggcggtctgcggacgtgcagccaacggtttctctagagtcgtccaaggtggaagtgaaggtgaaggcaccgcaggaggtcgcagatgaagcgagctctggaccgtcgaatccggcttcccggtccgcaagcaatccgaaagaaaggccggcgcgaaccgatgcgccagcgaggaagcggttatcgcttcctaacaacgcaacagcagccagtcggggagtagggaagcgccctaccaacagtagtcggagtcggacgaacgtggcctcgagaccgaagaatggcagaggcgcctccagcccaggcctcgagtagtgtcgtagggtggttgtgttgtgctggtgtacattgtttacgttgctgtgtattctaccattgtgttatgtattttttgtgcgtgtgtgtgtctgtgttctgttcaaattgcgtcctttcgaactgctcagtctgtggacgtttggaaaagcatgtttctggattctgtgattcggtcttcagcaccagtgtttggttggttgggtggtggtgata

SEQ ID NO: 8854 - DNA, 1889 bp, Zea Mays
aaaacagtggtggagctcaatcaatccaaagtgcgggcgaaaccgaaagcgagaggggggagactgggagagagagggacgagcggcgcggtctgctggtccgtcggcggcgaccgcgacgcctcgctgcagcggccgacgcatccgccgcgggcgtggagctcgccctctcctggctcgcaggagctcgcgagttgtttcgggtgcgagttgcttcttagtgctagctgtcgaaggcaacgaggaaaagactgccatggggatttcagctaagtggatcaaatcacttgttgggataaaaaagcacgaaaaagggcgaaatgctgaatgcagcgatgcgcatggactctgcaaccacttctattgttggcgtgtctttgtcatttgatacccatcaagggttattggcgcactattcagtcctagttatgagcagtgtcacatttggccaaaggagctctgctgtccagttgctacgcaaacgggaacattctgttgatacagaaagtgttcctgcggctgaagaactcagagtacaggccgaaccattggcaggtgacacaaatacagaaacaatatcaaattctgcctcctcaccgagcacatctcttcaagcttctcagaccgaacttggtacaaaggagcatcaggctgctgtagttatccaatctgcctttcgagcattcttggctaggcgggccttgcgggcgttaaaaggactagttagactccaggcacttgttcggggtcatgctgtaagaaaacaagcagcagaaacacttcagtgcatgcaagcgctagtaagagctcaagctcgtgtcagagcgagacgagtccgtgtttctttggaaagccaagggactcaaaagaaacctcctgaagaaaatgttcatgaggatcatgttcgagatattgaggaagactggtgtggcagtataggctcggtagaagaaatgaaagctaagacattaaaaaggcaagaggctgctgctaagcgggaaagggcgatggcatatgctttaacccatcagtggcaggcaagttcaaggaaacagaaagcagcaagcctccaaggccaaggactcgccggggacgagaaccagtggggacgaaactggctcgagaggtggatggccgcgcgcccgtgggagaacaggttacttgacagcaacgccagggacagtgtcactgccggcgacgacgacgacaaaccagcggaggaaggcaaggcaaaagctccggacctgagcaaaccaaaaggaaaagctcccgttttggcctctcagtctaacgggtcgcggcaggagaaagctgcagaccacgagaagtcgcattctgatgtcagcggctgtggctcttcgtcggggcggtctgcggacgtgcagccaacggtttctctagagtcgtccaaggtggaagtgaaggtgaaggcaccgcaggaggtcgcagatgaagcgagctctggaccgtcgaatccggcttcccggtccgcaagcaatccgaaagaaaggccggcgcgaaccgatgcgccagcgaggaagcggttatcgcttcctaacaacgcagccagtcggggagtagggaagcgccctaccaacagtagtcggagtcggacgaacgtggcctcgagaccgaagaatggcagaggcgcctccagcccaggcctcgagtagtgtcgtagggtggttgtgttgtgctggtgtacattgtttacgttgctgtgtattctaccattgtgttatgtattttttgtgcgtgtgtgtgtctgtgttctgttcaaattgcgtcctttcgaactgctcagtctgtggacgtttggaaaagcatgtttctggattctgtgattcggtcttcagcaccagtgtttggttggttgggtggtggtgata

SEQ ID NO: 8855 - DNA, 1765 bp, Zea Mays
aaaacagtggtggagctcaatcaatccaaagtgcgggcgaaaccgaaagcgagaggggggagactgggagagagagggacgagcggcgcggtctgctggtccgtcggcggcgaccgcgacgcctcgctgcagcggccgacgcatccgccgcgggcgtggagctcgccctctcctggctcgcaggagctcgcgagttgtttcggtgctagctgtcgaaggcaacgaggaaaagactgccatggggatttcagctaagtggatcaaatcacttgttgggataaaaaagcacgaaaaagggcgaaatgctgaatgcagcgatgcgaggagctctgctgtccagttgctacgcaaacgggaacattctgttgatacagaaagtgttcctgcggctgaagaactcagagtacaggccgaaccattggcaggtgacacaaatacagaaacaatatcaaattctgcctcctcaccgagcacatctcttcaagcttctcagaccgaacttggtacaaaggagcatcaggctgctgtagttatccaatctgcctttcgagcattcttggctaggcgggccttgcgggcgttaaaaggactagttagactccaggcacttgttcggggtcatgctgtaagaaaacaagcagcagaaacacttcagtgcatgcaagcgctagtaagagctcaagctcgtgtcagagcgagacgagtccgtgtttctttggaaagccaagggactcaaaagaaacctcctgaagaaaatgttcatgaggatcatgttcgagatattgaggaagactggtgtggcagtataggctcggtagaagaaatgaaagctaagacattaaaaaggcaagaggctgctgctaagcgggaaagggcgatggcatatgctttaacccatcagtggcaggcaagttcaaggaaacagaaagcagcaagcctccaaggccaaggactcgccggggacgagaaccagtggggacgaaactggctcgagaggtggatggccgcgcgcccgtgggagaacaggttacttgacagcaacgccagggacagtgtcactgccggcgacgacgacgacaaaccagcggaggaaggcaaggcaaaagctccggacctgagcaaaccaaaaggaaaagctcccgttttggcctctcagtctaacgggtcgcggcaggagaaagctgcagaccacgagaagtcgcattctgatgtcagcggctgtggctcttcgtcggggcggtctgcggacgtgcagccaacggtttctctagagtcgtccaaggtggaagtgaaggtgaaggcaccgcaggaggtcgcagatgaagcgagctctggaccgtcgaatccggcttcccggtccgcaagcaatccgaaagaaaggccggcgcgaaccgatgcgccagcgaggaagcggttatcgcttcctaacaacgcaacagcagccagtcggggagtagggaagcgccctaccaacagtagtcggagtcggacgaacgtggcctcgagaccgaagaatggcagaggcgcctccagcccaggcctcgagtagtgtcgtagggtggttgtgttgtgctggtgtacattgtttacgttgctgtgtattctaccattgtgttatgtattttttgtgcgtgtgtgtgtctgtgttctgttcaaattgcgtcctttcgaactgctcagtctgtggacgtttggaaaagcatgtttctggattctgtgattcggtcttcagcaccagtgtttggttggttgggtggtggtgata

SEQ ID NO: 8856 - DNA, 2617 bp, Zea Mays
gctatggagcagttttttagtgtttcgctgcacggaagtgactctgctagcccctaatcatatgagagtgattttgagtgtgccaaacgccccctattgaaattcccacgcgcccgtcgtttgccaccttccccaccagcaccaagcggcgagagcgggacggggcagagcaagagctagggataaccctcgcccaccatggcgacgcccggcgagcagcaggcaccggctgcggcggagtaggtcgtgtccgtcgagatgcctgcacccgacgggtggaccaagaagtttactccccagagagggggaagatccgagattgtttttgtttcgccaactggcgaggaaattaagaacaagaggcaactaagccaatacctaaaggcacaccctggaggccctgctgcttcagattttgattggggaactggtgataccccaaggcgttctgctcgcattagcgagaaagtcaaggtttttgatagcccagagggcgagaagatcccgaaacgcagcaggaactccagtggtaggaagggtaggcagggaaagaaggaagcccctgaaactgaagaagccaaagatgctgaaaccggccaggacgccccaagtgaagatggcacaaaggagactgacgtggagatgaagcctgctgaagaggcgaaggaagctcctactgaaactgatgacgctgagaagatgagaaagaaactgagaaaccagctgaagctgttgtagctcctcttgcgcaatcggaggagaagaaagaagatgccaagccagatgagcctgaagctgtggctccagctccagtaagcaacccaactgagaactcagcccctgctcctgccgagcctgctgctgttcctgccccagtgcctgagaccgaatcagttgccgagcctgctgctgttctcgccccagcgcctgaaaccaaaccagatgccaagcctgctgctgttcctgccccagcgcctgaaaacaaaccagatgccgagcctgctgctgctgctgctccagtgcctgacaccaaatcagttgctgagcctgctgctgctccagcgcctgacaccaaatcagttgctgaacctgctgctgctgctccagtgcccgagaccaaactagttgctgaatctgctgctgatgctgttgctgctccggcgcctgaaaccaaatcagatgccgagcctgctgctgctccagtgcccgagaccaaaccagttgctgaatctgctgctgatgctgttgctgctccagcgcctgaaaccaaatcagatgccgagcctgctgctgccgctgatccagcacctgaaatcaaatcagatgctgccgccgctgatccagcacccgggaccaaggcagatgctgccgccactgatgccgcgcctggagccgagccagacgccgctccactagagaacaccgctgccgacaaaggcggaagcgaggagagcagccagcccgtgaacaacgtgaacaacgggcactcaacgtgaagtgcatctgaggccggaacggaacaccccttccagcaccgtgtatctcatgtaggaacaaacatttgcattcgcattgtaatctgatggatcggtaagcatgttgattagtcagtctgacgctgctgggtgacatgttggtaattaggctctgcatttgagctctttttttttgtatggctgctgtcgccgccgtacatgtatcctgtatccaccaccatcatcatccccttggactattggttgtgttgtacctaactgcgtaagcatattattatcaatgttaggccatgtatactccgctctaatgtttgtattttgtgaaatttggataaccagctgaatgttgtttatcatcatctccagtgtctatgagaaaatagtaagagtgcctggctgggtatgtataaaaaaaatgcgttttattttactgcatgtgaaaatgaaatcgaccagaggctagagctgggtaggcgtcgcggccgggctgggcaccggcggcgagcggcagacggggcacgtcgggcgcagcctcagccagcggtcgacgcacagctggtggaaggcgtgcgcgcactcgggcagcacgcggagcacgtccccgctggcgtactcgcccaggcacaccgcgcagcacgtcgtcgtcccggtggcggcggtcgtcgtcgcagtcttcctctccgctttctcctcgccgtacaccacctcgggcagcgccttgagcgcggcctcgtctagccccgcctcgacgtccgcgcccacgtccacggcggtgccctcctcctcccgccgcgcgcgcgctgccgccgtcgcgggcgcggcgctgcggacgcacgtccgcagcaggaaggccacggcgacgatggccatggcgctgacgacgccgaaggcgacctccacctccagctccaccatcccttcggctggccggccggcgcccctgcgtttgtcagtgcctgcgacgacgagctacgtggaccggaccggatcggaggcgctagctgctgggctgctgttccattgcaaccaccagctgagccgccaacctactcgatcgagctgctaggtcgacgcaattgagctgatgagcttctcttagtttcagctggtgcagcgttgct

SEQ ID NO: 8857 - DNA, 2532 bp, Zea Mays
gctatggagcagttttttagtgtttcgctgcacggaagtgactctgctagcccctaatcatatgagagtgattttgagtgtgccaaacgccccctattgaaattcccacgcgcccgtcgtttgccaccttccccaccagcaccaagcggcgagagcgggacggggcagagcaagagctagggataaccctcgcccaccatggcgacgcccggcgagcagcaggcaccggctgcggcggagtaggtcgtgtccgtcgagatgcctgcacccgacgggtggaccaagaagtttactccccagagagggggaagatccgagattgtttttgtttcgccaactggcgaggaaattaagaacaagaggcaactaagccaatacctaaaggaactccagtggtaggaagggtaggcagggaaagaaggaagcccctgaaactgaagaagccaaagatgctgaaaccggccaggacgccccaagtgaagatggcacaaaggagactgacgtggagatgaagcctgctgaagaggcgaaggaagctcctactgaaactgatgacgctgagaaggctgcagacaaggcggacgatactcctgctccggcgccaatggaagaagatgagaaagaaactgagaaaccagctgaagctgttgtagctcctcttgcgcaatcggaggagaagaaagaagatgccaagccagatgagcctgaagctgtggctccagctccagtaagcaacccaactgagaactcagcccctgctcctgccgagcctgctgctgttcctgccccagtgcctgagaccgaatcagttgccgagcctgctgctgttctcgccccagcgcctgaaaccaaaccagatgccaagcctgctgctgttcctgccccagcgcctgaaaacaaaccagatgccgagcctgctgctgctgctgctccagtgcctgacaccaaatcagttgctgagcctgctgctgctccagcgcctgacaccaaatcagttgctgaacctgctgctgctgctccagtgcccgagaccaaactagttgctgaatctgctgctgatgctgttgctgctccggcgcctgaaaccaaatcagatgccgagcctgctgctgctccagtgcccgagaccaaaccagttgctgaatctgctgctgatgctgttgctgctccagcgcctgaaaccaaatcagatgccgagcctgctgctgccgctgatccagcacctgaaatcaaatcagatgctgccgccgctgatccagcacccgggaccaaggcagatgctgccgccactgatgccgcgcctggagccgagccagacgccgctccactagagaacaccgctgccgacaaaggcggaagcgaggagagcagccagcccgtgaacaacgtgaacaacgggcactcaacgtgaagtgcatctgaggccggaacggaacaccccttccagcaccgtgtatctcatgtaggaacaaacatttgcattcgcattgtaatctgatggatcggtaagcatgttgattagtcagtctgacgctgctgggtgacatgttggtaattaggctctgcatttgagctctttttttttgtatggctgctgtcgccgccgtacatgtatcctgtatccaccaccatcatcatccccttggactattggttgtgttgtacctaactgcgtaagcatattattatcaatgttaggccatgtatactccgctctaatgtttgtattttgtgaaatttggataaccagctgaatgttgtttatcatcatctccagtgtctatgagaaaatagtaagagtgcctggctgggtatgtataaaaaaaatgcgttttattttactgcatgtgaaaatgaaatcgaccagaggctagagctgggtaggcgtcgcggccgggctgggcaccggcggcgagcggcagacggggcacgtcgggcgcagcctcagccagcggtcgacgcacagctggtggaaggcgtgcgcgcactcgggcagcacgcggagcacgtccccgctggcgtactcgcccaggcacaccgcgcagcacgtcgtcgtcccggtggcggcggtcgtcgtcgcagtcttcctctccgctttctcctcgccgtacaccacctcgggcagcgccttgagcgcggcctcgtctagccccgcctcgacgtccgcgcccacgtccacggcggtgccctcctcctcccgccgcgcgcgcgctgccgccgtcgcgggcgcggcgctgcggacgcacgtccgcagcaggaaggccacggcgacgatggccatggcgctgacgacgccgaaggcgacctccacctccagctccaccatcccttcggctggccggccggcgcccctgcgtttgtcagtgcctgcgacgacgagctacgtggaccggaccggatcggaggcgctagctgctgggctgctgttccattgcaaccaccagctgagccgccaacctactcgatcgagctgctaggtcgacgcaattgagctgatgagcttctcttagtttcagctggtgcagcgttgct

SEQ ID NO: 8858 - DNA, 2714 bp, Zea Mays
cgcaggatcggtcatcctccttctctcctacctcgccggtggagagcttttcttgtgctagttggtctgtccgtctcgctgagcatctcgccatcgacgccggtcgagtcctcgcctccaacttcctcgtgctcggctcccagctcgcccaactttggtggtcgtcacgccccacctcgacccggagcaccgtgtcagcgacctagaaggtcaccagtctcttcgtcggagaaaaagcagaggaaacgagagaagacagacagagaaggaagaagactagttagcccaccgcccaattactggatccactcagcaccagaaacgtggacgtttggcttccttcgatgtcggcccatcttctgaagcggctgcagtcggaaaccgagcacgcaaagcttcctcatcttcccaagtagctaaagcatcatcgccttgagaccacttaatgaggacttgctgaatttgtttgcctccccgtagaatgacgcgtcgatcaagggcctgcaaagtaacctgaatgtgacttaaagtgtcagggtggatagtagcagaagaaggcaactgcaatttataggccactttgccaactctcgcaagaatcatatagggcccaaaaaacttgaagcttaacttgtgagcttccctaggcgccacagaggactgcacatatggttgcaacttgagataaaccatatcacccactacgaactccctctctgtccgttctttatcagcttgagatttaacccgttgttgggctcacaacaggtgttgctgaatgagcttaagcatcaactccctttgctgaagccaagtactaaggtctagttgagtagaagcatcagaaatattgagtcccagatggcgtggtgcccttccatacaacacttcaaaaggtgaacgccccaatgaagaatggtaggtcgtattgtactagtactcagctactgacaaccaagaagaccacttagaagggcaggcatgaacaaaactcctgagatatgttttcaaacactggttaacacgctccgtttgtccatctgtctgggggtgataggacgtgctcatcttcaatgtagtacctgacagccggaaaagctcttgccacagtcggctagtaaatattcgatcccggtatgtcacaattgaaacaggaagcccgtgcagtttgtaaacacagtccatgaatagctgagccacctttagtgcagagaaaggatgcagtaatgggaggaaatgactgtattttgaaaaggtatcaacgaccaccagaatggtgttggcattggcagaccttggaagaccttccacgaagtccatactaatcacctcccacgcttgcttgggaattggcaagggctgaagcaatcctgggtatttgctgcgatcaggcttggcttgttggcaggtagaacaagaactcacgtaccgcttgacaatagtcttcatagatggccaagaaaaaagttgtttaatttgggatatgtcactggaaaaccagaatgacccccaacagggctatcgtgtaatgccaacataatttgctgctgaagatgtatattattgccaacccatacacgacctttgtacctgatgatgcctgaattcaatgtataatgtcccgagtcattgggactaactgttaaggctaccagcaatttccgggcctgatcatctcccgtatacccctccataacctgaagcatccattgaggagtggctgaagacagactaaataattcagatgatggccgtcgtgacaatgcatcaatcgctccattgtcaatacccttcttgtacaccactttgtactgcagcccaattaacttggagaacacccgttgctgccacggtgtggtaagtcgttgttcagtaaggtgagacaagcttctatggtctgaatatatgaagaattcaccatgttgaaggtactgtcgccacttatcaacagccatgagtatggcgagatactccttttcataagtggataatccctgatttttgacaccaagtgctttgctcacatatgccaaggggtgatggtcttgtaacaacacagctccaatacccttactggaggcatcagtttcaattgcaaacggtttggcaaaattcggaagagctaaaacaggagctgataccagtgactgcttcaatgtctggaaggttgtttcatggatctgtgtccaaaggaacactaccccttttttcagtagatctgtaagtggtcgagcaatcactccaaaattcttaacaaacttcctataataccccgcaaggccgaggaatcctctaagttccttgcagttagctggtgttggccaagacgagacaactaccacttttgttgggtcggtagccactccattggggctaataacatgtccaagataagctatctgttgcttagcaaatgagcacttagtgagcttaatataccactgctctctttgtagaatctgaagaacttgtctcaaatggtgtatatgttcttcccaagttttgctatacaccaaaatgtcatcgaaaaataccaatacacttttccttagtagtggagcaagtgttgaattcatagcactctggaatgtggcaggtgctcctgatagaccaaagggcatgactctaaactcatagtaaccatggtgggtttgaaaagcagtcttgtgttggtctttatgactcatccttatctgatggaagctagctcgaag

SEQ ID NO: 8859 - DNA, 2712 bp, Zea Mays
cgcaggatcggtcatcctccttctctcctacctcgccggtggagagcttttcttgtgctagttggtctgtccgtctcgctgagcatctcgccatcgacgccggtcgagtcctcgcctccaacttcctcgtgctcggctcccagctcgcccaactttggtggtcgtcacgccccacctcgacccggagcaccgtgtcagcgacctagaaggtcaccagtctcttcgtcggagaaaaagcagaggaaacgagagaagacagacagagaaggaagaagactactgattacaaggcccaccgcccaattactggatccactcagcaccagaaacgtggacgtttggcttccttcgatgtcggcccatcttctgaagtcggaaaccgagcacgcaaagcttcctcatcttcccaagtagctaaagcatcatcgccttgagaccacttaatgaggacttgctgaatttgtttgcctccccgtagaatgacgcgtcgatcaagggcctgcaaagtaacctgaatgtgacttaaagtgtcagggtggatagtagcagaagaaggcaactgcaatttataggccactttgccaactctcgcaagaatcatatagggcccaaaaaacttgaagcttaacttgtgagcttccctaggcgccacagaggactgcacatatggttgcaacttgagataaaccatatcacccactacgaactccctctctgtccgttctttatcagcttgagatttaacccgttgttgggctcacaacaggtgttgctgaatgagcttaagcatcaactccctttgctgaagccaagtactaaggtctagttgagtagaagcatcagaaatattgagtcccagatggcgtggtgcccttccatacaacacttcaaaaggtgaacgccccaatgaagaatggtaggtcgtattgtactagtactcagctactgacaaccaagaagaccacttagaagggcaggcatgaacaaaactcctgagatatgttttcaaacactggttaacacgctccgtttgtccatctgtctgggggtgataggacgtgctcatcttcaatgtagtacctgacagccggaaaagctcttgccacagtcggctagtaaatattcgatcccggtatgtcacaattgaaacaggaagcccgtgcagtttgtaaacacagtccatgaatagctgagccacctttagtgcagagaaaggatgcagtaatgggaggaaatgactgtattttgaaaaggtatcaacgaccaccagaatggtgttggcattggcagaccttggaagaccttccacgaagtccatactaatcacctcccacgcttgcttgggaattggcaagggctgaagcaatcctgggtatttgctgcgatcaggcttggcttgttggcaggtagaacaagaactcacgtaccgcttgacaatagtcttcatagatggccaagaaaaaagttgtttaatttgggatatgtcactggaaaaccagaatgacccccaacagggctatcgtgtaatgccaacataatttgctgctgaagatgtatattattgccaacccatacacgacctttgtacctgatgatgcctgaattcaatgtataatgtcccgagtcattgggactaactgttaaggctaccagcaatttccgggcctgatcatctcccgtatacccctccataacctgaagcatccattgaggagtggctgaagacagactaaataattcagatgatggccgtcgtgacaatgcatcaatcgctccattgtcaatacccttcttgtacaccactttgtactgcagcccaattaacttggagaacacccgttgctgccacggtgtggtaagtcgttgttcagtaaggtgagacaagcttctatggtctgaatatatgaagaattcaccatgttgaaggtactgtcgccacttatcaacagccatgagtatggcgagatactccttttcataagtggataatccctgatttttgacaccaagtgctttgctcacatatgccaaggggtgatggtcttgtaacaacacagctccaatacccttactggaggcatcagtttcaattgcaaacggtttggcaaaattcggaagagctaaaacaggagctgataccagtgactgcttcaatgtctggaaggttgtttcatggatctgtgtccaaaggaacactaccccttttttcagtagatctgtaagtggtcgagcaatcactccaaaattcttaacaaacttcctataataccccgcaaggccgaggaatcctctaagttccttgcagttagctggtgttggccaagacgagacaactaccacttttgttgggtcggtagccactccattggggctaataacatgtccaagataagctatctgttgcttagcaaatgagcacttagtgagcttaatataccactgctctctttgtagaatctgaagaacttgtctcaaatggtgtatatgttcttcccaagttttgctatacaccaaaatgtcatcgaaaaataccaatacacttttccttagtagtggagcaagtgttgaattcatagcactctggaatgtggcaggtgctcctgatagaccaaagggcatgactctaaactcatagtaaccatggtgggtttgaaaagcagtcttgtgttggtctttatgactcatccttatctgatggaagctagctcgaag

SEQ ID NO: 8860 - DNA, 2484 bp, Zea Mays
cgcaggatcggtcatcctccttctctcctacctcgccggtggagagcttttcttgtgctagttggtctgtccgtctcgctgagcatctcgccatcgacgccggtcgagtcctcgcctccaacttcctcgtgctcggctcccagctcgcccaactttggtggtcgtcacgccccacctcgacccggagcaccgtgtcagcgacctagaaggtcaccagtctcttcgtcggagaaaaagcagaggaaacgagagaagacagacagagaaggaagaagactagttactgattacaaggcccaccgcccaattactggatccactcagcaccagaaacgtggacgtttggcttccttcgatgtcggcccatcttctgaagtcggaaaccgagcacgcaaagcttcctcatcttcccaagtagctaaagcatcatcgccttgagaccacttaatgaggacttgctgaatttgtttgcctccccgtagaatgacgcgtcgatcaagggcctgcaaagtaacctgaatgtgacttaaagtgtcaggtgttgctgaatgagcttaagcatcaactccctttgctgaagccaagtactaaggtctagttgagtagaagcatcagaaatattgagtcccagatggcgtggtgcccttccatacaacacttcaaaaggtgaacgccccaatgaagaatggtaggtcgtattgtactagtactcagctactgacaaccaagaagaccacttagaagggcaggcatgaacaaaactcctgagatatgttttcaaacactggttaacacgctccgtttgtccatctgtctgggggtgataggacgtgctcatcttcaatgtagtacctgacagccggaaaagctcttgccacagtcggctagtaaatattcgatcccggtatgtcacaattgaaacaggaagcccgtgcagtttgtaaacacagtccatgaatagctgagccacctttagtgcagagaaaggatgcagtaatgggaggaaatgactgtattttgaaaaggtatcaacgaccaccagaatggtgttggcattggcagaccttggaagaccttccacgaagtccatactaatcacctcccacgcttgcttgggaattggcaagggctgaagcaatcctgggtatttgctgcgatcaggcttggcttgttggcaggtagaacaagaactcacgtaccgcttgacaatagtcttcatagatggccaagaaaaaagttgtttaatttgggatatgtcactggaaaaccagaatgacccccaacagggctatcgtgtaatgccaacataatttgctgctgaagatgtatattattgccaacccatacacgacctttgtacctgatgatgcctgaattcaatgtataatgtcccgagtcattgggactaactgttaaggctaccagcaatttccgggcctgatcatctcccgtatacccctccataacctgaagcatccattgaggagtggctgaagacagactaaataattcagatgatggccgtcgtgacaatgcatcaatcgctccattgtcaatacccttcttgtacaccactttgtactgcagcccaattaacttggagaacacccgttgctgccacggtgtggtaagtcgttgttcagtaaggtgagacaagcttctatggtctgaatatatgaagaattcaccatgttgaaggtactgtcgccacttatcaacagccatgagtatggcgagatactccttttcataagtggataatccctgatttttgacaccaagtgctttgctcacatatgccaaggggtgatggtcttgtaacaacacagctccaatacccttactggaggcatcagtttcaattgcaaacggtttggcaaaattcggaagagctaaaacaggagctgataccagtgactgcttcaatgtctggaaggttgtttcatggatctgtgtccaaaggaacactaccccttttttcagtagatctgtaagtggtcgagcaatcactccaaaattcttaacaaacttcctataataccccgcaaggccgaggaatcctctaagttccttgcagttagctggtgttggccaagacgagacaactaccacttttgttgggtcggtagccactccattggggctaataacatgtccaagataagctatctgttgcttagcaaatgagcacttagtgagcttaatataccactgctctctttgtagaatctgaagaacttgtctcaaatggtgtatatgttcttcccaagttttgctatacaccaaaatgtcatcgaaaaataccaatacacttttccttagtagtggagcaagtgttgaattcatagcactctggaatgtggcaggtgctcctgatagaccaaagggcatgactctaaactcatagtaaccatggtgggtttgaaaagcagtcttgtgttggtctttatgactcatccttatctgatggaagctagctcgaag

SEQ ID NO: 8861 - DNA, 2914 bp, Zea Mays
cttacatgcgctcgcccttggccgcgtgtctttctcctccctcctctgccagcaccggcctcgccctggctatggtccgaccaacacctctgcgttgtctctgtgtctcggccggccgcgcgttccctgtccgtaccatcgccctctgtgtgcacggcaagctctccccttgtcgtttctcctctagctcgcaggatcggtcatcctccttctctcctacctcgccggtggagagcttttcttgtgctagttggtctgtccgtctcgctgagcatctcgccatcgacgccggtcgagtcctcgcctccaacttcctcgtgctcggctcccagctcgcccaactttggtggtcgtcacgccccacctcgacccggagcaccgtgtcagcgacctagaaggtcaccagtctcttcgtcggagaaaaagcagaggaaacgagagaagacagacagagaaggaagaagactagttactgattacaaggcccaccgcccaattactggatccactcagcaccagaaacgtggacgtttggcttccttcgatgtcggcccatcttctgaagcggctgcagtcggaaaccgagcacgcaaagcttcctcatcttcccaagtagctaaagcatcatcgccttgagaccacttaatgaggacttgctgaatttgtttgcctccccgtagaatgacgcgtcgatcaagggcctgcaaagtaacctgaatgtgacttaaagtgtcagggtggatagtagcagaagaaggcaactgcaatttataggccactttgccaactctcgcaagaatcatatagggcccaaaaaacttgaagcttaacttgtgagcttccctaggcgccacagaggactgcacatatggttgcaacttgagataaaccatatcacccactacgaactccctctctgtccgttctttatcagcttgagatttaacccgttgttgggctcacaacaggtgttgctgaatgagcttaagcatcaactccctttgctgaagccaagtactaaggtctagttgagtagaagcatcagaaatattgagtcccagatggcgtggtgcccttccatacaacacttcaaaaggtgaacgccccaatgaagaatggtaggtcgtattgtactagtactcagctactgacaaccaagaagaccacttagaagggcaggcatgaacaaaactcctgagatatgttttcaaacactggttaacacgctccgtttgtccatctgtctgggggtgataggacgtgctcatcttcaatgtagtacctgacagccggaaaagctcttgccacagtcggctagtaaatattcgatcccggtatgtcacaattgaaacaggaagcccgtgcagtttgtaaacacagtccatgaatagctgagccacctttagtgcagagaaaggatgcagtaatgggaggaaatgactgtattttgaaaaggtatcaacgaccaccagaatggtgttggcattggcagaccttggaagaccttccacgaagtccatactaatcacctcccacgcttgcttgggaattggcaagggctgaagcaatcctgggtatttgctgcgatcaggcttggcttgttggcaggtagaacaagaactcacgtaccgcttgacaatagtcttcatagatggccaagaaaaaagttgtttaatttgggatatgtcactggaaaaccagaatgacccccaacagggctatcgtgtaatgccaacataatttgctgctgaagatgtatattattgccaacccatacacgacctttgtacctgatgatgcctgaattcaatgtataatgtcccgagtcattgggactaactgttaaggctaccagcaatttccgggcctgatcatctcccgtatacccctccataacctgaagcatccattgaggagtggctgaagacagactaaataattcagatgatggccgtcgtgacaatgcatcaatcgctccattgtcaatacccttcttgtacaccactttgtactgcagcccaattaacttggagaacacccgttgctgccacggtgtggtaagtcgttgttcagtaaggtgagacaagcttctatggtctgaatatatgaagaattcaccatgttgaaggtactgtcgccacttatcaacagccatgagtatggcgagatactccttttcataagtggataatccctgatttttgacaccaagtgctttgctcacatatgccaaggggtgatggtcttgtaacaacacagctccaatacccttactggaggcatcagtttcaattgcaaacggtttggcaaaattcggaagagctaaaacaggagctgataccagtgactgcttcaatgtctggaaggttgtttcatggatctgtgtccaaaggaacactaccccttttttcagtagatctgtaagtggtcgagcaatcactccaaaattcttaacaaacttcctataataccccgcaaggccgaggaatcctctaagttccttgcagttagctggtgttggccaagacgagacaactaccacttttgttgggtcggtagccactccattggggctaataacatgtccaagataagctatctgttgcttagcaaatgagcacttagtgagcttaatataccactgctctctttgtagaatctgaagaacttgtctcaaatggtgtatatgttcttcccaagttttgctatacaccaaaatgtcatcgaaaaataccaatacacttttccttagtagtggagcaagtgttgaattcatagcactctggaatgtggcaggtgctcctgatagaccaaagggcatgactctaaactcatagtaaccatggtgggtttgaaaagcagtcttgtgttggtctttatgactcatccttatctgatggaagctagctcgaag

SEQ ID NO: 8862 - DNA, 1236 bp, Zea Mays
gctttgttgttgttgttggttgtctacttgttagtatcaaccattaaaatacatataaaagaaaatttactaggcaggatagtaaaatttcagacagaacgctggatagtaccttggactggacaaaccattgctcaggtgatgattttatggatcgccacattttggtttgtgggttcctggatagtgccattgttggctcatgctgctgggtttagcaaggaaacattgacgcacagaggccaggcactatacagtctcttgacagacataacagagggccttgccgggatcgcaatccttcaccaatgccttggtagattccgaccccttcctccagggtggttcgagttcaatctgaagggcaaatggcacttggacgtagcatttgggtgcctgctattcccactagttaatctactctcacacataaacatcagcctagttccagcgtcaccaggtccagctgttggggtttccagcgtagaacagtccatcgtggcccgggatccagtggcaatggctttgtatgctgtggtagtcacggtatgcgcgcctatatgggaagaaatcgtgttccgaggattccttctcccgtctctaacacggtacatgccactcccatggtcgatcctagcgagcgccgctgcgttcgcgctcgctcacttcaacgcacagagggtgatgccgctagtgtttcttggagtggtgatgggaggagtctttgcaaggtcgcgcaacctgctggcgtcgatggtgctgcacagcttgtggaatggatttgtgttcttggatttgatgaagtgagcagctgagctggagttattgtttcggttccaaccttggacatatctgcttgagcctcgtctgaaaatgttttggacaagattggttctattcttttttcaggattaaaagcaaggcatctaatgcagcggcggaacagaaggagtcgtgtaagtctgaagcgaagagggaacagttagtgcaggaaaatagaccacagaacagaagaaatgtttatttttttcagaattttgtgtagaatgatcagtcactgcagtcttaggacctgtgcccagcttccataagcatctgccacatttttgtaaattgcataggcgggagaatatttgtctcgtcgtgtatagaatcccccccccccttggaaaggagatatatatggtttcctgccattcaatgccatgctttaggggtggatattttaaaaccgaa

SEQ ID NO: 8863 - DNA, 1808 bp, Zea Mays
cttaggcctgcctcagccgcgtcgccgcgcccgcctcaggttgcccagcccccacgcgcgctgcgcctgcctcagtccccacgcgcgcccgccggcggccggcctcacgcctcagccctcaggcgctcaggctcagcagcgcctgcgccacgtgccgatgcgcgccctcctggccgccgcctccctgcttcgtggtgcctgcagcctgcctgtctggtgctagccgcgtcgccagagggatcaagaggcctggcctggagccgtcagcgtggtggcgcctcctccaccccacagcacccatgtcctccgcctcgtgcctcgtccatcccgctccaaggttccgggttcggctactgcctctcccctcctccgtcgccgcgaggccgttgcttggcttcaggcctcggtgtggggctccagcgaagggatgggcattgtggcacgtctcatgcttcagaaatggtcaggatgggccaacaacatctgacgaaggtgatgacttcaagtatgttgcccaatcacagagctctggtggtgcagaggtgaaaaaggaagaggtgagtagcttaaacggggatcaggagcagaatttgaaggatggcgattggttcctgcaactgcagaagataaaagaaaatttactaggcaggatagtaaaatttcagacagaacgctggatagtaccttggactggacaaaccattgctcaggtgatgattttatggatcgccacattttggtttgtgggttcctggatagtgccattgttggctcatgctgctgggtttagcaaggaaacattgacgcacagaggccaggcactatacagtctcttgacagacataacagagggccttgccgggatcgcaatccttcaccaatgccttggtagattccgaccccttcctccagggtggttcgagttcaatctgaagggcaaatggcacttggacgtagcatttgggtgcctgctattcccactagttaatctactctcacacataaacatcagcctagttccagcgtcaccaggtccagctgttggggtttccagcgtagaacagtccatcgtggcccgggatccagtggcaatggctttgtatgctgtggtagtcacggtatgcgcgcctatatgggaagaaatcgtgttccgaggattccttctcccgtctctaacacggtacatgccactcccatggtcgatcctagcgagcgccgctgcgttcgcgctcgctcacttcaacgcacagagggtgatgccgctagtgtttcttggagtggtgatgggaggagtctttgcaaggtcgcgcaacctgctggcgtcgatggtgctgcacagcttgtggaatggatttgtgttcttggatttgatgaagtgagcagctgagctggagttattgtttcggttccaaccttggacatatctgcttgagcctcgtctgaaaatgttttggacaagattggttctattcttttttcaggattaaaagcaaggcatctaatgcagcggcggaacagaaggagtcgtgtaagtctgaagcgaagagggaacagttagtgcaggaaaatagaccacagaacagaagaaatgtttatttttttcagaattttgtgtagaatgatcagtcactgcagtcttaggacctgtgcccagcttccataagcatctgccacatttttgtaaattgcataggcgggagaatatttgtctcgtcgtgtatagaatcccccccccccttggaaaggagatatatatggtttcctgccattcaatgccatgctttaggggtggatattttaaaaccgaa

SEQ ID NO: 8864 - DNA, 2167 bp, Zea Mays
cttcccagttcggcagttccctccctccctcctcgtcacctaatccgccccgtcgcccccggaagcttcaagaaggtggacggtcggagggacgggctacatggggggctgcttctggtagcttcggtcgcccgccgcgccgccgccagtggtggttgagtcctccgctaccgtgacagcctgcgagttcgccgtccgcccgtccgcgtcctgccgacctcatccacgccggcgccgcgcccgcctccgcgcccgcctccgcggaccgcatattcgttgtgacgccatcagctgcgccgcgcgtccttaggcctgcctcagccgcgtcgccgcgcccgcctcaggttgcccagcccccacgcgcgctgcgcctgcctcagtccccacgcgcgcccgccggcggccggcctcacgcctcagccctcaggcgctcaggctcagcagcgcctgcgccacgtgccgatgcgcgccctcctggccgccgcctccctgcttcgtggtgcctgcagcctgcctgtctggtgctagaccctcttttgatctgttcctggatctgccactgctccacggcattgtgcgaagccgcgtcgccagagggatcaagaggcctggcctggagccgtcagcgtggtggcgcctcctccaccccacagcacccatgtcctccgcctcgtgcctcgtccatcccgctccaaggttccgggttcggctactgcctctcccctcctccgtcgccgcgaggccgttgcttggcttcaggcctcggtgtggggctccagcgaagggatgggcattgtggcacgtctcatgcttcagaaatggtcaggatgggccaacaacatctgacgaaggtgatgacttcaagtatgttgcccaatcacagagctctggtggtgcagaggtgaaaaaggaagaggtgagtagcttaaacggggatcaggagcagaatttgaaggatggcgattggttcctgcaactgcagaagataaaagaaaatttactaggcaggatagtaaaatttcagacagaacgctggatagtaccttggactggacaaaccattgctcaggtgatgattttatggatcgccacattttggtttgtgggttcctggatagtgccattgttggctcatgctgctgggtttagcaaggaaacattgacgcacagaggccaggcactatacagtctcttgacagacataacagagggccttgccgggatcgcaatccttcaccaatgccttggtagattccgaccccttcctccagggtggttcgagttcaatctgaagggcaaatggcacttggacgtagcatttgggtgcctgctattcccactagttaatctactctcacacataaacatcagcctagttccagcgtcaccaggtccagctgttggggtttccagcgtagaacagtccatcgtggcccgggatccagtggcaatggctttgtatgctgtggtagtcacggtatgcgcgcctatatgggaagaaatcgtgttccgaggattccttctcccgtctctaacacggtacatgccactcccatggtcgatcctagcgagcgccgctgcgttcgcgctcgctcacttcaacgcacagagggtgatgccgctagtgtttcttggagtggtgatgggaggagtctttgcaaggtcgcgcaacctgctggcgtcgatggtgctgcacagcttgtggaatggatttgtgttcttggatttgatgaagtgagcagctgagctggagttattgtttcggttccaaccttggacatatctgcttgagcctcgtctgaaaatgttttggacaagattggttctattcttttttcaggattaaaagcaaggcatctaatgcagcggcggaacagaaggagtcgtgtaagtctgaagcgaagagggaacagttagtgcaggaaaatagaccacagaacagaagaaatgtttatttttttcagaattttgtgtagaatgatcagtcactgcagtcttaggacctgtgcccagcttccataagcatctgccacatttttgtaaattgcataggcgggagaatatttgtctcgtcgtgtatagaatcccccccccccttggaaaggagatatatatggtttcctgccattcaatgccatgctttaggggtggatattttaaaaccgaa

SEQ ID NO: 8865 - DNA, 1952 bp, Zea Mays
cttcccagttcggcagttccctccctccctcctcgtcacctaatccgccccgtcgcccccggaagcttcaagaaggtggacggtcggagggacgggctacatggggggctgcttctggtagcttcggtcgcccgccgcgccgccgccagaccctcttttgatctgttcctggatctgccactgctccacggcattgtgcgaagccgcgtcgccagagggatcaagaggcctggcctggagccgtcagcgtggtggcgcctcctccaccccacagcacccatgtcctccgcctcgtgcctcgtccatcccgctccaaggttccgggttcggctactgcctctcccctcctccgtcgccgcgaggccgttgcttggcttcaggcctcggtgtggggctccagcgaaggttggcgttcggaattggagtgatcagtgtatccagtttgttatatgaactgcaatgttgcttatcaactgactatgctatatgcttagtcgaccgttactcatggtcttcttttggtcttggaataatccggagcgtcttttctctttcctttgagcttatagggatgggcattgtggcacgtctcatgcttcagaaatggtcaggatgggccaacaacatctgacgaaggtgatgacttcaagtatgttgcccaatcacagagctctggtggtgcagaggtgaaaaaggaagaggtgagtagcttaaacggggatcaggagcagaatttgaaggatggcgattggttcctgcaactgcagaagataaaagaaaatttactaggcaggatagtaaaatttcagacagaacgctggatagtaccttggactggacaaaccattgctcaggtgatgattttatggatcgccacattttggtttgtgggttcctggatagtgccattgttggctcatgctgctgggtttagcaaggaaacattgacgcacagaggccaggcactatacagtctcttgacagacataacagagggccttgccgggatcgcaatccttcaccaatgccttggtagattccgaccccttcctccagggtggttcgagttcaatctgaagggcaaatggcacttggacgtagcatttgggtgcctgctattcccactagttaatctactctcacacataaacatcagcctagttccagcgtcaccaggtccagctgttggggtttccagcgtagaacagtccatcgtggcccgggatccagtggcaatggctttgtatgctgtggtagtcacggtatgcgcgcctatatgggaagaaatcgtgttccgaggattccttctcccgtctctaacacggtacatgccactcccatggtcgatcctagcgagcgccgctgcgttcgcgctcgctcacttcaacgcacagagggtgatgccgctagtgtttcttggagtggtgatgggaggagtctttgcaaggtcgcgcaacctgctggcgtcgatggtgctgcacagcttgtggaatggatttgtgttcttggatttgatgaagtgagcagctgagctggagttattgtttcggttccaaccttggacatatctgcttgagcctcgtctgaaaatgttttggacaagattggttctattcttttttcaggattaaaagcaaggcatctaatgcagcggcggaacagaaggagtcgtgtaagtctgaagcgaagagggaacagttagtgcaggaaaatagaccacagaacagaagaaatgtttatttttttcagaattttgtgtagaatgatcagtcactgcagtcttaggacctgtgcccagcttccataagcatctgccacatttttgtaaattgcataggcgggagaatatttgtctcgtcgtgtatagaatcccccccccccttggaaaggagatatatatggtttcctgccattcaatgccatgctttaggggtggatattttaaaaccgaa

SEQ ID NO: 8866 - DNA, 1792 bp, Zea Mays
cttcccagttcggcagttccctccctccctcctcgtcacctaatccgccccgtcgcccccggaagcttcaagaaggtggacggtcggagggacgggctacatggggggctgcttctggtagcttcggtcgcccgccgcgccgccgccaggtcaaccctcttttgatctgttcctggatctgccactgctccacggcattgtgcgaagccgcgtcgccagagggatcaagaggcctggcctggagccgtcagcgtggtggcgcctcctccaccccacagcacccatgtcctccgcctcgtgcctcgtccatcccgctccaaggttccgggttcggctactgcctctcccctcctccgtcgccgcgaggccgttgcttggcttcaggcctcggtgtggggctccagcgaagggatgggcattgtggcacgtctcatgcttcagaaatggtcaggatgggccaacaacatctgacgaaggtgatgacttcaagtatgttgcccaatcacagagctctggtggtgcagaggtgaaaaaggaagaggtgagtagcttaaacggggatcaggagcagaatttgaaggatggcgattggttcctgcaactgcagaagataaaagaaaatttactaggcaggatagtaaaatttcagacagaacgctggatagtaccttggactggacaaaccattgctcaggtgatgattttatggatcgccacattttggtttgtgggttcctggatagtgccattgttggctcatgctgctgggtttagcaaggaaacattgacgcacagaggccaggcactatacagtctcttgacagacataacagagggccttgccgggatcgcaatccttcaccaatgccttggtagattccgaccccttcctccagggtggttcgagttcaatctgaagggcaaatggcacttggacgtagcatttgggtgcctgctattcccactagttaatctactctcacacataaacatcagcctagttccagcgtcaccaggtccagctgttggggtttccagcgtagaacagtccatcgtggcccgggatccagtggcaatggctttgtatgctgtggtagtcacggtatgcgcgcctatatgggaagaaatcgtgttccgaggattccttctcccgtctctaacacggtacatgccactcccatggtcgatcctagcgagcgccgctgcgttcgcgctcgctcacttcaacgcacagagggtgatgccgctagtgtttcttggagtggtgatgggaggagtctttgcaaggtcgcgcaacctgctggcgtcgatggtgctgcacagcttgtggaatggatttgtgttcttggatttgatgaagtgagcagctgagctggagttattgtttcggttccaaccttggacatatctgcttgagcctcgtctgaaaatgttttggacaagattggttctattcttttttcaggattaaaagcaaggcatctaatgcagcggcggaacagaaggagtcgtgtaagtctgaagcgaagagggaacagttagtgcaggaaaatagaccacagaacagaagaaatgtttatttttttcagaattttgtgtagaatgatcagtcactgcagtcttaggacctgtgcccagcttccataagcatctgccacatttttgtaaattgcataggcgggagaatatttgtctcgtcgtgtatagaatcccccccccccttggaaaggagatatatatggtttcctgccattcaatgccatgctttaggggtggatattttaaaaccgaa

SEQ ID NO: 8867 - DNA, 1740 bp, Zea Mays
cacttccttcccagttcggcagttccctccctccctcctcgtcacctaatccgccccgtcgcccccggaagcttcaagaaggtggacggtcggagggacgggctacatggggggctgcttctggtagcttcggtcgcccgccgcgccgccgccagccgcgtcgccagagggatcaagaggcctggcctggagccgtcagcgtggtggcgcctcctccaccccacagcacccatgtcctccgcctcgtgcctcgtccatcccgctccaaggttccgggttcggctactgcctctcccctcctccgtcgccgcgaggccgttgcttggcttcaggcctcggtgtggggctccagcgaagggatgggcattgtggcacgtctcatgcttcagaaatggtcaggatgggccaacaacatctgacgaaggtgatgacttcaagtatgttgcccaatcacagagctctggtggtgcagaggtgaaaaaggaagaggtgagtagcttaaacggggatcaggagcagaatttgaaggatggcgattggttcctgcaactgcagaagataaaagaaaatttactaggcaggatagtaaaatttcagacagaacgctggatagtaccttggactggacaaaccattgctcaggtgatgattttatggatcgccacattttggtttgtgggttcctggatagtgccattgttggctcatgctgctgggtttagcaaggaaacattgacgcacagaggccaggcactatacagtctcttgacagacataacagagggccttgccgggatcgcaatccttcaccaatgccttggtagattccgaccccttcctccagggtggttcgagttcaatctgaagggcaaatggcacttggacgtagcatttgggtgcctgctattcccactagttaatctactctcacacataaacatcagcctagttccagcgtcaccaggtccagctgttggggtttccagcgtagaacagtccatcgtggcccgggatccagtggcaatggctttgtatgctgtggtagtcacggtatgcgcgcctatatgggaagaaatcgtgttccgaggattccttctcccgtctctaacacggtacatgccactcccatggtcgatcctagcgagcgccgctgcgttcgcgctcgctcacttcaacgcacagagggtgatgccgctagtgtttcttggagtggtgatgggaggagtctttgcaaggtcgcgcaacctgctggcgtcgatggtgctgcacagcttgtggaatggatttgtgttcttggatttgatgaagtgagcagctgagctggagttattgtttcggttccaaccttggacatatctgcttgagcctcgtctgaaaatgttttggacaagattggttctattcttttttcaggattaaaagcaaggcatctaatgcagcggcggaacagaaggagtcgtgtaagtctgaagcgaagagggaacagttagtgcaggaaaatagaccacagaacagaagaaatgtttatttttttcagaattttgtgtagaatgatcagtcactgcagtcttaggacctgtgcccagcttccataagcatctgccacatttttgtaaattgcataggcgggagaatatttgtctcgtcgtgtatagaatcccccccccccttggaaaggagatatatatggtttcctgccattcaatgccatgctttaggggtggatattttaaaaccgaa

SEQ ID NO: 8868 - DNA, 699 bp, Zea Mays
atgccgcgcgcattggatctgaatccactttacataacacaatcacgcttacgccaaatcagtggcgaaaccaagaatgtgcgcggcattgaggagatgaaggcgcatttgcctcgttcagcaatgccagacgagtcgacaaactccccgacccggcgccggcgcggcggaagagggctcagccgccgcaacggggcttgcgaaccgggagtgaagctagggtttggagggagactgctacagtggaaggaagaggagggcgacggggctgagggtgggggcggggatgcggagggcggcggcggcggatcggggccggcggtggcgatgcgggtgggggccgacagcgacgggtggaggagtaagagatgggcgggtgccacgcgaccgacgaggcacgggacggcactgactgacctggcggcggcgcggcgggcgaccgaagctaccagaagcagccacccatgtagcccgtccctccgaccgtccaccttcttgaagcttccgggagcgggggcgacggggcggattaggtggcgagaagggagggagggaactgccgaactgggaaggaagtggaactgtggaaggcgggatttgaaaaggcagagacgcgcctgctcgcgccgccacggtgcggatcgggtgctggtctggtttggtttgctcgggcccggcccacaggacgaagacaactag

SEQ ID NO: 8869 - DNA, 219 bp, Zea Mays
taccctcagttcagacggtgtcttcctcttcatccttggaaccaccggctgcctcccaatcaaagagccaccattcaaagcgggctcgacagcagcttgcgccattatagcatccaatcctctacatccacatcacaccctctggttccttgcttccccctaccttccactcagcctacaccaacacaggagcaaaaaaagggaggaaacccatgaaca

SEQ ID NO: 8870 - DNA, 245 bp, Zea Mays
cttcccaaggtttcttgcttttctcacagggaacacctctgtaacacgtgtgttgatgtacttggaaatcttttgttgctctgtgttccgaagtccattgtttgacctacaatacaagataatagtcacacacacaaaaagagagcatacgaggaacatgacaaggttaagaaagctacctatccaatgtggcagaaggtaacagatcatctccaagcttttcagaggtacgccgcttcagttgc

SEQ ID NO: 8871 - DNA, 141 bp, Zea Mays
ccagtctgcttctcatcgcctacatgaagctcagatacactccgcagagcattttcactgcatttctcaactttcttgaaacctggctttgcagcctccatggttggaactaaagtgtccaacttagcagtgtcaccatga

SEQ ID NO: 8872 - DNA, 179 bp, Zea Mays
acttcacagatgacgatgaaacaaactgcaaactagtctttaaggtaaaatccagaggagctttttccccaggaacagtgatcttagaagggcatatgtctgaaggcttcgacacagtaccaccaacttgtccattagggccgttgagcccagaagccacaaaagcatcacgagctcca

SEQ ID NO: 8873 - DNA, 204 bp, Zea Mays
agttgatgagagcatagcagatatgatagaggaaggcaacagcgattgtggatatacccatgactgtaaagcctttgagaatagaaattcctttttgctctcaagctttgagcactctaaattttgacacccacgaggacagctctgaccaatggctccagtgatgctacttctgccaaaacttgtattgagcttgtgacacct

SEQ ID NO: 8874 - DNA, 115 bp, Zea Mays
tcagaatgaactcacatgtttccgtagtaatgagcgtaggccacgtgtagattgtgataagtaggcattactagactgctttttctccaaacagcttccactaatgaagagagca

SEQ ID NO: 8875 - DNA, 2695 bp, Zea Mays
ccatccttcttcttcttcttgtttgcggtggatctttgcggggatttaatttgttggaactcggaacaaaccacgaaaggtgcaagcaagcttcgctgccttcctttctctctctctctctctctctcttggccggtgcggccgtgcaggtgcttccagtgcgacgatttgaatttgccggattcagttcagtgagctgctgttgatatactgtactcgagctggagctgtgttactctctgagatttcgcttgcgaagtttccagtccgtgtctcagtccccaatccaaacaggaacggaacggaacccatcccatcctctcagcccccaatccagacgcaatctaggttatgggtaaaggttgagaggaatctcagttgctaccgtctctagttccttcctctgctcggttgcttggcgttgggtcactgttggcaaggtgttgggtcgacgattggagctggcgtctacgtccttgttggcacagttgcgcgggagcattccgggccggcattgacgctttcatttctgatagccggaatagcagctgcgctttcagccttctgctatgcggagctggctagccgttgcccttcggcaggaagcgcctatcattattcgtacatctgcgttggcgaaggagttgcatggttgattggctgggctttgatacttgaatacacgattggtggatcagccgttgcccgtggcatttctcctaatctagccttattttttggaggacaggatagtctgccatggattttagcacgacatgagatcccatggcttgatgtcgttgtagatccttgtgcttctttcctcgttttcgtcgtcactggccttctctgtgtggggataaaagagagttcatttgtgcaaggagttgtgacggtcttaaattgctttgtgatgttatttgttatcatagccggtagctacatcggcttccaaacaggatgggttggctacaaggttgctggcggatttttcccttatggagcgaatggaatgcttgccgggtcagcaactgtcttcttcgcctacataggatttgattcagttgccagcacggctgaggaggtgaaaaatccacaacgagatctgccactgggaatcggaacagcattgtcgatttgctgttccttgtacatgttggtttcagttgttattgttggtctggtaccatactttgctatggacccagacacccctatttcatctgcttttgccaaacatgggatgcactgggcaatgtatcttgtaacaactggtgctgttcttgctctctgctcaaccttgatgggatctatattgccacagccaagaatattgatggccatggcacgagatggcctgctaccatcattcttctctgatgtccataagacgacacaagttccagtcaaaagcacagtagtgactggcatctgtgcagctgctcttgctttcttcatggatgtctctcaactggctggaatggttagtgtaggcacgctactcgcgttcactatagttgctgtgtccatcttgattcttagatacgttcctccagatgaggtacccctcccatcttccctgcaagcatcattccgcttgagccaagaaaatgacgaggaaaagctgaggggtacccttggagatgatgatcatgagcaaggctcagctgaaataagtgatgttgtagtagaaccaatcactgaccccctgatcgagaagcagctatacgcaagcaatttgagtgaggcaaaacggcgtaagaccgcggcatgcagcatcacatctgtttgcataggggttctgatcctcacgacgtcagcctcggcaacattcttgcccttcccggtgagatgctccgtttgtgttttgggtggcatgctcctcctagctggtctgggcatgctctgctggattgaccaagatgatgggaggcactcctttggccactccggaggattcatctgtccgtttgttcccttgctgccggtaatgtgtatcctcataaatacatacttgttaataaatcttggtggcggcacgtggatgcgagtgggggtgtggctagtgatgggggtgttcgtctacattttctatggccgcacccacagctcgttgacggatgtcgtgtatgtccctgtggccgaggcgaatgagatatacgggtcatcctcttcgttagggtttgtggcgtaaagagagatggaaggagatgtttgttgaagcctatcttgagccagtcatggtacttctcacaaaaacctcaaagatcctgactggagcaggtacctgcttgagctattgtgttgcaggcatgggtttgaagaattcaatttgtacgtcatatttttaaaatgtgtaaattgtaacgcacggctaagcttgtgtgtctctgttggaggaatgtaaatattagtatattgcatagaactatatataggtggtgccaatatacaggtgtttaaaaaaaagggggggggtcattctaggaatctgtatgttttactacgaacttgttctaaattcctaggaattcaaacaggcatgtctgaggcgtattatgtggttaaggcctcaaaggtccaaacacattttatttcatgttgaaatgaagattacacgagcagaaatgctcacggaaaaaacaatagtacatcaataattcagattcactgcaccaggtttccagcaccaggt

SEQ ID NO: 8876 - DNA, 2572 bp, Zea Mays
gcagtttactagttgtacacccataatgacccattctaccgtcatatacatacaccgttggcacgccatctaatcagcgaagaggagacgacgactgctctgcctttcttccctacaggaacaggacgaatcaatcaatcattcccctctgcagccgccggccctcagcaagcaagcaagggacagacgcggcggggatgggcagcggggtccgggcgctgatgcgccggaagcaggtagactccgagcggacgcgcgccgccggcagcgcccaccagctccgcaaggagctctccgtcacccagctcgtcgccatcggtgttgggtcgacgattggagctggcgtctacgtccttgttggcacagttgcgcgggagcattccgggccggcattgacgctttcatttctgatagccggaatagcagctgcgctttcagccttctgctatgcggagctggctagccgttgcccttcggcaggaagcgcctatcattattcgtacatctgcgttggcgaaggagttgcatggttgattggctgggctttgatacttgaatacacgattggtggatcagccgttgcccgtggcatttctcctaatctagccttattttttggaggacaggatagtctgccatggattttagcacgacatgagatcccatggcttgatgtcgttgtagatccttgtgcttctttcctcgttttcgtcgtcactggccttctctgtgtggggataaaagagagttcatttgtgcaaggagttgtgacggtcttaaattgctttgtgatgttatttgttatcatagccggtagctacatcggcttccaaacaggatgggttggctacaaggttgctggcggatttttcccttatggagcgaatggaatgcttgccgggtcagcaactgtcttcttcgcctacataggatttgattcagttgccagcacggctgaggaggtgaaaaatccacaacgagatctgccactgggaatcggaacagcattgtcgatttgctgttccttgtacatgttggtttcagttgttattgttggtctggtaccatactttgctatggacccagacacccctatttcatctgcttttgccaaacatgggatgcactgggcaatgtatcttgtaacaactggtgctgttcttgctctctgctcaaccttgatgggatctatattgccacagccaagaatattgatggccatggcacgagatggcctgctaccatcattcttctctgatgtccataagacgacacaagttccagtcaaaagcacagtagtgactggcatctgtgcagctgctcttgctttcttcatggatgtctctcaactggctggaatggttagtgtaggcacgctactcgcgttcactatagttgctgtgtccatcttgattcttagatacgttcctccagatgaggtacccctcccatcttccctgcaagcatcattccgcttgagccaagaaaatgacgaggaaaagctgaggggtacccttggagatgatgatcatgagcaaggctcagctgaaataagtgatgttgtagtagaaccaatcactgaccccctgatcgagaagcagctatacgcaagcaatttgagtgaggcaaaacggcgtaagaccgcggcatgcagcatcacatctgtttgcataggggttctgatcctcacgacgtcagcctcggcaacattcttgccctcccggtgagatgctccgtttgtgttttgggtggcatgctcctcctagctggtctgggcatgctctgctggattgaccaagatgatgggaggcactcctttggccactccggaggattcatctgtccgtttgttcccttgctgccggtaatgtgtatcctcataaatacatacttgttaataaatcttggtggcggcacgtggatgcgagtgggggtgtggctagtgatgggggtgttcgtctacattttctatggccgcacccacagctcgttgacggatgtcgtgtatgtccctgtggccgaggcgaatgagatatacgggtcatcctcttcgttagggtttgtggcgtaaagagagatggaaggagatgtttgttgaagcctatcttgagccagtcatggtacttctcacaaaaacctcaaagatcctgactggagcaggtacctgcttgagctattgtgttgcaggcatgggtttgaagaattcaatttgtacgtcatatttttaaaatgtgtaaattgtaacgcacggctaagcttgtgtgtctctgttggaggaatgtaaatattagtatattgcatagaactatatataggtggtgccaatatacaggtgtttaaaaaaaagggggggggtcattctaggaatctgtatgttttactacgaacttgttctaaattcctaggaattcaaacaggcatgtctgaggcgtattatgtggttaaggcctcaaaggtccaaacacattttatttcatgttgaaatgaagattacacgagcagaaatgctcacggaaaaaacaatagtacatcaataattcagattcactgcaccaggtttccagcaccaggt

SEQ ID NO: 8877 - DNA, 2529 bp, Zea Mays
gcagtttactagttgtacacccataatgacccattctaccgtcatatacatacaccgttggcacgccatctaatcagcgaagaggagacgacgactgctctgcctttcttccctacaggaacaggacgaatcaatcaatcattcccctctgcagccgccggccctcagcaagcaagcaagggacagacgcggcggggatgggcagcggggtccgggcgctgatgcgccggaagcaggtagactccgagcggacgcgcgccgccggcagcgcccaccagctccgcaaggagctctccgtcacccagctcgtcgccatcggtgttgggtcgacgattggagctggcgtctacgtccttgttggcacagttgcgcgggagcattccgggccggcattgacgctttcatttctgatagccggaatagcagctgcgctttcagccttctgctatgcggagctggctagccgttgcccttcggcaggaagcgcctatcattattcgtacatctgcgttggcgaaggagttgcatggttgattggctgggctttgatacttgaatacacgattggtggatcagccgttgcccgtggcatttctcctaatctagccttattttttggaggacaggatagtctgccatggattttagcacgacatgagatcccatggcttgatgtcgttgtagatccttgtgcttctttcctcgttttcgtcgtcactggccttctctgtgtggggataaaagagagttcatttgtgcaaggagttgtgacggtcttaaattgctttgtgatgttatttgttatcatagccggtagctacatcggcttccaaacaggatgggttggctacaaggttgctggcggatttttcccttatggagcgaatggaatgcttgccgggtcagcaactgtcttcttcgcctacataggatttgattcagttgccagcacggctgaggaggtgaaaaatccacaacgagatctgccactgggaatcggaacagcattgtcgatttgctgttccttgtacatgttggtttcagttgttattgttggtctggtaccatactttgctatggacccagacacccctatttcatctgcttttgccaaacatgggatgcactgggcaatgtatcttgtaacaactggtgctgttcttgctctctgctcaaccttgatgggatctatattgccacagccaagaatattgatggccatggcacgagatggcctgctaccatcattcttctctgatgtccataagacgacacaagttccagtcaaaagcacagtagtgactggcatctgtgcagctgctcttgctttcttcatggatgtctctcaactggctggaatggttagtgtaggcacgctactcgcgttcactatagttgctgtgtccatcttgattcttagatacgttcctccagatgaggtacccctcccatcttccctgcaagcatcattccgcttgagccaagaaaatgacgaggaaaagctgaggggtacccttggagatgatgatcatgagcaaggctcagctgaaataagtgatgttgtagtagaaccaatcactgaccccctgatcgagaagcagctatacgcaagcaatttgagtgaggcaaaacggcgtaagaccgcggcatgcagcatcacatctgtttgcataggggttctgatcctcacgacgtcagcctcggcaacattcttgcccttcccggtgagatgctccgtttgtgttttgggtggcatgctcctcctagctggtctgggcatgctctgctggattgaccaagatgatgggaggcactcctttggccactccggaggattcatctgtccgtttgttcccttgctgccgtggcggcacgtggatgcgagtgggggtgtggctagtgatgggggtgttcgtctacattttctatggccgcacccacagctcgttgacggatgtcgtgtatgtccctgtggccgaggcgaatgagatatacgggtcatcctcttcgttagggtttgtggcgtaaagagagatggaaggagatgtttgttgaagcctatcttgagccagtcatggtacttctcacaaaaacctcaaagatcctgactggagcaggtacctgcttgagctattgtgttgcaggcatgggtttgaagaattcaatttgtacgtcatatttttaaaatgtgtaaattgtaacgcacggctaagcttgtgtgtctctgttggaggaatgtaaatattagtatattgcatagaactatatataggtggtgccaatatacaggtgtttaaaaaaaagggggggggtcattctaggaatctgtatgttttactacgaacttgttctaaattcctaggaattcaaacaggcatgtctgaggcgtattatgtggttaaggcctcaaaggtccaaacacattttatttcatgttgaaatgaagattacacgagcagaaatgctcacggaaaaaacaatagtacatcaataattcagattcactgcaccaggtttccagcaccaggt

SEQ ID NO: 8878 - DNA, 2500 bp, Zea Mays
gcagtttactagttgtacacccataatgacccattctaccgtcatatacatacaccgttggcacgccatctaatcagcgaagaggagacgacgactgctctgcctttcttccctacaggaacaggacgaatcaatcaatcattcccctctgcagccgccggccctcagcaagcaagcaagggacagacgcggcggggatgggcagcggggtccgggcgctgatgcgccggaagcaggtagactccgagcggacgcgcgccgccggcagcgcccaccagctccgcaaggagctctccgtcacccagctcgtcgccatcggtgttgggtcgacgattggagctggcgtctacgtccttgttggcacagttgcgcgggagcattccgggccggcattgacgctttcatttctgatagccggaatagcagctgcgctttcagccttctgctatgcggagctggctagccgttgcccttcggcaggaagcgcctatcattattcgtacatctgcgttggcgaaggagttgcatggttgattggctgggctttgatacttgaatacacgattggtggatcagccgttgcccgtggcatttctcctaatctagccttattttttggaggacaggatagtctgccatggattttagcacgacatgagatcccatggcttgatgtcgttgtagatccttgtgcttctttcctcgttttcgtcgtcactggccttctctgtgtggggataaaagagagttcatttgtgcaaggagttgtgacggtcttaaattgctttgtgatgttatttgttatcatagccggtagctacatcggcttccaaacaggatgggttggctacaaggttgctggcggatttttcccttatggagcgaatggaatgcttgccgggtcagcaactgtcttcttcgcctacataggatttgattcagttgccagcacggctgaggaggtgaaaaatccacaacgagatctgccactgggaatcggaacagcattgtcgatttgctgttccttgtacatgttggtttcagttgttattgttggtctggtaccatactttgctatggacccagacacccctatttcatctgcttttgccaaacatgggatgcactgggcaatgtatcttgtaacaactggtgctgttcttgctctctgctcaaccttgatgggatctatattgccacagccaagaatattgatggccatggcacgagatggcctgctaccatcattcttctctgatgtccataagacgacacaagttccagtcaaaagcacagtagtgactggcatctgtgcagctgctcttgctttcttcatggatgtctctcaactggctggaatgatgaggtacccctcccatcttccctgcaagcatcattccgcttgagccaagaaaatgacgaggaaaagctgaggggtacccttggagatgatgatcatgagcaaggctcagctgaaataagtgatgttgtagtagaaccaatcactgaccccctgatcgagaagcagctatacgcaagcaatttgagtgaggcaaaacggcgtaagaccgcggcatgcagcatcacatctgtttgcataggggttctgatcctcacgacgtcagcctcggcaacattcttgcccttcccggtgagatgctccgtttgtgttttgggtggcatgctcctcctagctggtctgggcatgctctgctggattgaccaagatgatgggaggcactcctttggccactccggaggattcatctgtccgtttgttcccttgctgccggtaatgtgtatcctcataaatacatacttgttaataaatcttggtggcggcacgtggatgcgagtgggggtgtggctagtgatgggggtgttcgtctacattttctatggccgcacccacagctcgttgacggatgtcgtgtatgtccctgtggccgaggcgaatgagatatacgggtcatcctcttcgttagggtttgtggcgtaaagagagatggaaggagatgtttgttgaagcctatcttgagccagtcatggtacttctcacaaaaacctcaaagatcctgactggagcaggtacctgcttgagctattgtgttgcaggcatgggtttgaagaattcaatttgtacgtcatatttttaaaatgtgtaaattgtaacgcacggctaagcttgtgtgtctctgttggaggaatgtaaatattagtatattgcatagaactatatataggtggtgccaatatacaggtgtttaaaaaaaagggggggggtcattctaggaatctgtatgttttactacgaacttgttctaaattcctaggaattcaaacaggcatgtctgaggcgtattatgtggttaaggcctcaaaggtccaaacacattttatttcatgttgaaatgaagattacacgagcagaaatgctcacggaaaaaacaatagtacatcaataattcagattcactgcaccaggtttccagcaccaggt

SEQ ID NO: 8879 - DNA, 2552 bp, Zea Mays
gcagtttactagttgtacacccataatgacccattctaccgtcatatacatacaccgttggcacgccatctaatcagcgaagaggagacgacgactgctctgcctttcttccctacaggaacaggacgaatcaatcaatcattcccctctgcagccgccggccctcagcaagcaagcaagggacagacgcggcggggatgggcagcggggtccgggcgctgatgcgccggaagcaggtagactccgagcggacgcgcgccgccggcagcgcccaccagctccgcaaggagctctccgtcacccagctcgtcgccatcggtgttgggtcgacgattggagctggcgtctacgtccttgttggcacagttgcgcgggagcattccgggccggcattgacgctttcatttctgatagccggaatagcagctgcgctttcagccttctgctatgcggagctggctagccgttgcccttcggcaggaagcgcctatcattattcgtacatctgcgttggcgaaggagttgcatggttgattggctgggctttgatacttgaatacacgattggtggatcagccgttgcccgtggcatttctcctaatctagatagtctgccatggattttagcacgacatgagatcccatggcttgatgtcgttgtagatccttgtgcttctttcctcgttttcgtcgtcactggccttctctgtgtggggataaaagagagttcatttgtgcaaggagttgtgacggtcttaaattgctttgtgatgttatttgttatcatagccggtagctacatcggcttccaaacaggatgggttggctacaaggttgctggcggatttttcccttatggagcgaatggaatgcttgccgggtcagcaactgtcttcttcgcctacataggatttgattcagttgccagcacggctgaggaggtgaaaaatccacaacgagatctgccactgggaatcggaacagcattgtcgatttgctgttccttgtacatgttggtttcagttgttattgttggtctggtaccatactttgctatggacccagacacccctatttcatctgcttttgccaaacatgggatgcactgggcaatgtatcttgtaacaactggtgctgttcttgctctctgctcaaccttgatgggatctatattgccacagccaagaatattgatggccatggcacgagatggcctgctaccatcattcttctctgatgtccataagacgacacaagttccagtcaaaagcacagtagtgactggcatctgtgcagctgctcttgctttcttcatggatgtctctcaactggctggaatggttagtgtaggcacgctactcgcgttcactatagttgctgtgtccatcttgattcttagatacgttcctccagatgaggtacccctcccatcttccctgcaagcatcattccgcttgagccaagaaaatgacgaggaaaagctgaggggtacccttggagatgatgatcatgagcaaggctcagctgaaataagtgatgttgtagtagaaccaatcactgaccccctgatcgagaagcagctatacgcaagcaatttgagtgaggcaaaacggcgtaagaccgcggcatgcagcatcacatctgtttgcataggggttctgatcctcacgacgtcagcctcggcaacattcttgcccttcccggtgagatgctccgtttgtgttttgggtggcatgctcctcctagctggtctgggcatgctctgctggattgaccaagatgatgggaggcactcctttggccactccggaggattcatctgtccgtttgttcccttgctgccggtaatgtgtatcctcataaatacatacttgttaataaatcttggtggcggcacgtggatgcgagtgggggtgtggctagtgatgggggtgttcgtctacattttctatggccgcacccacagctcgttgacggatgtcgtgtatgtccctgtggccgaggcgaatgagatatacgggtcatcctcttcgttagggtttgtggcgtaaagagagatggaaggagatgtttgttgaagcctatcttgagccagtcatggtacttctcacaaaaacctcaaagatcctgactggagcaggtacctgcttgagctattgtgttgcaggcatgggtttgaagaattcaatttgtacgtcatatttttaaaatgtgtaaattgtaacgcacggctaagcttgtgtgtctctgttggaggaatgtaaatattagtatattgcatagaactatatataggtggtgccaatatacaggtgtttaaaaaaaagggggggggtcattctaggaatctgtatgttttactacgaacttgttctaaattcctaggaattcaaacaggcatgtctgaggcgtattatgtggttaaggcctcaaaggtccaaacacattttatttcatgttgaaatgaagattacacgagcagaaatgctcacggaaaaaacaatagtacatcaataattcagattcactgcaccaggtttccagcaccaggt

SEQ ID NO: 8880 - DNA, 1211 bp, Zea Mays
ctaagctagcgcgttccttccttttttcctccctcgcttcctgttgctcggtccagctgctccgccacatgctcgacaggatgcggccggaggacgtgggcctgagcccggacctgagcttcttcagggctcgagacgccacacgtggcggtggcaccccgaccataacgcacacgacgatatacaaatgcccgaatttctcgatggtcatcctcttcctgccgcgaaacgcggtgatcccgctccacaaccaccctgggatgacggtgttcagcaagctgctcctggggtcgatgcacgtcaagtcgtacgactggctcaacactgctgaccccgatccttcttccgccacgagcaccaccagctcttcgtcctccgatggcccatgcctgaggctggcagaactggtggtggacgacgtcttcacggcgccgtgcgacacctccgtgctgtacccgacggcgggagggaacatgcaccggttcaccgccatggcgccctgcgcgatcctcgacgtcctcgggcccccctactccatagaggaggacagggactgcacgtactacgcggaattaccgtacgcacaccactcgctggtggctgcgggcgaggacgtggagcggggccagggccaaggccatctggcgtggcttgaggagatcgacatgccgagagagctcaagatgtgcagcgtccactatggtggaccgccgatctccgacgagtgacgtcgccggccgtctccctcactggttgtactatgtctaactgatcgcggcagagccgtgccgccgccgttgtgtatagcaggcagcagcaagccataggctgtagttacacgaagtcccgatcgattacaatgtttcttgctggcctgcatcgttgttctctagatgccctttctttcttgttatttttgtttctactactactacaagtagacgatgttttgtcctgatgatgaatgatacagataagtcatatatatccacatatttcatttttgtcgtttgggctattctggtcatagtttgtgcgtgttgcgccattttgtccaaatattttcatattatatctaatgtaggtaattcttatggatttcgtagcaacgtgggcacgcacttattgtggtgactatactcatcagcaaatatagcaagtctaatttatcaaaaacaaggagatatagactttgaaatattgaaggaaac

SEQ ID NO: 8881 - DNA, 1224 bp, Zea Mays
ctagttgccttgactgcctgcctcgtcttaccaccaagctaagctagcgcgttccttccttttttcctccctcgcttcctgttgctcgacaggatgcggccggaggacgtgggcctgagcccggacctgagcttcttcagggctcgagacgccacacgtggcggtggcaccccgaccataacgcacacgacgatatacaaatgcccgaatttctcgatggtcatcctcttcctgccgcgaaacgcggtgatcccgctccacaaccaccctgggatgacggtgttcagcaagctgctcctggggtcgatgcacgtcaagtcgtacgactggctcaacactgctgaccccgatccttcttccgccacgagcaccaccagctcttcgtcctccgatggcccatgcctgaggctggcagaactggtggtggacgacgtcttcacggcgccgtgcgacacctccgtgctgtacccgacggcgggagggaacatgcaccggttcaccgccatggcgccctgcgcgatcctcgacgtcctcgggcccccctactccatagaggaggacagggactgcacgtactacgcggaattaccgtacgcacaccactcgctggtggctgcgggcgaggacgtggagcggggccagggccaaggccatctggcgtggcttgaggagatcgacatgccgagagagctcaagatgtgcagcgtccactatggtggaccgccgatctccgacgagtgacgtcgccggccgtctccctcactggttgtactatgtctaactgatcgcggcagagccgtgccgccgccgttgtgtatagcaggcagcagcaagccataggctgtagttacacgaagtcccgatcgattacaatgtttcttgctggcctgcatcgttgttctctagatgccctttctttcttgttatttttgtttctactactactacaagtagacgatgttttgtcctgatgatgaatgatacagataagtcatatatatccacatatttcatttttgtcgtttgggctattctggtcatagtttgtgcgtgttgcgccattttgtccaaatattttcatattatatctaatgtaggtaattcttatggatttcgtagcaacgtgggcacgcacttattgtggtgactatactcatcagcaaatatagcaagtctaatttatcaaaaacaaggagatatagactttgaaatattgaaggaaac

SEQ ID NO: 8882 - DNA, 1862 bp, Zea Mays
ccgtcaccccctcctccgctccgcctcctgtttatagtcgcctgctgtcgcggcccctttttccttccaccacccaccggccaccaccctccgcgcttgcctagttgccttgactgcctgcctcgtcttaccaccaagctaagctagcgcgttccttccttttttcctccctcgcttcctgttgctcggtccatggaggtggcggcggccgcgacggcgggcgcgggggttgtggagctgcagctcgacctactcgaggcggcggcgccgacggagcgagaggccaagaggcgccgggtgcacccggttccagcgggcccaccggccggggcagcagcgccgggacgccgcagctgcagccgcaggcgccgcgccgtgcagcgtctcttccaggcctgccgccacgtcttccggggccccggcaccgtgcccagtcccggcgaggtccagctgctccgccacatgctcggtgagccatgcacgacccgactcaaaaaaaactagaacatttcgtaattttcagcgatcgatctggaacgaactggttgtcatggaccggcatggcctccgcgtactctgttcaatttcactagcactagcacttagctgctctgcttatactgaatctgaattcctgtacagaatagtatgcatccatcaatcatgcacctgtttcgtgcatgcgtttactgaaaaacctcaactccttctcctaccaaaatgcagacaggatgcggccggaggacgtgggcctgagcccggacctgagcttcttcagggctcgagacgccacacgtggcggtggcaccccgaccataacgcacacgacgatatacaaatgcccgaatttctcgatggtcatcctcttcctgccgcgaaacgcggtgatcccgctccacaaccaccctgggatgacggtgttcagcaagctgctcctggggtcgatgcacgtcaagtcgtacgactggctcaacactgctgaccccgatccttcttccgccacgagcaccaccagctcttcgtcctccgatggcccatgcctgaggctggcagaactggtggtggacgacgtcttcacggcgccgtgcgacacctccgtgctgtacccgacggcgggagggaacatgcaccggttcaccgccatggcgccctgcgcgatcctcgacgtcctcgggcccccctactccatagaggaggacagggactgcacgtactacgcggaattaccgtacgcacaccactcgctggtggctgcgggcgaggacgtggagcggggccagggccaaggccatctggcgtggcttgaggagatcgacatgccgagagagctcaagatgtgcagcgtccactatggtggaccgccgatctccgacgagtgacgtcgccggccgtctccctcactggttgtactatgtctaactgatcgcggcagagccgtgccgccgccgttgtgtatagcaggcagcagcaagccataggctgtagttacacgaagtcccgatcgattacaatgtttcttgctggcctgcatcgttgttctctagatgccctttctttcttgttatttttgtttctactactactacaagtagacgatgttttgtcctgatgatgaatgatacagataagtcatatatatccacatatttcatttttgtcgtttgggctattctggtcatagtttgtgcgtgttgcgccattttgtccaaatattttcatattatatctaatgtaggtaattcttatggatttcgtagcaacgtgggcacgcacttattgtggtgactatactcatcagcaaatatagcaagtctaatttatcaaaaacaaggagatatagactttgaaatattgaaggaaac

SEQ ID NO: 8883 - DNA, 1612 bp, Zea Mays
tggctccccgtcaccccctcctccgctccgcctcctgtttatagtcgcctgctgtcgcggcccctttttccttccaccacccaccggccaccaccctccgcgcttgcctagttgccttgactgcctgcctcgtcttaccaccaagctaagctagcgcgttccttccttttttcctccctcgcttcctgttgctcggtccatggaggtggcggcggccgcgacggcgggcgcgggggttgtggagctgcagctcgacctactcgaggcggcggcgccgacggagcgagaggccaagaggcgccgggtgcacccggttccagcgggcccaccggccggggcagcagcgccgggacgccgcagctgcagccgcaggcgccgcgccgtgcagcgtctcttccaggcctgccgccacgtcttccggggccccggcaccgtgcccagtcccggcgaggtccagctgctccgccacatgctcgacaggatgcggccggaggacgtgggcctgagcccggacctgagcttcttcagggctcgagacgccacacgtggcggtggcaccccgaccataacgcacacgacgatatacaaatgcccgaatttctcgatggtcatcctcttcctgccgcgaaacgcggtgatcccgctccacaaccaccctgggatgacggtgttcagcaagctgctcctggggtcgatgcacgtcaagtcgtacgactggctcaacactgctgaccccgatccttcttccgccacgagcaccaccagctcttcgtcctccgatggcccatgcctgaggctggcagaactggtggtggacgacgtcttcacggcgccgtgcgacacctccgtgctgtacccgacggcgggagggaacatgcaccggttcaccgccatggcgccctgcgcgatcctcgacgtcctcgggcccccctactccatagaggaggacagggactgcacgtactacgcggaattaccgtacgcacaccactcgctggtggctgcgggcgaggacgtggagcggggccagggccaaggccatctggcgtggcttgaggagatcgacatgccgagagagctcaagatgtgcagcgtccactatggtggaccgccgatctccgacgagtgacgtcgccggccgtctccctcactggttgtactatgtctaactgatcgcggcagagccgtgccgccgccgttgtgtatagcaggcagcagcaagccataggctgtagttacacgaagtcccgatcgattacaatgtttcttgctggcctgcatcgttgttctctagatgccctttctttcttgttatttttgtttctactactactacaagtagacgatgttttgtcctgatgatgaatgatacagataagtcatatatatccacatatttcatttttgtcgtttgggctattctggtcatagtttgtgcgtgttgcgccattttgtccaaatattttcatattatatctaatgtaggtaattcttatggatttcgtagcaacgtgggcacgcacttattgtggtgactatactcatcagcaaatatagcaagtctaatttatcaaaaacaaggagatatagactttgaaatattgaaggaaac

SEQ ID NO: 8884 - DNA, 2446 bp, Zea Mays
ctacagtttagttcatcctgtttgcagcatttacggttgttcatttgatcttgcactggctgtactgctcaattaattagcttgtaaatgagaaactgccatggttggttgcggtttcgttgaaaaattattcaggtttttggatgctattccgttctagagcttccagaatccaaggagatattgttttccctgcatccctgttttggactataagacgtactttgtggttgtcgtttagttaatcgcttttctattcggtattcatttcatcgcgttccagctgtaacgcttaactagattgcactaactgagaaactgatgtagttgtttgctgtttgttttcaaattattcagtttttgagtggtattctgatgtcaaacttccagaattcaaggatatattcttcgcattccttttgtcacattttttctgtttttatgacatgctttgcggttgttgtttagttcattctgtgtgtagcatttaacaccattcattccgttgtgcacagactgtaacacaaaagaaaaagattgtaactgagaaactgccatagcggtttctgctggcacattgacaactgtaaatgcaggatgtttctgttcaaatatctccttttggcaaatttatttccataaatccctacatgatccccatgcttcatgattttggttatgagaatttggtctatattagtatttgttgttatagaatctgttggagaggagagcttgattactcttccttgcctcggaagtcttaccggaacaatcggcatcagagtggcttttcacatttttataggccctagaactagaaattctgctcatgcttttatccttgttatagatgggcagccctagtcccaatgagtcactagtttggtgttcgaagcagcctctccgtatttgtgggggaagcgcttttctaggcctcactcatgtatagcaggagcttaaaactgaactgttggtagctctgttcttaaggcgtcgcctaggcgtccaggcggtggtcaaacgcctaggcgccttgcccgcctacctcgcctaggcgtcgcctaggcgccgcctaggcgtccaggcggtgctccaacgccttggaccgccttaccgctttaaaaacccgtttccatgccatgtcattctttgcttcgcaggagagtgacgagagcaacacagaatggctctctggttacgtagaggactgcttttcgagctccacgtcgtacacaaatcccgtctctgcaatggcaagcgagggtgtcggaaaaccaaagctacctccaccaccatcctccaacggcaggagaaagaaacggagcttggcctccgtcatgaccaacggcgactaccaacaattcgtcctcccgctgtacgtcgagccaccgctgatcctgatcgaccagaaacactggatggcagagagcgagctgatccaccccaagaaggacgacgacgaccgagaggtttgccagcaacaagggcaggagcaagagaagggcgtgccgcggctggtgaagatgtgcagcaactgtctgtcaagccaaacgccacggtggagggacgggccgtcggggcgccagatgatgtgcagcgcatgcggcatgaggctcaagccagagaccaggttgtcagccgagcagcagtgcggccaggaagaacccaccaggaaggagcaagagccagacaggaagaggaagaaggcggccaagaagacgtgctacgagagcagcgacgccccgccgtcgtcggaccagcaagagaagcggtgcgcccactgcctgtcctccaagaccccgcagtggagggcggggcctctggggcccaagaccctgtgcaacgcctgcggcgtcaggttcaagtccggcagtgaggccgacgtctcccggaatctatcgttggaagcgcgttaggggatctcttagatcgtagcttagtcgatgctcagagaggatgagaacagagactttggttatagtagtagtaggcaatcgtcgttagctctagcggtgttctagctcagactgatttgctcggtgtttttagacgtcggattcaatacaatctcgatgttgtcctgaattgtgctatgggttttcggtccattagatgttcaaggtttcaattgggaactcggtgtttaaagagaattgctatgaaaaggcatcagttcctggaagatctggggttgtacgttgcctggcgcgatctcgtcccagaatcaatggcgcgtttttctggcaccaagacctccaggtgcagtgctttgctttgctctgaaccaatggcagcaggttcagaacacaggtatctgcaggtcaaggtcgtccaagtatctgctaccaagctgcctttgggaggcagaacgcaacgatgggacgcaaaagtactcgtcttcgtcctggtgttgaattggagttcaagctaggtttaaactttg

SEQ ID NO: 8885 - DNA, 1085 bp, Zea Mays
tacgaagggccggcaaaggtattaaattcggaagcgtgtgcattcggtcgtactgactgttgtgctcaaggttggcatgtcctgtgagggctgtgttggagctgtcaagcgggtcctcggcaagatggaaggcgtcgagtcctacgacgtagacatcatggaacagaaggtcaccgtgaagggcaatgtgacacctgacgccgtcctgcaaactgtttccaagactggcaagaagacttcgttctgggaggctgaggccgtgacaagtgaatccgccacacctgccggtgccaccgcctgacaggttcgatgatctggaagtgcccggcaaggcggcaaagaaaaaaaatgtgaatgtatttagcttggatctgttacaaataattgcaaactgctagctcggtctgtacattttacagttgctattcgtgtactgtgatgttctcgtaagtttggggagatgataaaccaatatttgtatgatatatgtgtcgtgttccataaggtaaggttttgacggtgtgctatcatcacctgaggtgactttagcatcaccaggctacttcaactcggttaccccattcccatggctccatgcctggtatgatggtcccgtccaattgccagatcctcgtctatccagcgaaagcatttctttgtgggaatgagaaaaattacattcttggagatggagacactgttcaagaattgcactttattgtttctgggatggagaaagggggtatttgggtttggataatttcacgtgcaataatgcagagggacggatgaattggagatggtattgtgacagcacagcgctagcaacgttgatatagattgcgagaagaaacaaatgaaggttgcgggctcaggctagcagaagatgcctctccctaggctctactctactagctttcattgcattgcatggtcctggaacgtcctcctgtcgacagcgtagtactcctacgccgttcggtggggggtacacctctaaacctctaggagggataccatgcctgccgccttgttggaatgttggacctggtcctgctctggtattgactactgcattttttgtc

SEQ ID NO: 8886 - DNA, 1374 bp, Zea Mays
tgcttctctcttgagtctcattcacccccttctcccaaaaccctaacccctagacttcccaatatggcgtcgcatcccccattagccgtcgtggcatccggatcgcagccgccacggatccagttggcagcatcagccccgcggtcgtgtccaccacactgccggtggtcgtcgtcaagttcgagacgccgttcatgctcttggcccaacctgccgcgacgctccaactgggtacgcgacgtacttgtccatcttggagaagcccccgccgtgacctctgccgcaccctcaacacccctccccgcgcgtgataggatctgggagcggcaagaggtcgccccccatcttcagcaacgagctcgtaccttccccttcctcccctccccaccaccatcacaccgccaagcgtgcccactgcttactcgtttgtttttttacaagttcagatccacaagcatactcacatagtgaacatacccacatgattttgttatgcacatgtgtaaccagcataagaattaggagcaagctttaatgtttatgctcattttatctatgaaattcttacactaaaaatgcatgtgctattcttgcttgagaataacagaatctatttatcttatacttttttcataggttgttattgtcaaaccaaattatgtgcctatataagttgcacttatggattatgcgttcgagtataaattgcacctgcattttggtatgtcgttgcttattttggtaatttatcatcctattctttctctttgtgttcattatgtgcgccctcatttctgcttctatgaccctgcatgttctcgatggtgttcaataaggatttggtcatcagcaatgatgtgttttaagtttctcttctcttgtatgtccacgtgcatcgactcaggggccaaaatcttttcgccgcataacaacagtggcattcttgatgtaggggatatcgagttaatgtctttcattgaagcatcaggaacttctgtctcgttcatgctagtcttgtttcagatctaaatgtagacgaaaactaagcctactgctacacaacatattgttcgaggacttgggttagtacctgatgttttagcatgttgcagcactgagccattggaggaacatgtgaaggccaagctttcacaattttgccatgtcccattaatgataatgatcgtcccattacaaggccccttttgagtttttacccttgttcttgtgttgacaacacaacttgtgtagcaggtctcaaatatagtgaacctccatgacgtgacaaacatttggcacatccccttactgctaaggtttggtcaaatcttgctggcgaggatggcatcccacattggatgatgcgacaggcag

SEQ ID NO: 8887 - DNA, 3834 bp, Zea Mays
ctacacacttggccttccatggcatcacaaatgttgcaagagctatatgaactttgcattttgtacctatatatatatatatgttgagcgaaactctgaaatattggaggaaaccaaaacaccatgtttcgccttccacgtgtagaattgataagtaacatgataatgaatgtcaaattattacaacaaaacaactatattgctcctgcatcgtctccaaaaaactcaaactctatgatttatacgttttcgctaacctactaattgatttatactcttcacactaatttagattattaaccaagagaactagctatcaccatttctaaatccactatttgttttcttttaaaactcaatgctgaaaggagattaacagagacgacatctatggcaacttatgcgttctcctgcagatgtaatacgtgctcacgttcggcacccaaatgcccgtagaccatggtcaaggtgagggacgacgtaaaccttcccatctatcagggtgaaaacatcaacgacaagacatttgacgagaagagtcatgtcttggacccatacaagatgctttaggagtacacccaattcactgtcatgctcaacctactctacgccttctccaccggcggctactccaacattcagcgcgtcacgcagtggaaacttgatgtcaccgaacatagcaagtagggtgacatgtgaaataaaatcttccattcaccgagttgatttattctataattttattgcttgaccacaatagccttaggatttattgtctgaccatattttttcactatgaaagacgtggcgtatagtcatagtaagagttcaataaaatttcctgtttgatgagctacatccccacgtatattgtcacaacccaaccaagttatcggacccacgtaccccaatccttgccatcaaggcttcagatagatacttaagtggatcagataacttactcggggtgccgagtttcgatgaacttgttcaattccaaggaccattcatccaaagttgcaaatattacaataatcatacatgaacataactttaaacacatgagttgagcggaagactttgcactaaggtaatagacattaagtaactgttaagtatacaaaaccaagtagtatttattattacatgcccgaggtagagtttaagtgctaacttattacatcaactatcaagaaaccatcttcccgcagtacacacataatgcacataagtaaaagtcgccattatgagtttaacaaaactcatacgtgttgatagtttctcctgcagcaacaatgggaataaaaccctgagtatgggattactcagcaagactgacccgactaaagaaaagactctcaagggtatgctggatttaaaaggattcaaggtaaggctcatcaagtttcaaagaatcatttttgcagaaaagcttactagtagtggatccttatgccaaaattttacttcacaagttaagtagccttaatctagatttgcctaatctagagcattcacgtgtcctactctagcttcattttagcagctttagtttcgcttgttaactacgatgcagggcagtgatccagtcttcatatccgagaagtaacggcgatccaaatcgattaatactcagctgaggatatccaaccacacgacatatgtagcacttaacacttgcatatctcaactcgccatcgggtttctcaagaccagaacgggttcacgcgacccgagaccacaacaccccaccattcagccacctgcctggtgggcacacgttactctcgccatctctccactcctagtgtgtgcgagctattctggtattggtccgaccgaggctaagcttacccatgatgaggcatgtggccagttaaagagtcctagatcaggaggccaacaatcggaatggtccttaatcaacacagatggatgacctttcctgctcaacgtctggtctccccttaaattatttctgaaaacctggtacctgtctgaggtaccctactaaatgcatgaagttatcaaggcctttgataccttcataactccagcctctttttctttgtaaaaacatgattcatagattaaaacattttgttcttagtctatgagcatactaagcacatctagctttttaaaataggtatcaaggatggtaatcaatagttcaaggaagttatgcaacaaaggtttaatcattcaactcctaccacacctaatgcagcatataagtgataaaagtttaaaacatcaagaaggtggcaaatgcaccagggcttgccttggtgaggaggagagtcgggctcttctacaaggatattgcagttagcagcaaatccaaatgggacaccctccggggggacctttagtgacatcctcagttggagaagtttcggatggaggaacattctctctttccacttccacttcaaattcttcttcaaggtgctctacaagtcaattcgaagtatatgaatgctcatgtaatgcgatgctatgaaaactcctacaagggagatgtggaatgccccattacttttaagtacatatatagttattatacctatagctttaggttacctaatgttggcttaaagtggtcaaactaaatctatttcaaagtatcaaagaatatatactctaaggcttgccaatatcgatgtttgacattgtgtgtgactcaggtttgatcccactctaaattagtattaaagattagggtgttttaaatactcatacttggttagtttctggttttctaagtaaataaattccaaacaggctcaaaatttgatcaggagttattccgaaggtatataaatttctcacaaatttctatgatttttggacctagggttttatttctaaattttttttaatcctcatatgggtactttaaaatgactaaaaatttatttattacaacaaaaatcctacctttttttaaccgaagctacataattgtgtggactctacaaaatttgtttggtcacgttttcatctctctatcaatttttttatgctgtacaagttgttagcaaaaataataaaggaaaaaccctaaacagtaatgggccgatttcagcctaacgacgacccacaccggccgagcatgcgtgccgactgccaccagcggacgtgcgttcaccttgcacttgaccccctagggttcaccataattggaaccagcgaacgcactgttccagaaagtcagaaaacttcacaaaatttcccttgtcttctatgaaattcacaaactcacgtcccctcaccccaccgttcaccgaaacgcgcctaaagctttgggtatcgtagattacgactgcgacactaacaacctcgattataaagcatgtttccccaagacgacgacggagcctacccgaaggcatacggctgcccaggcccagtggcgtacccgcaaccgtatccaggaccatacggcggcaccacggtgtttcagtaaaaaaaattgaaatatatagatccataagcttcactgttgtctataaaattcgaaatacaaaagcaggaacatataactgggatgaaccggactaaccgtatgaagggatttgtgtggactcggcgttggtcagcgagggtgagatcgtagagtgaacttggtgaaggtaatcaatcgagtgggagttatcctagcactgctagctataaagccgagtgcaccataggaacatacatgggctctgtgaacacaaacgcgagagtggaactacctgtgcatacatgatacagtcagtttggctaataaccagggaggctatcagtgcttttaccgagctccataaaacaccgagggactacagg

SEQ ID NO: 8888 - DNA, 473 bp, Zea Mays
gacaagctgggagctgcatgcagtgcaggcggatcataaacacggagcacgcacctgtgttgtttcttcttttagcttcagcaaaaatcagatgccgtcgtccacgtccgcctccggcgccgtagggctagggcggcgacagcctcccaatcccattgcagcagtaggggggcttagaagaagcgatagcagcagatggtggtgggcgagattaatggagaagaactacagtgatgctgagagatttctcgcaaggaggccggaagagaggctgatcaacgattacctgctgcttgagtccgccgcacggaaggtcgccaccggcctcgcgtacctgttgctgacgtggtccaccgtcgtcctccttggtggcttcgtctccgtgctcaagctcatcgacttttggtgtctcgctgccattagcacgtcatttgcagtcaaattgaatatcgtcgggtttacttacgttgttg

SEQ ID NO: 8889 - DNA, 1028 bp, Zea Mays
cttttgagtggctaatgaaagatctcgaaattacaattcagaagataggaatgatccaggtggaagctccaggaacaatcccattcagtttgatgtaaatttaatgaaaccagtaaatgtagatggcaacattggtggtgataatgcagaggctagcatgtctagaactggtgaaggaaggcatctgccaagcaatgaacctttgtccaccaatggtaaagatttaggtgtgggttctgcagacaatgggcaacctcaacaaatcaggaaaggacgtggttttactcagaagtatgggtatgcacgccgatataggacgccatctcccgagcgtccctctgtttgaccccgctacgatggagggagagatgatagatggaacaatttcaataggtatgaaagaaatggtccttacagtagacgctcgccagtaaggagataccatggctcgccaagagccaatagcccatccaggttcgttaaactttaaagaaacaacatgtttcttcccaactattattttatccttatttatgtattgtttaattccatagggtataatagtataagtttgtttttaggatccaatctgctcattgtaaatagtcagttggaagccattgctaattggttgtaattcctaaattattcaaactattattattctacgtcgatgccaatgcccaacgcccaacgtcatttcctaataagattgttttcatctgttgtagtactacccaagcctcaaccgttcaaagtgttgctcgaaggggatatgtacagtgttttctttaaatgaaaccgactcatactactcggcctacacagtgcccattctgcaaaacgcccaattatgctgtggagtatcgtggcatcaaaacaaaggagtaaaggagcatagagcagtttacagacaattgaaaaagagaattgatcttttttatgggcgaagtgttgaagatggctttggtgaaggaaatgtcttgttagcatcaagtaagtggcgacatcacaacccctacaagctt

SEQ ID NO: 8890 - DNA, 1224 bp, Zea Mays
actctgcatagcaccgatccgactcatctctatttcgattccatccgctccgtcctggcaatcactttgggaaggtggtcagtggaatagctttgcttaaaaagcttgaagcagttggtagtgaaactggaaatccttcttatcaagtgaaaattgtagactgtggtgaagtttccaacacaaattctcaggatccgctaaagggagataaagtaagctcaaagacagataacagcagttcagacagtgaaaagggtggccatcgtaccaagcgttccttaccgaaaggaatgatccaggtggaagctccaggaacaatcccattcagtttgatgtaaatttaatgaaaccagtaaatgtagatggcaacattggtggtgataatgcagaggctagcatgtctagaactggtgaaggaaggcatctgccaagcaatgaacctttgtccaccaatggtaaagatttaggtgtgggttctgcagacaatgggcaacctcaacaaatcaggaaaggacgtggttttactcagaagtatgggtatgcacgccgatataggacgccatctcccgagcgtccctctgtttgaccccgctacgatggagggagagatgatagatggaacaatttcaataggtatgaaagaaatggtccttacagtagacgctcgccagtaaggagataccatggctcgccaagagccaatagcccatccaggttcgttaaactttaaagaaacaacatgtttcttcccaactattattttatccttatttatgtattgtttaattccatagggtataatagtataagtttgtttttaggatccaatctgctcattgtaaatagtcagttggaagccattgctaattggttgtaattcctaaattattcaaactattattattctacgtcgatgccaatgcccaacgcccaacgtcatttcctaataagattgttttcatctgttgtagtactacccaagcctcaaccgttcaaagtgttgctcgaaggggatatgtacaggtgcccattctgcaaaacgcccaattatgctgtggagtatcgtggcatcaaaacaaaggagtaaaggagcatagagcagtttacagacaattgaaaaagagaattgatcttttttatgggcgaagtgttgaagatggctttggtgaaggaaatgtcttgttagcatcaagtaagtggcgacatcacaacccctacaagctt

SEQ ID NO: 8891 - DNA, 1149 bp, Zea Mays
gtaagctctacccgtctcgcttgggttgctcgagaccaccaagtccatgcctaaacccaaccttttttccattatatttatatgtacaatactacaatttcaagtccatccggatagtcctggttggattttttcgatactctgcatagcaccgatccgactcatctctatttcgattccatccgctccgtcctggcaatcactttgggaaggtggtcagtggaatagctttgcttaaaaagcttgaagcagttggtagtgaaactggaaatccttcttatcaagtgaaaattgtagactgtggtgaagtttccaacacaaattctcaggatccgctaaagggagataaagtaagctcaaagacagataacagcagttcagacagtgaaaagggtggccatcgtaccaagcgttccttaccgaaaggaatgatccaggtggaagctccaggaacaatcccattcagtttgatgtaaatttaatgaaaccagtaaatgtagatggcaacattggtggtgataatgcagaggctagcatgtctagaactggtgaaggaaggcatctgccaagcaatgaacctttgtccaccaatggtaaagatttaggtgtgggttctgcagacaatgggcaacctcaacaaatcaggaaaggacgtggttttactcagaagtatgggtatgcacgccgatataggacgccatctcccgagcgtccctctgtttgaccccgctacgatggagggagagatgatagatggaacaatttcaataggtatgaaagaaatggtccttacagtagacgctcgccagtaaggagataccatggctcgccaagagccaatagcccatccagtactacccaagcctcaaccgttcaaagtgttgctcgaaggggatatgtacagtgttttctttaaatgaaaccgactcatactactcggcctacacagtgcccattctgcaaaacgcccaattatgctgtggagtatcgtggcatcaaaacaaaggagtaaaggagcatagagcagtttacagacaattgaaaaagagaattgatcttttttatgggcgaagtgttgaagatggctttggtgaaggaaatgtcttgttagcatcaagtaagtggcgacatcacaacccctacaagctt

SEQ ID NO: 8892 - DNA, 1105 bp, Zea Mays
gtaagctctacccgtctcgcttgggttgctcgagaccaccaagtccatgcctaaacccaaccttttttccattatatttatatgtacaatactacaatttcaagtccatccggatagtcctggttggattttttcgatactctgcatagcaccgatccgactcatctctatttcgattccatccgctccgtcctggcaatcactttgggaaggtggtcagtggaatagctttgcttaaaaagcttgaagcagttggtagtgaaactggaaatccttcttatcaagtgaaaattgtagactgtggtgaagtttccaacacaaattctcaggatccgctaaagggagataaagtaagctcaaagacagataacagcagttcagacagtgaaaagggtggccatcgtaccaagcgttccttaccgaaaggaatgatccaggtggaagctccaggaacaatcccattcagtttgatgtaaatttaatgaaaccagtaaatgtagatggcaacattggtggtgataatgcagaggctagcatgtctagaactggtgaaggaaggcatctgccaagcaatgaacctttgtccaccaatggtaaagatttaggtgtgggttctgcagacaatgggcaacctcaacaaatcaggaaaggacgtggttttactcagaagtatgggtatgcacgccgatataggacgccatctcccgagcgtccctctgtttgaccccgctacgatggagggagagatgatagatggaacaatttcaataggtatgaaagaaatggtccttacagtagacgctcgccagtaaggagataccatggctcgccaagagccaatagcccatccagtactacccaagcctcaaccgttcaaagtgttgctcgaaggggatatgtacaggtgcccattctgcaaaacgcccaattatgctgtggagtatcgtggcatcaaaacaaaggagtaaaggagcatagagcagtttacagacaattgaaaaagagaattgatcttttttatgggcgaagtgttgaagatggctttggtgaaggaaatgtcttgttagcatcaagtaagtggcgacatcacaacccctacaagctt

SEQ ID NO: 8893 - DNA, 1358 bp, Zea Mays
agctgcactgcagcacacgcgccaccgaagcgctctgcccacctcgctcccctccagtggccgccagcgcggctcagcggtccatcctcctgacgccacctgcaacggcgtcaggcggtgatccattccaactcgcgctccgtcctggcaatcactttgggaaggtggtcagtggaatagctttgcttaaaaagcttgaagcagttggtagtgaaactggaaatccttcttatcaagtgaaaattgtagactgtggtgaagtttccaacacaaattctcaggatccgctaaagggagataaagtaagctcaaagacagataacagcagttcagacagtgaaaagggtggccatcgtaccaagcgttccttaccgaaaggaatgatccaggtggaagctccaggaacaatcccattcagtttgatgtaaatttaatgaaaccagtaaatgtagatggcaacattggtggtgataatgcagaggctagcatgtctagaactggtgaaggaaggcatctgccaagcaatgaacctttgtccaccaatggtaaagatttaggtgtgggttctgcagacaatgggcaacctcaacaaatcaggaaaggacgtggttttactcagaagtatgggtatgcacgccgatataggacgccatctcccgagcgtccctctgtttgaccccgctacgatggagggagagatgatagatggaacaatttcaataggtatgaaagaaatggtccttacagtagacgctcgccagtaaggagataccatggctcgccaagagccaatagcccatccaggttcgttaaactttaaagaaacaacatgtttcttcccaactattattttatccttatttatgtattgtttaattccatagggtataatagtataagtttgtttttaggatccaatctgctcattgtaaatagtcagttggaagccattgctaattggttgtaattcctaaattattcaaactattattattctacgtcgatgccaatgcccaacgcccaacgtcatttcctaataagattgttttcatctgttgtagtactacccaagcctcaaccgttcaaagtgttgctcgaaggggatatgtacagtgttttctttaaatgaaaccgactcatactactcggcctacacagtgcccattctgcaaaacgcccaattatgctgtggagtatcgtggcatcaaaacaaaggagtaaaggagcatagagcagtttacagacaattgaaaaagagaattgatcttttttatgggcgaagtgttgaagatggctttggtgaaggaaatgtcttgttagcatcaagtaagtggcgacatcacaacccctacaagctt

SEQ ID NO: 8894 - DNA, 863 bp, Zea Mays
agctgcactgcagcacacgcgccaccgaagcgctctgcccacctcgctcccctccagtggccgccagcgcggctcagcggtccatcctcctgacgccacctgcaacggcgtcaggcggtgatccattccaactcgcgctccgtcctggcaatcactttgggaaggtggtcagtggaatagctttgcttaaaaagcttgaagcagttggtagtgaaactggaaatccttcttatcaagtgaaaattgtagactgtggtgaagtttccaacacaaattctcaggatccgctaaagggagataaagtaagctcaaagacagataacagcagttcagacagtgaaaagggtggccatcgtaccaagcgttccttaccgaaagacaatgggcaacctcaacaaatcaggaaaggacgtggttttactcagaagtatgggtatgcacgccgatataggacgccatctcccgagcgtccctctgtttgaccccgctacgatggagggagagatgatagatggaacaatttcaataggtatgaaagaaatggtccttacagtagacgctcgccagtaaggagataccatggctcgccaagagccaatagcccatccagtactacccaagcctcaaccgttcaaagtgttgctcgaaggggatatgtacaggtgcccattctgcaaaacgcccaattatgctgtggagtatcgtggcatcaaaacaaaggagtaaaggagcatagagcagtttacagacaattgaaaaagagaattgatcttttttatgggcgaagtgttgaagatggctttggtgaaggaaatgtcttgttagcatcaagtaagtggcgacatcacaacccctacaagctt

SEQ ID NO: 8895 - DNA, 1330 bp, Zea Mays
ctccctcttcacccgcagctgcactgcagcacacgcgccaccgaagcgctctgcccacctcgctcccctccagtggccgccagcgcggctcagcggtccatcctcctgacgccacctgcaacggcgtcaggcggtgatccattccaactcgcgctccgtcctggcaatcactttgggaaggtggtcagtggaatagctttgcttaaaaagcttgaagcagttggtagtgaaactggaaatccttcttatcaagtgaaaattgtagactgtggtgaagtttccaacacaaattctcaggatccgctaaagggagataaagtaagctcaaagacagataacagcagttcagacagtgaaaagggtggccatcgtaccaagcgttccttaccgaaaggaatgatccaggtggaagctccaggaacaatcccattcagtttgatgtaaatttaatgaaaccagtaaatgtagatggcaacattggtggtgataatgcagaggctagcatgtctagaactggtgaaggaaggcatctgccaagcaatgaacctttgtccaccaatggtaaagatttaggtgtgggttctgcagacaatgggcaacctcaacaaatcaggaaaggacgtggttttactcagaagtatgggtatgcacgccgatataggacgccatctcccgagcgtccctctgtttgaccccgctacgatggagggagagatgatagatggaacaatttcaataggtatgaaagaaatggtccttacagtagacgctcgccagtaaggagataccatggctcgccaagagccaatagcccatccaggttcgttaaactttaaagaaacaacatgtttcttcccaactattattttatccttatttatgtattgtttaattccatagggtataatagtataagtttgtttttaggatccaatctgctcattgtaaatagtcagttggaagccattgctaattggttgtaattcctaaattattcaaactattattattctacgtcgatgccaatgcccaacgcccaacgtcatttcctaataagattgttttcatctgttgtagtactacccaagcctcaaccgttcaaagtgttgctcgaaggggatatgtacaggtgcccattctgcaaaacgcccaattatgctgtggagtatcgtggcatcaaaacaaaggagtaaaggagcatagagcagtttacagacaattgaaaaagagaattgatcttttttatgggcgaagtgttgaagatggctttggtgaaggaaatgtcttgttagcatcaagtaagtggcgacatcacaacccctacaagctt

SEQ ID NO: 8896 - DNA, 947 bp, Zea Mays
gaacgacggtggaaccctggtctcctccctcttcacccgcagctgcactgcagcacacgcgccaccgaagcgctctgcccacctcgctcccctccagtggccgccagcgcggctcagcggtccatcctcctgacgccacctgcaacggcgtcaggcggtgatccattccaactcgcgctccgtcctggcaatcactttgggaaggtggtcagtggaatagctttgcttaaaaagcttgaagcagttggtagtgaaactggaaatccttcttatcaagtgaaaattgtagactgtggtgaagtttccaacacaaattctcaggatccgctaaagggagataaagtaagctcaaagacagataacagcagttcagacagtgaaaagggtggccatcgtaccaagcgttccttaccgaaagacaatgggcaacctcaacaaatcaggaaaggacgtggttttactcagaagtatgggtatgcacgccgatataggacgccatctcccgagcgtccctctgtttgaccccgctacgatggagggagagatgatagatggaacaatttcaataggtatgaaagaaatggtccttacagtagacgctcgccagtaaggagataccatggctcgccaagagccaatagcccatccagtactacccaagcctcaaccgttcaaagtgttgctcgaaggggatatgtacagtgttttctttaaatgaaaccgactcatactactcggcctacacagtgcccattctgcaaaacgcccaattatgctgtggagtatcgtggcatcaaaacaaaggagtaaaggagcatagagcagtttacagacaattgaaaaagagaattgatcttttttatgggcgaagtgttgaagatggctttggtgaaggaaatgtcttgttagcatcaagtaagtggcgacatcacaacccctacaagctt

SEQ ID NO: 8897 - DNA, 1144 bp, Zea Mays
ctcgagttgtgtacggctacggcccactaggcatgatcgacccaacagaacgacggtggaaccctggtctcctccctcttcacccgcagctgcactgcagcacacgcgccaccgaagcgctctgcccacctcgctcccctccagtggccgccagcgcggctcagcggtccatcctcctgacgccacctgcaacggcgtcaggcggtgatccattccaactcgcgctccgtcctggcaatcactttgggaaggtggtcagtggaatagctttgcttaaaaagcttgaagcagttggtagtgaaactggaaatccttcttatcaagtgaaaattgtagactgtggtgaagtttccaacacaaattctcaggatccgctaaagggagataaagtaagctcaaagacagataacagcagttcagacagtgaaaagggtggccatcgtaccaagcgttccttaccgaaaggaatgatccaggtggaagctccaggaacaatcccattcagtttgatgtaaatttaatgaaaccagtaaatgtagatggcaacattggtggtgataatgcagaggctagcatgtctagaactggtgaaggaaggcatctgccaagcaatgaacctttgtccaccaatggtaaagatttaggtgtgggttctgcagacaatgggcaacctcaacaaatcaggaaaggacgtggttttactcagaagtatgggtatgcacgccgatataggacgccatctcccgagcgtccctctgtttgaccccgctacgatggagggagagatgatagatggaacaatttcaataggtatgaaagaaatggtccttacagtagacgctcgccagtaaggagataccatggctcgccaagagccaatagcccatccagtactacccaagcctcaaccgttcaaagtgttgctcgaaggggatatgtacaggtgcccattctgcaaaacgcccaattatgctgtggagtatcgtggcatcaaaacaaaggagtaaaggagcatagagcagtttacagacaattgaaaaagagaattgatcttttttatgggcgaagtgttgaagatggctttggtgaaggaaatgtcttgttagcatcaagtaagtggcgacatcacaacccctacaagctt

SEQ ID NO: 8898 - DNA, 1188 bp, Zea Mays
ctcgagttgtgtacggctacggcccactaggcatgatcgacccaacagaacgacggtggaaccctggtctcctccctcttcacccgcagctgcactgcagcacacgcgccaccgaagcgctctgcccacctcgctcccctccagtggccgccagcgcggctcagcggtccatcctcctgacgccacctgcaacggcgtcaggcggtgatccattccaactcgcgctccgtcctggcaatcactttgggaaggtggtcagtggaatagctttgcttaaaaagcttgaagcagttggtagtgaaactggaaatccttcttatcaagtgaaaattgtagactgtggtgaagtttccaacacaaattctcaggatccgctaaagggagataaagtaagctcaaagacagataacagcagttcagacagtgaaaagggtggccatcgtaccaagcgttccttaccgaaaggaatgatccaggtggaagctccaggaacaatcccattcagtttgatgtaaatttaatgaaaccagtaaatgtagatggcaacattggtggtgataatgcagaggctagcatgtctagaactggtgaaggaaggcatctgccaagcaatgaacctttgtccaccaatggtaaagatttaggtgtgggttctgcagacaatgggcaacctcaacaaatcaggaaaggacgtggttttactcagaagtatgggtatgcacgccgatataggacgccatctcccgagcgtccctctgtttgaccccgctacgatggagggagagatgatagatggaacaatttcaataggtatgaaagaaatggtccttacagtagacgctcgccagtaaggagataccatggctcgccaagagccaatagcccatccagtactacccaagcctcaaccgttcaaagtgttgctcgaaggggatatgtacagtgttttctttaaatgaaaccgactcatactactcggcctacacagtgcccattctgcaaaacgcccaattatgctgtggagtatcgtggcatcaaaacaaaggagtaaaggagcatagagcagtttacagacaattgaaaaagagaattgatcttttttatgggcgaagtgttgaagatggctttggtgaaggaaatgtcttgttagcatcaagtaagtggcgacatcacaacccctacaagctt

SEQ ID NO: 8899 - DNA, 5465 bp, Zea Mays
gatgaagccggcgccatcgttaagcacaaggctcgcttggtggcacgtggtttcttacagcaggaggggatcgacttcgacgatgctttcgcccctgtggcacggatggaatccgtgcgactcctccttgcattgccagcccaggagggctggcacgttcatcacatggacgtcaagtcagtatttcttaacggcgacttaaaggaggaggtctacgaacaccagccgccaggttttgcgatccctggcaaggagggcaaggtgttgcgcctgcgcaaggctctctatggcctgcgataggcaccgagggtgtggaatgccaagctggattccatgctcaaaggaatgggcttcacgccaagcccgcacgaggcggccatctatcggcggggcaatggaggaagtgccctgctagtgggtgtctacgtcgacgacttggtgatcaccggcgccaaggatgcagaggtggcagcgttcaaggaagagatgaaggccaccttccaaatgagtgacctggggcatctctcctacctggggattgaggtgcaccagggagactccaggatcacacttcgccagaccacctacgtcaagcgcattgttgagctggctgggctcatcgactgcaacccagctctcactccgatggaggagaggctgaagctgagtcgcgatagcacgacggaggaggtggacgctacacagtaccggcgtcttgtggggagccttcgctacctcgtccacacacgacctgacttggcatactccgtcggctacgttagtcggtttctgcagcgaccgacgacggagcatgagcaggctgtgaagaggatcatccgctatgttgcggggactctcgaccacggtctctactacccgaggtgccctggggaggcacaccttgttgggtacagcgacagcgaccacgccggtggcatcgacactagcaagagcacaagcgagatcctcttcttcctcagcaagtgcctcattagctggcagtcggtcaagcagcaggtggtggcaatgtccagctgcgaggccaagtacatagcggtctccactgcttcgactcaggcgctctggctggctcgattgctcggtgatctcctcgggagagacactggagcggtggaactcagggtggacagccagtccgctctagcattggccaagaaccctgtgttcaatgaacggagcaagcacatctgggtgagataccacttcatccgagactgcttggcagaagggagcatcaagacgcgctacatcagcaccaaggatcagcttgcagacctgctcaccaagccccttgggaggatcaagtttcttgagctttgctccaggtccgggatggcccaactttcccacaagacgacgcccaagacttagggggggaatgatggaataagtcttgagcatctagaggacaacataagatttttgactgtcctctttagtctctttagcatctagaggatagcaggagctttttgactgccctctttagtctctttagcatctagaggacagcaggagctttttgactgtcctctttagtctcttttagcttttagcatctagagaacaatcctgttgtgtagtatgttgtgtagtgtgttgtgtagcctctagggctataaatatgtgtctccaacccttagatgggtatgacatttgagtagagtgtgagaaataaacgaaaattgccccaactcgtagtgtcatcctctgaataagagttagagtccctctacttacagtgtcaccctagtctactgtgataacattgatgttgtgtatctctctagcaacccagtgcagcattagcacacaaagcgtgttgagatagatcttcactttgtccaggagagggttgtcgtcggccacatttgcatacttcatgttcctacaacatcccagtacgctgatgtctttaccaaggctcttcctacctcattgttttaggagtttcgttctagcctgaacgttcgtcgtgctcctagtcatactatgggagagtgttagcacatattgtatttattgtagtcacccattaattgtggttgtaatcttgcttgtgtgattgggtgcatgtcatcccaacgcctatatgtgcctttgtacaacatatggaatacaatcaattattccctcaactcccacaaaaatgatttctactatcaaaattgatgaaaacgcagaagagagaagggtgatggttatgtagagatgatgacgcattgacgtaccggcttctactagttctacagtgttttgtcgctacggattacagctgcagcagtccaaatagtcggctttaatctgaagtgtgagcagcagctcccattaatttcgtggggttgactgcccttatccgaccccaggggtcggctgtgtccagccacctgggggggtcagcagggggtcttctacaaaaaggccaaaccagcccatttatgtgccagtggctgctctgtattccggggaaaacttctccagaatgcactagctcatttggggaaaaccaaagaagagagagctaggcttagagaggggagaggggagattgagaggcaccaatccacaaatttgagagagtggtttggggatctggagcctcccctcacttgttggctcccacctcgtgtaatcttcatcttcatagtggagttcttgctcgtccctgtccgtgggttttctctcgcaaggagtttcccacgtaaatctctgtgtcttcacttgcttgggtattttacttgtcatatgtgctgattgctcatcatcttgcttgctattggagccatatctcaagttcctgttgtatggtcatgttggcatgggggcatatatgtgttcttggatatattggtgatctgttgatggggttgatgttgtggtgagctgattgcggcacatgtattgttgttgtactgctggacagcatgtggttgcttgatttgaagcttaggtacggtgcttcttttggttcattgtcacaaggtgttcggtgaaatatttgtgacagctgctgttctgtgcccgcttccgctgcgcgtagggatgacaatgggctctaaattttacactacaagatttaagaatcggatcagattaggatcgtgtcctatttctattcatttttgaactaaaaattatttagggtcctaccattttgtgaagaagcatttggatcacgatccattaccgcccctagctgcgcgccgaccctcacatgaagcgaacaactcctggctcttttttaatgcaggtgagttgttgccatttagctgggtataactacttgctttgcagaggttgggtttcgattcagttagatcttctgctggtccttgctgatatgtaaggtttttttgttctctcttggtactctctttcgatgtcctttagatactagctgctctgcgtgacaattaatcatccggagtgagagaaaggatcagggactataatttcggaccaaaatttctgattttttaaaaaattcttttctttcgatgggggtccgaaaaaacatttcagccaaatttgcctcccgctcaaatatgtaccaaaatggcaaaaaatcaatcaaaatgagttataaattgtgaattgtagtttaatttatagttttttatgtaattgtgatgttggatagcttagaaatagattacaggaagactgagtgggatgggttctttggccaacctcctcttctttgatgtttaatttgctctacgtcagaaaagaagattctagagaaaacttgacagcagcaaataaaaaaagtaaaatgcatcgaacttggcatattgtattacttaattcctcgtaatctaaaaaaaaagaaaacggatctatgaacttggttggccatccaaaaccggatttactcaaacttgtctagtgtcgtaagtcacggtggtatccggtttaagcaaatctagttttagataatcgactacgtacgaggaccggttttgctggtttaagagtttggagaacctaaacgctaagtttgagtacgactgatgcattttaagtcacggtggtatcctctttggttgtggagccgttttatggtctatctggagggctcggaatgactggtgctttggtaatagaactctttatgatccatctaatgtgcttttcatgtgctgcttttggctggactcttgggcaattcgacagaaaaagaaggaaaaaaggaaggtggagcaaggaagcagactcatcagaaagatggcaagtgaagtgatgtgtcgtgccttcgtctggtgtccgatggatcaccgaattgctggaagatgatctccatatctcattgtgatgttggcgcttcgctgattgcgtgttcttaagtcttttgctccttctggagttatgcgtcttgctgggatacttgttttgcctccacacgagtgctatcttgtaataagtggctccttgactttgtcgtgtatgtctgtttgcgctttaggtcgtttctttctctatcgagcgcgctcggtattgtttaggacaccttgttgccttgatcattcaggccagtggtttcttgtaaggtgacttttgttcctatttcctaatgaaatagggggttataccctattgtaaaaaaaactctaaagactagtttggaaaccccatttttctaagagatttctattttttatgggaaaataaattattttttcttgggaaatgaaaatctaatggagtttccaaactagctctaaacgatgatataccactcatagaatactagatgggaacggcgatggatatgatagggacggacgaaggagagaaatcaagttaattaagcttacttgactgcaaatgacgtactaatggcagccagacaccaaaagtcgatgagcttgagcgcggagacgaaaccaccaaggaggacaacggtggaccacgtcagcaacagatacgcgaggccggtggcgaccttccgtgcggcggactcaagcagcaggcccccctgctgcaatgggaggccgccgccgccctaggcctacgccggaggcggacgaggacgacggcatctgatccggtcgatcccgtgaacaagtgtgtgctatccgcccaacttgtggctgctctctgctctctgctctgagccctatattattcacaacagaggaactttcggcatctttggttggctggctggctaccatcctagacatattgagtttatttggttacctaaatgcttaaaccctagcgaggcctcagtaatgcataaaggagtgttagccggctcagttagcacattagactatcccctccagcaatttactcatggcaacgacggctatgcaagtagtccttctgtgcaagcgtgcaagcaaaccatctaatccatgagatcgtaatccaactgtatgtcacatttagcacttaaactcttccaccaccagttcaataatctttataaaaaaaac

SEQ ID NO: 8900 - DNA, 801 bp, Zea Mays
gtttgcgttttctccaatctgagtttctactgccatggaggtcgaggacacactaatccagctcttaaggctccggcgggccggcgtgcggggccctctgatccctgtacggccatctccagctgacagctgtgatgcccacctctatcgctttcaccgccggtgagctgttccgggcagcgagtgcgacagtgctgctttgcctctatcagggagctccatgtcctcatcatcaagagctcgtcctcccttttggattactcagtgtttggggaaaatatcctcaaggaggcttttgaatttctgatccgaaaatccaagcaaactcggagtatcctgaatggatgtggcacttgctcgacaagcttcatgtactaagtgagttgtggaggaaagaccctaagacagtctcttatgaagacctgaagtgttttgtcaagttggacaacctatccaagatcaaggaaaagaataacatcggtgctaagaactgatctggagtctcagaacaaaacatgacatgttctattgtactttttttattcatatagcaccagacaacattaacatttttatggattttttggcaataatgtagccacctgggatattaaaatgtttccatttgcttggtttcgtacggttttaggcagctacgacactgacattcttttggttcttccatcttgagaagatgcagcttcccaattacttagcaaattatcaagtttcaaggttctacaacattatttgatgtcccagcataggattcacgatttatatatttttcagttcatcttg

SEQ ID NO: 8901 - DNA, 811 bp, Zea Mays
gtttgcgttttctccaatctgagtttctactgccatggaggtcgaggacacactaatccagctcttaaggctccggcgggccggcgtgcggggccctctgatccctgtacggccatctccagctgacagctgtgatgcccacctctatcgctttcaccgccggtgagctgttccgggcagcgagtgcgacagtgctgctttgcctctatcagggagctccatgtcctcatcatcaagagctcgtcctcccttttggattactcagaatacaacagtgtttggggaaaatatcctcaaggaggcttttgaatttctgatccgaaaatccaagcaaactcggagtatcctgaatggatgtggcacttgctcgacaagcttcatgtactaagtgagttgtggaggaaagaccctaagacagtctcttatgaagacctgaagtgttttgtcaagttggacaacctatccaagatcaaggaaaagaataacatcggtgctaagaactgatctggagtctcagaacaaaacatgacatgttctattgtactttttttattcatatagcaccagacaacattaacatttttatggattttttggcaataatgtagccacctgggatattaaaatgtttccatttgcttggtttcgtacggttttaggcagctacgacactgacattcttttggttcttccatcttgagaagatgcagcttcccaattacttagcaaattatcaagtttcaaggttctacaacattatttgatgtcccagcataggattcacgatttatatatttttcagttcatcttg

SEQ ID NO: 8902 - DNA, 1740 bp, Zea Mays
caaaatgagcgtccaattgaaatacataatctcccatgcaaaaaagttgaaaacatgaatcaaaggaaaatgagacgaggaaggtgggggtgccggatgtatcggaccggagaaatgggccagatacggtgcagaactgcagatgcaggccgtcaaataatgagtttcgaaagcgataatggtcccacccacccatccacccgcacgcccaggaggtggacctaccaatcatcactgtccctgttctcttccagcggcgcgggggatagctcgccggagtccggagtcgccgctgccagtccacagccccaccgtctgcttcacctcgcccgtcatgtctgctgccgcagcagctgcagctgccgctcggtgcgtccctctccgggtgtcctcgccggagaccgcgaagtccgccgcttccattcccacctcctcggccgcctctgcgtctgctcccctccgcgccgccgtcgccgcgggacccggccgccggcttccggcgccgccgttccggtgctcctcatcgtcgccggagaactctgccccgcgcgatcttggattgcttctggaggtggaaggagttcttgcagatgtctaccgttttggcaatcgccaagctttcaatcatttcgaagcctcggactagattgtgcaaattggacagagccaatatatgctgatttggtgagcttgtggtgatgaggaaaggatgctggcattattctttgacaggattggctggcctacatctttgccaactagtgagaaaggatcatttataaaaagtgttcttcgtgagaagctgaaagctttggaagagttctcagcttctgatagcttaccactacggcctggagtggaaaagttcattgacgatgcacttggtgaaggtgttcctttggccatattggctgcatatgggagaaatggagaaaagatttcaagatctatagctatgaagttaggtcccgaaagaatctcaaaaataaagattgttggaaacgttgaggttgaagaaagcttttatgggcaacttgttcttggtaaaggagtcacatccggtttggatgagcaacttgtcagggaagcccagaaggctgcttctgcagagaagcagaggattgcagaaaaggttgcatcgatcctaaaacttagtgttgacatcacagcatccgaaagctctgacaaggtaatagctgctctccgagctggttcagaatacgttgggtgcgacgtgcaaagctgcatccttgttgcgggcagccaatctggtgtccttgcagccgaacgcattggcatgccatgcatagttgttcgaagcagctttaccgcaagagccgaatttcactccgcgaaggccgttatggatggattcggcgacacagacttgaccgtttcgaaactgctgagcaaaaagtggttttgattgtctgtcacctgtggaaacgaagggttggattggaggctgttgtgatttatgaacctgtaaatgattcagtgctaaccggagcaaacctttgtataaacaagaggtgttgctgattaaagttaatgagtaacaaactgaaagaataaattcaggtggcgccatcgtgtgcttctggttatcagtaatctgcctctatcaagtgccatgcatgttttgatgtggagacaatgaaataaataggtcattatagcattgaatctgtgttgctttccaattgttgccttactacatactagtcaattacacataag

SEQ ID NO: 8903 - DNA, 2437 bp, Zea Mays
caaaatgagcgtccaattgaaatacataatctcccatgcaaaaaagttgaaaacatgaatcaaaggaaaatgagacgaggaaggtgggggtgccggatgtatcggaccggagaaatgggccagatacggtgcagaactgcagatgcaggccgtcaaataatgagtttcgaaagcgataatggtcccacccacccatccacccgcacgcccaggaggtggacctaccaatcatcactgtccctgttctcttccagcggcgcgggggatagctcgccggagtccggagtcgccgctgccagtccacagccccaccgtctgcttcacctcgcccgtcatgtctgctgccgcagcagctgcagctgccgctcggtgcgtccctctccgggtgtcctcgccggagaccgcgaagtccgccgcttccattcccacctcctcggccgcctctgcgtctgctcccctccgcgccgccgtcgccgcgggacccggccgccggcttccggcgccgccgttccggtgctcctcatcgtcgccggagaactctgccccgcgcgatcttggattgcttctggaggtggaaggagttcttgcagatgtctaccgttttggcaatcgccaagctttcaatgtagcatttcgaagcctcggactagattgtgcaaattggacagagccaatatatgctgatttggtgaggaaagcttgtggtgatgaggaaaggatgctggcattattctttgacaggattggctggcctacatctttgccaactagtgagaaaggatcatttataaaaagtgttcttcgtgagaagctgaaagctttggaagagttctcagcttctgatagcttaccactacggcctggagtggaaaagtaagacttcaagcttctattatcactgtatgtcaaaaaaaatctctctagatatgaagtcttccaatgtaaaagttctttgtttccatacacaaatagttcacaagaattacacggccgttttactaagtgtgcattgttgaagtgtataagtggactgtctaccttctcccaacaatttaagcttttaggttaaactagttaatgcgtccactctaacatggtatcaaagtcagaggtctcaagttcgaatcctcgtagagcgttaatttatgtctccacctatttatttccacgtttgtgtctctctctctttggctgcacgtgaatgagggtgttgaagtgtataattggactacctaccttctcctagcagcttaagcttttgggttggactggttagtgcgtccactctaatatgcatgtgtggccatgtggggtctttgttatctgaacaaagggtcagaagttgcagagttgcagcatcttgataaaagtttttatatgtttctgcatgatttcttctatccatgatcattataagctaattattttttggtcctatatgtattcatgtgtacagctttggtctctgttctgtactctttgcttgccataagatatgaatgactcgttcgtgaactttaaattgtcttgtatgtgattctgtgaatgaaatcatttaaaggttcattgacgatgcacttggtgaaggtgttcctttggccatattggctgcatatgggagaaatggagaaaagatttcaagatctatagctatgaagttaggtcccgaaagaatctcaaaaataaagattgttggaaacgttgaggttgaagaaagcttttatgggcaacttgttcttggtaaaggagtcacatccggtttggatgagcaacttgtcagggaagcccagaaggctgcttctgcagagaagcagaggattgcagaaaaggttgcatcgatcctaaaacttagtgttgacatcacagcatccgaaagctctgacaaggtaatagctgctctccgagctggttcagaatacgttgggtgcgacgtgcaaagctgcatccttgttgcgggcagccaatctggtgtccttgcagccgaacgcattggcatgccatgcatagttgttcgaagcagctttaccgcaagagccgaatttcactccgcgaaggccgttatggatggattcggcgacacagacttgaccgtttcgaaactgctgagcaaaaagtggttttgattgtctgtcacctgtggaaacgaagggttggattggaggctgttgtgatttatgaacctgtaaatgattcagtgctaaccggagcaaacctttgtataaacaagaggtgttgctgattaaagttaatgagtaacaaactgaaagaataaattcaggtggcgccatcgtgtgcttctggttatcagtaatctgcctctatcaagtgccatgcatgttttgatgtggagacaatgaaataaataggtcattatagcattgaatctgtgttgctttccaattgttgccttactacatactagtcaattacacataag

SEQ ID NO: 8904 - DNA, 2262 bp, Zea Mays
caaaatgagcgtccaattgaaatacataatctcccatgcaaaaaagttgaaaacatgaatcaaaggaaaatgagacgaggaaggtgggggtgccggatgtatcggaccggagaaatgggccagatacggtgcagaactgcagatgcaggccgtcaaataatgagtttcgaaagcgataatggtcccacccacccatccacccgcacgcccaggaggtggacctaccaatcatcactgtccctgttctcttccagcggcgcgggggatagctcgccggagtccggagtcgccgctgccagtccacagccccaccgtctgcttcacctcgcccgtcatgtctgctgccgcagcagctgcagctgccgctcggtgcgtccctctccgggtgtcctcgccggagaccgcgaagtccgccgcttccattcccacctcctcggccgcctctgcgtctgctcccctccgcgccgccgtcgccgcgggacccggccgccggcttccggcgccgccgttccggtgctcctcatcgtcgccggagaactctgccccgcgcgatcttggattgcttctggaggtggaaggagttcttgcagatgtctaccgttttggcaatcgccaagctttcaatgtagcatttcgaagcctcggactagattgtgcaaattggacagagccaatatatgctgatttggtgaggaaagcttgtggtgatgaggaaaggatgctggcattattctttgacaggattggctggcctacatctttgccaactagtgagaaaggatcatttataaaaagtgttcttcgtgagaagctgaaagctttggaagagttctcagcttctgatagcttaccactacggcctggagtggaaaagtaagacttcaagcttctattatcactgtatgtcaaaaaaaatctctctagatatgaagtcttccaatgtaaaagttctttgtttccatacacaaatagttcacaagaattacacggccgttttactaagtgtgcattgttgaagtgtataagtggactgtctaccttctcccaacaatttaagcttttaggttaaactagttaatgcgtccactctaacatggtatcaaagtcagaggtctcaagttcgaatcctcgtagagcgttaatttatgtctccacctatttatttccacgtttgtgtctctctctctttggctgcacgtgaatgagggtgttgaagtgtataattggactacctaccttctcctagcagcttaagcttttgggttggactggttagtgcgtccactctaatatgcatgtgtggccatgtggggtctttgttatctgaacaaagggtcagaagttgcagagttgcagcatcttgataaaagtttttatatgtttctgcatgatttcttctatccatgatcattataagctaattattttttggtcctatatgtattcatgtgtacagctttggtctctgttctgtactctttgcttgccataagatatgaatgactcgttcgtgaactttaaattgtcttgtatgtgattctgtgaatgaaatcatttaaaggttcattgacgatgcacttggtgaaggtgttcctttggccatattggctgcatatgggagaaatggagaaaagatttcaagatctatagctatgaagttaggtcccgaaagaatctcaaaaataaagattgttggaaacgttgaggttgaagaaagcttttatgggcaacttgttcttggtaaaggagtcacatccggtttggatgagcaacttgtcagggaagcccagaaggctgcttctgcagagaagcagaggattgcagaaaaggttgcatcgatcctaaaacttagtgttgacatcacagcatccgaaagctctgacaaggtaatagctgctctccgagctggttcagaatacgttgggtgcgacgtgcaaagctgcatccttgttgcgggcagccaatctggtgtccttgcagccgaacgcattggcatgccatgcatagttgttcgaagcagtgctaaccggagcaaacctttgtataaacaagaggtgttgctgattaaagttaatgagtaacaaactgaaagaataaattcaggtggcgccatcgtgtgcttctggttatcagtaatctgcctctatcaagtgccatgcatgttttgatgtggagacaatgaaataaataggtcattatagcattgaatctgtgttgctttccaattgttgccttactacatactagtcaattacacataag

SEQ ID NO: 8905 - DNA, 2257 bp, Zea Mays
caaaatgagcgtccaattgaaatacataatctcccatgcaaaaaagttgaaaacatgaatcaaaggaaaatgagacgaggaaggtgggggtgccggatgtatcggaccggagaaatgggccagatacggtgcagaactgcagatgcaggccgtcaaataatgagtttcgaaagcgataatggtcccacccacccatccacccgcacgcccaggaggtggacctaccaatcatcactgtccctgttctcttccagcggcgcgggggatagctcgccggagtccggagtcgccgctgccagtccacagccccaccgtctgcttcacctcgcccgtcatgtctgctgccgcagcagctgcagctgccgctcggtgcgtccctctccgggtgtcctcgccggagaccgcgaagtccgccgcttccattcccacctcctcggccgcctctgcgtctgctcccctccgcgccgccgtcgccgcgggacccggccgccggcttccggcgccgccgttccggtgctcctcatcgtcgccggagaactctgccccgcgcgatcttggattgcttctggaggtggaaggagttcttgcagatgtctaccgttttggcaatcgccaagctttcaatgtagcatttcgaagcctcggactagattgtgcaaattggacagagccaatatatgctgatttggtgagcttgtggtgatgaggaaaggatgctggcattattctttgacaggattggctggcctacatctttgccaactagtgagaaaggatcatttataaaaagtgttcttcgtgagaagctgaaagctttggaagagttctcagcttctgatagcttaccactacggcctggagtggaaaagtaagacttcaagcttctattatcactgtatgtcaaaaaaaatctctctagatatgaagtcttccaatgtaaaagttctttgtttccatacacaaatagttcacaagaattacacggccgttttactaagtgtgcattgttgaagtgtataagtggactgtctaccttctcccaacaatttaagcttttaggttaaactagttaatgcgtccactctaacatggtatcaaagtcagaggtctcaagttcgaatcctcgtagagcgttaatttatgtctccacctatttatttccacgtttgtgtctctctctctttggctgcacgtgaatgagggtgttgaagtgtataattggactacctaccttctcctagcagcttaagcttttgggttggactggttagtgcgtccactctaatatgcatgtgtggccatgtggggtctttgttatctgaacaaagggtcagaagttgcagagttgcagcatcttgataaaagtttttatatgtttctgcatgatttcttctatccatgatcattataagctaattattttttggtcctatatgtattcatgtgtacagctttggtctctgttctgtactctttgcttgccataagatatgaatgactcgttcgtgaactttaaattgtcttgtatgtgattctgtgaatgaaatcatttaaaggttcattgacgatgcacttggtgaaggtgttcctttggccatattggctgcatatgggagaaatggagaaaagatttcaagatctatagctatgaagttaggtcccgaaagaatctcaaaaataaagattgttggaaacgttgaggttgaagaaagcttttatgggcaacttgttcttggtaaaggagtcacatccggtttggatgagcaacttgtcagggaagcccagaaggctgcttctgcagagaagcagaggattgcagaaaaggttgcatcgatcctaaaacttagtgttgacatcacagcatccgaaagctctgacaaggtaatagctgctctccgagctggttcagaatacgttgggtgcgacgtgcaaagctgcatccttgttgcgggcagccaatctggtgtccttgcagccgaacgcattggcatgccatgcatagttgttcgaagcagtgctaaccggagcaaacctttgtataaacaagaggtgttgctgattaaagttaatgagtaacaaactgaaagaataaattcaggtggcgccatcgtgtgcttctggttatcagtaatctgcctctatcaagtgccatgcatgttttgatgtggagacaatgaaataaataggtcattatagcattgaatctgtgttgctttccaattgttgccttactacatactagtcaattacacataag

SEQ ID NO: 8906 - DNA, 1433 bp, Zea Mays
catatcctagaatattcgaatctatatttgaattcagattacaaggtagtgaattgtgacatgtattcgttcctatccgatccgtcgtttttgagcactaggtgcggtcactgtgacgcgtggacttggcttcgcccactgccatcgtggacccacgtcatcagcaagtgtccatatccaccacccgacccgacgaccgcttgccgtccgatccgtgtgctcccgagggcaaggatggcatttcgccacgcgagatatttttcggtggcctgcacaggccggcagtgcagcggccaaaacgaggtcaggtcagtcacgctgggccccgcctcacgctcccgtcctgctccgggtcccaacaaagccgtccccgggaggtgctcgtgtgctcgtagcgcggtggcgaccccgatgccccgcatattccactgggcgtccgcgccgtcggatgggatcaggacggccgcggcggccccgcgctcggctataaagacgctgcgggggacgcattccctctccgtgctttcttagaggtgggttggcttctcctccccctccggttcgggttcgggttccggatcgagatggcggcgtcggatgttgagtaccgctgcttcgtcggcggcctcgcctgggccacggacgaccactccctccacaacgccttcagcacctacggcgaggtcctcgagtccaagatcatcctcgatcgggagacgcagaggtcccgcggcttcggcttcgtcaccttctccacggaggaggcgatgcggaacgccatcgagggcatgaacggcaaggagctggacggccgcaacatcaccgtcaacgaggcccagtcccgcggcggccgtggaggcggcggctacggcggtggcgggcgccgtgatggcggtggcggctacggcggtggcggcggctacggtggcggcggcggctacggtggtggtggcggcggctacggcggtggcaaccgtggcggcggctacggcaactccgacgggaactggaggaactgagcggtggggcccgcgcggccaagttatcctgttcgctaccgtgatgtttaccctagtccagagggtttatcttcgttcgtgtcgtgtttgttgttgcccatctgtgtttttgattgcaaggtcgctctgtgtcagttgttagtgctgtgttcatcctcggtttcagcagacccatgcatcaaacagcatggactgcggatcgatggatgctgttacccccgtcaggctttattctaagttaatcttaaggaaaaaatggtgcttcttggtgctgcaaaatggttgtgctcatctgaaaagctacttactctcgctttgagtgcgaatcaaggcaaaggttgccagtttttcaaacaatgaatgattctttgctttggaatgaaaaaagtagccgccaatcaacatgaatctatg

SEQ ID NO: 8907 - DNA, 318 bp, Zea Mays
ggcatcatccaggcagttgctcatgctgctgatttgattcaaaacgagtaatttcagaaagctctgaagatatacatatagagagagagattacactcactttaaagaaataaggacataatcatataaaatggagaactcttgtgcccatgcacaactagcaccgaagccgaaggttaccatacaatggaggaaacaacaccagtgtattcatgatgaaagcatatcatttttccctgcgccaattgcctacaggggcatggaaacaaattattctgaatggaggactcagtatgtgccgtttcttttactgctatc

SEQ ID NO: 8908 - DNA, 1118 bp, Zea Mays
gtgcgtctcctctcgcgtccccgtcttcctcttgtgatcttgtcgcctgcctctgcggctctgcctgcctctctcgaagcttctcgcgtctcctgggtggccgtgtccagtctcccacgccaccgccccgaccgccggtaggtaattccagttccaagagcactcgacatggcggccgctaatgttggggaatcaacaagcggcggcagcagcagcagcggcgccgacgccgggggcggattcgagtgcaacatatgcttcgagctgccgcaggagccgatcgtgacgctgtgcgggcacctcttctgctggccgtgcctctacaagtggctgcgcatccactcgcactcgcccgagtgcccggtgtgcaaggccgtggtcgaggaggagaagctcgtgcccctgtacggccgcggcaaggaccgcgtcgacccgaggtccaagaacgtccccggggcggccgacatccccagccgtccggctgggcagaggccggccacggctccgcaggcggaccccaacaacgcccacttccccaacgccgccaacccggcgaacccgtggttcatgggcggcggcggcggaggcatcccgctggccaacgcgcgctgggggaactacaccttctcggcggcgttcggtgggctgttcccgctgctcagcttccaggtgcacgggttcccggacgccacggcctatggccagccagctgggttcccgtacgggtacggccacggccacgcttttcatggcgggcacgctggagcacatgcccacgccgcagctgcagctcctcggcacgcgcagcaccagcagcagcaggcggatgtgtaccttaaggcgctgctcatcctagtcggcgttctggttatcgcgagcctcgtcacgttctagggcgtcgcctgttggtaggtgttcatcatattgttgctgccttgctggtaataaataagagagagagacagagacaacacgaccgaaactgaattattcagagcggtgcaatgtgttgatagaagggttgttgttgtacatgctgatacatgattgtatactgtggtctttgaacatacattattatcgaataataatctggaggctctgtttgaaaaaaaaaa

SEQ ID NO: 8909 - DNA, 1735 bp, Zea Mays
caaattcttgctttctaaaggagttcgtgttgatgtggaatcaagtgtcttgaccccactgattattgctacctttagaggatatctagtatcgtgaagattttattggagcacggtgcagatgctggagctaatgtgaatggttttggatctatcttataatcccttggcaagagctgcagagaaaggtttgactgaagctatcaagtgcttgttggaagctggtgcaaatccaaacgttcctgacacagtgagatttgcttcttgttacatgcatcactatagtgatttgcttgattttatatcttccatagcgtaatctaatacacatatgcaatgctggtaacacaaaatatgatgccatacaagaatgttcttatgacagtacaaggtctgtgtgggaagtaaacaataagatgtggtcggactgctttgcttgcttacttattttctgcataagcttattactgttttggcaagtcttatgttttagttatgttaggaatacatatggttgcaacataataggcttccttgacctgctatgacaggagtgaattaataatctttgcgttggtctgtgtatggaatggacttagaagtgattgcgttctggatctataagtagttaagtactttgttagcgtttactttgattgtgttcaggatttagtgttcttgctgctggagcaatgttcttcaaagattaatagtttttaggcgcttactctgattttgttcacttcaggatttagtgtagctactgctggagcatagtccgtcaagaattaataatatttagttggagaatgctcaatttgctattctttttattttaaaattttctatacttcatcaatatgtttgtttgctcaacattttggtaggctgccaatagaattggctgctgagtatggtacatgggaagatgttgaacttctattccctgtcacttccaaaattccaacagtggcagattggagtgttaatggagtaattagtaatgtacacatggaagtcacacaactagaggatgacgaaattgtcaataagaaaaagtccgagctgaaacgacaaggagctgatgcgtttagcaaggaggattatctaaacgcgtcagtattctacacacaggccctgaaggttgatcagttcgacgcaacactgttctcaaacaggagcctttgctggcttcgcctgggtgatggaaagaaggctttgctcgatgctatagagtgcaaacatctgcgtccgaattggggaaaagcctactaccggcaaggagctgccctgatgtctctggaggattacagcagtgcttatgatgcgttctctcatggcttggagttggacccagaaagcgaagagatggagaaaatgctttgggaggcgatggacctgaagtagtagttgatgtcttggatcgtaagaagatgacttgagaactggaatctcttcaattttggtgtcgtagaattgacacgaacactcggatggttgcctacttttgcattgacctaagtttgctagtcctgaaacgatgctgcctctttttttctgtcgtgtgtaattcacggagggtagcggcagtttagagaccaccgcaggctgctaactatctttgatatgatcgtggtagccgcagctacaacgcttctgacgccctgttaactgaaacgatgtgttcaccgagatgcctttgccgacatgcttggtcccccttcacatgtttttg

SEQ ID NO: 8910 - DNA, 1149 bp, Zea Mays
gcgtcctgaaatagccaaattcttgctttctaaaggagttcgtgttgatgtggaatcaagtgtcttgaccccactgattattgctacctttagaggatatctagtatcgtgaagattttattggagcacggtgcagatcccaacgagctttgattgataaagttacaccattaagcatggcattaaaacactcttatgtgtcttgtttgaaacttttggttcaacgtaatctaatacacatatgcaatgctggtaacacaaaatatgatgccatacaagaatgttcttatgacagtacaaggctgccaatagaattggctgctgagtatggtacatgggaagatgttgaacttctattccctgtcacttccaaaattccaacagtggcagattggagtgttaatggagtaattagtaatgtacacatggaagtcacacaactagaggatgacgaaattgtcaataagaaaaagtccgagctgaaacgacaaggagctgatgcgtttagcaaggaggattatctaaacgcgtcagtattctacacacaggccctgaaggttgatcagttcgacgcaacactgttctcaaacaggagcctttgctggcttcgcctgggtgatggaaagaaggctttgctcgatgctatagagtgcaaacatctgcgtccgaattggggaaaagcctactaccggcaaggagctgccctgatgtctctggaggattacagcagtgcttatgatgcgttctctcatggcttggagttggacccagaaagcgaagagatggagaaaatgctttgggaggcgatggacctgaagtagtagttgatgtcttggatcgtaagaagatgacttgagaactggaatctcttcaattttggtgtcgtagaattgacacgaacactcggatggttgcctacttttgcattgacctaagtttgctagtcctgaaacgatgctgcctctttttttctgtcgtgtgtaattcacggagggtagcggcagtttagagaccaccgcaggctgctaactatctttgatatgatcgtggtagccgcagctacaacgcttctgacgccctgttaactgaaacgatgtgttcaccgagatgcctttgccgacatgcttggtcccccttcacatgtttttg

SEQ ID NO: 8911 - DNA, 1164 bp, Zea Mays
ctccgatcgattcgaggccgccgcgcctccgccaaccgtaccgctaccgaacaggagagaggatgccgcgccgggaggtgtcgctgcccgacgccttcaatctcgtcctcggcaaagatcgggacaactggcctcccgcagcgggcctcctcgtggccgcctactacggcgacatccgccgcctcaagggctggagctaatgtgaatggttttggatctatcttataatcccttggcaagagctgcagagaaaggtttgactgaagctatcaagtgcttgttggaagctggtgcaaatccaaacgttcctgacacagctgccaatagaattggctgctgagtatggtacatgggaagatgttgaacttctattccctgtcacttccaaaattccaacagtggcagattggagtgttaatggagtaattagtaatgtacacatggaagtcacacaactagaggatgacgaaattgtcaataagaaaaagtccgagctgaaacgacaaggagctgatgcgtttagcaaggaggattatctaaacgcgtcagtattctacacacaggccctgaaggttgatcagttcgacgcaacactgttctcaaacaggagcctttgctggcttcgcctgggtgatggaaagaaggctttgctcgatgctatagagtgcaaacatctgcgtccgaattggggaaaagcctactaccggcaaggagctgccctgatgtctctggaggattacagcagtgcttatgatgcgttctctcatggcttggagttggacccagaaagcgaagagatggagaaaatgctttgggaggcgatggacctgaagtagtagttgatgtcttggatcgtaagaagatgacttgagaactggaatctcttcaattttggtgtcgtagaattgacacgaacactcggatggttgcctacttttgcattgacctaagtttgctagtcctgaaacgatgctgcctctttttttctgtcgtgtgtaattcacggagggtagcggcagtttagagaccaccgcaggctgctaactatctttgatatgatcgtggtagccgcagctacaacgcttctgacgccctgttaactgaaacgatgtgttcaccgagatgcctttgccgacatgcttggtcccccttcacatgtttttg

SEQ ID NO: 8912 - DNA, 2574 bp, Zea Mays
ccaaccactcttctccgatcgattcgaggccgccgcgcctccgccaaccgtaccgctaccgaacaggagagaggatgccgcgccgggaggtgtcgctgcccgacgccttcaatctcgtcctcggcaaagatcgggacaactggcctcccgcagcgggcctcctcgtggccgcctactacggcgacatccgccgcctcaaggggcgtcctgaaatagccaaattcttgctttctaaaggagttcgtgttgatgtggaatcaagtgtcttgaccccactgattattgctacctttagaggatatctagtatcgtgaagattttattggagcacggtgcagatgtatgtgctaattgtaactcttatttttatttgctctggaacctgcacggttcactgctctcccacattgttcccggttgtattctcagtttctctgaactactgatgtgtgaccctgatcaaagatatgggtaactggacacccagacataagcagctatgatgttctaaaattcaaacagtaggacattaggaacatatacacttcaataatatactattgttttttttccatctgaaattctctgcttctctagtgcgttttttttcttttggcattgatattgatttttcggttcttgcagcccaacgagctttgattgataaagttacaccattaagcatggcattaaaacactcttatgtgtcttgtttgaaacttttggttcaagtaagctgtttgctacattccgactgcaatcgaatttccccctactgatgctgggtctagctctgcaattatgtctttgttagtcatcggtttatggagaaagcgtatgattcctttgtcttcttaaattacctttgtaggctggagctaatgtgaatggttttggatctatcttataatcccttggcaagagctgcagagaaaggtttgactgaagctatcaagtgcttgttggaagctggtgcaaatccaaacgttcctgacacagtgagatttgcttcttgttacatgcatcactatagtgatttgcttgattttatatcttccatagcgtaatctaatacacatatgcaatgctggtaacacaaaatatgatgccatacaagaatgttcttatgacagtacaaggtctgtgtgggaagtaaacaataagatgtggtcggactgctttgcttgcttacttattttctgcataagcttattactgttttggcaagtcttatgttttagttatgttaggaatacatatggttgcaacataataggcttccttgacctgctatgacaggagtgaattaataatctttgcgttggtctgtgtatggaatggacttagaagtgattgcgttctggatctataagtagttaagtactttgttagcgtttactttgattgtgttcaggatttagtgttcttgctgctggagcaatgttcttcaaagattaatagtttttaggcgcttactctgattttgttcacttcaggatttagtgtagctactgctggagcatagtccgtcaagaattaataatatttagttggagaatgctcaatttgctattctttttattttaaaattttctatacttcatcaatatgtttgtttgctcaacattttggtaggctgccaatagaattggctgctgagtatggtacatgggaagatgttgaacttctattccctgtcacttccaaaattccaacagtggcagattggagtgttaatggagtaattagtaatgtacacatggaagtcacacaactagaggatgacgaaattgtcaataagaaaaagtccgagctgaaacgacaaggagctgatgcgtttagcaaggaggattatctaaacgcgtcagtattctacacacaggccctgaaggttgatcagttcgacgcaacactgttctcaaacaggagcctttgctggcttcgcctgggtgatggaaagaaggctttgctcgatgctatagagtgcaaacatctgcgtccgaattggggaaaagcctactaccggcaaggagctgccctgatgtctctggaggtgcagcaacagaagattacattacagattaagaacctctgctgttcctcatctgctacctaagtcagtactatgcacttgctttgctcaggattacagcagtgcttatgatgcgttctctcatggcttggagttggacccagaaagcgaagagatggagaaaatgctttgggaggcgatggacctgaagtagtagttgatgtcttggatcgtaagaagatgacttgagaactggaatctcttcaattttggtgtcgtagaattgacacgaacactcggatggttgcctacttttgcattgacctaagtttgctagtcctgaaacgatgctgcctctttttttctgtcgtgtgtaattcacggagggtagcggcagtttagagaccaccgcaggctgctaactatctttgatatgatcgtggtagccgcagctacaacgcttctgacgccctgttaactgaaacgatgtgttcaccgagatgcctttgccgacatgcttggtcccccttcacatgtttttg

SEQ ID NO: 8913 - DNA, 1315 bp, Zea Mays
ccaaccactcttctccgatcgattcgaggccgccgcgcctccgccaaccgtaccgctaccgaacaggagagaggatgccgcgccgggaggtgtcgctgcccgacgccttcaatctcgtcctcggcaaagatcgggacaactggcctcccgcagcgggcctcctcgtggccgcctactacggcgacatccgccgcctcaaggggcgtcctgaaatagccaaattcttgctttctaaaggagttcgtgttgatgtggaatcaagtgtcttgaccccactgattattgctacctttagaggatatctagtatcgtgaagattttattggagcacggtgcagatgctggagctaatgtgaatggttttggatctatcttataatcccttggcaagagctgcagagaaaggtttgactgaagctatcaagtgcttgttggaagctggtgcaaatccaaacgttcctgacacagctgccaatagaattggctgctgagtatggtacatgggaagatgttgaacttctattccctgtcacttccaaaattccaacagtggcagattggagtgttaatggagtaattagtaatgtacacatggaagtcacacaactagaggatgacgaaattgtcaataagaaaaagtccgagctgaaacgacaaggagctgatgcgtttagcaaggaggattatctaaacgcgtcagtattctacacacaggccctgaaggttgatcagttcgacgcaacactgttctcaaacaggagcctttgctggcttcgcctgggtgatggaaagaaggctttgctcgatgctatagagtgcaaacatctgcgtccgaattggggaaaagcctactaccggcaaggagctgccctgatgtctctggaggattacagcagtgcttatgatgcgttctctcatggcttggagttggacccagaaagcgaagagatggagaaaatgctttgggaggcgatggacctgaagtagtagttgatgtcttggatcgtaagaagatgacttgagaactggaatctcttcaattttggtgtcgtagaattgacacgaacactcggatggttgcctacttttgcattgacctaagtttgctagtcctgaaacgatgctgcctctttttttctgtcgtgtgtaattcacggagggtagcggcagtttagagaccaccgcaggctgctaactatctttgatatgatcgtggtagccgcagctacaacgcttctgacgccctgttaactgaaacgatgtgttcaccgagatgcctttgccgacatgcttggtcccccttcacatgtttttg

SEQ ID NO: 8914 - DNA, 1112 bp, Zea Mays
gcccaaccactcttctccgatcgattcgaggccgccgcgcctccgccaaccgtaccgctaccgaacaggagagaggatgccgcgccgggaggtgtcgctgcccgacgccttcaatctcgtcctcggcaaagatcgggacaactggcctcccgcagcgggcctcctcgtggccgcctactacggcgacatccgccgcctcaaggcccaacgagctttgattgataaagttacaccattaagcatggcattaaaacactcttatgtgtcttgtttgaaacttttggttcaacgtaatctaatacacatatgcaatgctggtaacacaaaatatgatgccatacaagaatgttcttatgacagtacaaggctgccaatagaattggctgctgagtatggtacatgggaagatgttgaacttctattccctgtcacttccaaaattccaacagtggcagattggagtgttaatggagtaattagtaatgtacacatggaagtcacacaactagaggccctgaaggttgatcagttcgacgcaacactgttctcaaacaggagcctttgctggcttcgcctgggtgatggaaagaaggctttgctcgatgctatagagtgcaaacatctgcgtccgaattggggaaaagcctactaccggcaaggagctgccctgatgtctctggaggattacagcagtgcttatgatgcgttctctcatggcttggagttggacccagaaagcgaagagatggagaaaatgctttgggaggcgatggacctgaagtagtagttgatgtcttggatcgtaagaagatgacttgagaactggaatctcttcaattttggtgtcgtagaattgacacgaacactcggatggttgcctacttttgcattgacctaagtttgctagtcctgaaacgatgctgcctctttttttctgtcgtgtgtaattcacggagggtagcggcagtttagagaccaccgcaggctgctaactatctttgatatgatcgtggtagccgcagctacaacgcttctgacgccctgttaactgaaacgatgtgttcaccgagatgcctttgccgacatgcttggtcccccttcacatgtttttg

SEQ ID NO: 8915 - DNA, 1269 bp, Zea Mays
ccaaagcccaaccactcttctccgatcgattcgaggccgccgcgcctccgccaaccgtaccgctaccgaacaggagagaggatgccgcgccgggaggtgtcgctgcccgacgccttcaatctcgtcctcggcaaagatcgggacaactggcctcccgcagcgggcctcctcgtggccgcctactacggcgacatccgccgcctcaaggcccaacgagctttgattgataaagttacaccattaagcatggcattaaaacactcttatgtgtcttgtttgaaacttttggttcaagctggagctaatgtgaatggttttggatctatcttataatcccttggcaagagctgcagagaaaggtttgactgaagctatcaagtgcttgttggaagctggtgcaaatccaaacgttcctgacacagctgccaatagaattggctgctgagtatggtacatgggaagatgttgaacttctattccctgtcacttccaaaattccaacagtggcagattggagtgttaatggagtaattagtaatgtacacatggaagtcacacaactagaggatgacgaaattgtcaataagaaaaagtccgagctgaaacgacaaggagctgatgcgtttagcaaggaggattatctaaacgcgtcagtattctacacacaggccctgaaggttgatcagttcgacgcaacactgttctcaaacaggagcctttgctggcttcgcctgggtgatggaaagaaggctttgctcgatgctatagagtgcaaacatctgcgtccgaattggggaaaagcctactaccggcaaggagctgccctgatgtctctggaggattacagcagtgcttatgatgcgttctctcatggcttggagttggacccagaaagcgaagagatggagaaaatgctttgggaggcgatggacctgaagtagtagttgatgtcttggatcgtaagaagatgacttgagaactggaatctcttcaattttggtgtcgtagaattgacacgaacactcggatggttgcctacttttgcattgacctaagtttgctagtcctgaaacgatgctgcctctttttttctgtcgtgtgtaattcacggagggtagcggcagtttagagaccaccgcaggctgctaactatctttgatatgatcgtggtagccgcagctacaacgcttctgacgccctgttaactgaaacgatgtgttcaccgagatgcctttgccgacatgcttggtcccccttcacatgtttttg

SEQ ID NO: 8916 - DNA, 1119 bp, Zea Mays
ggggggagacaagaagcctgaaataagttgaaacaaccagcaaaagcaaaagtgggggagaaaatgacagaaaggccggagcgacacaaagaaagaggcccaataccatacagtccacaagtcgcgcgcgggccgcggggtagaacgcaagcggaggcgtccctggcaacaaaggcagcaatggcgacggggtggctcgcagggtctctccccctccgctccgcatccacagccccgtcggcggccagggcacagcctctcccctccgccgccgcgccacgccgcatcccagcgcgactttcggttgccacgggcgggggcgagcagcagctcgtcaccgcgcaggaaccggcgcacgatttgccgtctgctctttggtggggcagcagaacctgattatggagttgtaagcattcaccatgtcgggatcctgtgcgagaatcttgagaggtcactggcgttctacaaggacctactgggtctgagggtgaatccagctcggccaaacgacaagctcccgtacaggggcgcttggctctgggtgggttctgagatgatccacctgatggagctgccgaatcctgatccgttgaccggacgccccgagcacggcggacgtgatcggcatacctgtatagcgattagagatgttctgaagctgaaagaagtttttgatgaagctggaatcagctacacgctaagcaaatctgggaggccagcgatctttgcaagagacccagacgggaacgcgttggagttcacccaagtgtagcaactggaaaactccttccatgctagagcatctcatggataccaagaggtcatagactttgctgcttgtatttcttgtagctgctacaaataaagacctggcagataaataccgcttgtacatatattacatgtcgatcaaggatttgagcaagtaaaaataaaggcagataaacggtgtgtttggtttatggagtcactctatgcttcatgaggtgattcatcataagttcattccatcaattttggtggaatcaacccactcctcatgtatatactaattattagcttataaggaattgggtggtgatggatcaacccattttattccacaaaccaaataaaaaa

SEQ ID NO: 8917 - DNA, 1072 bp, Zea Mays
cggaagtcgtccacgcaaacgtgtaaaatggccggccggccggcgacaggacagcttccaaaccccttttgtgtttccagctctgggtcagtgacacggccatcggcactcaactcactccacaggcttcgtttcatcatcatcatcatcaccgtcgtcatagccatggccgcgcgtcaccacgccccgcacctcctcgcgatgctcatgctctcggcggccggcttcttctccgtggcctccgccgcgcgcgacctcgacgcagccaacccgctcgcggtcgcggtcgcggcgcccgccgctggccgaaacaacgacaacaacaaccctcccgagcctaactactactcctaccatggcggctacggcgccgtcccggcgggctacggacctgcaggcgtctctggcgccggcgggtggggcgcgggctccggcggcggtggcgggtacgcacacggcggcgtggaagcgccgacggtgatgtgccaggacaaggggccctgctacggcaagaaggtggcgtgccccaagcgctgcttctggtcctacagccgctccggcagcggatacggagccggaggcggcggcgggtcctgcaccgtcgactgcaaggacaagtgcaccgccacctgctgatggatcgacgggtagagctaactagctatctgctcatggctctccactcgatcgatgacgatatatactactacatacagtgtgtgtgcgcttgtactatatatatatatatatatatatatatatacagtatacaatagtaatcggccccttgctcttgcagtaccagctggttaatttcagaggaactatgaattacgatgaactgctgctgctgctggttcattaattaatgaataaggcgttggatcacgccacgcatgatcgatgtcggccatgcatgcagtgtgcttcatcagctattacatataacgaattttgcacgcaatctgatggagatggaatcattgcatttccagctgaagctcctgtaatgtaagccacctggagccggaaaaggctcgctcacacagttactcacgcagtcacgctgcgt

SEQ ID NO: 8918 - DNA, 1238 bp, Zea Mays
ggaggtcttcgcggcgtttggcgatggcttttacataaatcagtttcaggagccaggaagagccgagagggcatttgctcgctacgatgttgcgacggtcctaaagaagttctacgccttgaaaatcgacgagatgattgctcctcctggagtggagatcatagactttctccaggcaccttcttcgccgattccctggatgacagacgaagaactgggacggtacgccgagaagttcgagaagactggcttcacaggacccctcaactactaccgcatgcttgaaacaaactggagactgactgcaccttggagtggatcgaaaatcacagtgcctgcgaaattcatactcagcaagaacgacgtcggcctgcagtccttcggaaccgagaagtacgtcaagagtggcgctctgaaggagaacgttccagaccttgagatttcgatcatcgaggggcaccatttcgtccagcaggaagaggccgggacagtgaattcggaaatactctccttccttggcaagtttcccagcgagggaggatcagcgtgattgttatttattgtttgcagccagtcccggactcctgagaggaagatggcctccgaatgatccgagggtttatgattgaataaagtgagagctcagatcgatagccgtctgttggcttgcattaaaaaaataaagagcttgcatgtaaaactatttatgaacgaataaacttctgtcatatactcgcaagtctcaacattgtttacatgccagccaacgaacaactaagcagaagtgcagaacacatcatctgcagcgcacaaaagttttcttttacacaaccggggaaaacgcacagagaaaaaaaaaactgcacaagatgagccaattcatttacacagtccataaaaaggcgaacgggaacagttcagcctcgtcagcatacaggtgaagcgcacttctccgccgacggcgacgcacgcttgggcttgatggaccggaccttcacgtagcggcgcaccattccgatcaccctccgtcccgccggcacctgtccagcccgccgcgttgcctcgcctgctgcagctccttgtagttgtgcaaattcacgaacaccagcagcaggagtgttcccttccgtggtgcctccggtggcggcgccgtcgacggcctcgtcctcgatcagctcctgcagcgagaaacgacggtcctgacactcttcctccgtcgagggttctgacgcctcgtg

SEQ ID NO: 8919 - DNA, 2029 bp, Zea Mays
agatctaagatgagtgatgatgatttaatatatacatcatgtacaccaaactttcttgtacatcagatatattctcataaaatagcagctacaacaatcaaatgactagccttaatccaaacaattggctttaatccaatgctagagttgacttgtaaaggatgacatggtctcccatggtgcagaagaacgaatttcacggaataatctaaatactcattcatttgcttttggccatttctcttcttgctcaagagttcaacccaaatttctcaacgtggatagtgagcacatttgactgaccgccatagcaaccagaggaacacaaagcggcgaccgacgagccaagcaagcagcagagcatggacgcgggagaggtgcggcactggaacgcggacgtcaacggcgtctccatccacgtcgccgagcggggccccgaggatgggcccgcggtgctcctaatccacggcttcccggagctctggctctcgtggcgccaccagatggccgcgctcgccgcccgcgggttccgcgcgctggctcccgatctccgcggctacggcgactcctccgtgccgtccgaccccgccgcctacaccatcttccacatcgttggcgacatcgtcgcgctccttgaccacctccaagttccaactcacaaaggtgttcgtggttgggcacgactggggcgcgatggtggcgtggcacctctgcctgttccggccggaccgggtgcgcgccgctgttgtcctggggatcccctacttcccccgcggccctcgcccgatgacggactcatttgccaagctcggcgatggattctacatcaatcagttccaggagccaggaagagccgagagggcatttgctcgctacgatgttgcgacggtcctaaagaagttctacgccttgaaaatcgacgagatgattgctcctcctggagtggagatcatagactttctccaggcaccttcttcgccgattccctggatgacagacgaagaactgggacggtacgccgagaagttcgagaagactggcttcacaggacccctcaactactaccgcatgcttgaaacaaactggagactgactgcaccttggagtggatcgaaaatcacagtgcctgcgaaattcatactcagcaagaacgacgtcggcctgcagtccttcggaaccgagaagtacgtcaagagtggcgctctgaaggagaacgttccagaccttgagatttcgatcatcgaggggcaccatttcgtccagcaggaagaggccgggacagtgaattcggaaatactctccttccttggcaagtttcccagcgagggaggatcagcgtgattgttatttattgtttgcagccagtcccggactcctgagaggaagatggcctccgaatgatccgagggtttatgattgaataaagtgagagctcagatcgatagccgtctgttggcttgcattaaaaaaataaagagcttgcatgtaaaactatttatgaacgaataaacttctgtcatatactcgcaagtctcaacattgtttacatgccagccaacgaacaactaagcagaagtgcagaacacatcatctgcagcgcacaaaagttttcttttacacaaccggggaaaacgcacagagaaaaaaaaaactgcacaagatgagccaattcatttacacagtccataaaaaggcgaacgggaacagttcagcctcgtcagcatacaggtgaagcgcacttctccgccgacggcgacgcacgcttgggcttgatggaccggaccttcacgtagcggcgcaccattccgatcaccctccgtcccgccggcacctgtccagcccgccgcgttgcctcgcctgctgcagctccttgtagttgtgcaaattcacgaacaccagcagcaggagtgttcccttccgtggtgcctccggtggcggcgccgtcgacggcctcgtcctcgatcagctcctgcagcgagaaacgacggtcctgacactcttcctccgtcgagggttctgacgcctcgtg

SEQ ID NO: 8920 - DNA, 4018 bp, Zea Mays
agatctaagatgagtgatgatgatttaatatatacatcatgtacaccaaactttcttgtacatcagatatattctcataaaatagcagctacaacaatcaaatgactagccttaatccaaacaattggctttaatccaatgctagagttgacttgtaaaggatgacatggtctcccatggtgcagaagaacgaatttcacggaataatctaaatactcattcatttgcttttggccatttctcttcttgctcaagagttcaacccaaatttctcaacgtggatagtgagcacatttgactgaccgccatagcaaccagaggaacacaaagcggcgaccgacgagccaagcaagcagcagagcatggacgcgggagaggtgcggcactggaacgcggacgtcaacggcgtctccatccacgtcgccgagcggggccccgaggatgggcccgcggtgctcctaatccacggcttcccggagctctggctctcgtggcgccaccagatggccgcgctcgccgcccgcgggttccgcgcgctggctcccgatctccgcggctacggcgactcctccgtgccgtccgaccccgccgcctacaccatcttccacatcgttggcgacatcgtcgcgctccttgaccacctccaagttccaactcacaaaggtgttcgtggtggggcacgactggggcgcgcaggtggcgtggcacctctgcctgttccggccggaccgggtgcgcgccgccgccgttctaggaataccgtactacgctcgacaagctcaccccatcatggaggtcttcgcggcgtttggcgatggcttttacataaatcagtttcaggagcccggaagagctgaagccgcattcgctcaatacgatgttgcaactgtactaaagaagttctactccattgaaatagatgaactcactgctcctcctggagtggagatcatagactttctcgaggcatctccatcaccacttccttggctcagcgaggaagaactgggccagtacgccgaaaagtttcggaagtctgggttcactggacccctcaactactaccgcatgtgggagacgaattggagacttcttgcaccctggaacgaggccaagattacagtgcccgtcaagttcatagctggtgataaggacatcggtgtccagtcctttggggttgagaagtacatcaagagtggggaattcaagtccactgtcccagatcttgaagtcgcggtcattgaaggccaccattttctccagcaagaacaggccgagagggtgaattcggagataatttcctacctcgtcaggtttactagccaggaggcatcatcttgatgctttgctcccagttgaacctgaccagaaaaaaaatgatgtgcgatgggactccatttctttctgaactgaaaaggtcttgaattgccgaataaagtgtgagtagagttgaaaagggatggaagtcccgtccgtactgttttccacatttgacccgtccgttttcgtatttgtggaaaaatctagaaataggacagaaacgagagaggatctatcccgaccatttttgcggaatcccgtttttttctagatttaacccatatttattccgtattcaagaaaccaagatgacccaatatgtattagtttacaaactaaagcatcatattttaaagttatatattataacataaatggtcattctagtcaccggctctcctcaataataagtggtctaaaagttcaaacaacatcgatcgtagctatatgtacaccgctaataatcaaacaacaattaaatgttatctttttatatctatttgttttatgttattgccttgctagtcagttatcaatatcatatgtgtgtctatattaaattacgagtttctgcttaatattttcgctctcattcattttcgtacacctgtttattccgctcccgttttcgtacccgactattctagaatcggttctgtttccgatgatataatgtggcaaccgaaacaagataggggttgttttgttttcatcccaaattaagtgtgagctaggcatttgctggcttgatgttacttgtacgaataaaaagagcacgtgacaaaaaaaaaacttggtgctcaaagcttgcgtgcttgtgttgcttctgctagtcattgcagccttgcagtcttgtaggcagaaggtgcaatcgacgcgtgcactatggaacatgtgatccagaacgagccaggtggttgagatgattagtatttatggttgagatgatttgtatttctggaagtgagaacagccattgagcagcaggtagcgcgtcaagcgagcagagcagcgaaaagcatggatgccgaagccgccgccgccgagggccaggtgcggcactggaccgcggacgtcaacggcatttccctccacgtcgccgagcgcggcgccgccgacgcgccggcggtcctcctcatccacggcttcccggagctctggctctcgtggcgccaccagatggccgcgctcgccgcccgcggcttccgcgcgctggctcccgacctccgtggctacggcgactcgtctgtgcccaccgaccccgccgcctactccatcctccacctcgtcggcgacttggtcgcgctccttgaccacctccaactcacaaaggtgttcgtggttgggcacgactggggcgcgatggtggcgtggcacctctgcctgttccggccggaccgggtgcgcgccgctgttgtcctggggatcccctacttcccccgcggccctcgcccgatgacggactcatttgccaagctcggcgatggattctacatcaatcagttccaggagccaggaagagccgagagggcatttgctcgctacgatgttgcgacggtcctaaagaagttctacgccttgaaaatcgacgagatgattgctcctcctggagtggagatcatagactttctccaggcaccttcttcgccgattccctggatgacagacgaagaactgggacggtacgccgagaagttcgagaagactggcttcacaggacccctcaactactaccgcatgcttgaaacaaactggagactgactgcaccttggagtggatcgaaaatcacagtgcctgcgaaattcatactcagcaagaacgacgtcggcctgcagtccttcggaaccgagaagtacgtcaagagtggcgctctgaaggagaacgttccagaccttgagatttcgatcatcgaggggcaccatttcgtccagcaggaagaggccgggacagtgaattcggaaatactctccttccttggcaagtttcccagcgagggaggatcagcgtgattgttatttattgtttgcagccagtcccggactcctgagaggaagatggcctccgaatgatccgagggtttatgattgaataaagtgagagctcagatcgatagccgtctgttggcttgcattaaaaaaataaagagcttgcatgtaaaactatttatgaacgaataaacttctgtcatatactcgcaagtctcaacattgtttacatgccagccaacgaacaactaagcagaagtgcagaacacatcatctgcagcgcacaaaagttttcttttacacaaccggggaaaacgcacagagaaaaaaaaaactgcacaagatgagccaattcatttacacagtccataaaaaggcgaacgggaacagttcagcctcgtcagcatacaggtgaagcgcacttctccgccgacggcgacgcacgcttgggcttgatggaccggaccttcacgtagcggcgcaccattccgatcaccctccgtcccgccggcacctgtccagcccgccgcgttgcctcgcctgctgcagctccttgtagttgtgcaaattcacgaacaccagcagcaggagtgttcccttccgtggtgcctccggtggcggcgccgtcgacggcctcgtcctcgatcagctcctgcagcgagaaacgacggtcctgacactcttcctccgtcgagggttctgacgcctcgtg

SEQ ID NO: 8921 - DNA, 754 bp, Zea Mays
ttttacataaatcagtttcagattcatatttgcaggagcccggaagagctgaagccgcattcgctcaatacgatgttgcaactgtactaaagaagttctactccattgaaatagatgaactcactgctcctcctggagtggagatcatagactttctcgaggcatctccatcaccacttccttggctcagcgaggaagaactgggccagtacgccgaaaagtttcggaagtctgggttcactggacccctcaactactaccgcatgtgggagacgaattggagacttcttgcaccctggaacgaggccaagattacagtgcccgtcaagttcatagctggtgataaggacatcggtgtccagtcctttggggttgagaagtacatcaagagtggggaattcaagtccactgtcccagatcttgaagtcgcggtcattgaaggccaccattttctccagcaagaacaggccgagagggtgaattcggagataatttcctacctcgtcaggtttactagccaggaggcatcatcttgatgctttgctcccagttgaacctgaccagaaaaaaaatgatgtgcgatgggactccatttctttctgaactgaaaaggtcttgaattgccgaataaagtgtgagtagagttgaaaagggatggaagtcccgtccgtactgttttccacatttgacccgtccgttttcgtatttgtggaaaaatctagaaataggacagaaacgagagaggatctatccc

SEQ ID NO: 8922 - DNA, 1480 bp, Zea Mays
agatctaagatgagtgatgatgatttaatatatacatcatgtacaccaaactttcttgtacatcagatatattctcataaaatagcagctacaacaatcaaatgactagccttaatccaaacaattggctttaatccaatgctagagttgacttgtaaaggatgacatggtctcccatggtgcagaagaacgaatttcacggaataatctaaatactcattcatttgcttttggccatttctcttcttgctcaagagttcaacccaaatttctcaacgtggatagtgagcacatttgactgaccgccatagcaaccagaggaacacaaagcggcgaccgacgagccaagcaagcagcagagcatggacgcgggagaggtgcggcactggaacgcggacgtcaacggcgtctccatccacgtcgccgagcggggccccgaggatgggcccgcggtgctcctaatccacggcttcccggagctctggctctcgtggcgccaccagatggccgcgctcgccgcccgcgggttccgcgcgctggctcccgatctccgcggctacggcgactcctccgtgccgtccgaccccgccgcctacaccatcttccacatcgttggcgacatcgtcgcgctccttgaccacctccaagttccaactcacaaaggtgttcgtggtggggcacgactggggcgcgcaggtggcgtggcacctctgcctgttccggccggaccgggtgcgcgccgccgccgttctaggaataccgtactacgctcgacaagctcaccccatcatggaggtcttcgcggcgtttggcgatggcttttacataaatcagtttcagatgaactcactgctcctcctggagtggagatcatagactttctcgaggcatctccatcaccacttccttggctcagcgaggaagaactgggccagtacgccgaaaagtttcggaagtctgggttcactggacccctcaactactaccgcatgtgggagacgaattggagacttcttgcaccctggaacgaggccaagattacagtgcccgtcaagttcatagctggtgataaggacatcggtgtccagtcctttggggttgagaagtacatcaagagtggggaattcaagtccactgtcccagatcttgaagtcgcggtcattgaaggccaccattttctccagcaagaacaggccgagagggtgaattcggagataatttcctacctcgtcaggtttactagccaggaggcatcatcttgatgctttgctcccagttgaacctgaccagaaaaaaaatgatgtgcgatgggactccatttctttctgaactgaaaaggtcttgaattgccgaataaagtgtgagtagagttgaaaagggatggaagtcccgtccgtactgttttccacatttgacccgtccgttttcgtatttgtggaaaaatctagaaataggacagaaacgagagaggatctatccc

SEQ ID NO: 8923 - DNA, 585 bp, Zea Mays
ctaaatcttaactacaagttagctgttggtaattatattctgtatgactcgtggtcaccagcgatgaccgtgagctctgtctgtatcagtatcctgtctatgttgtctagttcgccagcaaagcaacgcccggcggacaatgaccgctatgttaggaactgccgcaacgggaggtcgccaaaggagactagatggtggttccatgacgacacggtgtaatgatctctgtggcattgcctgtcagccttctgtactgtgatatatctcttcaagggggagatgagatgatttaggcctatttctaagcagccctctattggattgcgaagcttaccttgctgtggtggtatgtaaatgagttgctcacgtgtcagtctgggaatatgtgttatcaccatcaatgatataatatagaataaagcaagattgtaccctgcctaagtcactgaaacgagctcaaaagtaatgtgcaggtttgactatgatttgttgtggtcaatgtgccttcgtatcagtctgcagtctgcttatgcatttgcctatttgttcattgtagtgctgtactgctgctactgtgatagttcc

SEQ ID NO: 8924 - DNA, 2972 bp, Zea Mays
gacgactcgtcgtccccccatgtccggtacgtacgaggccaaacccggcacaccttgtctctgtctctcatctcatggtggtgggccaggcaaggacactgacatctgggcccaagcaggcgcacagcatgtgggcctacttgccattgggataaaggccaactcggtcactgcgctccttctccttccttctctcacacactccactgctcccctcctttttccttcaaatcctcccaacaccacccagggagacaaccacccccgccgcaatggacaagattgagacgacgacgaggaggaggaggaaagggagaagcagcagccgccgccgccgccagggggcacggggaccggcgggcctcgtagccacggccttggccctcctctgcgcctgcgccttctccacgcctgccgccacggctctcaccccggacggcgaggcgttgctggagctcaagctggccttcaacgccaccgtgcatcatcggctcaccagctggcggcgcagcgaccccaacccctgtgtctgggagggcatctcctgctccgtccccgacctcagggtacaatccataaatctcccatacatgcagcttgggggcatcatttcgcccagcatcgggaggctggacaagctgcagagactagctctgcaccagaacagcttgcacggcccaatccccgcagagatcaagaactgcaccgagctcagggcaatttacctgagagccaactacctgcaaggaggtatcccttcggagattggcgagctcgtgcacctcaccatcttggacctgtcaagcaatctgttgaggggaacgataccggcctccatcggaagcctcactcaccttcgcttcctccagacccaggcccgttgtgtgcattgaccatgaacgagtatgcgattggttgcctgtgccatccgaacgcagcctgcacgcgcggaaacaggccaggcgttttttcagccctcagcctgcacgcgcggagacacagaaaagacgcttctccggtcgcccaggccggcgtgggcgtggctcgcattggcactgcaaccaatcacgtagtatgtatctcccaggaacctgtctactaatttcttctccggagagatcccaaatgtcggtgtcctcggagccttcaaaagcagctcgttcgttggaaatctggagctctgtggcctgtccatccagaaagcttgccgtggaaccctcggctttcctgccgtgctgccccactccgatccgctctcttcagctggcggtgtctctccaatcagtaacaacaacaagaagacatcgcgctttctgaatggcgtcgtgatcggctcgatgtcaaccttggctcttgccctgatcgctgtgctcggattcctgtggatctgcttgctgtccaggaagaagagcgtcggtggaaactacgtaaagatggacaagaaaactgttcctgacggcgcgaagcttgtgacgtaccagtggaaccttccgtactcgtcgagtgagatcattagaaggctggagctgcttgacgaagaggatgtggttggctgcgggggcttcggcacggtgtacagaatggtgatggacgatggcacgtcgttcgccgtcaagaggattgatctcagccgccaaagccgcgacaggaccatggagaaggagctcgagttcctgggcagcatcaggcacataaatcttgtcactttgcgaggctactgccggctgctccctgcagcaaagctactcgtatacgatttcgttgagctgggcagcttggactgctaccttcatggagatggacaagaggaccagccgttgaactggaacgcgcgtatgaagatcgcccttggctcggctcgaggcctggcatatctgcaccatgattgctcgcctgggatcgtgcacagggacatcaaggccagcaatatcctgctggacagaagcttggagcctcgtgtctctgattttggacttgcaaagctgcttgtagacaatgccgccgcccatgttaccactgttgtggcgggcacctttggatacctagcaccagagtacttgcaaaacgggcatgctactgagaaatcagacgtgtatagctttggagtgcttttgctggagctagtgacgggaaagaggccaaccgattcatgcttcatcaagaagggactgaacattgttggctggctgaacaccctgacgggggagcaccggctggaggatatcgttgacgagcgatgcggcgacgtcgaggtggaagccgtggaagccatcctggacatcgcagcgatgtgcaccgacgcagacccggcgcagcggccgtccatgagcgctgtcctcaagatgctggaggaagagatcctgtccccctgcatgagcgagctgtgctacgagcagcacctggagctctgagccgaggaagcctgacctgactacgatgcagtgcatgatggatgagactgtgtaggaaacaaaagttttgtagatatgacgatgatgaaccgcgtacgtagtgtaggtgtttgtgagcagctcaaaagtaggacaagtgcagaaccaacaacctgatcggcacgttacatacatagatcttctctctgtctgtcttctaatcctttttggcctttttgttctcagttttctttggacggccgtattctgtagatgagctgggaaacagtgaacggcattgagacctgagaatgaataccagagcaggacaaaataacaacagcagagggtgtttcggtataaaaagaaagacggtttaaagaaaactgatttttacaatgtccaaaccgaaaggacagttaagactgcaatatctaaactagaacctgataactgggatacagagcaccaccagtgaccagagcattgcaaagttgacgagtgaaggtaatacttgtccatacatgatgtaccagcatgtgagccttgcaaagttgacaagttcatgattcttattacaat

SEQ ID NO: 8925 - DNA, 2967 bp, Zea Mays
gacgactcgtcgtccccccatgtccggtacgtacgaggccaaacccggcacaccttgtctctgtctctcatctcatggtggtgggccaggcaaggacactgacatctgggcccaagcaggcgcacagcatgtgggcctacttgccattgggataaaggccaactcggtcactgcgctccttctccttccttctctcacacactccactgctcccctcctttttccttcaaatcctcccaacaccacccagggagacaaccacccccgccgcaatggacaagattgagacgacgacgaggaggaggaggaaagggagaagcagcagccgccgccgccgccagggggcacggggaccggcgggcctcgtagccacggccttggccctcctctgcgcctgcgccttctccacgcctgccgccacggctctcaccccggacggcgaggcgttgctggagctcaagctggccttcaacgccaccgtgcatcatcggctcaccagctggcggcgcagcgaccccaacccctgtgtctgggagggcatctcctgctccgtccccgacctcagggtacaatccataaatctcccatacatgcagcttgggggcatcatttcgcccagcatcgggaggctggacaagctgcagagacagctctgcaccagaacagcttgcacggcccaatccccgcagagatcaagaactgcaccgagctcagggcaatttacctgagagccaactacctgcaaggaggtatcccttcggagattggcgagctcgtgcacctcaccatcttggacctgtcaagcaatctgttgaggggaacgataccggcctccatcggaagcctcactcaccttcgcttcctacccaggcccgttgtgtgcattgaccatgaacgagtatgcgattggttgcctgtgccatccgaacgcagcctgcacgcgcggaaacaggccaggcgttttttcagccctcagcctgcacgcgcggagacacagaaaagacgcttctccggtcgcccaggccggcgtgggcgtggctcgcattggcactgcaaccaatcacgtagtatgtatctcccaggaacctgtctactaatttcttctccggagagatcccaaatgtcggtgtcctcggagccttcaaaagcagctcgttcgttggaaatctggagctctgtggcctgtccatccagaaagcttgccgtggaaccctcggctttcctgccgtgctgccccactccgatccgctctcttcagctggcggtgtctctccaatcagtaacaacaacaagaagacatcgcgctttctgaatggcgtcgtgatcggctcgatgtcaaccttggctcttgccctgatcgctgtgctcggattcctgtggatctgcttgctgtccaggaagaagagcgtcggtggaaactacgtaaagatggacaagaaaactgttcctgacggcgcgaagcttgtgacgtaccagtggaaccttccgtactcgtcgagtgagatcattagaaggctggagctgcttgacgaagaggatgtggttggctgcgggggcttcggcacggtgtacagaatggtgatggacgatggcacgtcgttcgccgtcaagaggattgatctcagccgccaaagccgcgacaggaccatggagaaggagctcgagttcctgggcagcatcaggcacataaatcttgtcactttgcgaggctactgccggctgctccctgcagcaaagctactcgtatacgatttcgttgagctgggcagcttggactgctaccttcatggagatggacaagaggaccagccgttgaactggaacgcgcgtatgaagatcgcccttggctcggctcgaggcctggcatatctgcaccatgattgctcgcctgggatcgtgcacagggacatcaaggccagcaatatcctgctggacagaagcttggagcctcgtgtctctgattttggacttgcaaagctgcttgtagacaatgccgccgcccatgttaccactgttgtggcgggcacctttggatacctagcaccagagtacttgcaaaacgggcatgctactgagaaatcagacgtgtatagctttggagtgcttttgctggagctagtgacgggaaagaggccaaccgattcatgcttcatcaagaagggactgaacattgttggctggctgaacaccctgacgggggagcaccggctggaggatatcgttgacgagcgatgcggcgacgtcgaggtggaagccgtggaagccatcctggacatcgcagcgatgtgcaccgacgcagacccggcgcagcggccgtccatgagcgctgtcctcaagatgctggaggaagagatcctgtccccctgcatgagcgagctgtgctacgagcagcacctggagctctgagccgaggaagcctgacctgactacgatgcagtgcatgatggatgagactgtgtaggaaacaaaagttttgtagatatgacgatgatgaaccgcgtacgtagtgtaggtgtttgtgagcagctcaaaagtaggacaagtgcagaaccaacaacctgatcggcacgttacatacatagatcttctctctgtctgtcttctaatcctttttggcctttttgttctcagttttctttggacggccgtattctgtagatgagctgggaaacagtgaacggcattgagacctgagaatgaataccagagcaggacaaaataacaacagcagagggtgtttcggtataaaaagaaagacggtttaaagaaaactgatttttacaatgtccaaaccgaaaggacagttaagactgcaatatctaaactagaacctgataactgggatacagagcaccaccagtgaccagagcattgcaaagttgacgagtgaaggtaatacttgtccatacatgatgtaccagcatgtgagccttgcaaagttgacaagttcatgattcttattacaat

SEQ ID NO: 8926 - DNA, 3076 bp, Zea Mays
gacgactcgtcgtccccccatgtccggtacgtacgaggccaaacccggcacaccttgtctctgtctctcatctcatggtggtgggccaggcaaggacactgacatctgggcccaagcaggcgcacagcatgtgggcctacttgccattgggataaaggccaactcggtcactgcgctccttctccttccttctctcacacactccactgctcccctcctttttccttcaaatcctcccaacaccacccagggagacaaccacccccgccgcaatggacaagattgagacgacgacgaggaggaggaggaaagggagaagcagcagccgccgccgccgccagggggcacggggaccggcgggcctcgtagccacggccttggccctcctctgcgcctgcgccttctccacgcctgccgccacggctctcaccccggacggcgaggcgttgctggagctcaagctggccttcaacgccaccgtgcatcatcggctcaccagctggcggcgcagcgaccccaacccctgtgtctgggagggcatctcctgctccgtccccgacctcagggtacaatccataaatctcccatacatgcagcttgggggcatcatttcgcccagcatcgggaggctggacaagctgcagagactagctctgcaccagaacagcttgcacggcccaatccccgcagagatcaagaactgcaccgagctcagggcaatgaggtatcccttcggagattggcgagctcgtgcacctcaccatcttggacctgtcaagcaatctgttgaggggaacgataccggcctccatcggaagcctcactcaccttcgcttcctccagacccaggcccgttgtgtgcattgaccatgaacgagtatgcgattggttgcctgtgccatccgaacgcagcctgcacgcgcggaaacaggccaggcgttttttcagccctcagcctgcacgcgcggagacacagaaaagacgcttctccggtcgcccaggccggcgtgggcgtggctcgcattggcactgcaaccaatcacgtagtatgtatctcccaggaacctgtctactaatttcttctccggagagatcccaaatgtcggtgtcctcggagccttcaaaagcagctcgttcgttggaaatctggagctctgtggcctgtccatccagaaagcttgccgtggaaccctcggctttcctgccgtgctgccccactccgatccgctctcttcagctggcggtgtctctccaatcagtaacaacaacaagaagacatcgcgctttctgaatggcgtcgtgatcggctcgatgtcaaccttggctcttgccctgatcgctgtgctcggattcctgtggatctgcttgctgtccaggaagaagagcgtcggtggaaactacgtaaagatggacaagaaaactgttcctgacggcgcgaagcttgtgacgtaccagtggaaccttccgtactcgtcgagtgagatcattagaaggctggagctgcttgacgaagaggatgtggttggctgcgggggcttcggcacggtgtacagaatggtgatggacgatggcacgtcgttcgccgtcaagaggattgatctcagccgccaaagccgcgacaggaccatggagaaggagctcgagttcctgggcagcatcaggcacataaatcttgtcactttgcgaggctactgccggctgctccctgcagcaaagctactcgtatacgatttcgttgagctgggcagcttggactgctaccttcatggagatggacaagaggaccagccgttgaactggaacgcgcgtatgaagatcgcccttggctcggctcgaggcctggcatatctgcaccatgattgctcgcctgggatcgtgcacagggacatcaaggccagcaatatcctgctggacagaagcttggagcctcgtgtctctgattttggacttgcaaagctgcttgtagacaatgccgccgcccatgttaccactgttgtggcgggcacctttggatacctagcaccaggtacatctcctgcctatcttcttgccagatgatatcgttgtagtgggaaaaaaaaacaaggcatctagtagctatgaagttggtgaaactaaaactggctggttgctttggctttggtggctggcaacagagtacttgcaaaacgggcatgctactgagaaatcagacgtgtatagctttggagtgcttttgctggagctagtgacgggaaagaggccaaccgattcatgcttcatcaagaagggactgaacattgttggctggctgaacaccctgacgggggagcaccggctggaggatatcgttgacgagcgatgcggcgacgtcgaggtggaagccgtggaagccatcctggacatcgcagcgatgtgcaccgacgcagacccggcgcagcggccgtccatgagcgctgtcctcaagatgctggaggaagagatcctgtccccctgcatgagcgagctgtgctacgagcagcacctggagctctgagccgaggaagcctgacctgactacgatgcagtgcatgatggatgagactgtgtaggaaacaaaagttttgtagatatgacgatgatgaaccgcgtacgtagtgtaggtgtttgtgagcagctcaaaagtaggacaagtgcagaaccaacaacctgatcggcacgttacatacatagatcttctctctgtctgtcttctaatcctttttggcctttttgttctcagttttctttggacggccgtattctgtagatgagctgggaaacagtgaacggcattgagacctgagaatgaataccagagcaggacaaaataacaacagcagagggtgtttcggtataaaaagaaagacggtttaaagaaaactgatttttacaatgtccaaaccgaaaggacagttaagactgcaatatctaaactagaacctgataactgggatacagagcaccaccagtgaccagagcattgcaaagttgacgagtgaaggtaatacttgtccatacatgatgtaccagcatgtgagccttgcaaagttgacaagttcatgattcttattacaat

SEQ ID NO: 8927 - DNA, 3052 bp, Zea Mays
actgcctagtaatattacaacagtaatttaccataggagcttaatatttccttgaccaatcttcaacggctagttggtttggttgacgactcgtcgtccccccatgtccggtacgtacgaggccaaacccggcacaccttgtctctgtctctcatctcatggtggtgggccaggcaaggacactgacatctgggcccaagcaggcgcacagcatgtgggcctacttgccattgggataaaggccaactcggtcactgcgctccttctccttccttctctcacacactccactgctcccctcctttttccttcaaatcctcccaacaccacccagggagacaaccacccccgccgcaatggacaagattgagacgacgacgaggaggaggaggaaagggagaagcagcagccgccgccgccgccagggggcacggggaccggcgggcctcgtagccacggccttggccctcctctgcgcctgcgccttctccacgcctgccgccacggctctcaccccggacggcgaggcgttgctggagctcaagctggccttcaacgccaccgtgcatcatcggctcaccagctggcggcgcagcgaccccaacccctgtgtctgggagggcatctcctgctccgtccccgacctcagggtacaatccataaatctcccatacatgcagcttgggggcatcatttcgcccagcatcgggaggctggacaagctgcagagactagctctgcaccagaacagcttgcacggcccaatccccgcagagatcaagaactgcaccgagctcagggcaatttacctgagagccaactacctgcaaggaggtatcccttcggagattggcgagctcgtgcacctcaccatcttggacctgtcaagcaatctgttgaggggaacgataccggcctccatcggaagcctcactcaccttcgcttcctacccaggcccgttgtgtgcattgaccatgaacgagtatgcgattggttgcctgtgccatccgaacgcagcctgcacgcgcggaaacaggccaggcgttttttcagccctcagcctgcacgcgcggagacacagaaaagacgcttctccggtcgcccaggccggcgtgggcgtggctcgcattggcactgcaaccaatcacgtagtatgtatctcccaggaacctgtctactaatttcttctccggagagatcccaaatgtcggtgtcctcggagccttcaaaagcagctcgttcgttggaaatctggagctctgtggcctgtccatccagaaagcttgccgtggaaccctcggctttcctgccgtgctgccccactccgatccgctctcttcagctggcggtgtctctccaatcagtaacaacaacaagaagacatcgcgctttctgaatggcgtcgtgatcggctcgatgtcaaccttggctcttgccctgatcgctgtgctcggattcctgtggatctgcttgctgtccaggaagaagagcgtcggtggaaactacgtaaagatggacaagaaaactgttcctgacggcgcgaagcttgtgacgtaccagtggaaccttccgtactcgtcgagtgagatcattagaaggctggagctgcttgacgaagaggatgtggttggctgcgggggcttcggcacggtgtacagaatggtgatggacgatggcacgtcgttcgccgtcaagaggattgatctcagccgccaaagccgcgacaggaccatggagaaggagctcgagttcctgggcagcatcaggcacataaatcttgtcactttgcgaggctactgccggctgctccctgcagcaaagctactcgtatacgatttcgttgagctgggcagcttggactgctaccttcatggagatggacaagaggaccagccgttgaactggaacgcgcgtatgaagatcgcccttggctcggctcgaggcctggcatatctgcaccatgattgctcgcctgggatcgtgcacagggacatcaaggccagcaatatcctgctggacagaagcttggagcctcgtgtctctgattttggacttgcaaagctgcttgtagacaatgccgccgcccatgttaccactgttgtggcgggcacctttggatacctagcaccagagtacttgcaaaacgggcatgctactgagaaatcagacgtgtatagctttggagtgcttttgctggagctagtgacgggaaagaggccaaccgattcatgcttcatcaagaagggactgaacattgttggctggctgaacaccctgacgggggagcaccggctggaggatatcgttgacgagcgatgcggcgacgtcgaggtggaagccgtggaagccatcctggacatcgcagcgatgtgcaccgacgcagacccggcgcagcggccgtccatgagcgctgtcctcaagatgctggaggaagagatcctgtccccctgcatgagcgagctgtgctacgagcagcacctggagctctgagccgaggaagcctgacctgactacgatgcagtgcatgatggatgagactgtgtaggaaacaaaagttttgtagatatgacgatgatgaaccgcgtacgtagtgtaggtgtttgtgagcagctcaaaagtaggacaagtgcagaaccaacaacctgatcggcacgttacatacatagatcttctctctgtctgtcttctaatcctttttggcctttttgttctcagttttctttggacggccgtattctgtagatgagctgggaaacagtgaacggcattgagacctgagaatgaataccagagcaggacaaaataacaacagcagagggtgtttcggtataaaaagaaagacggtttaaagaaaactgatttttacaatgtccaaaccgaaaggacagttaagactgcaatatctaaactagaacctgataactgggatacagagcaccaccagtgaccagagcattgcaaagttgacgagtgaaggtaatacttgtccatacatgatgtaccagcatgtgagccttgcaaagttgacaagttcatgattcttattacaat

SEQ ID NO: 8928 - DNA, 1805 bp, Zea Mays
tctcgccctctgctcttctcttggcggcctaccctactcggtcgctcggtgttgttagtcccgaccgccgccggccatggcatccaacggcatcgccccaagagatgtatgtgttgttggcgttgcacgcacccctttgggtggtttccttggtgccttgtcttccttgcccgcaacaaagcttggttctatagcaattgaagctgctctgaaaagagcaaatgtggatccggccctcgtgcaggaggtctttttcggaaacgtcttgagtgctaatttgggacaagctcctgcaaggcaagccgctctgggtgcagggataccaaacactgttgtttgcaccactgttaacaaagtctgcgcatctggcatgaaagctactatgttcgccgcacagtcaattcagctgggtatcaatgatattgttgtggcaggtggcatggaaagcatgtccaatgccccaaagtacattgctgaagctaggaaagggtctcgttttggacatgacacacttgttgatgccatgcttaaggatggactttgggatgtatacaatgactgtgccatgggaatgtgtgccgaactttgtgctgacaatcatgccctcacaagagaagaccaggatgcttttgctatccaaagcaaccagcgtggaattgctgctcgtgacagtggtgcttttgcatgggagattgttccgattgaagttcctgttgggagaggaaaaccacctgtacttattgagaaagatgaaagcctggataagtttgacccagcaaaactgaagaaacttcgcccaagtttcaaggagaatggtggtaccgttacagctggaaatgcttctagtataagtgatggggcggctgcattagttttggtgagtgggcagaaggctcaagagcttggcctgcaagtccttgcaaggatcagaggatatgcagatgcggctcaagctccggaactttttacaaccaccccagcacttgcgataccaaaggctatatcaaatgctggattagagtcatcccatgttgatttttttgagattaatgaagcattttctgctgtcgcacttgcaaatcaaaagcttcttgggattccttcagaaaagattaatgtccatggaggagctgtgtctctagggcatcctcttgggtgcagcggtgctcgcattttggtcacccttcttggtgtccttagggaaaagggcggcaagatcggtgttgctggtgtctgcaacggcggaggtggagcatcagctcttgttctcgaactcgcataagaagcattggcttgaagcactggatatgtagttaattcagtcgcatgcatctatgcatgattgatgtatgtgtagtgctggacattcttaagttaattcggcaataaagtgtgttgtgcttctgctacctgcatcttagataagagaaatggagcagcctctttgatcagttcaattcatctttacatcccacttggagactccggtttcaagtattttttttttgaactgaagctcgtctgcttaaactctgagggtcttgctgatattggagaagccaggtttcagtccaggtagagcaggacatggtgcaagtcagttgtgtgttactgatgcttccaaaattgccttggtcagctacttatcaccagttctcagattttctttcccctgtgaatgcaactctgttctgagccctgtggatgaatggtcggtataaacatgctctcttctccaaaattgagatggatgctaatcatgttgatatcatatggatggaggagtcatcaagcaataatatagt

SEQ ID NO: 8929 - DNA, 2124 bp, Zea Mays
cccaactgcccgcgttcccgtgcccgtactaaaaataaataacggactgccatctcctcgtgcactccgccaaccgccgccgccactcgccactctcacgtctcgcccatcccgccactgctgctctccagagtccaggcgacccaggctgcgcggtcgctcggtgttgttagtcccgaccgccgccggccatggcatccaacggcatcgccccaagagatgtatgtgttgttggcgttgcacgcacccctttgggtggtttccttggtgccttgtcttccttgcccgcaacaaagcttggttctatagcaattgaagctgctctgaaaagagcaaatgtggatccggccctcgtgcaggaggtctttttcggaaacgtcttgagtgctaatttgggacaagctcctgcaaggcaagccgctctgggtgcagggataccaaacactgttgtttgcaccactgttaacaaagtctgcgcatctggcatgaaagctactatgttcgccgcacagtcaattcagctgggtatcaatgatattgttgtggcaggtggcatggaaagcatgtccaatgccccaaagtacattgctgaagctaggaaagggtctcgttttggacatgacacacttgttgatgccatgcttaaggatggactttgggatgtatacaatgactgtgccatgggaatgtgtgccgaactttgtgctgacaatcatgccctcacaagagaagaccaggatgcttttgctatccaaagcaaccagcgtggaattgctgctcgtgacagtggtgcttttgcatgggagattgttccgattgaagttcctgttgggagaggaaaaccacctgtacttattgagaaagatgaaagcctggataagtttgacccagcaaaactgaagaaacttcgcccaagtttcaaggagaatggtggtaccgttacagctggaaatgcttctagtataagtgatggggcggctgcattagttttggtgagtgggcagaaggctcaagagcttggcctgcaagtccttgcaaggatcagaggatatgcagatgcggctcaagtaagctacattaaaaaatatctcacttgagatgagagtatattttgtcttgatatttacattgtgacctaaatgttcaaggatattgggagtttattttctcggacggttttatgctctattttagacatcaaagtttgtcaattattaaaattatattctggaattatattttgtaaccttgaatgtttgttgtttatacaggctccggaactttttacaaccaccccagcacttgcgataccaaaggctatatcaaatgctggattagagtcatcccatgttgatttttttgagattaatgaagcattttctgctgtcgcacttgcaaatcaaaagcttcttgggattccttcagaaaagattaatgtccatggaggagctgtgtctctagggcatcctcttgggtgcagcggtgctcgcattttggtcacccttcttggtgtccttagggaaaagggcggcaagatcggtgttgctggtgtctgcaacggcggaggtggagcatcagctcttgttctcgaactcgcataagaagcattggcttgaagcactggatatgtagttaattcagtcgcatgcatctatgcatgattgatgtatgtgtagtgctggacattcttaagttaattcggcaataaagtgtgttgtgcttctgctacctgcatcttagataagagaaatggagcagcctctttgatcagttcaattcatctttacatcccacttggagactccggtttcaagtattttttttttgaactgaagctcgtctgcttaaactctgagggtcttgctgatattggagaagccaggtttcagtccaggtagagcaggacatggtgcaagtcagttgtgtgttactgatgcttccaaaattgccttggtcagctacttatcaccagttctcagattttctttcccctgtgaatgcaactctgttctgagccctgtggatgaatggtcggtataaacatgctctcttctccaaaattgagatggatgctaatcatgttgatatcatatggatggaggagtcatcaagcaataatatagt

SEQ ID NO: 8930 - DNA, 904 bp, Zea Mays
cccaactgcccgcgttcccgtgcccgtactaaaaataaataacggactgccatctcctcgtgcactccgccaaccgccgccgccactcgccactctcacgtctcgcccatcccgccactgctgctctccagagtccaggcgacccaggctgcgcggtcgctcggtgttgttagtcccgaccgccgccggccatggcatccaacggcatcgccccaagagatgtatgtgttgttggcgttgcacgcacccctttgggtggtttccttggtgccttgtcttccttgcccgcaacaaagcttggttctatagcaattgaagctgctctgaaaagagcaaatgtggatccggccctcgtgcaggaggtctttttcggaaacgtcttgagtgctaatttgggacaagctcctgcaaggcaagccgctctgggtgcagggataccaaacactgttgtttgcaccactgttaacaaagtctgcgcatctggcatgaaagctactatgttcgccgcacagtcaattcagctgggtatcaatgatattgttgtggcaggtggcatggaaagcatgtccaatgccccaaagtacattgctgaagctaggaaagggtctcgttttggacatgacacacttgttgatgccatgcttaaggatggactttgggatgtatacaatgactgtgccatgggaatgtgtgccgaactttgtgctgacaatcatgccctcacaagagaagaccaggatgcttttgctatccaaagcaaccagcgtggaattgctgctcgtgacagtggtgcttttgcatgggagattgttccgattgaagttcctgttgggagaggaaaaccacctgtacttattgagaaagatgaaagcctggataaggcctccttacatagggacttgtg

SEQ ID NO: 8931 - DNA, 2784 bp, Zea Mays
cacccacccactctccatggacacgggcatggagttgtcctcctccgccctccttcctccccccaccttctaggactaggcctaaggactaggagtggcgccgcggtgccgtgtggcgttgactggagatccagagggcgccatccgtcctcgatttgaacttgggttcacctcgccttttctcttcctctccctggtctgccattgaggagtcacatgtgtttcagtggcggttagaagcctacaactctacactcacgtgaagttgtggttggatttgttaaccggtgcggtagcacagatggagcttcatgcacatgccctgaggatgagacttatgctccaaaaaggcagactgcaagtgctatcgagcagaattctcattcaacccacagaacatttgtgaagattcagcctcctttgcaagatgctactagagctactggccacccagttccagctgttcatgccactacctcaacttcaggaaaggaggctgcatctagtaacagaagcaatcatcctcacagtcatcatcagatcataagaagtgattatgtacagccatctaagcagacagccagaagcatttctcaatctggaattgctggagctggtgtatattcagagctggttaatatcaggtcctcatctaataatggaagcactgatcaggctccacagatgggtactaactattcttatcagattttatctgataaccattcttctaataatagggcacagaatcaacttaactttcctgagggaaagatggcttataacccttccgtgaacaatgaatttgggaagggttacccaagagctggctatgcaaagccaaagcagagtttctcaggaccttctgtgatggtttccagttcaccatcacaaataaggagtcaagggcatcctggtctacctcctgcaaaatatcattctaatcatttcaattcagatgccaggcaagatgatgtacaaactcggaacccatcaggtcccaatgtgtttagtggttctggcaacaaaattcagggttctacaggaagggtaaaagctcatagtggaggaccccaatctaacttaagatcattgaagttattgcgatcagttgagcagtactaccacacactgcagcaaatgaaatggggtccaatgaccgagcatgttctagacaatcttcattgcaagatagatgcattccaggcaaatcaagtactcaagctgcttcatgaccacactgtcgctcttggcttctttcaatggttaaagaggcaacctggattcaagcacgatggtcatacttacacaaccatgataggcatccttggacaagccaggcaatttggtgttttgaaggaacttctggatgagatgagccgagctcactgcaaaccaactgtggtgacctacaacagaataatacatgcatatggccgtgcaaattatcttaaggaggctgtcaaagtatttgaggaaatgcaggaagctggttatgagcctgatcgggttacatattgtacattgattgatatccatgctaaagctggatacctagacattgcaatggatttatatggcaggatgcaagaagtaggcttgtcacctgatacgttcacctacagtgtcatggttaattgccttggtaaaggtggtcaattagcggctgcttataagcttttctgtgagatgattgaaaatggctgcacacctaaccttgttacttacaatattatgattgcgctccaggccaaagcaagaaattatgagaatgttgttaagctgtacaaagacatgcaggttgctgggtttcgtcctgacaaaataacttacagcatcgttatggaagttcttggtcattgcggccatctggatgaggctgaggcggtttttattgagatgaggcgtgattgggctcctgatgagccggtatatggacttttggtcgatctctggggcaaagctggcaatgttgacaaagcgctaggatggtaccaagcgatgcttcaggatggtttgcagcctaacgtgccgacctgcaattcgctcttgagtgctttcctgaagatgaacagatttcaagatgcctacatcgtgctccagaacatgcttgctcgggggcttgttccatctgtgcagacttacaccctgctactcagctgctgcaccgtgggtcaggcacagatgggtttgtgctgccagctcatggccatcactggacatccagctcacatgttcctgctgtacttgcctgatgcagaagctggtggccagaacgtcagggatcacactggttatttcttggacatgatgcacagtgaggacagagagagtaaaaggggtctaatggatgctgtcatagacttcttgcacaagtccggtctcaaggaggaagcaggctttatatgggaggttgctgcacagaagaacgtgtacccagattctgtaagggagaagagctcgtcgtattggctcatcaaccttcatctgatgtctgagggcacagcagtgactgcactgtccaggacgcttgcctggttccataggcaggttctgacattgggcactggtcctgaaagaattgacattgtcactggctggggcaggaggagcagggtaactggatcttcgctggttaggcaatcgattcaaaagcttctaaacctctttgaatccccattcttcaccacccgtggaaatactggctgctttgtcggctgcggggagccactcaacaagtggttgcacaatccttatgttgagcgcatgcatttattgtaagct

SEQ ID NO: 8932 - DNA, 2855 bp, Zea Mays
cacccacccactctccatggacacgggcatggagttgtcctcctccgccctccttcctccccccaccttctaggactaggcctaaggactaggagtggcgccgcggtgccgtgtggcgttgactggagatccagagggcgccatccgtcctcgatttgaacttgggttcacctcgccttttctcttcctctccctggtctgccattgaggagtcacatgtgtttcagtggcggttagaagcctacaactctacactcacgtgaagttgtggttggatttgttaaccgtccatgttgagggcaaagcaactcagcaccctaactcagtgtgcacggtccttctatcttaatggatcaaggtgcggtagcacagatggagcttcatgcacatgccctgaggatgagacttatgctccaaaaaggcagactgcaagtgctatcgagcagaattctcattcaacccacagaacatttgtgaagattcagcctcctttgcaagatgctactagagctactggccacccagttccagctgttcatgccactacctcaacttcaggaaaggaggctgcatctagtaacagaagcaatcatcctcacagtcatcatcagatcataagaagtgattatgtacagccatctaagcagacagccagaagcatttctcaatctggaattgctggagctggtgtatattcagagctggttaatatcaggtcctcatctaataatggaagcactgatcaggctccacagatgggtactaactattcttatcagattttatctgataaccattcttctaataatagggcacagaatcaacttaactttcctgagggaaagatggcttataacccttccgtgaacaatgaatttgggaagggttacccaagagctggctatgcaaagccaaagcagagtttctcaggaccttctgtgatggtttccagttcaccatcacaaataaggagtcaagggcatcctggtctacctcctgcaaaatatcattctaatcatttcaattcagatgccaggcaagatgatgtacaaactcggaacccatcaggtcccaatgtgtttagtggttctggcaacaaaattcagggttctacaggaagggtaaaagctcatagtggaggaccccaatctaacttaagatcattgaagttattgcgatcagttgagcagtactaccacacactgcagcaaatgaaatggggtccaatgaccgagcatgttctagacaatcttcattgcaagatagatgcattccaggcaaatcaagtactcaagctgcttcatgaccacactgtcgctcttggcttctttcaatggttaaagaggcaacctggattcaagcacgatggtcatacttacacaaccatgataggcatccttggacaagccaggcaatttggtgttttgaaggaacttctggatgagatgagccgagctcactgcaaaccaactgtggtgacctacaacagaataatacatgcatatggccgtgcaaattatcttaaggaggctgtcaaagtatttgaggaaatgcaggaagctggttatgagcctgatcgggttacatattgtacattgattgatatccatgctaaagctggatacctagacattgcaatggatttatatggcaggatgcaagaagtaggcttgtcacctgatacgttcacctacagtgtcatggttaattgccttggtaaaggtggtcaattagcggctgcttataagcttttctgtgagatgattgaaaatggctgcacacctaaccttgttacttacaatattatgattgcgctccaggccaaagcaagaaattatgagaatgttgttaagctgtacaaagacatgcaggttgctgggtttcgtcctgacaaaataacttacagcatcgttatggaagttcttggtcattgcggccatctggatgaggctgaggcggtttttattgagatgaggcgtgattgggctcctgatgagccggtatatggacttttggtcgatctctggggcaaagctggcaatgttgacaaagcgctaggatggtaccaagcgatgcttcaggatggtttgcagcctaacgtgccgacctgcaattcgctcttgagtgctttcctgaagatgaacagatttcaagatgcctacatcgtgctccagaacatgcttgctcgggggcttgttccatctgtgcagacttacaccctgctactcagctgctgcaccgtgggtcaggcacagatgggtttgtgctgccagctcatggccatcactggacatccagctcacatgttcctgctgtacttgcctgatgcagaagctggtggccagaacgtcagggatcacactggttatttcttggacatgatgcacagtgaggacagagagagtaaaaggggtctaatggatgctgtcatagacttcttgcacaagtccggtctcaaggaggaagcaggctttatatgggaggttgctgcacagaagaacgtgtacccagattctgtaagggagaagagctcgtcgtattggctcatcaaccttcatctgatgtctgagggcacagcagtgactgcactgtccaggacgcttgcctggttccataggcaggttctgacattgggcactggtcctgaaagaattgacattgtcactggctggggcaggaggagcagggtaactggatcttcgctggttaggcaatcgattcaaaagcttctaaacctctttgaatccccattcttcaccacccgtggaaatactggctgctttgtcggctgcggggagccactcaacaagtggttgcacaatccttatgttgagcgcatgcatttattgtaagct

SEQ ID NO: 8933 - DNA, 920 bp, Zea Mays
acggaagacgacaggtagtggtagtggactggtggttaattgcttctttgtttgcccactattatagcaggcacacagcccgcacgtcattaataggctacatacaatacgtcacccaacctctcgtcctcttcctctcaataatataatccccttcatccatccattccatatccttagcttccattccatccatcatatcgcgcccatggatcatcgtcagccgccgccgaataagacggcggagcttgaccccgtgctgcactccatcggcttccagatcgaggaggtgtcgccgtcgcaggtcaccggccggctccccgtcacacccagccgttccaggtgctccacggcggcgtgtcggcgctggtggcggagggcctggccagcatgggcgcgcacatggcgtcgggcttccgccgggttgccggcgtcagcctcaccatcaaccacttccgcagcgccaaggtgggagacgtcgtcctcgtccgcgccgccccgctccacgtcggccgttcgacgcaggtgtgggacgtgaagctatggaaggaggatcagcaggggaagaaggggagtcagatatccgagtcaagggtgacgctgctatgcaacctgcccgtgccggacatcctcaagcacgctggcgatgcactcaagaagtatgccgacgcccccgccgcccaaaaacccaccgccaccagcagattgtagatatatagttaagttattagtagagtgatatgcagagatttatttattttaatacataacgatataaacactcattactcatacatgtatatctagtatacaattgtacacctacatgaactattacttgtgtgttggtgtgctcttcatctctgcttgcatttttcgtctagcttaattagctttagtatggtaattttctagtgctc

SEQ ID NO: 8934 - DNA, 757 bp, Zea Mays
ctcgtttatgtaatttttaaaggaaatgttatcaaaattttatagcaatttattgaaagtattatagcaattcagtagtatagcaatttattggaagtattggaagtgtaactttagtgacatcccgagtaacgaaactacgtaattgaacggacaaaaaaaataccaaaaacagcaccttaagcgactaatattttagaacatatatagggagtactataattgtttgttatgggaacaaggaatctccttaccggagacctctatgctacggcaagaagagatgcaggaaaccgttcagaagaactttggttttggtatagagcagcaacgtcaaagtacacccagaagatgtactcgatcgatctccgtttgccaatttgttcatcatacgtacttggttggccttataaactcatagttgcatacacacaagttcatcacactgctagcctatatatatacacacacgtacacgtagctcagccgcagctgcagcagcgaaacgcctaaaaggtttgaggttgcctctgatgacatggactccgccggcggcaagggtggagggtgatgatgcggttgtagcactagggggactagcgttgccgttgccattgcggtgcatctcctccaggtagcccagcagcaggtccagccgatccacccgcgccatcatgctcgccgtcgtcgtcgccgccatgtattgtatcgtagctgtgtgttgctgatgtatcgactgctagctcgtcgtacgagc

SEQ ID NO: 8935 - DNA, 6540 bp, Zea Mays
gagactttcaactctgttatttaaaatattttatatacctctagcccacacaatgtaatcaataaatgtggccgctcaatcaacccacaacgccatcatttcgtcagcttgcacaactaaactataaaataagtattgattattattgttacctccaaaatttatatttatagtatatttaagaaaaaagaaaaaagaatggttccacttgctaagggtgccagctccagcccagcagctagcaaagtcaacgctcttcgcgccgttccctttccttgcgctcagcgccttcctccaaatcgtcaatcgcaaccactccggccgccagcgccaggcgcaaacgcgcgcccctcccatgtccatggcgtcgcctgtcctccaccgcctgatcctactctcggtctcgctgtcggtggcaatcgccgctgccgatgccagcgctgtgcccgtcgagtacctctacccgaccctgaatctcacctacatacactccatcgacaccgacggagtcttcctccgctcccccagcgccaacttctccgccgccatctacaacgccgccggagccggccagtcctcagacgactcccagtcccgcttcttcttctccgtcctgcacactgcctcacggaccccagtctggaccgccaccgccaccggctcaaccatgttcaactccatcgtcctgtccgtcgcccccaccgggctcgctctctacgacccttccgccgccaagcccgacgacccggcctggtccacgccgcgcctccgcgaacccgtcgtagcgctgcgcctcctcgacaccggcgagctcgcgctcatcgatagccgaaacaccacgctctggtcctccttcgaccgccccaccgacacgctgctcccgggacagccgctcctcctcgggagcccgctcacgtcctccgcgtccgaccgcgacctctcccccggagcttaccgccttgtcctcacacccaacgacgcgctccttcagtgggccaccaacgcctccactgccttcctcacctactggtccatgtcctccgaccccgccgccttgcaagactccaaccaagccgtcgccgccatggccgtcaactcctccggcctctacctcttcgccgccaacggcagggacaccgtttacaggctcctcttcccttcgccgccggcgtcaaagtccgagtcgcgcatcctcaagctctacccttccggcagcctgcgtgcggtcgccctcaccgccgccgccaccgtctccaccatctgggccgcgccagccaacgactgcgacctcccgctgccgtgcccgtccctcagcctctgcacatcggacgccaacggatccacctgcacctgtcccgaggccttcagcacctactccaacggcggctgcgagccggccgacggctccgcgctgccatccatcgccgacacctgtgccaaacaagaggcaacgacgcgttacaactacgtcagcctcggcgccgggatcggctacctgtcgaccaagttcgcggtagccgatacctccggcgacgagctcccagcgtgccgcgacctctgctccgccaattgctcctgcctcggcttcttctacaagaacacctccgggtcctgcttcctcctgcacaaccggatcggctccgtcttccgcgccggcgccgacgtcgccgtgggcttcatcaagactctcccgttaccgcagcagcagcagcgcggcagtaaaggaggcgccggccgcagcacgtcaagaagagcaccagcagcagctggttcaagctgccggcgatgctgtcgtcgtcctccgccccgtccgacagcgagggcctcgacgaggacgtgctcatcccgggcctgccgacccggttcacgtacgccgacctggacgctgcgacggacggcttcaagtggcagatcggctccggcgggttcggctccgtgttccgcggcgagctccccgaccggagccccgtggcggtgaagcggatgaacgggctgggcacgcagggccggcgcgagttcctgacggagatcgccgtgatcggcaacgtccatcacgtgaacctggtgaagctccgtgggttctgcgccgagggcgcggggcggcagctgctggtgtacgagtatatgaaccggggctccctggaccagacgctcttccgcagcgcgccggcgctggagctggagtgggcggcccggctgcgggtgtgcgtgggcgcggcgcgcgggctggcgtacctccacgctgggtgcgaccgtaagatcctgcactgcgacgtgaaaccagagaacatcctcctggacgaccacggcggcgtgaagatctccgacttcgggctggcgaagctgatgagcccggagcagtcggggctgttcacgacgatgcgcggcacgcgcgggtacctggcgccggagtggctcatgaacgcgcccatcaccgacaaggcggacgtgtacagcttcggcatggtgctcctggagatcgtgcgcgggaggaagaactcaaagaagcagggggaggagcatcagatggcgagcgggtccagcgcgtcgtcgtcgtcgtcgtcatcggagagcagcggctacttccccgcgctggcgctggagctgcacgagcagggccggtacgaggagctggtggacccgaggctggaggggcgcgcggacgcggtgcaggtggaacgtgtggtgcgggtggcgctctgctgcctccacgaggacgcggcgctgcggcccaccatgacggtggtgtccgccatgctcgacggcagcatggaggcgggccagccccgggcggagctcctccggtaccttaggatgtacgggcgtgggttggtggacctgcggcccgccgctgccgggtggatggagcaagggaaagccaggggaagcgccggcggcgtcagcagtggctggtcgccgccgtcgtgcgtgtcggcgcagcagctctcgggacccagatgacgggactgtctgtctcacaccgtacagaccaaatcgatcaatgtcgtagcttttctcttccttttcgtttcggagccaagatgatttcagcagttcttgccacgacgtacactgattagcgtgatcagcagttcaatacatacagaacagcaagctattcggatcctgatttcgccaccaatggctgctgactgaaaagaaccaggagatagcgcagatgaaactagatgcagtgcccattgctgactggaaaaatgtctgcattggaatcggattacttcgccaacctagtacacaaaattgaataaacaaatcgtcagaaaaaaaacaatgtatatgaatctccacggaacaagggagtgtttattttaattcaggttcaacgcttgaacagctgtatatctttgcttaaaccagggaacgatcaaacagctgccggcaggtagtaggcaatccagcgcaaagctagcgagaagctgtttctggccgagatctcaaaccatgcctctcctctgttgatgtgacatatggggcaactgggattattcagttgaggctgaaactacaaccaacatgctcctccacacgccacttgttcctttttttaccaccaagtaagcaagtgcaacagagatcgaactcagttcacaattaatcagatctgacatattggtatgtttgacagaacctgcgactctgaacgtcattaagtggattatatatgtatgtttctcccttactttcctaatctagtactcattggctgcccttttagttctatagaccaaagtgcctacgaacagattagctaatcaaacatattcctaagcggccaaactggtttggcgtggctgcattccaggactgttccactggctatatataacaagtgaaggtgtgtaccaaaatacaagcagtttacagcctgctgggcgtacttggtttggtggtcaatttttgtgcttgggaggttacgctatctccagcagatcccttattatttcagacttctctctacaaacaatgtcatctacaattccacgtctcttatttgtcacactttactggagacagtcttatctctcttgtttatgctagccgagaagttttactagatattcagtgaaactgtatgcctaagggctacatatcacacggccctgcataggacatttggactggtaatgtaaattagtacttatagtgtggttacagttccacccacagaaaaatgtccatggaggcgctcctcctcctgtgcaaaccgaaggtgccatggaccatgctctacagttgcattattttaagcctttcaaagtagtgctgcgaaaaaagctcgaagctcgcgagccgagccaggttttcgagctcgttaagataacgagccgctctggctcgcgagctgcacaaaattaataaacctacacaataatgattgatattggataattttatagatatctgactcgtttcttagtctttaatgatggatatatgacaattatatcttagattacttgtaatgttgggttatgattatttatttcacatttatagactattaattcactatataatgcaatattagttttcaaggtgcagcttgtgagcccgagcctccttttacaactcggtgagtaggcgagctgagccgagctcggccactgagcgagccacatcgagctgagccgagctcgactcgtttctagccctattccaaagtgagtatgaaaagtcactagcagcctatgtagtaggttcaaatggaactaatgaatttgtcattgcaattggagcttatggagggacagttacacttgatgaagagcgaaaggttatactggatcctactagtcagattgtctcatgcaaatgttgactctttgagagaactggtatattatgtaggcatggactaaaaggtctccatttgttgaacattaaattactgcctgaaagatatattttgaagcgatggactcgatgtagatatgcatgggacggatatagtggaaaatcctaatttagaatttagatgccacacttgggtaaaaaaaaatccttgccaaagacttcttccactagcttcaagagctgctgaatatgaagactgctacttgcttgtggaagaggcacttcatagagtgagtaagcaaggggaagaagaagaaacccgaggaactcctaatgtggatgctagcaagcctagcgttgaagaatcatttagtttaactgaaccattcaaacatgtagctggactgaaggagaaagaaaagcaaaagagtggatcaaaacaaaaaaaaaagttaggctgaaaaattgcagaagaagaagaaagcaaacaagaataaaacaaactatcctatacagtacaaaagaaaatgaaagctctgtaccagactctcaagcatatgaatcacttaatagctttacccaactcattaaggtacatcgtcgccttctctctctctctcttaatattgcagcaatgcagcctatattctaaacacatggtaaacttaactaatggatgatacaagcttttgtacatgaagatgtgaaaaaataatggcatactgtcttttgttaagctttttgagtatggctgcttttcttaagcaaatcttagtttagagattttaattgttgctaaataaagctgtggatgccagggaaaaaaaactagttcagtttatggctatgcattatgtatgcctaaggactagtgggaattggccatgctttgattatgatttctctccttttaccgtttatagctgcatgtttgattctgattctcattacctcacaacattaacatcgcggcttataggaggaaaaaaagataaccagtagagtgaaaggggtgcggctgaatgagaaactatgataccatcactgcttatggtgtagtggaaatagcatcggtgtcctgcttatggtgtggagaagagagaatgcaacggcggatccccatccgtgttccggcagttacacggtggctgtgctgtgctgtgcaacgaaagatccaatccaatccaacagatcaatcaatcgaagacaatctgtgtatatgatagtatttgtgaatggaggttactttaatagtagacgtgatacagggcagggctacaagcgagaacaactcagatgggggagtatgagtagataatatcaaccggggaatctgccggagaggagcatggcgaagaggaggacgaggatgtagaggaggatgacgatgatcttggtgtggaacaaggccagcaagagcttcaccacgaacaccagcagcagcgcgttgaacagcagcgtcagcaactcctccatacctgccatgccatgcccccacacacctgacctgaccttggatgcgcttctgatgatccacaccacccactgcaatcaaaggcatcggagcaggtgacagcgacatgttttgtttatttctgttgcttgtgctaattaattactccctccgtttctttttattagtcgctggatagtgcaattttgtactatctagcgactaataaaaagaaacagagggagtactatatatcactcctactccaccag

SEQ ID NO: 8936 - DNA, 3540 bp, Zea Mays
cctggtgaggttttccagctaagatagcaaattgaatgacatcattgttgttcaggagcactttggtaatggtgctgatattaacacagatgcaaccaagatgcaagctcctgctccgcctacccttccatcctcaaaagatagaaggaggtcacttcacggtgcccctgagtctgaaagcggaggtatcctatcaagtgatgctgaggataacaaagggcatggacggaggcaaagtcaaagttgttcaaaatctccaaagcccagaagggagaaggaaaggaggcacaaagatgggcatcactcttcatcttcaaaagatcattatcccaaaaatcgctctagagcatctccatactcaaggcatcagagtgaagctcattcaagagatcacttgagatctggagaaagaggtgatgatactaatggttctgatcgtgagagcaatgatcagaatgggaagtctggcagacatacgactgggacccaggagaatgaaagagaaaggagcagcagccatggtattcatgatagacatggtgataggcataatgacagacatggcagccaggaaaggtacagagacgataggacatatagagacaaaattgattcgctagaagctacttggaagcacagagaaagaagcaggagtcatagtagatcggatctaagggaaagtacacgtcttcgtgatcaaagccgggagagtgaaagacggattggtagttcaatgcatagggatcatggcagcaagagggatacaagtaaacatagagaatctgacagggttaacagtgcatatgaaagggagagagggagagatgctggggacagggaatggcacagggtcaagggaagcgaaactcatagagctaaggaaggacgggacaaagttagcgatagtgataggtacagggattcaacacgctcgaaatatagtgtgtctgatggctacaaagagagaacaagatctggggagaaaggtagagatgttgaccgtaaaaaccgaaagtttgaagaaatgaaggaaaattatctcaaggaggaagatgaagagaagtaccaagagaaaatagaacagcagttagcaatgcaggaggaagaggaccctgaaaaaatcaaagaggaagcaaggaggaggaaagaagctatcatggcgaagtacaggcagcagcaatcacagaagcaggatatggaagctaaaccaagcagcaatgatgaagatatattgttgtctgtgcagaagtaagagctatggatggaaatgtaactatgcatcagaaagatgataacggtagcagttccacgggcaatgacaaagctgaaaataagcatgattcttcagaggtatttgatggcaaaaccgacttttctgtgggaaagtctcctgctcaaaatgatacttcaactagcacgggagcattcactgatgagaggacaatagatgtttcaggtcttggagagggttctcccaagggcaagggtgatggtttgcatgttgagagaaatgctcttcatgacaactgggatgatgcagatgggtactacacttaccggttcggagaattgctggatggccattacgaaatcatagcagcacatgggaagggtgtgttctcaaaagtcgtgcgggcaaaagatcttaaagcgagtaaagatgatcctgaagaagttgctatcaaaattattcgcaacaaggagacaatgtacaaggctggtaagcaagaggtttcaatactggaaaaacttgcaagtgtggaccgtgaggacaaacgccactgcgtgcggtttatttctagtttcatcttttcatcgccctgaagcacctgaagaactgcaaagttttgcactgtgatattaaacctgacaatatgctggtgaatgaggctaagaatgtgctcaagctatgtgattttgggaatgctatgcttgctggtatgaatgaagttacgccttatcttgttagccgtttctatcgggcacctgagatcattcttgggttagcctatgatcatcctttagacatgtggtcagttggctgctgtctatatgagctttataccggtaaagtcttatttcctggtccatcaaacaatgccatgcttcggcttcatatggaattgaagggtccattccctaagaagatgcttcgaaagggtgcctttactatgcaacactttgatcaagatctcaattttcatgctaccgaggaggatcctgtgacaaaaacggctgtgagaaggttaattttgaacattaaaccaaaggatgtcggttttttgattttgaactctcctggcgaggatccaaaaatgctatccagttttaaagatcttcttgataaaatgtttatattagatccagaaaagaggataaccgtatcacaagcacttagccatccatttatcactgctctgagaacaaatacatggatgaagcacggaactatcgaagagatggctatctgcagaccttgttgcatgcacttatcatttggatatgttctgttgcttgattctgccagggcctctgctgtgtgtacactttatatgcttaagcgccaacatttgaagtatcaattgaatggttttgcttttatgttattgaggtcctgggatggagatcgctggaccctcctctcctcatcatggcttctcatccccatcaacagtgctccatgtgattaacaaaggctcagatgtcctaatgcgatcctccacaacatgtcagaatcgtatagaaagcaaaatctcacagattttcatcttcgcctctatggaagccaatttggacttgaccaatcaccacttaaaaaaagttggctcaaagcatccttaggccttgttcgtttgtgtcggattgatgggtcggaacgaatccgagccggattgcttctttaatttatataaactttgattagccggaatgattccgggtgcaatccgatgtaaacgaacaaggccttatgcttgtattcgtgagaaaagcagaagtgaaaagcattggcaaatcgagtggctacatgtctcaataaatctgggacatagaagcacgcaggcgaaatttgtagtgccccacaattttttattgagatcattggaaggcatcttggctgttacaaattattgtatttgtgatcaatccaaggggtgcgacagataattcccaagggacacaccccttgtgaactcaccccttcatatgtatataaacataacccctgctgcaataaagatagaactgtcatttgtctctctctcaatcttgttactactgagtatacttcaacacgttatcagcactgctcgcgagaactgagaaaaagaagcgagtgttttctatcggcgatgtgcggttctatctgtgggaggcggcgttgtacacatcggtgatacagatggccagaatcaatgcgtactggcgttacggcggatgatggaactgctacgacgacccgctcagaaactaatctccatgctgcctacgtaccagcatgcatggcagtgccatcaagcgccatggcattagcaattggct

SEQ ID NO: 8937 - DNA, 4133 bp, Zea Mays
cggtccgcaggcgcaacaaaattcgcatcggcatcgcaatctcgctcgcagggaggagagggggagcctctaaccctaaccctacctgcctctgtcgcaatcgccatggccgccggcggagagccctcccccctgtcccctgccaaatactctcgcttgcccgacgacgcccagcccgacgcatccccgaagcgccgcaagcgccaccaccgccaccaccaccaccaccaccaccgtcgacaccgtcacgccgattccccgatacccgaggcggccgacgaagaggtagaggagggggagatactcgacgatgcttcctccgtctctgctatggaggtcaatgccgagtccgccgccccacagtcttcccttgctccggagcactttggtaatggtgctgatattaacacagatgcaaccaagatgcaagctcctgctccgcctacccttccatcctcaaaagatagaaggaggtcacttcacggtgcccctgagtctgaaagcggaggtatcctatcaagtgatgctgaggataacaaagggcatggacggaggcaaagtcaaagttgttcaaaatctccaaagcccagaagggagaaggaaaggaggcacaaagatgggcatcactcttcatcttcaaaagatcattatcccaaaaatcgctctagagcatctccatactcaaggcatcagagtgaagctcattcaagagatcacttgagatctggagaaagaggtgatgatactaatggttctgatcgtgagagcaatgatcagaatgggaagtctggcagacatacgactgggacccaggagaatgaaagagaaaggagcagcagccatggtattcatgatagacatggtgataggcataatgacagacatggcagccaggaaaggtacagagacgataggacatatagagacaaaattgattcgctagaagctacttggaagcacagagaaagaagcaggagtcatagtagatcggatctaagggaaagtacacgtcttcgtgatcaaagccgggagagtgaaagacggattggtagttcaatgcatagggatcatggcagcaagagggatacaagtaaacatagagaatctgacagggttaacagtgcatatgaaagggagagagggagagatgctggggacagggaatggcacagggtcaagggaagcgaaactcatagagctaaggaaggacgggacaaagttagcgatagtgataggtacagggattcaacacgctcgaaatatagtgtgtctgatggctacaaagagagaacaagatctggggagaaaggtagagatgttgaccgtaaaaaccgaaagtttgaagaaatgaaggaaaattatctcaaggaggaagatgaagagaagtaccaagagaaaatagaacagcagttagcaatgcaggaggaagaggaccctgaaaaaatcaaagaggaagcaaggaggaggaaagaagctatcatggcgaagtacaggcagcagcaatcacagaagcaggatatggaagctaaaccaagcagcaatgatgaagatatattgttgtctgtgcagaagtaagagctatggatggaaatgtaactatgcatcagaaagatgataacggtagcagttccacgggcaatgacaaagctgaaaataagcatgattcttcagaggtatttgatggcaaaaccgacttttctgtgggaaagtctcctgctcaaaatgatacttcaactagcacgggagcattcactgatgagaggacaatagatgtttcaggtcttggagagggttctcccaagagtgagagatcagcagacatgttttgtgatgacattttcggagaatcacctgcgggagttagaaaatcgggcaagggtgatggtttgcatgttgagagaaatgctcttcatgacaactgggatgatgcagatgggtactacacttaccggttcggagaattgctggatggccattacgaaatcatagcagcacatgggaagggtgtgttctcaaaagtcgtgcgggcaaaagatcttaaagcgagtaaagatgatcctgaagaagttgctatcaaaattattcgcaacaaggagacaatgtacaaggctggtaagcaagaggtttcaatactggaaaaacttgcaagtgtggaccgtgaggacaaacgccactgcgtgcggtttatttctagtttcatgtaccggaaccatctttgcttagtttttgaatctctcaatatgaatcttcgtgaggttttaaagaaatttggtcgtaatattgggcttaaactgactgcggtgagggcatattcaaagcagcttttcatcgccctgaagcacctgaagaactgcaaagttttgcactgtgatattaaacctgacaatatgctggtgaatgaggctaagaatgtgctcaagctatgtgattttgggaatgctatgcttgctggtatgaatgaagttacgccttatcttgttagccgtttctatcgggcacctgagatcattcttgggttagcctatgatcatcctttagacatgtggtcagttggctgctgtctatatgagctttataccggtaaagtcttatttcctggtccatcaaacaatgccatgcttcggcttcatatggaattgaagggtccattccctaagaagatgcttcgaaagggtgcctttactatgcaacactttgatcaagatctcaattttcatgctaccgaggaggatcctgtgacaaaaacggctgtgagaaggttaattttgaacattaaaccaaaggatgtcggttttttgattttgaactctcctggcgaggatccaaaaatgctatccagttttaaagatcttcttgataaaatgtttatattagatccagaaaagaggataaccgtatcacaagcacttagccatccatttatcactggcaagtgacataagatgctgattcctcttgatattgaacttagcatctacactgtaaaatacaatttgggtttctcttgtctaatcatcgacgtttctgtcttgtgtcctgggagctctgagaacaaatacatggatgaagcacggaactatcgaagagatggctatctgcagaccttgttgcatgcacttatcatttggatatgttctgttgcttgattctgccagggcctctgctgtgtgtacactttatatgcttaagcgccaacatttgaaggtcctgggatggagatcgctggaccctcctctcctcatcatggcttctcatccccatcaacagtgctccatgtgattaacaaaggctcagatgtcctaatgcgatcctccacaacatgtcagaatcgtatagaaagcaaaatctcacagattttcatcttcgcctctatggaagccaatttggacttgaccaatcaccacttaaaaaaagttggctcaaagcatccttaggccttgttcgtttgtgtcggattgatgggtcggaacgaatccgagccggattgcttctttaatttatataaactttgattagccggaatgattccgggtgcaatccgatgtaaacgaacaaggccttatgcttgtattcgtgagaaaagcagaagtgaaaagcattggcaaatcgagtggctacatgtctcaataaatctgggacatagaagcacgcaggcgaaatttgtagtgccccacaattttttattgagatcattggaaggcatcttggctgttacaaattattgtatttgtgatcaatccaaggggtgcgacagataattcccaagggacacaccccttgtgaactcaccccttcatatgtatataaacataacccctgctgcaataaagatagaactgtcatttgtctctctctcaatcttgttactactgagtatacttcaacacgttatcagcactgctcgcgagaactgagaaaaagaagcgagtgttttctatcggcgatgtgcggttctatctgtgggaggcggcgttgtacacatcggtgatacagatggccagaatcaatgcgtactggcgttacggcggatgatggaactgctacgacgacccgctcagaaactaatctccatgctgcctacgtaccagcatgcatggcagtgccatcaagcgccatggcattagcaattggct

SEQ ID NO: 8938 - DNA, 3836 bp, Zea Mays
ctcgtttgtgctgccatcatcggctcggtccgcaggcgcaacaaaattcgcatcggcatcgcaatctcgctcgcagggaggagagggggagcctctaaccctaaccctacctgcctctgtcgcaatcgccatggccgccggcggagagccctcccccctgtcccctgccaaatactctcgcttgcccgacgacgcccagcccgacgcatccccgaagcgccgcaagcgccaccaccgccaccaccaccaccaccaccaccgtcgacaccgtcacgccgattccccgatacccgaggcggccgacgaagaggtagaggagggggagatactcgacgatgcttcctccgtctctgctatggaggtcaatgccgagtccgccgccccacagtcttcccttgctccggagcactttggtaatggtgctgatattaacacagatgcaaccaagatgcaagctcctgctccgcctacccttccatcctcaaaagatagaaggaggtcacttcacggtgcccctgagtctgaaagcggaggtatcctatcaagtgatgctgaggataacaaagggcatggacggaggcaaagtcaaagttgttcaaaatctccaaagcccagaagggagaaggaaaggaggcacaaagatgggcatcactcttcatcttcaaaagatcattatcccaaaaatcgctctagagcatctccatactcaaggcatcagagtgaagctcattcaagagatcacttgagatctggagaaagaggtgatgatactaatggttctgatcgtgagagcaatgatcagaatgggaagtctggcagacatacgactgggacccaggagaatgaaagagaaaggagcagcagccatggtattcatgatagacatggtgataggcataatgacagacatggcagccaggaaaggtacagagacgataggacatatagagacaaaattgattcgctagaagctacttggaagcacagagaaagaagcaggagtcatagtagatcggatctaagggaaagtacacgtcttcgtgatcaaagccgggagagtgaaagacggattggtagttcaatgcatagggatcatggcagcaagagggatacaagtaaacatagagaatctgacagggttaacagtgcatatgaaagggagagagggagagatgctggggacagggaatggcacagggtcaagggaagcgaaactcatagagctaaggaaggacgggacaaagttagcgatagtgataggtacagggattcaacacgctcgaaatatagtgtgtctgatggctacaaagagagaacaagatctggggagaaaggtagagatgttgaccgtaaaaaccgaaagtttgaagaaatgaaggaaaattatctcaaggaggaagatgaagagaagtaccaagagaaaatagaacagcagttagcaatgcaggaggaagaggaccctgaaaaaatcaaagaggaagcaaggaggaggaaagaagctatcatggcgaagtacaggcagcagcaatcacagaagcaggatatggaagctaaaccaagcagcaatgatgaagaagtaagagctatggatggaaatgtaactatgcatcagaaagatgataacggtagcagttccacgggcaatgacaaagctgaaaataagcatgattcttcagaggtatttgatggcaaaaccgacttttctgtgggaaagtctcctgctcaaaatgatacttcaactagcacgggagcattcactgatgagaggacaatagatgtttcaggtcttggagagggttctcccaagggcaagggtgatggtttgcatgttgagagaaatgctcttcatgacaactgggatgatgcagatgggtactacacttaccggttcggagaattgctggatggccattacgaaatcatagcagcacatgggaagggtgtgttctcaaaagtcgtgcgggcaaaagatcttaaagcgagtaaagatgatcctgaagaagttgctatcaaaattattcgcaacaaggagacaatgtacaaggctggtaagcaagaggtttcaatactggaaaaacttgcaagtgtggaccgtgaggacaaacgccactgcgtgcggtttatttctagtttcatcagcttttcatcgccctgaagcacctgaagaactgcaaagttttgcactgtgatattaaacctgacaatatgctggtgaatgaggctaagaatgtgctcaagctatgtgattttgggaatgctatgcttgctggtatgaatgaagttacgccttatcttgttagccgtttctatcgggcacctgagatcattcttgggttagcctatgatcatcctttagacatgtggtcagttggctgctgtctatatgagctttataccggtaaagtcttatttcctggtccatcaaacaatgccatgcttcggcttcatatggaattgaagggtccattccctaagaagatgcttcgaaagggtgcctttactatgcaacactttgatcaagatctcaattttcatgctaccgaggaggatcctgtgacaaaaacggctgtgagaaggttaattttgaacattaaaccaaaggatgtcggttttttgattttgaactctcctggcgaggatccaaaaatgctatccagttttaaagatcttcttgataaaatgtttatattagatccagaaaagaggataaccgtatcacaagcacttagccatccatttatcactgctctgagaacaaatacatggatgaagcacggaactatcgaagagatggctatctgcagaccttgttgcatgcacttatcatttggatatgttctgttgcttgattctgccagggcctctgctgtgtgtacactttatatgcttaagcgccaacatttgaaggtcctgggatggagatcgctggaccctcctctcctcatcatggcttctcatccccatcaacagtgctccatgtgattaacaaaggctcagatgtcctaatgcgatcctccacaacatgtcagaatcgtatagaaagcaaaatctcacagattttcatcttcgcctctatggaagccaatttggacttgaccaatcaccacttaaaaaaagttggctcaaagcatccttaggccttgttcgtttgtgtcggattgatgggtcggaacgaatccgagccggattgcttctttaatttatataaactttgattagccggaatgattccgggtgcaatccgatgtaaacgaacaaggccttatgcttgtattcgtgagaaaagcagaagtgaaaagcattggcaaatcgagtggctacatgtctcaataaatctgggacatagaagcacgcaggcgaaatttgtagtgccccacaattttttattgagatcattggaaggcatcttggctgttacaaattattgtatttgtgatcaatccaaggggtgcgacagataattcccaagggacacaccccttgtgaactcaccccttcatatgtatataaacataacccctgctgcaataaagatagaactgtcatttgtctctctctcaatcttgttactactgagtatacttcaacacgttatcagcactgctcgcgagaactgagaaaaagaagcgagtgttttctatcggcgatgtgcggttctatctgtgggaggcggcgttgtacacatcggtgatacagatggccagaatcaatgcgtactggcgttacggcggatgatggaactgctacgacgacccgctcagaaactaatctccatgctgcctacgtaccagcatgcatggcagtgccatcaagcgccatggcattagcaattggct

SEQ ID NO: 8939 - DNA, 3948 bp, Zea Mays
ctaaaaccaatctcgtttgtgctgccatcatcggctcggtccgcaggcgcaacaaaattcgcatcggcatcgcaatctcgctcgcagggaggagagggggagcctctaaccctaaccctacctgcctctgtcgcaatcgccatggccgccggcggagagccctcccccctgtcccctgccaaatactctcgcttgcccgacgacgcccagcccgacgcatccccgaagcgccgcaagcgccaccaccgccaccaccaccaccaccaccaccgtcgacaccgtcacgccgattccccgatacccgaggcggccgacgaagaggtagaggagggggagatactcgacgatgcttcctccgtctctgctatggaggtcaatgccgagtccgccgccccacagtcttcccttgctccggagcactttggtaatggtgctgatattaacacagatgcaaccaagatgcaagctcctgctccgcctacccttccatcctcaaaagatagaaggaggtcacttcacggtgcccctgagtctgaaagcggaggtatcctatcaagtgatgctgaggataacaaagggcatggacggaggcaaagtcaaagttgttcaaaatctccaaagcccagaagggagaaggaaaggaggcacaaagatgggcatcactcttcatcttcaaaagatcattatcccaaaaatcgctctagagcatctccatactcaaggcatcagagtgaagctcattcaagagatcacttgagatctggagaaagaggtgatgatactaatggttctgatcgtgagagcaatgatcagaatgggaagtctggcagacatacgactgggacccaggagaatgaaagagaaaggagcagcagccatggtattcatgatagacatggtgataggcataatgacagacatggcagccaggaaaggtacagagacgataggacatatagagacaaaattgattcgctagaagctacttggaagcacagagaaagaagcaggagtcatagtagatcggatctaagggaaagtacacgtcttcgtgatcaaagccgggagagtgaaagacggattggtagttcaatgcatagggatcatggcagcaagagggatacaagtaaacatagagaatctgacagggttaacagtgcatatgaaagggagagagggagagatgctggggacagggaatggcacagggtcaagggaagcgaaactcatagagctaaggaaggacgggacaaagttagcgatagtgataggtacagggattcaacacgctcgaaatatagtgtgtctgatggctacaaagagagaacaagatctggggagaaaggtagagatgttgaccgtaaaaaccgaaagtttgaagaaatgaaggaaaattatctcaaggaggaagatgaagagaagtaccaagagaaaatagaacagcagttagcaatgcaggaggaagaggaccctgaaaaaatcaaagaggaagcaaggaggaggaaagaagctatcatggcgaagtacaggcagcagcaatcacagaagcaggatatggaagctaaaccaagcagcaatgatgaagaagtaagagctatggatggaaatgtaactatgcatcagaaagatgataacggtagcagttccacgggcaatgacaaagctgaaaataagcatgattcttcagaggtatttgatggcaaaaccgacttttctgtgggaaagtctcctgctcaaaatgatacttcaactagcacgggagcattcactgatgagaggacaatagatgtttcaggtcttggagagggttctcccaagagtgagagatcagcagacatgttttgtgatgacattttcggagaatcacctgcgggagttagaaaatcgggcaagggtgatggtttgcatgttgagagaaatgctcttcatgacaactgggatgatgcagatgggtactacacttaccggttcggagaattgctggatggccattacgaaatcatagcagcacatgggaagggtgtgttctcaaaagtcgtgcgggcaaaagatcttaaagcgagtaaagatgatcctgaagaagttgctatcaaaattattcgcaacaaggagacaatgtacaaggctggtaagcaagaggtttcaatactggaaaaacttgcaagtgtggaccgtgaggacaaacgccactgcgtgcggtttatttctagtttcatcttttcatcgccctgaagcacctgaagaactgcaaagttttgcactgtgatattaaacctgacaatatgctggtgaatgaggctaagaatgtgctcaagctatgtgattttgggaatgctatgcttgctggtatgaatgaagttacgccttatcttgttagccgtttctatcgggcacctgagatcattcttgggttagcctatgatcatcctttagacatgtggtcagttggctgctgtctatatgagctttataccggtaaagtcttatttcctggtccatcaaacaatgccatgcttcggcttcatatggaattgaagggtccattccctaagaagatgcttcgaaagggtgcctttactatgcaacactttgatcaagatctcaattttcatgctaccgaggaggatcctgtgacaaaaacggctgtgagaaggttaattttgaacattaaaccaaaggatgtcggttttttgattttgaactctcctggcgaggatccaaaaatgctatccagttttaaagatcttcttgataaaatgtttatattagatccagaaaagaggataaccgtatcacaagcacttagccatccatttatcactgctctgagaacaaatacatggatgaagcacggaactatcgaagagatggctatctgcagaccttgttgcatgcacttatcatttggatatgttctgttgcttgattctgccagggcctctgctgtgtgtacactttatatgcttaagcgccaacatttgaagtatcaattgaatggttttgcttttatgttattgaggtcctgggatggagatcgctggaccctcctctcctcatcatggcttctcatccccatcaacagtgctccatgtgattaacaaaggctcagatgtcctaatgcgatcctccacaacatgtcagaatcgtatagaaagcaaaatctcacagattttcatcttcgcctctatggaagccaatttggacttgaccaatcaccacttaaaaaaagttggctcaaagcatccttaggccttgttcgtttgtgtcggattgatgggtcggaacgaatccgagccggattgcttctttaatttatataaactttgattagccggaatgattccgggtgcaatccgatgtaaacgaacaaggccttatgcttgtattcgtgagaaaagcagaagtgaaaagcattggcaaatcgagtggctacatgtctcaataaatctgggacatagaagcacgcaggcgaaatttgtagtgccccacaattttttattgagatcattggaaggcatcttggctgttacaaattattgtatttgtgatcaatccaaggggtgcgacagataattcccaagggacacaccccttgtgaactcaccccttcatatgtatataaacataacccctgctgcaataaagatagaactgtcatttgtctctctctcaatcttgttactactgagtatacttcaacacgttatcagcactgctcgcgagaactgagaaaaagaagcgagtgttttctatcggcgatgtgcggttctatctgtgggaggcggcgttgtacacatcggtgatacagatggccagaatcaatgcgtactggcgttacggcggatgatggaactgctacgacgacccgctcagaaactaatctccatgctgcctacgtaccagcatgcatggcagtgccatcaagcgccatggcattagcaattggct

SEQ ID NO: 8940 - DNA, 3913 bp, Zea Mays
ctaaaaccaatctcgtttgtgctgccatcatcggctcggtccgcaggcgcaacaaaattcgcatcggcatcgcaatctcgctcgcagggaggagagggggagcctctaaccctaaccctacctgcctctgtcgcaatcgccatggccgccggcggagagccctcccccctgtcccctgccaaatactctcgcttgcccgacgacgcccagcccgacgcatccccgaagcgccgcaagcgccaccaccgccaccaccaccaccaccaccaccgtcgacaccgtcacgccgattccccgatacccgaggcggccgacgaagaggtagaggagggggagatactcgacgatgcttcctccgtctctgctatggaggtcaatgccgagtccgccgccccacagtcttcccttgctccggagcactttggtaatggtgctgatattaacacagatgcaaccaagatgcaagctcctgctccgcctacccttccatcctcaaaagatagaaggaggtcacttcacggtgcccctgagtctgaaagcggaggtatcctatcaagtgatgctgaggataacaaagggcatggacggaggcaaagtcaaagttgttcaaaatctccaaagcccagaagggagaaggaaaggaggcacaaagatgggcatcactcttcatcttcaaaagatcattatcccaaaaatcgctctagagcatctccatactcaaggcatcagagtgaagctcattcaagagatcacttgagatctggagaaagaggtgatgatactaatggttctgatcgtgagagcaatgatcagaatgggaagtctggcagacatacgactgggacccaggagaatgaaagagaaaggagcagcagccatggtattcatgatagacatggtgataggcataatgacagacatggcagccaggaaaggtacagagacgataggacatatagagacaaaattgattcgctagaagctacttggaagcacagagaaagaagcaggagtcatagtagatcggatctaagggaaagtacacgtcttcgtgatcaaagccgggagagtgaaagacggattggtagttcaatgcatagggatcatggcagcaagagggatacaagtaaacatagagaatctgacagggttaacagtgcatatgaaagggagagagggagagatgctggggacagggaatggcacagggtcaagggaagcgaaactcatagagctaaggaaggacgggacaaagttagcgatagtgataggtacagggattcaacacgctcgaaatatagtgtgtctgatggctacaaagagagaacaagatctggggagaaaggtagagatgttgaccgtaaaaaccgaaagtttgaagaaatgaaggaaaattatctcaaggaggaagatgaagagaagtaccaagagaaaatagaacagcagttagcaatgcaggaggaagaggaccctgaaaaaatcaaagaggaagcaaggaggaggaaagaagctatcatggcgaagtacaggcagcagcaatcacagaagcaggatatggaagctaaaccaagcagcaatgatgaagaagtaagagctatggatggaaatgtaactatgcatcagaaagatgataacggtagcagttccacgggcaatgacaaagctgaaaataagcatgattcttcagaggtatttgatggcaaaaccgacttttctgtgggaaagtctcctgctcaaaatgatacttcaactagcacgggagcattcactgatgagaggacaatagatgtttcaggtcttggagagggttctcccaagagtgagagatcagcagacatgttttgtgatgacattttcggagaatcacctgcgggagttagaaaatcgggcaagggtgatggtttgcatgttgagagaaatgctcttcatgacaactgggatgatgcagatgggtactacacttaccggttcggagaattgctggatggccattacgaaatcatagcagcacatgggaagggtgtgttctcaaaagtcgtgcgggcaaaagatcttaaagcgagtaaagatgatcctgaagaagttgctatcaaaattattcgcaacaaggagacaatgtacaaggctggtaagcaagaggtttcaatactggaaaaacttgcaagtgtggaccgtgaggacaaacgccactgcgtgcggtttatttctagtttcatcttttcatcgccctgaagcacctgaagaactgcaaagttttgcactgtgatattaaacctgacaatatgctggtgaatgaggctaagaatgtgctcaagctatgtgattttgggaatgctatgcttgctggtatgaatgaagttacgccttatcttgttagccgtttctatcgggcacctgagatcattcttgggttagcctatgatcatcctttagacatgtggtcagttggctgctgtctatatgagctttataccggtaaagtcttatttcctggtccatcaaacaatgccatgcttcggcttcatatggaattgaagggtccattccctaagaagatgcttcgaaagggtgcctttactatgcaacactttgatcaagatctcaattttcatgctaccgaggaggatcctgtgacaaaaacggctgtgagaaggttaattttgaacattaaaccaaaggatgtcggttttttgattttgaactctcctggcgaggatccaaaaatgctatccagttttaaagatcttcttgataaaatgtttatattagatccagaaaagaggataaccgtatcacaagcacttagccatccatttatcactgctctgagaacaaatacatggatgaagcacggaactatcgaagagatggctatctgcagaccttgttgcatgcacttatcatttggatatgttctgttgcttgattctgccagggcctctgctgtgtgtacactttatatgcttaagcgccaacatttgaaggtcctgggatggagatcgctggaccctcctctcctcatcatggcttctcatccccatcaacagtgctccatgtgattaacaaaggctcagatgtcctaatgcgatcctccacaacatgtcagaatcgtatagaaagcaaaatctcacagattttcatcttcgcctctatggaagccaatttggacttgaccaatcaccacttaaaaaaagttggctcaaagcatccttaggccttgttcgtttgtgtcggattgatgggtcggaacgaatccgagccggattgcttctttaatttatataaactttgattagccggaatgattccgggtgcaatccgatgtaaacgaacaaggccttatgcttgtattcgtgagaaaagcagaagtgaaaagcattggcaaatcgagtggctacatgtctcaataaatctgggacatagaagcacgcaggcgaaatttgtagtgccccacaattttttattgagatcattggaaggcatcttggctgttacaaattattgtatttgtgatcaatccaaggggtgcgacagataattcccaagggacacaccccttgtgaactcaccccttcatatgtatataaacataacccctgctgcaataaagatagaactgtcatttgtctctctctcaatcttgttactactgagtatacttcaacacgttatcagcactgctcgcgagaactgagaaaaagaagcgagtgttttctatcggcgatgtgcggttctatctgtgggaggcggcgttgtacacatcggtgatacagatggccagaatcaatgcgtactggcgttacggcggatgatggaactgctacgacgacccgctcagaaactaatctccatgctgcctacgtaccagcatgcatggcagtgccatcaagcgccatggcattagcaattggct

SEQ ID NO: 8941 - DNA, 3587 bp, Zea Mays
atggccgccggcggagagccctcccccctgtcccctgccaaatactctcgcttgcccgacgacgcccagcccgacgcatccccgaagcgccgcaagcgccaccaccgccaccaccaccaccaccaccaccgtcgacaccgtcacgccgattccccgatacccgaggcggccgacgaagaggtagaggagggggagatactcgacgatgcttcctccgtctctgctatggaggtcaatgccgagtccgccgccccacagtcttcccttgctccggagcactttggtaatggtgctgatattaacacagatgcaaccaagatgcaagctcctgctccgcctacccttccatcctcaaaagatagaaggaggtcacttcacggtgcccctgagtctgaaagcggaggtatcctatcaagtgatgctgaggataacaaagggcatggacggaggcaaagtcaaagttgttcaaaatctccaaagcccagaagggagaaggaaaggaggcacaaagatgggcatcactcttcatcttcaaaagatcattatcccaaaaatcgctctagagcatctccatactcaaggcatcagagtgaagctcattcaagagatcacttgagatctggagaaagaggtgatgatactaatggttctgatcgtgagagcaatgatcagaatgggaagtctggcagacatacgactgggacccaggagaatgaaagagaaaggagcagcagccatggtattcatgatagacatggtgataggcataatgacagacatggcagccaggaaaggtacagagacgataggacatatagagacaaaattgattcgctagaagctacttggaagcacagagaaagaagcaggagtcatagtagatcggatctaagggaaagtacacgtcttcgtgatcaaagccgggagagtgaaagacggattggtagttcaatgcatagggatcatggcagcaagagggatacaagtaaacatagagaatctgacagggttaacagtgcatatgaaagggagagagggagagatgctggggacagggaatggcacagggtcaagggaagcgaaactcatagagctaaggaaggacgggacaaagttagcgatagtgataggtacagggattcaacacgctcgaaatatagtgtgtctgatggctacaaagagagaacaagatctggggagaaaggtagagatgttgaccgtaaaaaccgaaagtttgaagaaatgaaggaaaattatctcaaggaggaagatgaagagaagtaccaagagaaaatagaacagcagttagcaatgcaggaggaagaggaccctgaaaaaatcaaagaggaagcaaggaggaggaaagaagctatcatggcgaagtacaggcagcagcaatcacagaagcaggatatggaagctaaaccaagcagcaatgatgaagaagtaagagctatggatggaaatgtaactatgcatcagaaagatgataacggtagcagttccacgggcaatgacaaagctgaaaataagcatgattcttcagaggtatttgatggcaaaaccgacttttctgtgggaaagtctcctgctcaaaatgatacttcaactagcacgggagcattcactgatgagaggacaatagatgtttcaggtcttggagagggttctcccaagggcaagggtgatggtttgcatgttgagagaaatgctcttcatgacaactgggatgatgcagatgggtactacacttaccggttcggagaattgctggatggccattacgaaatcatagcagcacatgggaagggtgtgttctcaaaagtcgtgcgggcaaaagatcttaaagcgagtaaagatgatcctgaagaagttgctatcaaaattattcgcaacaaggagacaatgtacaaggctggtaagcaagaggtttcaatactggaaaaacttgcaagtgtggaccgtgaggacaaacgccactgcgtgcggtttatttctagtttcatcagcttttcatcgccctgaagcacctgaagaactgcaaagttttgcactgtgatattaaacctgacaatatgctggtgaatgaggctaagaatgtgctcaagctatgtgattttgggaatgctatgcttgctggtatgaatgaagttacgccttatcttgttagccgtttctatcgggcacctgagatcattcttgggttagcctatgatcatcctttagacatgtggtcagttggctgctgtctatatgagctttataccggtaaagtcttatttcctggtccatcaaacaatgccatgcttcggcttcatatggaattgaagggtccattccctaagaagatgcttcgaaagggtgcctttactatgcaacactttgatcaagatctcaattttcatgctaccgaggaggatcctgtgacaaaaacggctgtgagaaggttaattttgaacattaaaccaaaggatgtcggttttttgattttgaactctcctggcgaggatccaaaaatgctatccagttttaaagatcttcttgataaaatgtttatattagatccagaaaagaggataaccgtatcacaagcacttagccatccatttatcactggcaagtgacataagatgctgattcctcttgatattgaacttagcatctacactgtaaaatacaatttgggtttctcttgtctaatcatcgacgtttctgtcttgtgtcctgggagctctgagaacaaatacatggatgaagcacggaactatcgaagagatggctatctgcagaccttgttgcatgcacttatcatttggatatgttctgttgcttgattctgccagggcctctgctgtgtgtacactttatatgcttaagcgccaacatttgaagtatcaattgaatggttttgcttttatgttattgaggtcctgggatggagatcgctggaccctcctctcctcatcatggtgtatttctaattgtttttgcgttttggtaagtaatttctttttgtcagtttcatcaaacattgatcttccaaacaatttgtttgtcttttgtgtgtccgacaaacttttccatattaatgggttgtgaaattcaagtactatatagtatatactccggggattttagccccatccaatcccctccggttttctggcttccaaactagccatcaatcccatcatccaattcccttatcccaaactagccctaagaaaattgggtacagggaaaagaaatcccaacttggcctcccctctataagcatgcagaagctgaaaggctctcagcctgttgtccccgtagaatgctctcctttgtgattgcctgcacagcactgccataacacttgcaatggcgctgttaaaaacacatcattccaatctctcaagccaaccaagatagtgaattcaggcctaccatttcgcacttgaccgcctggctcaaagcacctattgataattggctgagagtttgaggtgcaatggaaataaatcaaagcctgtaagatcattctttagattgaacagttggttgaacgaacctattaccatctatacgtgggcatatgaatgaca

SEQ ID NO: 8942 - DNA, 3639 bp, Zea Mays
ccgcaggcgcaacaaaattcgcatcggcatcgcaatctcgctcgcagggaggagagggggagcctctaaccctaaccctacctgcctctgtcgcaatcgccatggccgccggcggagagccctcccccctgtcccctgccaaatactctcgcttgcccgacgacgcccagcccgacgcatccccgaagcgccgcaagcgccaccaccgccaccaccaccaccaccaccaccgtcgacaccgtcacgccgattccccgatacccgaggcggccgacgaagaggtagaggagggggagatactcgacgatgcttcctccgtctctgctatggaggtcaatgccgagtccgccgccccacagtcttcccttgctccggagcactttggtaatggtgctgatattaacacagatgcaaccaagatgcaagctcctgctccgcctacccttccatcctcaaaagatagaaggaggtcacttcacggtgcccctgagtctgaaagcggaggtatcctatcaagtgatgctgaggataacaaagggcatggacggaggcaaagtcaaagttgttcaaaatctccaaagcccagaagggagaaggaaaggaggcacaaagatgggcatcactcttcatcttcaaaagatcattatcccaaaaatcgctctagagcatctccatactcaaggcatcagagtgaagctcattcaagagatcacttgagatctggagaaagaggtgatgatactaatggttctgatcgtgagagcaatgatcagaatgggaagtctggcagacatacgactgggacccaggagaatgaaagagaaaggagcagcagccatggtattcatgatagacatggtgataggcataatgacagacatggcagccaggaaaggtacagagacgataggacatatagagacaaaattgattcgctagaagctacttggaagcacagagaaagaagcaggagtcatagtagatcggatctaagggaaagtacacgtcttcgtgatcaaagccgggagagtgaaagacggattggtagttcaatgcatagggatcatggcagcaagagggatacaagtaaacatagagaatctgacagggttaacagtgcatatgaaagggagagagggagagatgctggggacagggaatggcacagggtcaagggaagcgaaactcatagagctaaggaaggacgggacaaagttagcgatagtgataggtacagggattcaacacgctcgaaatatagtgtgtctgatggctacaaagagagaacaagatctggggagaaaggtagagatgttgaccgtaaaaaccgaaagtttgaagaaatgaaggaaaattatctcaaggaggaagatgaagagaagtaccaagagaaaatagaacagcagttagcaatgcaggaggaagaggaccctgaaaaaatcaaagaggaagcaaggaggaggaaagaagctatcatggcgaagtacaggcagcagcaatcacagaagcaggatatggaagctaaaccaagcagcaatgatgaagaagtaagagctatggatggaaatgtaactatgcatcagaaagatgataacggtagcagttccacgggcaatgacaaagctgaaaataagcatgattcttcagaggtatttgatggcaaaaccgacttttctgtgggaaagtctcctgctcaaaatgatacttcaactagcacgggagcattcactgatgagaggacaatagatgtttcaggtcttggagagggttctcccaagagtgagagatcagcagacatgttttgtgatgacattttcggagaatcacctgcgggagttagaaaatcgggcaagggtgatggtttgcatgttgagagaaatgctcttcatgacaactgggatgatgcagatgggtactacacttaccggttcggagaattgctggatggccattacgaaatcatagcagcacatgggaagggtgtgttctcaaaagtcgtgcgggcaaaagatcttaaagcgagtaaagatgatcctgaagaagttgctatcaaaattattcgcaacaaggagacaatgtacaaggctggtaagcaagaggtttcaatactggaaaaacttgcaagtgtggaccgtgaggacaaacgccactgcgtgcggtttatttctagtttcatcttttcatcgccctgaagcacctgaagaactgcaaagttttgcactgtgatattaaacctgacaatatgctggtgaatgaggctaagaatgtgctcaagctatgtgattttgggaatgctatgcttgctggtatgaatgaagttacgccttatcttgttagccgtttctatcgggcacctgagatcattcttgggttagcctatgatcatcctttagacatgtggtcagttggctgctgtctatatgagctttataccggtaaagtcttatttcctggtccatcaaacaatgccatgcttcggcttcatatggaattgaagggtccattccctaagaagatgcttcgaaagggtgcctttactatgcaacactttgatcaagatctcaattttcatgctaccgaggaggatcctgtgacaaaaacggctgtgagaaggttaattttgaacattaaaccaaaggatgtcggttttttgattttgaactctcctggcgaggatccaaaaatgctatccagttttaaagatcttcttgataaaatgtttatattagatccagaaaagaggataaccgtatcacaagcacttagccatccatttatcactgctctgagaacaaatacatggatgaagcacggaactatcgaagagatggctatctgcagaccttgttgcatgcacttatcatttggatatgttctgttgcttgattctgccagggcctctgctgtgtgtacactttatatgcttaagcgccaacatttgaagtatcaattgaatggttttgcttttatgttattgaggtcctgggatggagatcgctggaccctcctctcctcatcatggtgtatttctaattgtttttgcgttttggtaagtaatttctttttgtcagtttcatcaaacattgatcttccaaacaatttgtttgtcttttgtgtgtccgacaaacttttccatattaatgggttgtgaaattcaagtactatatagtatatactccggggattttagccccatccaatcccctccggttttctggcttccaaactagccatcaatcccatcatccaattcccttatcccaaactagccctaagaaaattgggtacagggaaaagaaatcccaacttggcctcccctctataagcatgcagaagctgaaaggctctcagcctgttgtccccgtagaatgctctcctttgtgattgcctgcacagcactgccataacacttgcaatggcgctgttaaaaacacatcattccaatctctcaagccaaccaagatagtgaattcaggcctaccatttcgcacttgaccgcctggctcaaagcacctattgataattggctgagagtttgaggtgcaatggaaataaatcaaagcctgtaagatcattctttagattgaacagttggttgaacgaacctattaccatctatacgtgggcatatgaatgaca

SEQ ID NO: 8943 - DNA, 3785 bp, Zea Mays
atcatcggctcggtccgcaggcgcaacaaaattcgcatcggcatcgcaatctcgctcgcagggaggagagggggagcctctaaccctaaccctacctgcctctgtcgcaatcgccatggccgccggcggagagccctcccccctgtcccctgccaaatactctcgcttgcccgacgacgcccagcccgacgcatccccgaagcgccgcaagcgccaccaccgccaccaccaccaccaccaccaccgtcgacaccgtcacgccgattccccgatacccgaggcggccgacgaagaggtagaggagggggagatactcgacgatgcttcctccgtctctgctatggaggtcaatgccgagtccgccgccccacagtcttcccttgctccggagcactttggtaatggtgctgatattaacacagatgcaaccaagatgcaagctcctgctccgcctacccttccatcctcaaaagatagaaggaggtcacttcacggtgcccctgagtctgaaagcggaggtatcctatcaagtgatgctgaggataacaaagggcatggacggaggcaaagtcaaagttgttcaaaatctccaaagcccagaagggagaaggaaaggaggcacaaagatgggcatcactcttcatcttcaaaagatcattatcccaaaaatcgctctagagcatctccatactcaaggcatcagagtgaagctcattcaagagatcacttgagatctggagaaagaggtgatgatactaatggttctgatcgtgagagcaatgatcagaatgggaagtctggcagacatacgactgggacccaggagaatgaaagagaaaggagcagcagccatggtattcatgatagacatggtgataggcataatgacagacatggcagccaggaaaggtacagagacgataggacatatagagacaaaattgattcgctagaagctacttggaagcacagagaaagaagcaggagtcatagtagatcggatctaagggaaagtacacgtcttcgtgatcaaagccgggagagtgaaagacggattggtagttcaatgcatagggatcatggcagcaagagggatacaagtaaacatagagaatctgacagggttaacagtgcatatgaaagggagagagggagagatgctggggacagggaatggcacagggtcaagggaagcgaaactcatagagctaaggaaggacgggacaaagttagcgatagtgataggtacagggattcaacacgctcgaaatatagtgtgtctgatggctacaaagagagaacaagatctggggagaaaggtagagatgttgaccgtaaaaaccgaaagtttgaagaaatgaaggaaaattatctcaaggaggaagatgaagagaagtaccaagagaaaatagaacagcagttagcaatgcaggaggaagaggaccctgaaaaaatcaaagaggaagcaaggaggaggaaagaagctatcatggcgaagtacaggcagcagcaatcacagaagcaggatatggaagctaaaccaagcagcaatgatgaagaagtaagagctatggatggaaatgtaactatgcatcagaaagatgataacggtagcagttccacgggcaatgacaaagctgaaaataagcatgattcttcagaggtatttgatggcaaaaccgacttttctgtgggaaagtctcctgctcaaaatgatacttcaactagcacgggagcattcactgatgagaggacaatagatgtttcaggtcttggagagggttctcccaagggcaagggtgatggtttgcatgttgagagaaatgctcttcatgacaactgggatgatgcagatgggtactacacttaccggttcggagaattgctggatggccattacgaaatcatagcagcacatgggaagggtgtgttctcaaaagtcgtgcgggcaaaagatcttaaagcgagtaaagatgatcctgaagaagttgctatcaaaattattcgcaacaaggagacaatgtacaaggctggtaagcaagaggtttcaatactggaaaaacttgcaagtgtggaccgtgaggacaaacgccactgcgtgcggtttatttctagtttcatgtaccggaaccatctttgcttagtttttgaatctctcaatatgaatcttcgtgaggttttaaagaaatttggtcgtaatattgggcttaaactgactgcggtgagggcatattcaaagcagcttttcatcgccctgaagcacctgaagaactgcaaagttttgcactgtgatattaaacctgacaatatgctggtgaatgaggctaagaatgtgctcaagctatgtgattttgggaatgctatgcttgctggtatgaatgaagttacgccttatcttgttagccgtttctatcgggcacctgagatcattcttgggttagcctatgatcatcctttagacatgtggtcagttggctgctgtctatatgagctttataccggtaaagtcttatttcctggtccatcaaacaatgccatgcttcggcttcatatggaattgaagggtccattccctaagaagatgcttcgaaagggtgcctttactatgcaacactttgatcaagatctcaattttcatgctaccgaggaggatcctgtgacaaaaacggctgtgagaaggttaattttgaacattaaaccaaaggatgtcggttttttgattttgaactctcctggcgaggatccaaaaatgctatccagttttaaagatcttcttgataaaatgtttatattagatccagaaaagaggataaccgtatcacaagcacttagccatccatttatcactggcaagtgacataagatgctgattcctcttgatattgaacttagcatctacactgtaaaatacaatttgggtttctcttgtctaatcatcgacgtttctgtcttgtgtcctgggagctctgagaacaaatacatggatgaagcacggaactatcgaagagatggctatctgcagaccttgttgcatgcacttatcatttggatatgttctgttgcttgattctgccagggcctctgctgtgtgtacactttatatgcttaagcgccaacatttgaaggtcctgggatggagatcgctggaccctcctctcctcatcatggtgtatttctaattgtttttgcgttttggtaagtaatttctttttgtcagtttcatcaaacattgatcttccaaacaatttgtttgtcttttgtgtgtccgacaaacttttccatattaatgggttgtgaaattcaagtactatatagtatatactccggggattttagccccatccaatcccctccggttttctggcttccaaactagccatcaatcccatcatccaattcccttatcccaaactagccctaagaaaattgggtacagggaaaagaaatcccaacttggcctcccctctataagcatgcagaagctgaaaggctctcagcctgttgtccccgtagaatgctctcctttgtgattgcctgcacagcactgccataacacttgcaatggcgctgttaaaaacacatcattccaatctctcaagccaaccaagatagtgaattcaggcctaccatttcgcacttgaccgcctggctcaaagcacctattgataattggctgagagtttgaggtgcaatggaaataaatcaaagcctgtaagatcattctttagattgaacagttggttgaacgaacctattaccatctatacgtgggcatatgaatgaca

SEQ ID NO: 8944 - DNA, 2998 bp, Zea Mays
ccgcaggcgcaacaaaattcgcatcggcatcgcaatctcgctcgcagggaggagagggggagcctctaaccctaaccctacctgcctctgtcgcaatcgccatggccgccggcggagagccctcccccctgtcccctgccaaatactctcgcttgcccgacgacgcccagcccgacgcatccccgaagcgccgcaagcgccaccaccgccaccaccaccaccaccaccaccgtcgacaccgtcacgccgattccccgatacccgaggcggccgacgaagaggtagaggagggggagatactcgacgatgcttcctccgtctctgctatggaggtcaatgccgagtccgccgccccacagtcttcccttgctccggagcactttggtaatggtgctgatattaacacagatgcaaccaagatgcaagctcctgctccgcctacccttccatcctcaaaagatagaaggaggtcacttcacggtgcccctgagtctgaaagcggaggtatcctatcaagtgatgctgaggataacaaagggcatggacggaggcaaagtcaaagttgttcaaaatctccaaagcccagaagggagaaggaaaggaggcacaaagatgggcatcactcttcatcttcaaaagatcattatcccaaaaatcgctctagagcatctccatactcaaggcatcagagtgaagctcattcaagagatcacttgagatctggagaaagaggtgatgatactaatggttctgatcgtgagagcaatgatcagaatgggaagtctggcagacatacgactgggacccaggagaatgaaagagaaaggagcagcagccatggtattcatgatagacatggtgataggcataatgacagacatggcagccaggaaaggtacagagacgataggacatatagagacaaaattgattcgctagaagctacttggaagcacagagaaagaagcaggagtcatagtagatcggatctaagggaaagtacacgtcttcgtgatcaaagccgggagagtgaaagacggattggtagttcaatgcatagggatcatggcagcaagagggatacaagtaaacatagagaatctgacagggttaacagtgcatatgaaagggagagagggagagatgctggggacagggaatggcacagggtcaagggaagcgaaactcatagagctaaggaaggacgggacaaagttagcgatagtgataggtacagggattcaacacgctcgaaatatagtgtgtctgatggctacaaagagagaacaagatctggggagaaaggtagagatgttgaccgtaaaaaccgaaagtttgaagaaatgaaggaaaattatctcaaggaggaagatgaagagaagtaccaagagaaaatagaacagcagttagcaatgcaggaggaagaggaccctgaaaaaatcaaagaggaagcaaggaggaggaaagaagctatcatggcgaagtacaggcagcagcaatcacagaagcaggatatggaagctaaaccaagcagcaatgatgaagaagtaagagctatggatggaaatgtaactatgcatcagaaagatgataacggtagcagttccacgggcaatgacaaagctgaaaataagcatgattcttcagaggtatttgatggcaaaaccgacttttctgtgggaaagtctcctgctcaaaatgatacttcaactagcacgggagcattcactgatgagaggacaatagatgtttcaggtcttggagagggttctcccaagagtgagagatcagcagacatgttttgtgatgacattttcggagaatcacctgcgggagttagaaaatcgggcaagggtgatggtttgcatgttgagagaaatgctcttcatgacaactgggatgatgcagatgggtactacacttaccggttcggagaattgctggatggccattacgaaatcatagcagcacatgggaagggtgtgttctcaaaagtcgtgcgggcaaaagatcttaaagcgagtaaagatgatcctgaagaagttgctatcaaaattattcgcaacaaggagacaatgtacaaggctggtaagcaagaggtttcaatactggaaaaacttgcaagtgtggaccgtgaggacaaacgccactgcgtgcggtttatttctagtttcatcttttcatcgccctgaagcacctgaagaactgcaaagttttgcactgtgatattaaacctgacaatatgctggtgaatgaggctaagaatgtgctcaagctatgtgattttgggaatgctatgcttgctggtatgaatgaagttacgccttatcttgttagccgtttctatcgggcacctgagatcattcttgggttagcctatgatcatcctttagacatgtggtcagttggctgctgtctatatgagctttataccggtaaagtcttatttcctggtccatcaaacaatgccatgcttcggcttcatatggaattgaagggtccattccctaagaagatgcttcgaaagggtgcctttactatgcaacactttgatcaagatctcaattttcatgctaccgaggaggatcctgtgacaaaaacggctgtgagaaggttaattttgaacattaaaccaaaggatgtcggttttttgattttgaactctcctggcgaggatccaaaaatgctatccagttttaaagatcttcttgataaaatgtttatattagatccagaaaagaggataaccgtatcacaagcacttagccatccatttatcactgctctgagaacaaatacatggatgaagcacggaactatcgaagagatggctatctgcagaccttgttgcatgcacttatcatttggatatgttctgttgcttgattctgccagggcctctgctgtgtgtacactttatatgcttaagcgccaacatttgaaggttgagagatggcatctatattgaattttataccattcatatgtcctgatcgtt

SEQ ID NO: 8945 - DNA, 1893 bp, Zea Mays
gcggactattacaaatgccaccttatggtggccaaaatttgaggtgatagtgaggttgcaagaactgttattgatgaaagtaacgctgagggggaggaagctagaaaattcttggaagatgttcgagttacattcccgcaggtgctacgagtgctaaagacacgacaagtcacatattctgtgctgacacacttgagtgagtatattcaaaacctccagaagactgggctgctggaagagaaggaaatggtccatttagatgatgctctgcagacagacttgaagaagttgcagaggaatccaccaatagtgaaaatgccaagagtcagtgatcttctgaacactcatcctttagttggcgcgctgcctgctgctgtacgtgatactttgctaagcaatacgaaggaaaccctgcgagggcagggcacaacgctgtatagagaaggatccaggccaaccggtatctggcttgtttctattggtgtagtgaaggtctgtccgcgcctcaacaacactagacaaaattctgttggggaagaattgttcgttctaatgagcattttattcccccactttttttaaaaaaaatttccaacaacagtggacaagtcagagattaagcagaaggcattccttggatccaattttatcgcatgggagcactctgggtctgtatgaggtgctgattggaaagccatatatctgtgacatgaccacagattcgatggtacagtgtttcttcatcgaaactgaaaagatagaagagctgctccattcagatccttcgattgagattttcctgtggcaggaaagtgctctggtgcttgccaggcttttggtccctcatagattcgagaaaatgggaatgcatgagatgagggttctggttgctgaaaggtcgacgatgaacatatacatcaagggagaagacttggaagtggagcagaattgcattggcattttgctggaagggttcttgaagatcgagaacctgactctcatcacgcccccagcgttgcttctgccatggaatgctgacttgagcttattcggtctcgagtcctcaggtatcaggtggaagccagagcgcggatcatcttcttcgacgaggcagaggccgcccatcttcatgttcagacaagtgcgtcgctgccccaaggtgagccagcacggagcatgagcaaggagcacagcggcttgctcagctggcccgagagcttccggaggtctcgtggcagcctaggcttagcagctgagatgctgccgggcggcttgtcttccagggccctgcaactgagcatgtacgggggcagcgtggtgagcctctcctccggccagcagggtcaccggcggcagaggccacgtcatcgcgtgcaggcggccacgacgatgacaaaccagaagaagcacagctcttcctaccccaggatgccatccatatccaaggagcggcatctgctctccgtgcagtcggagggctccaacatgaagagagtggcagctctacctgaggttgctgccaccgctcctgctccggcaggggcagcacaggggcagcggagggctatgaacttgcaggaggaatacaactcgagcgaagactccgccggcgaagaagtcatcgtcagagttgactcgcccagcatgctctctttccgtgagtccaccgccgtgcctccgccccaggagcagtagctggatgcctggatgtggtcttctcttctcgtgtattgtattgtactgtatgtattgtatcagggaagctttggcgcagtggtgtggtgtggtgtggtgtggtaaacaaaataaataaaacacatttccgcgttccatattttctcttcatgatcaccgaataaataaaagaaacagagacaatgatgcggaagaaaa

SEQ ID NO: 8946 - DNA, 3700 bp, Zea Mays
tggtctccggccaaggggtcgtcacatacaaggaccagcgagatgggcggcgaggctgagcctgacaacgcggtgctcttcgttggggtgtcgctggtgctgggcatcgcctcccggcacctcctccgcggcacccgcgtgccctacaccgtcgcccttctcgtcctcggcgtcgcgcttggatccctcgagtacggaacacaacatggtctaggcaagcttggagctggaattcgtatctgggctaacataaaccctgatcttctgctggctgtttttctacctgccctcctctttgaaagctccttctccatggaagtacaccaaataaagagatgtatggcacagatggtgttacttgctggacctggtgtgctaatatcaacagttttacttggcgttgccgtaaagctcacttttccttacaactggagctggaaaacatcattgttgcttggcggactgcttagtgcaactgatccagttgctgtggttgcactgctaaaagaactcggagcaagtaaaaagcttagcacaatcattgaaggtgaatccttaatgaatgatgggaccgctattgttgcctatcagctattctatcgaatggtgcttggaagaacctttgatgctggctcaataataaagttcttgtctgaagtttcacttggagctgttgctctgggccttgcatttggaatcatgtcaatactgtggctgggctttatttttaacgatacaatcatagagattgcacttactcttgctgtcagttatatagctttcttcactgcacaagactcactggaggtctctggtgttttgactgtcatgacactgggaatgttctatgcagcttttgcaaaaactgcttttaagggtgaaagtcagcaaagcttacaccatttctgtgttggttaccaaaagtaccatgaaatcttcagttgacactgaattaagggaaatggttgcttacattgcaaatacacttatttttatactgagtggggttgttattgcagatggtgttctacaaaataatggccactttgagaggcacggcagttcatggggcttccttcttctgctctatgtctttgtacaaatatctcgagttatagttgttggtgttttgtacccgatgttgcgtcactttgggtatgggttggacttgaaagaggccatgattcttgtttggtcagggctgcgaggggctgttgctctgtcactatcattatctgttaagcgtaccagcgattcagttcaaccttaccttaaaccagaagttggaacaatgtttgtgttcttcactggtggcattgtgtttctgacattgatttttaatggctcaaccacacaatttttgctacatatactcggcatggacaaattgttgcccacaaagcttcgtatattgaaatatacaaggtacgaaatgctaaagaaagcattagaggcttttggtgaactaagggatgacgaggaacttggacctgctgactgggttactgtaaagaaatatatcacatgtttgaatgacctagactatgagccagagcatccccatgatgttggtgacgaagatgactgcatgcatatcatgaacttaacagatatccgagtgcggcttttgaatggtgtgcaagccgcgtactggggaatgcttgaagaaggacgaataactcaagttacagcaaatattctgatgagatcggttgatgaagctatggaccttgtttctggacaaacattatgtgattggaaaggtttaaagtccaatgtgcagttcccaaattactataggttccttcagaggagtaggttaccacgaaagcttgtcacatacttcacagtcgaaagattagagtctggatgttacatctgtgctgcatttcttcgtgctcacagaatcgcaaggcggcagctacatgattttcttggtgatagtgaggttgcaagaactgttattgatgaaagtaacgctgagggggaggaagctagaaaattcttggaagatgttcgagttacattcccgcaggtgctacgagtgctaaagacacgacaagtcacatattctgtgctgacacacttgagtgagtatattcaaaacctccagaagactgggctgctggaagagaaggaaatggtccatttagatgatgctctgcagacagacttgaagaagttgcagaggaatccaccaatagtgaaaatgccaagagtcagtgatcttctgaacactcatcctttagttggcgcgctgcctgctgctgtacgtgatactttgctaagcaatacgaaggaaaccctgcgagggcagggcacaacgctgtatagagaaggatccaggccaaccggtatctggcttgtttctattggtgtagtgaagtggacaagtcagagattaagcagaaggcattccttggatccaattttatcgcatgggagcactctgggtctgtatgaggtgctgattggaaagccatatatctgtgacatgaccacagattcgatggtacagtgtttcttcatcgaaactgaaaagatagaagagctgctccattcagatccttcgattgagattttcctgtggcaggaaagtgctctggtgcttgccaggcttttggtccctcatagattcgagaaaatgggaatgcatgagatgagggttctggttgctgaaaggtcgacgatgaacatatacatcaagggagaagacttggaagtggagcagaattgcattggcattttgctggaagggttcttgaagatcgagaacctgactctcatcacgcccccagcgttgcttctgccatggaatgctgacttgagcttattcggtctcgagtcctcagactactgccatactgcacgcaggtatcaggtggaagccagagcgcggatcatcttcttcgacgaggcagaggccgcccatcttcatgttcagacaagtgcgtcgctgccccaaggtgagccagcacggagcatgagcaaggagcacagcggcttgctcagctggcccgagagcttccggaggtctcgtggcagcctaggcttagcagctgagatgctgccgggcggcttgtcttccagggccctgcaactgagcatgtacgggggcagcgtggtgagcctctcctccggccagcagggtcaccggcggcagaggccacgtcatcgcgtgcaggcggccacgacgatgacaaaccagaagaagcacagctcttcctaccccaggatgccatccatatccaaggagcggcatctgctctccgtgcagtcggagggctccaacatgaagagagtggcagctctacctgaggttgctgccaccgctcctgctccggcaggggcagcacaggggcagcggagggctatgaacttgcaggaggaatacaactcgagcgaagactccgccggcgaagaagtcatcgtcagagttgactcgcccagcatgctctctttccgtgagtccaccgccgtgcctccgccccaggagcagtagctggatgcctggatgtggtcttctcttctcgtgtattgtattgtactgtatgtattgtatcagggaagctttggcgcagtggtgtggtgtggtgtggtgtggtaaacaaaataaataaaacacatttccgcgttccatattttctcttcatgatcaccgaataaataaaagaaacagagacaatgatgcggaagaaaa

SEQ ID NO: 8947 - DNA, 3648 bp, Zea Mays
cttgctcttccggctcacggcggtggtctccggccaaggggtcgtcacatacaaggaccagcgagatgggcggcgaggctgagcctgacaacgcggtgctcttcgttggggtgtcgctggtgctgggcatcgcctcccggcacctcctccgcggcacccgcgtgccctacaccgtcgcccttctcgtcctcggcgtcgcgcttggatccctcgagtacggaacacaacatggtctaggcaagcttggagctggaattcgtatctgggctaacataaaccctgatcttctgctggctgtttttctacctgccctcctctttgaaagctccttctccatggaagtacaccaaataaagagatgtatggcacagatggtgttacttgctggacctggtgtgctaatatcaacagttttacttggcgttgccgtaaagctcacttttccttacaactggagctggaaaacatcattgttgcttggcggactgcttagtgcaactgatccagttgctgtggttgcactgctaaaagaactcggagcaagtaaaaagcttagcacaatcattgaaggaccgctattgttgcctatcagctattctatcgaatggtgcttggaagaacctttgatgctggctcaataataaagttcttgtctgaagtttcacttggagctgttgctctgggccttgcatttggaatcatgtcaatactgtggctgggctttatttttaacgatacaatcatagagattgcacttactcttgctgtcagttatatagctttcttcactgcacaagactcactggaggtctctggtgttttgactgtcatgacactgggaatgttctatgcagcttttgcaaaaactgcttttaagggtgaaagtcagcaaagcttacaccatttctgggaaatggttgcttacattgcaaatacacttatttttatactgagtggggttgttattgcagatggtgttctacaaaataatggccactttgagaggcacggcagttcatggggcttccttcttctgctctatgtctttgtacaaatatctcgagttatagttgttggtgttttgtacccgatgttgcgtcactttgggtatgggttggacttgaaagaggccatgattcttgtttggtcagggctgcgaggggctgttgctctgtcactatcattatctgttaagcgtaccagcgattcagttcaaccttaccttaaaccagaagttggaacaatgtttgtgttcttcactggtggcattgtgtttctgacattgatttttaatggctcaaccacacaatttttgctacatatactcggcatggacaaattgttgcccacaaagcttcgtatattgaaatatacaaggtacgaaatgctaaagaaagcattagaggcttttggtgaactaagggatgacgaggaacttggacctgctgactgggttactgtaaagaaatatatcacatgtttgaatgacctagactatgagccagagcatccccatgatgttggtgacgaagatgactgcatgcatatcatgaacttaacagatatccgagtgcggcttttgaatggtgtgcaagccgcgtactggggaatgcttgaagaaggacgaataactcaagttacagcaaatattctgatgagatcggttgatgaagctatggaccttgtttctggacaaacattatgtgattggaaaggtttaaagtccaatgtgcagttcccaaattactataggttccttcagaggagtaggttaccacgaaagcttgtcacatacttcacagtcgaaagattagagtctggatgttacatctgtgctgcatttcttcgtgctcacagaatcgcaaggcggcagctacatgattttcttggtgatagtgaggttgcaagaactgttattgatgaaagtaacgctgagggggaggaagctagaaaattcttggaagatgttcgagttacattcccgcaggtgctacgagtgctaaagacacgacaagtcacatattctgtgctgacacacttgagtgagtatattcaaaacctccagaagactgggctgctggaagagaaggaaatggtccatttagatgatgctctgcagacttgaagaagttgcagaggaatccaccaatagtgaaaatgccaagagtcagtgatcttctgaacactcatcctttagttggcgcgctgcctgctgctgtacgtgatactttgctaagcaatacgaaggaaaccctgcgagggcagggcacaacgctgtatagagaaggatccaggccaaccggtatctggcttgtttctattggtgtagtgaagtggacaagtcagagattaagcagaaggcattccttggatccaattttatcgcatgggagcactctgggtctgtatgaggtgctgattggaaagccatatatctgtgacatgaccacagattcgatggtacagtgtttcttcatcgaaactgaaaagatagaagagctgctccattcagatccttcgattgagattttcctgtggcaggaaagtgctctggtgcttgccaggcttttggtccctcatagattcgagaaaatgggaatgcatgagatgagggttctggttgctgaaaggtcgacgatgaacatatacatcaagggagaagacttggaagtggagcagaattgcattggcattttgctggaagggttcttgaagatcgagaacctgactctcatcacgcccccagcgttgcttctgccatggaatgctgacttgagcttattcggtctcgagtcctcagactactgccatactgcacgcaggtatcaggtggaagccagagcgcggatcatcttcttcgacgaggcagaggccgcccatcttcatgttcagacaagtgcgtcgctgccccaaggtgagccagcacggagcatgagcaaggagcacagcggcttgctcagctggcccgagagcttccggaggtctcgtggcagcctaggcttagcagctgagatgctgccgggcggcttgtcttccagggccctgcaactgagcatgtacgggggcagcgtggtgagcctctcctccggccagcagggtcaccggcggcagaggccacgtcatcgcgtgcaggcggccacgacgatgacaaaccagaagaagcacagctcttcctaccccaggatgccatccatatccaaggagcggcatctgctctccgtgcagtcggagggctccaacatgaagagagtggcagctctacctgaggttgctgccaccgctcctgctccggcaggggcagcacaggggcagcggagggctatgaacttgcaggaggaatacaactcgagcgaagactccgccggcgaagaagtcatcgtcagagttgactcgcccagcatgctctctttccgtgagtccaccgccgtgcctccgccccaggagcagtagctggatgcctggatgtggtcttctcttctcgtgtattgtattgtactgtatgtattgtatcagggaagctttggcgcagtggtgtggtgtggtgtggtgtggtaaacaaaataaataaaacacatttccgcgttccatattttctcttcatgatcaccgaataaataaaagaaacagagacaatgatgcggaagaaaa

SEQ ID NO: 8948 - DNA, 3999 bp, Zea Mays
gttcttcgtcgcttgctcttccggctcacggcggtggtctccggccaaggggtcgtcacatacaaggaccagcgagatgggcggcgaggctgagcctgacaacgcggtgctcttcgttggggtgtcgctggtgctgggcatcgcctcccggcacctcctccgcggcacccgcgtgccctacaccgtcgcccttctcgtcctcggcgtcgcgcttggatccctcgagtacggaacacaacatggtctaggcaagcttggagctggaattcgtatctgggctaacataaaccctgatcttctgctggctgtttttctacctgccctcctctttgaaagctccttctccatggaagtacaccaaataaagagatgtatggcacagatggtgttacttgctggacctggtgtgctaatatcaacagttttacttggcgttgccgtaaagctcacttttccttacaactggagctggaaaacatcattgttgcttggcggactgcttagtgcaactgatccagttgctgtggttgcactgctaaaagaactcggagcaagtaaaaagcttagcacaatcattgaaggaccgctattgttgcctatcagctattctatcgaatggtgcttggaagaacctttgatgctggctcaataataaagttcttgtctgaagtttcacttggagctgttgctctgggccttgcatttggaatcatgtcaatactgtggctgggctttatttttaacgatacaatcatagagattgcacttactcttgctgtcagttatatagctttcttcactgcacaagactcactggaggtctctggtgttttgactgtcatgacactgggaatgttctatgcagcttttgcaaaaactgcttttaagggtgaaagtcagcaaagcttacaccatttctggtttaaggtccagacccagtcatggtttctcacattggctgcagtacgccagtaccactgtgtaaaggtgagacaggatttcaagggctttctcgacctatttgcacctggggactatcttacccccataggccaatttttcttgttggttaccaaaagtaccatgaaatcttcagttgacactgaattaaggtaccctaatctgggtattactacgaacacatcaaattattgacttctttttttctgtagtttatgtacatgttctttactcttctgatatatgagtattcatctgatctgagtttcatgtttgctttgctcttattcatgtactcagggaaatggttgcttacattgcaaatacacttatttttatactgagtggggttgttattgcagatggtgttctacaaaataatggccactttgagaggcacggcagttcatggggcttccttcttctgctctatgtctttgtacaaatatctcgagttatagttgttggtgttttgtacccgatgttgcgtcactttgggtatgggttggacttgaaagaggccatgattcttgtttggtcagggctgcgaggggctgttgctctgtcactatcattatctgttaagcgtaccagcgattcagttcaaccttaccttaaaccagaagttggaacaatgtttgtgttcttcactggtggcattgtgtttctgacattgatttttaatggctcaaccacacaatttttgctacatatactcggcatggacaaattgttgcccacaaagcttcgtatattgaaatatacaaggtacgaaatgctaaagaaagcattagaggcttttggtgaactaagggatgacgaggaacttggacctgctgactgggttactgtaaagaaatatatcacatgtttgaatgacctagactatgagccagagcatccccatgatgttggtgacgaagatgactgcatgcatatcatgaacttaacagatatccgagtgcggcttttgaatggtgtgcaagccgcgtactggggaatgcttgaagaaggacgaataactcaagttacagcaaatattctgatgagatcggttgatgaagctatggaccttgtttctggacaaacattatgtgattggaaaggtttaaagtccaatgtgcagttcccaaattactataggttccttcagaggagtaggttaccacgaaagcttgtcacatacttcacagtcgaaagattagagtctggatgttacatctgtgctgcatttcttcgtgctcacagaatcgcaaggcggcagctacatgattttcttggtgatagtgaggttgcaagaactgttattgatgaaagtaacgctgagggggaggaagctagaaaattcttggaagatgttcgagttacattcccgcaggtgctacgagtgctaaagacacgacaagtcacatattctgtgctgacacacttgagtgagtatattcaaaacctccagaagactgggctgctggaagagaaggaaatggtccatttagatgatgctctgcagacttgaagaagttgcagaggaatccaccaatagtgaaaatgccaagagtcagtgatcttctgaacactcatcctttagttggcgcgctgcctgctgctgtacgtgatactttgctaagcaatacgaaggaaaccctgcgagggcagggcacaacgctgtatagagaaggatccaggccaaccggtatctggcttgtttctattggtgtagtgaagtggacaagtcagagattaagcagaaggcattccttggatccaattttatcgcatgggagcactctgggtctgtatgaggtgctgattggaaagccatatatctgtgacatgaccacagattcgatggtacagtgtttcttcatcgaaactgaaaagatagaagagctgctccattcagatccttcgattgagattttcctgtggcaggaaagtgctctggtgcttgccaggcttttggtccctcatagattcgagaaaatgggaatgcatgagatgagggttctggttgctgaaaggtcgacgatgaacatatacatcaagggagaagacttggaagtggagcagaattgcattggcattttgctggaagggttcttgaagatcgagaacctgactctcatcacgcccccagcgttgcttctgccatggaatgctgacttgagcttattcggtctcgagtcctcagactactgccatactgcacgcaggtatcaggtggaagccagagcgcggatcatcttcttcgacgaggcagaggccgcccatcttcatgttcagacaagtgcgtcgctgccccaaggtgagccagcacggagcatgagcaaggagcacagcggcttgctcagctggcccgagagcttccggaggtctcgtggcagcctaggcttagcagctgagatgctgccgggcggcttgtcttccagggccctgcaactgagcatgtacgggggcagcgtggtgagcctctcctccggccagcagggtcaccggcggcagaggccacgtcatcgcgtgcaggcggccacgacgatgacaaaccagaagaagcacagctcttcctaccccaggatgccatccatatccaaggagcggcatctgctctccgtgcagtcggagggctccaacatgaagagagtggcagctctacctgaggttgctgccaccgctcctgctccggcaggggcagcacaggggcagcggagggctatgaacttgcaggaggaatacaactcgagcgaagactccgccggcgaagaagtcatcgtcagagttgactcgcccagcatgctctctttccgtgagtccaccgccgtgcctccgccccaggagcagtagctggatgcctggatgtggtcttctcttctcgtgtattgtattgtactgtatgtattgtatcagggaagctttggcgcagtggtgtggtgtggtgtggtgtggtaaacaaaataaataaaacacatttccgcgttccatattttctcttcatgatcaccgaataaataaaagaaacagagacaatgatgcggaagaaaa

SEQ ID NO: 8949 - DNA, 3689 bp, Zea Mays
ctctgttcttcgtcgcttgctcttccggctcacggcggtggtctccggccaaggggtcgtcacatacaaggaccagcgagatgggcggcgaggctgagcctgacaacgcggtgctcttcgttggggtgtcgctggtgctgggcatcgcctcccggcacctcctccgcggcacccgcgtgccctacaccgtcgcccttctcgtcctcggcgtcgcgcttggatccctcgagtacggaacacaacatggtctaggcaagcttggagctggaattcgtatctgggctaacataaaccctgatcttctgctggctgtttttctacctgccctcctctttgaaagctccttctccatggaagtacaccaaataaagagatgtatggcacagatggtgttacttgctggacctggtgtgctaatatcaacagttttacttggcgttgccgtaaagctcacttttccttacaactggagctggaaaacatcattgttgcttggcggactgcttagtgcaactgatccagttgctgtggttgcactgctaaaagaactcggagcaagtaaaaagcttagcacaatcattgaaggtgaatccttaatgaatgatgggaccgctattgttgcctatcagctattctatcgaatggtgcttggaagaacctttgatgctggctcaataataaagttcttgtctgaagtttcacttggagctgttgctctgggccttgcatttggaatcatgtcaatactgtggctgggctttatttttaacgatacaatcatagagattgcacttactcttgctgtcagttatatagctttcttcactgcacaagactcactggaggtctctggtgttttgactgtcatgacactgggaatgttctatgcagcttttgcaaaaactgcttttaagggtgaaagtcagcaaagcttacaccatttctgggaaatggttgcttacattgcaaatacacttatttttatactgagtggggttgttattgcagatggtgttctacaaaataatggccactttgagaggcacggcagttcatggggcttccttcttctgctctatgtctttgtacaaatatctcgagttatagttgttggtgttttgtacccgatgttgcgtcactttgggtatgggttggacttgaaagaggccatgattcttgtttggtcagggctgcgaggggctgttgctctgtcactatcattatctgttaagcgtaccagcgattcagttcaaccttaccttaaaccagaagttggaacaatgtttgtgttcttcactggtggcattgtgtttctgacattgatttttaatggctcaaccacacaatttttgctacatatactcggcatggacaaattgttgcccacaaagcttcgtatattgaaatatacaaggtacgaaatgctaaagaaagcattagaggcttttggtgaactaagggatgacgaggaacttggacctgctgactgggttactgtaaagaaatatatcacatgtttgaatgacctagactatgagccagagcatccccatgatgttggtgacgaagatgactgcatgcatatcatgaacttaacagatatccgagtgcggcttttgaatggtgtgcaagccgcgtactggggaatgcttgaagaaggacgaataactcaagttacagcaaatattctgatgagatcggttgatgaagctatggaccttgtttctggacaaacattatgtgattggaaaggtttaaagtccaatgtgcagttcccaaattactataggttccttcagaggagtaggttaccacgaaagcttgtcacatacttcacagtcgaaagattagagtctggatgttacatctgtgctgcatttcttcgtgctcacagaatcgcaaggcggcagctacatgattttcttggtgatagtgaggttgcaagaactgttattgatgaaagtaacgctgagggggaggaagctagaaaattcttggaagatgttcgagttacattcccgcaggtgctacgagtgctaaagacacgacaagtcacatattctgtgctgacacacttgagtgagtatattcaaaacctccagaagactgggctgctggaagagaaggaaatggtccatttagatgatgctctgcagacagacttgaagaagttgcagaggaatccaccaatagtgaaaatgccaagagtcagtgatcttctgaacactcatcctttagttggcgcgctgcctgctgctgtacgtgatactttgctaagcaatacgaaggaaaccctgcgagggcagggcacaacgctgtatagagaaggatccaggccaaccggtatctggcttgtttctattggtgtagtgaagtggacaagtcagagattaagcagaaggcattccttggatccaattttatcgcatgggagcactctgggtctgtatgaggtgctgattggaaagccatatatctgtgacatgaccacagattcgatggtacagtgtttcttcatcgaaactgaaaagatagaagagctgctccattcagatccttcgattgagattttcctgtggcaggaaagtgctctggtgcttgccaggcttttggtccctcatagattcgagaaaatgggaatgcatgagatgagggttctggttgctgaaaggtcgacgatgaacatatacatcaagggagaagacttggaagtggagcagaattgcattggcattttgctggaagggttcttgaagatcgagaacctgactctcatcacgcccccagcgttgcttctgccatggaatgctgacttgagcttattcggtctcgagtcctcagactactgccatactgcacgcaggtatcaggtggaagccagagcgcggatcatcttcttcgacgaggcagaggccgcccatcttcatgttcagacaagtgcgtcgctgccccaaggtgagccagcacggagcatgagcaaggagcacagcggcttgctcagctggcccgagagcttccggaggtctcgtggcagcctaggcttagcagctgagatgctgccgggcggcttgtcttccagggccctgcaactgagcatgtacgggggcagcgtggtgagcctctcctccggccagcagggtcaccggcggcagaggccacgtcatcgcgtgcaggcggccacgacgatgacaaaccagaagaagcacagctcttcctaccccaggatgccatccatatccaaggagcggcatctgctctccgtgcagtcggagggctccaacatgaagagagtggcagctctacctgaggttgctgccaccgctcctgctccggcaggggcagcacaggggcagcggagggctatgaacttgcaggaggaatacaactcgagcgaagactccgccggcgaagaagtcatcgtcagagttgactcgcccagcatgctctctttccgtgagtccaccgccgtgcctccgccccaggagcagtagctggatgcctggatgtggtcttctcttctcgtgtattgtattgtactgtatgtattgtatcagggaagctttggcgcagtggtgtggtgtggtgtggtgtggtaaacaaaataaataaaacacatttccgcgttccatattttctcttcatgatcaccgaataaataaaagaaacagagacaatgatgcggaagaaaa

SEQ ID NO: 8950 - DNA, 3680 bp, Zea Mays
aactacctaaatactctgttcttcgtcgcttgctcttccggctcacggcggtggtctccggccaaggggtcgtcacatacaaggaccagcgagatgggcggcgaggctgagcctgacaacgcggtgctcttcgttggggtgtcgctggtgctgggcatcgcctcccggcacctcctccgcggcacccgcgtgccctacaccgtcgcccttctcgtcctcggcgtcgcgcttggatccctcgagtacggaacacaacatggtctaggcaagcttggagctggaattcgtatctgggctaacataaaccctgatcttctgctggctgtttttctacctgccctcctctttgaaagctccttctccatggaagtacaccaaataaagagatgtatggcacagatggtgttacttgctggacctggtgtgctaatatcaacagttttacttggcgttgccgtaaagctcacttttccttacaactggagctggaaaacatcattgttgcttggcggactgcttagtgcaactgatccagttgctgtggttgcactgctaaaagaactcggagcaagtaaaaagcttagcacaatcattgaaggaccgctattgttgcctatcagctattctatcgaatggtgcttggaagaacctttgatgctggctcaataataaagttcttgtctgaagtttcacttggagctgttgctctgggccttgcatttggaatcatgtcaatactgtggctgggctttatttttaacgatacaatcatagagattgcacttactcttgctgtcagttatatagctttcttcactgcacaagactcactggaggtctctggtgttttgactgtcatgacactgggaatgttctatgcagcttttgcaaaaactgcttttaagggtgaaagtcagcaaagcttacaccatttctgggaaatggttgcttacattgcaaatacacttatttttatactgagtggggttgttattgcagatggtgttctacaaaataatggccactttgagaggcacggcagttcatggggcttccttcttctgctctatgtctttgtacaaatatctcgagttatagttgttggtgttttgtacccgatgttgcgtcactttgggtatgggttggacttgaaagaggccatgattcttgtttggtcagggctgcgaggggctgttgctctgtcactatcattatctgttaagcgtaccagcgattcagttcaaccttaccttaaaccagaagttggaacaatgtttgtgttcttcactggtggcattgtgtttctgacattgatttttaatggctcaaccacacaatttttgctacatatactcggcatggacaaattgttgcccacaaagcttcgtatattgaaatatacaaggtacgaaatgctaaagaaagcattagaggcttttggtgaactaagggatgacgaggaacttggacctgctgactgggttactgtaaagaaatatatcacatgtttgaatgacctagactatgagccagagcatccccatgatgttggtgacgaagatgactgcatgcatatcatgaacttaacagatatccgagtgcggcttttgaatggtgtgcaagccgcgtactggggaatgcttgaagaaggacgaataactcaagttacagcaaatattctgatgagatcggttgatgaagctatggaccttgtttctggacaaacattatgtgattggaaaggtttaaagtccaatgtgcagttcccaaattactataggttccttcagaggagtaggttaccacgaaagcttgtcacatacttcacagtcgaaagattagagtctggatgttacatctgtgctgcatttcttcgtgctcacagaatcgcaaggcggcagctacatgattttcttggtgatagtgaggttgcaagaactgttattgatgaaagtaacgctgagggggaggaagctagaaaattcttggaagatgttcgagttacattcccgcaggtgctacgagtgctaaagacacgacaagtcacatattctgtgctgacacacttgagtgagtatattcaaaacctccagaagactgggctgctggaagagaaggaaatggtccatttagatgatgctctgcagacagacttgaagaagttgcagaggaatccaccaatagtgaaaatgccaagagtcagtgatcttctgaacactcatcctttagttggcgcgctgcctgctgctgtacgtgatactttgctaagcaatacgaaggaaaccctgcgagggcagggcacaacgctgtatagagaaggatccaggccaaccggtatctggcttgtttctattggtgtagtgaagtggacaagtcagagattaagcagaaggcattccttggatccaattttatcgcatgggagcactctgggtctgtatgaggtgctgattggaaagccatatatctgtgacatgaccacagattcgatggtacagtgtttcttcatcgaaactgaaaagatagaagagctgctccattcagatccttcgattgagattttcctgtggcaggaaagtgctctggtgcttgccaggcttttggtccctcatagattcgagaaaatgggaatgcatgagatgagggttctggttgctgaaaggtcgacgatgaacatatacatcaagggagaagacttggaagtggagcagaattgcattggcattttgctggaagggttcttgaagatcgagaacctgactctcatcacgcccccagcgttgcttctgccatggaatgctgacttgagcttattcggtctcgagtcctcagactactgccatactgcacgcaggtatcaggtggaagccagagcgcggatcatcttcttcgacgaggcagaggccgcccatcttcatgttcagacaagtgcgtcgctgccccaaggtgagccagcacggagcatgagcaaggagcacagcggcttgctcagctggcccgagagcttccggaggtctcgtggcagcctaggcttagcagctgagatgctgccgggcggcttgtcttccagggccctgcaactgagcatgtacgggggcagcgtggtgagcctctcctccggccagcagggtcaccggcggcagaggccacgtcatcgcgtgcaggcggccacgacgatgacaaaccagaagaagcacagctcttcctaccccaggatgccatccatatccaaggagcggcatctgctctccgtgcagtcggagggctccaacatgaagagagtggcagctctacctgaggttgctgccaccgctcctgctccggcaggggcagcacaggggcagcggagggctatgaacttgcaggaggaatacaactcgagcgaagactccgccggcgaagaagtcatcgtcagagttgactcgcccagcatgctctctttccgtgagtccaccgccgtgcctccgccccaggagcagtagctggatgcctggatgtggtcttctcttctcgtgtattgtattgtactgtatgtattgtatcagggaagctttggcgcagtggtgtggtgtggtgtggtgtggtaaacaaaataaataaaacacatttccgcgttccatattttctcttcatgatcaccgaataaataaaagaaacagagacaatgatgcggaagaaaa

SEQ ID NO: 8951 - DNA, 4109 bp, Zea Mays
caactacctaaatactctgttcttcgtcgcttgctcttccggctcacggcggtggtctccggccaaggggtcgtcacatacaaggaccagcgagatgggcggcgaggctgagcctgacaacgcggtgctcttcgttggggtgtcgctggtgctgggcatcgcctcccggcacctcctccgcggcacccgcgtgccctacaccgtcgcccttctcgtcctcggcgtcgcgcttggatccctcgagtacggaacacaacatggtctaggcaagcttggagctggaattcgtatctgggctaacataaaccctgatcttctgctggctgtttttctacctgccctcctctttgaaagctccttctccatggaagtacaccaaataaagagatgtatggcacagatggtgttacttgctggacctggtgtgctaatatcaacagttttacttggcgttgccgtaaagctcacttttccttacaactggagctggaaaacatcattgttgcttggcggactgcttagtgcaactgatccagttgctgtggttgcactgctaaaagaactcggagcaagtaaaaagcttagcacaatcattgaaggaccgctattgttgcctatcagctattctatcgaatggtgcttggaagaacctttgatgctggctcaataataaagttcttgtctgaagtttcacttggagctgttgctctgggccttgcatttggaatcatgtcaatactgtggctgggctttatttttaacgatacaatcatagagattgcacttactcttgctgtcagttatatagctttcttcactgcacaagactcactggaggtctctggtgttttgactgtcatgacactgggaatgttctatgcagcttttgcaaaaactgcttttaagggtgaaagtcagcaaagcttacaccatttctggtatgtatcttatagaaacaagtcagcctcccaataaaggtcatgctgtcgtgctatgccactatcactggcgaaaaggtctctcacttagttggttaggtggtctgagtagtactcattccagtgggagcaaatttcagaccagggttaaaaaattctcgcgtctgtcacacgccaaagcacaggtttaaggtccagacccagtcatggtttctcacattggctgcagtacgccagtaccactgtgtaaaggtgagacaggatttcaagggctttctcgacctatttgcacctggggactatcttacccccataggccaatttttcttgttggttaccaaaagtaccatgaaatcttcagttgacactgaattaagggaaatggttgcttacattgcaaatacacttatttttatactgagtggggttgttattgcagatggtgttctacaaaataatggccactttgagaggcacggcagttcatggggcttccttcttctgctctatgtctttgtacaaatatctcgagttatagttgttggtgttttgtacccgatgttgcgtcactttgggtatgggttggacttgaaagaggccatgattcttgtttggtcagggctgcgaggggctgttgctctgtcactatcattatctgttaagcgtaccagcgattcagttcaaccttaccttaaaccagaagttggaacaatgtttgtgttcttcactggtggcattgtgtttctgacattgatttttaatggctcaaccacacaatttttgctacatatactcggcatggacaaattgttgcccacaaagcttcgtatattgaaatatacaaggtacgaaatgctaaagaaagcattagaggcttttggtgaactaagggatgacgaggaacttggacctgctgactgggttactgtaaagaaatatatcacatgtttgaatgacctagactatgagccagagcatccccatgatgttggtgacgaagatgactgcatgcatatcatgaacttaacagatatccgagtgcggcttttgaatggtgtgcaagccgcgtactggggaatgcttgaagaaggacgaataactcaagttacagcaaatattctgatgagatcggttgatgaagctatggaccttgtttctggacaaacattatgtgattggaaaggtttaaagtccaatgtgcagttcccaaattactataggttccttcagaggagtaggttaccacgaaagcttgtcacatacttcacagtcgaaagattagagtctggatgttacatctgtgctgcatttcttcgtgctcacagaatcgcaaggcggcagctacatgattttcttggtgatagtgaggttgcaagaactgttattgatgaaagtaacgctgagggggaggaagctagaaaattcttggaagatgttcgagttacattcccgcaggtgctacgagtgctaaagacacgacaagtcacatattctgtgctgacacacttgagtgagtatattcaaaacctccagaagactgggctgctggaagagaaggaaatggtccatttagatgatgctctgcaggtagctggaatatttaacttacagtaaatatgctttatataactctagtaagccatgctaattcacttggcagacagacttgaagaagttgcagaggaatccaccaatagtgaaaatgccaagagtcagtgatcttctgaacactcatcctttagttggcgcgctgcctgctgctgtacgtgatactttgctaagcaatacgaaggaaaccctgcgagggcagggcacaacgctgtatagagaaggatccaggccaaccggtatctggcttgtttctattggtgtagtgaagtggacaagtcagagattaagcagaaggcattccttggatccaattttatcgcatgggagcactctgggtctgtatgaggtgctgattggaaagccatatatctgtgacatgaccacagattcgatggtacagtgtttcttcatcgaaactgaaaagatagaagagctgctccattcagatccttcgattgagattttcctgtggcaggaaagtgctctggtgcttgccaggcttttggtccctcatagattcgagaaaatgggaatgcatgagatgagggttctggttgctgaaaggtcgacgatgaacatatacatcaagggagaagacttggaagtggagcagaattgcattggcattttgctggaagggttcttgaagatcgagaacctgactctcatcacgcccccagcgttgcttctgccatggaatgctgacttgagcttattcggtctcgagtcctcaggtatcaggtggaagccagagcgcggatcatcttcttcgacgaggcagaggccgcccatcttcatgttcagacaagtgcgtcgctgccccaaggtgagccagcacggagcatgagcaaggagcacagcggcttgctcagctggcccgagagcttccggaggtctcgtggcagcctaggcttagcagctgagatgctgccgggcggcttgtcttccagggccctgcaactgagcatgtacgggggcagcgtggtgagcctctcctccggccagcagggtcaccggcggcagaggccacgtcatcgcgtgcaggcggccacgacgatgacaaaccagaagaagcacagctcttcctaccccaggatgccatccatatccaaggagcggcatctgctctccgtgcagtcggagggctccaacatgaagagagtggcagctctacctgaggttgctgccaccgctcctgctccggcaggggcagcacaggggcagcggagggctatgaacttgcaggaggaatacaactcgagcgaagactccgccggcgaagaagtcatcgtcagagttgactcgcccagcatgctctctttccgtgagtccaccgccgtgcctccgccccaggagcagtagctggatgcctggatgtggtcttctcttctcgtgtattgtattgtactgtatgtattgtatcagggaagctttggcgcagtggtgtggtgtggtgtggtgtggtaaacaaaataaataaaacacatttccgcgttccatattttctcttcatgatcaccgaataaataaaagaaacagagacaatgatgcggaagaaaa

SEQ ID NO: 8952 - DNA, 4254 bp, Zea Mays
caactacctaaatactctgttcttcgtcgcttgctcttccggctcacggcggtggtctccggccaaggggtcgtcacatacaaggaccagcgagatgggcggcgaggctgagcctgacaacgcggtgctcttcgttggggtgtcgctggtgctgggcatcgcctcccggcacctcctccgcggcacccgcgtgccctacaccgtcgcccttctcgtcctcggcgtcgcgcttggatccctcgagtacggaacacaacatggtctaggcaagcttggagctggaattcgtatctgggctaacataaaccctgatcttctgctggctgtttttctacctgccctcctctttgaaagctccttctccatggaagtacaccaaataaagagatgtatggcacagatggtgttacttgctggacctggtgtgctaatatcaacagttttacttggcgttgccgtaaagctcacttttccttacaactggagctggaaaacatcattgttgcttggcggactgcttagtgcaactgatccagttgctgtggttgcactgctaaaagaactcggagcaagtaaaaagcttagcacaatcattgaaggaccgctattgttgcctatcagctattctatcgaatggtgcttggaagaacctttgatgctggctcaataataaagttcttgtctgaagtttcacttggagctgttgctctgggccttgcatttggaatcatgtcaatactgtggctgggctttatttttaacgatacaatcatagagattgcacttactcttgctgtcagttatatagctttcttcactgcacaagactcactggaggtctctggtgttttgactgtcatgacactgggaatgttctatgcagcttttgcaaaaactgcttttaagggtgaaagtcagcaaagcttacaccatttctggtatgtatcttatagaaacaagtcagcctcccaataaaggtcatgctgtcgtgctatgccactatcactggcgaaaaggtctctcacttagttggttaggtggtctgagtagtactcattccagtgggagcaaatttcagaccagggttaaaaaattctcgcgtctgtcacacgccaaagcacaggtttaaggtccagacccagtcatggtttctcacattggctgcagtacgccagtaccactgtgtaaaggtgagacaggatttcaagggctttctcgacctatttgcacctggggactatcttacccccataggccaatttttctgtatgctgctatcaatgtgtttgcatgactggggaaactaaacaaggttgagaggttgagtcagccagggtggtggcgttggaattgctggtaaactacttattgcactatgggaactaatttgagggtctgccatagctaatcactagccatgttaatttgggatctgtagccaacaaaaagattcattatgaaaacttataaaaccctaaaaacataaatacacaagcattaattaatagcattttttggcatggaattgttctggtactctatccctgtgatccctatcctaattttgttgatgaataattttccagtgttggttaccaaaagtaccatgaaatcttcagttgacactgaattaagggaaatggttgcttacattgcaaatacacttatttttatactgagtggggttgttattgcagatggtgttctacaaaataatggccactttgagaggcacggcagttcatggggcttccttcttctgctctatgtctttgtacaaatatctcgagttatagttgttggtgttttgtacccgatgttgcgtcactttgggtatgggttggacttgaaagaggccatgattcttgtttggtcagggctgcgaggggctgttgctctgtcactatcattatctgttaagcgtaccagcgattcagttcaaccttaccttaaaccagaagttggaacaatgtttgtgttcttcactggtggcattgtgtttctgacattgatttttaatggctcaaccacacaatttttgctacatatactcggcatggacaaattgttgcccacaaagcttcgtatattgaaatatacaaggtacgaaatgctaaagaaagcattagaggcttttggtgaactaagggatgacgaggaacttggacctgctgactgggttactgtaaagaaatatatcacatgtttgaatgacctagactatgagccagagcatccccatgatgttggtgacgaagatgactgcatgcatatcatgaacttaacagatatccgagtgcggcttttgaatggtgtgcaagccgcgtactggggaatgcttgaagaaggacgaataactcaagttacagcaaatattctgatgagatcggttgatgaagctatggaccttgtttctggacaaacattatgtgattggaaaggtttaaagtccaatgtgcagttcccaaattactataggttccttcagaggagtaggttaccacgaaagcttgtcacatacttcacagtcgaaagattagagtctggatgttacatctgtgctgcatttcttcgtgctcacagaatcgcaaggcggcagctacatgattttcttggtgatagtgaggttgcaagaactgttattgatgaaagtaacgctgagggggaggaagctagaaaattcttggaagatgttcgagttacattcccgcaggtgctacgagtgctaaagacacgacaagtcacatattctgtgctgacacacttgagtgagtatattcaaaacctccagaagactgggctgctggaagagaaggaaatggtccatttagatgatgctctgcagacagacttgaagaagttgcagaggaatccaccaatagtgaaaatgccaagagtcagtgatcttctgaacactcatcctttagttggcgcgctgcctgctgctgtacgtgatactttgctaagcaatacgaaggaaaccctgcgagggcagggcacaacgctgtatagagaaggatccaggccaaccggtatctggcttgtttctattggtgtagtgaagtggacaagtcagagattaagcagaaggcattccttggatccaattttatcgcatgggagcactctgggtctgtatgaggtgctgattggaaagccatatatctgtgacatgaccacagattcgatggtacagtgtttcttcatcgaaactgaaaagatagaagagctgctccattcagatccttcgattgagattttcctgtggcaggaaagtgctctggtgcttgccaggcttttggtccctcatagattcgagaaaatgggaatgcatgagatgagggttctggttgctgaaaggtcgacgatgaacatatacatcaagggagaagacttggaagtggagcagaattgcattggcattttgctggaagggttcttgaagatcgagaacctgactctcatcacgcccccagcgttgcttctgccatggaatgctgacttgagcttattcggtctcgagtcctcagactactgccatactgcacgcaggtatcaggtggaagccagagcgcggatcatcttcttcgacgaggcagaggccgcccatcttcatgttcagacaagtgcgtcgctgccccaagggccctgcaactgagcatgtacgggggcagcgtggtgagcctctcctccggccagcagggtcaccggcggcagaggccacgtcatcgcgtgcaggcggccacgacgatgacaaaccagaagaagcacagctcttcctaccccaggatgccatccatatccaaggagcggcatctgctctccgtgcagtcggagggctccaacatgaagagagtggcagctctacctgaggttgctgccaccgctcctgctccggcaggggcagcacaggggcagcggagggctatgaacttgcaggaggaatacaactcgagcgaagactccgccggcgaagaagtcatcgtcagagttgactcgcccagcatgctctctttccgtgagtccaccgccgtgcctccgccccaggagcagtagctggatgcctggatgtggtcttctcttctcgtgtattgtattgtactgtatgtattgtatcagggaagctttggcgcagtggtgtggtgtggtgtggtgtggtaaacaaaataaataaaacacatttccgcgttccatattttctcttcatgatcaccgaataaataaaagaaacagagacaatgatgcggaagaaaa

SEQ ID NO: 8953 - DNA, 2357 bp, Zea Mays
actacctaaatactctgttcttcgtcgcttgctcttccggctcacggcggtggtctccggccaaggggtcgtcacatacaaggaccagcgagatgggcggcgaggctgagcctgacaacgcggtgctcttcgttggggtgtcgctggtgctgggcatcgcctcccggcacctcctccgcggcacccgcgtgccctacaccgtcgcccttctcgtcctcggcgtcgcgcttggatccctcgagtacggaacacaacatggtctaggcaagcttggagctggaattcgtatctgggctaacataaaccctgatcttctgctggctgtttttctacctgccctcctctttgaaagctccttctccatggaagtacaccaaataaagagatgtatggcacagatggtgttacttgctggacctggtgtgctaatatcaacagttttacttggcgttgccgtaaagctcacttttccttacaactggagctggaaaacatcattgttgcttggcggactgcttagtgcaactgatccagttgctgtggttgcactgctaaaagaactcggagcaagtaaaaagcttagcacaatcattgaaggtgaatccttaatgaatgatgggaccgctattgttgcctatcagctattctatcgaatggtgcttggaagaacctttgatgctggctcaataataaagttcttgtctgaagtttcacttggagctgttgctctgggccttgcatttggaatcatgtcaatactgtggctgggctttatttttaacgatacaatcatagagattgcacttactcttgctgtcagttatatagctttcttcactgcacaagactcactggaggtctctggtgttttgactgtcatgacactgggaatgttctatgcagcttttgcaaaaactgcttttaagggtgaaagtcagcaaagcttacaccatttctggtatgtatcttatagaaacaagtcagcctcccaataaaggtcatgctgtcgtgctatgccactatcactggcgaaaaggtctctcacttagttggttaggtggtctgagtagtactcattccagtgggagcaaatttcagaccagggttaaaaaattctcgcgtctgtcacacgccaaagcacaggtttaaggtccagacccagtcatggtttctcacattggctgcagtacgccagtaccactgtgtaaaggtgagacaggatttcaagggctttctcgacctatttgcacctggggactatcttacccccataggccaatttttctgtatgctgctatcaatgtgtttgcatgactggggaaactaaacaaggttgagaggttgagtcagccagggtggtggcgttggaattgctggtaaactacttattgcactatgggaactaatttgagggtctgccatagctaatcactagccatgttaatttgggatctgtagccaacaaaaagattcattatgaaaacttataaaaccctaaaaacataaatacacaagcattaattaatagcattttttggcatggaattgttctggtactctatccctgtgatccctatcctaattttgttgatgaataattttccagtgttggttaccaaaagtaccatgaaatcttcagttgacactgaattaagggaaatggttgcttacattgcaaatacacttatttttatactgagtggggttgttattgcagatggtgttctacaaaataatggccactttgagaggcacggcagttcatggggcttccttcttctgctctatgtctttgtacaaatatctcgagttatagttgttggtgttttgtacccgatgttgcgtcactttgggtatgggttggacttgaaagaggccatgattcttgtttggtcagggctgcgaggggctgttgctctgtcactatcattatctgttaagcgtaccagcgattcagttcaaccttaccttaaaccagaagttggaacaatgtttgtgttcttcactggtggcattgtgtttctgacattgatttttaatggctcaaccacacaatttttgctacatatactcggcatggacaaattgttgcccacaaagcttcgtatattgaaatatacaaggtacgaaatgctaaagaaagcattagaggcttttggtgaactaagggatgacgaggaacttggacctgctgactgggttactgtaaagaaatatatcacatgtttgaatgacctagactatgagccagagcatccccatgatgttggtgacgaagatgactgcatgcatatcatgaacttaacagatatccgagtgcggcttttgaatgactttatacaagggcagacctggtg

SEQ ID NO: 8954 - DNA, 1038 bp, Zea Mays
tggtctccggccaaggggtcgtcacatacaaggaccagcgagatgggcggcgaggctgagcctgacaacgcggtgctcttcgttggggtgtcgctggtgctgggcatcgcctcccggcacctcctccgcggcacccgcgtgccctacaccgtcgcccttctcgtcctcggcgtcgcgcttggatccctcgagtacggaacacaacatggtctaggcaagcttggagctggaattcgtatctgggctaacataaaccctgatcttctgctggctgtttttctacctgccctcctctttgaaagctccttctccatggaagtacaccaaataaagagatgtatggcacagatggtgttacttgctggacctggtgtgctaatatcaacagttttacttggcgttgccgtaaagctcacttttccttacaactggagctggaaaacatcattgttgcttggcggactgcttagtgcaactgatccagttgctgtggttgcactgctaaaagaactcggagcaagtaaaaagcttagcacaatcattgaaggtgaatccttaatgaatgatgggaccgctattgttgcctatcagctattctatcgaatggtgcttggaagaacctttgatgctggctcaataataaagttcttgtctgaagtttcacttggagctgttgctctgggccttgcatttggaatcatgtcaatactgtggctgggctttatttttaacgatacaatcatagagattgcacttactcttgctgtcagttatatagctttcttcactgcacaagactcactggaggtctctggtgttttgactgtcatgacactgggaatgttctatgcagcttttgcaaaaactgcttttaagggtgaaagtcagcaaagcttacaccatttctgggaaatggttgcttacattgcaaatacacttatttttatactgagtggggttgttattgcagatggtgttctacaaaataatggccactttgagaggcacggtatcgcttctccctcactaaccattgtc

SEQ ID NO: 8955 - DNA, 4049 bp, Zea Mays
gtcacttgttctcaaatgctgagtcaagaacaaggcaacacaattgttaattataatagaccttcatcctccaaagtattatctcctcatgggtataatactaatcagacgaaggtcgagaaggacatacctttatcatttattgtatgaataagaatgcaaaaggatgtagacaataattgtatatcattgatttatctatattttcatcccagaaaacatgtatgaatattaacagatttcacattacaatgataccttcggcttgctcgaaggtgaagatgcgggagagcgattacaatccagcgtgaacagtacggtgctactgttcaagtatttataggcacgagatgtagcccgagtaaaagtacatttatgtccttgtcatccgtcttcaattataatacgaaacattaaggactaaatagtctttatccttttttggtcactgttgtatttggtcttcgtcatcaacctgagccaaagtcccttgattatagcttcgtcgcccatttttgtcaccttcaagttacacctctactcttgtcacagaagaatatctctattccgaagctgaagcctcctgcaataatctatgtcatgctggagacatatggttagttacttttttaggaccttcggaggaggaaggcccccaataatattcatttatgtaatcgttgtgtacgtgggttttgatcctagcacgtacatggttcacattcggtttgccttttaaaaccgagtgtgacacctagcccccctagtcgtccctcatggccctgcccctagccccctaaccaatagcccttaagtccaggtcccccacgacctccaggtttagccatctgccgacatcaccactcgacaggtatgatttttgtgctaatgctaaagtattccccacgaagcctcaaataagaaatagggatcacgggaacaggaatagagatgagtttgtccttgttaagctaaacaaagtgggatgagaaatgggtttcacggaaggggggagctggtctccagccccgcccccatcctagtcacaggctgcgtaactttttctgtttaagttagttttttagggtgtgtttggtttgaggaatgaagtgatctatcttcttctcactcctcacatttttatttggtttgttgaatagaatgagttgatccatcaccacctcattccttataagctaataattagtatatacatgaggagtgggttgattccaccaaaattgatggaatgaacttatgatgcatcacctcatgaagcattgggtgactccacaaaccaagcacaccattaatttggcctagtaatcttaggtatgttgtggcgcagttagccatgaggcctaaaattgctcccttccccctctttccccctattttgtttgttagattagagaagagtaatctaggggatgtttggtttttagactaaattttagtcccatcacatcatatatttaaatgttagttagaaatattaaatacaatataatattaaatataatatagttattataaaactaattatccagataagaattaaacaagaagatgaatctactaagctcaatcagtatgtgattcgcacacatgttactatttgctaattattgatttattaggcataataaaattttcttatcattagtcttcatcaatgtaattaattttataattaaactatatttactacttataattagacttttaatatatgatgtgacatgaaataaaatttagttagagaaccaaacagccttagagcatctccactagttccaaaaactccataaatttattttagagtgttagtaaccaaaattcatgcttcagcagtttcttaaatgaggtcgctaaaaatagtaacttcttaaatattcatatttagtcccaaacttggaaagttgtttcatactcccaatggtctcttttactcatcaatcacaccataaaatcacttgtttgacattgatttcgcactcgtgtataagttatgcactttaaatgatttaaggtatgaaaataataaatttatatcaaattagcatagttaaaaaaacaacctaagagcatgtccaattgttatctaaaaggtttctaaatcccagtttaaagagtcattagataattgttatctaaaaggtttctaaatcccagtttaaagtcattagataaaacacatgtcgagtggtattgtaaagaactagtgtttggtgcgcgcccatgcatgcatgttcagctgtgttgtaagcttttttattataataagcatgtataatcttgtattatgtcatgaacatgtgtacatgcatggagtaatcgttttttggtcacataagtatgtaagtatgaaagcaaatttaagcatattaagggcaaataagtacgtaggacgttttcaaacaacttatatcaattgtagagtgaactgagattacaatacatactaaatagcattaaaccaccatgcatcaagagctaacaacaatgtgtttgaaggcgttgcgtgaacatatacatgtccaaaaatagaggtaaaaccatacctgttctgaatgaaagttgcaaactgttagaatgcacaatgcaccttctttcgattccaaaatagtaggtcattaggtgatgatgcgaaaaaacagcaaacaacaaatgagatttataacatagaggtttacgacgataggtaacaattttgtttacttgaaaaacatacttgttctgaatgaaagtctgaaattattgaaataagttgtcgaagattcaaattggaatgtgaacctgttctaaatgacattcacaatttgtggtcttgctagcagtaaaatggtttagcagcagatccttacacgttcaaatttcaaggcctgattgaagttgaaataaacacttgaaggccggatctattccttatgtagcttgcttcccctcgtctagggtcggagggagcttctagttaggaatacagattagttgaagctagaagaatgatgcattggtacataagtatgtatgaagggacatcatgtcgagctatacatggaagataatatgcatgatgtttatgcaaatataaccaatattgtcctgattaatggtatccaaagttattatctcatgactatagaaatagataggtaacaattttgttttcttggaaaaacatacctgttctgaatgaaattcacaatttgtggtcttgctagcagtaaaatggtttagcagaagatccttacgtattcaaatttcaaggcctgattgaggttgaaataaacacttgaaggtcggatctgttctttatgtagcttgcttcccctcgtctagggtcggagggagcttctagttaggaatgcagattagttgaagctagattagtttgagaattttcagactcaaatttaaggtcttgcttcaaagtctcgagcttaaaatacgcctaaatgtaactgaacattagcgggttaggtgctgatttgtgcaatctgaacaatgaagtccaagcaacaggtagctgaggctcatcaaacgaacacgaactgaactgcgaggggttgcatgtgtatatgctggttattccaacacctaatcatatcctaatataacagaacaatagcagcaaactaagaaataaagaggaaaaaaatagatcgcaggtcggtccaatgaacatgaatcaaaatacgggggatgcaagcggatggtgataattcaaagacataatcatatccggatctagtagaacaatagcagcaaactaagaaaaaaaagaaaggatgagcgtggatgtcatacctgcttaccccttgcgcccacggtcgccttattctctattgatgccttttggcggcgcttggccctgcgcccgcgcaacgacgacacgatggacatgcggcaggaattgagaagagcgagccagaggcgggtagggatgaaaatcaagaagaggccgggatgggcatggattgctcggcgtgggtgcggtggcgtgggggactcagcggcaagcagaggcatgcggtcctggtcccttc

SEQ ID NO: 8956 - DNA, 4002 bp, Zea Mays
tgggcgtgctgaactgatgcaagtgtttggcgatgaccacctcgtagcttccgacctcagatccagacttcttctcagggccgatggactgtggatcttcgatctagagacccgcgacgggttgggtgctgcctggacgccgtcaagcgtcatggcgcggggcgagctcagccgcggtggcctccatggcacggtgaaagctccgatggcggcgacacaacaagtgggcgacgaggaacggcggcggtggcttgcgggattttttatttggtgttgggtgttttagcaccggatgatatcactggtcggtgctatttgtcatttctagcctcggttgtagcagctggtgctagaagttgtgagatttagcgacgctttcttagcaccggttgcaaaaaggcggtgtatctctgctagtgactataaatataacatgatcgacctccttgagtgatacgaagcttccataattctttcatggtaatcagagccacctcttccatatgcatctagtttggttagaattgcttgacggtgagcttctctacttcgtcgacgatgctgccggcgcttggacctccggtttcagagaaacttgcgagggataacttcctcttatggagagcccaattcatgcctgttctcaggggtgcacaattgatgcgctatctggatgagaagatagagattccgccagaaaagatcaccatcttgggagacgacaagaaaccagcgattgtccccaacccagaatacttggtatgggtggcacaggaccaacaagtggtagcctatcttctgaactcgcttacgaagggaactctcggacatgttgctaccgtagagacctcgactgaagcatggaaggctctcagcgagtcgtttgctgcgcaatccaaggccaaagttgcaaacttgagatatgcgctgagaaacacaaagaaaggttcgatgacaatgtcacagtacttcagcaagatgaagaagtttgctgatgaacttgcctcggctggaaaagtacttgaagatgaagagattgtgtcctatattctcaatgcactagactcgacatatactccattggtgtcatctgtcatatcgaggatggatgcaatctctgtaaatgacctatattcccaagcacatggatatgaacatcgccaggatatgttgcgtagagatgaagatggcttttcgtcagccaatgtcgctatgcgcgggtgtggccacgacagaagtggttcccgtggaggtcgaaatcctggacgtggacagaaccaaggcaatggtcgtcgtggtagttttggaaggttaggacaaagcaactccagcaacaacaaaacaatctgccagatctgtggcagatcgaatcacaccgcgttggactgttggtaccgatatgatgaagatgatccaaagagtgaagataaatttgctggtgttattgctccctcctacgacgtggacactaattggtacatggataccggtgccatagatcacatcacaggagaagttgacagttcgtgacaaatatcaggggcaagatcaaattcacgcggctaacggaaaaggtatgcaaattagccatattggcagtactttgattcgttcccctatttgtccactcaaactcaataatgttctctatgttcctagctctaagttaaatatttgctcggttcacaaaatatctagagatgataatgtgttttttgaataccatccatggtatttcttcatcaaggaccgagcaacgaggaacacaattcttgaaggaaaatgcgagggaggtctttatcctatcaagtctccaaacgaagttagattcaaacaagtattctccgccatcaagccctcagtggatgcgtgacatagtcgtcttggtcatccttcctatgtcatagtagatcatgtcatcaaaaataatagtctacccctttctaataagtctcatagtggagtagtttgtgattcatgtcaaaaggccaagagccatcaacttccttacccaatgtcaaaaagtgaatcttctcgtcctcttgagttagtttactctcatgtatgggggcctgctcccaaatccattggacgtaataaatattatgtgagttttatagatgatttcagtaagtatacatggattttcatgctcaaaaacaaatctgatgtctttcaagtctttcgtaattttcaaaaccttattgagagacaattcgatcaaaagattcttacaatgcaaactgattggggtggtgagtatgagaaattaaactccttttttcaaaaaaattgggattacccaccatgtctcttgtccacatgcccatcaacaaaacagttctgctgaaagaaaacatcgccatatcgttgaagttggccttgctgttcttgcaaacgcttccatgcctttaaagttttgggacgaggctttcataaccgctatacatctcatcaaccttctcccatctcgagtaattcaaatgaaaactcctactgaactcctccttgggcacaaacctgtctactctcacttaagaatctttggttcggcttgctggccaaatcttcgtccatacatcactcacaagttagctttctgctctactaaatgtgtgttcattggctatagtcccttgcataaagggttcaagtgtctagaaccaaaaacaggaagagtctatatttctcgggttgttgtgtttgatgagcaaatttttcccttctctgaacttcatgaaaatgcaggggctaggcttagaaaagaaattctcctcctaccacatcaccttcaaccaaactctcattccataggggacaaatcgagtaatgctcaattggttaatgctactgattctatgttaagctgcgatgatgtgcaggaatctggaagtaataatggtgttgaagaaattggctgaccagatgatgaatcggctccggcatatacaccaatgcaaactggtgtgcatttggcactgaagagcaagatcaatcccaaggtcagaggcagcctcaatcgactactcagtattcataacgactgtggctgtcatcggcatggaacccgttcttcttaggcatgttcatgaacagtcccatcgatggatggtaaaggtcagagtaacatggataacaacacatttggacagccgcgatcctacgaacataatcaggcttaactttgtcatgctcgatgaagagtctgatacaatggaatggatgctgagattcagcaagagtggattcctgctttcatgccgaaaatacgagaatattacataagatatttccgtgtcgttgctcaagcacgagatacatatcatgctatggacaaacccataatggcaaggtatactaatgttactgagatatcaccgttacccttggatttccctaggtatgcatgcagtttggtgccattccaaacattgagagaaagggacaaagacaacacggtctgttcaggtacattatgatttgggtgcaaatcataatctgatcttaaatgatttgggtgcagtgaaacagcatccgttgcattatggggctcccacgctgacgatttcaatgctgacgaatacatgcagacaagagccactggttttcctttttcgttggtttgacaagtcgtatatttaaggactccatatctcttcaaggatctttgatctgcaagtggtttgctgaaccagatcttccagaagcccattcgctacgcgagagatacatagcgtaagcgtatttctagattacgtgctttacattgtgtatcaggaaaaaaaaattgtgttgtgaaagctgcgtggtgaccgggagcggcagaggaggtagatatttcctgaagaattcagatggccagtggtgaaggtggaggagatgggggtggacccaaggtgctgaaaaaaacaccttttattaagatggtggaggcgtggagctaacgagtgagagcgacatatatcttattattagaacaacttcaatagttctctaaaattt

SEQ ID NO: 8957 - DNA, 4676 bp, Zea Mays
gttccgtgcattctgttctggaacaagcattaccatactatagttatgatcaatggagtattaaattctctagtcactgattctaatttcctatatatgaaacgcggttcaaaacggcctcgatgagaccatccacgtcgcccttcgattcatcagccgtcggatcacgcttcaacggttcggtgaaacctccctgcctgcactactaatcgacctctgcgatgcttccagacgagccgaaagtgcggtaaagaagggaaaactatgcgtcttcctcccaggctgtagctacggcccattctcttctttcccagatccttccatcctccgtccaatctgctcgtctattctttgacttcccaaggccagaaccggtgacaatgtcgtgagccgccccttctcaagaacgagctggacgccaccccatcgctcaagaaggccattacaaggatggccacagcgctgtggcacaggacgagggaggttgccgctctgttggacgaaattcggacgccgaagaagccttccagacgagccgaaagtgcggtaaagaagggaaaactatgcgtcttcctcccaggctgtagctacggcccattctcttcttccccagatccttccatcctccgtccaatctgctcgtctattctttgacttcccaaggccagaaccggtgacaatgtcgtgagccgccccttctcaagaacgagctgccccttctcaagaacgagctggacgccaccccatcgctcaagaaggccattacaaggatggccacagcgctgtggcacaggacgagggaggttgccgctctgttggacgaaattcggacgccgaagaagcccatagaggagctagcgacggacgtgaagctgatcccgacgccggagaagttggaggagacgctgaaagcgcacggccgtagccggcggcgtaggctgaggcggcgacggtggcgacggatgacctcatgtccgttgaacgagagctcaacattggcatcgagccaccgaggctgggcggaaccctgtcaagcgcaaggcggaggtcaagctgccagagaggtaaagatccatgtcccccgatgtgatttcagattttgcttcacggttcgaaatcgagctgctttccaccgccccatcgctgccgcttgctccaccgcctccgccacctcctcatgctctggcgccgcctccccttgggctccagttacgcttcgtcgtccttgtccttcccgtccctcgtcgtgttcgattgggtctcgtgtgcatcatcttccaccgcttgtttcgacctaggttacatgtttcaccttctgattggtagggcatcatcttccactgcttctatacacaagagtgttctgttggggagaaacaacatggatcagaattttggattcgccaaatccggatgtacccaattgcaacttatcatggccatactaatagaagaacataagaaagaaacaactaacttgatgggaacaggtggtcagataaactggattgcagtggtctctattacgcttcatgtacaaccactaagccttgttatatttggcatggcaactgacagcctctccatttaacctggttaggctagatttgtagggccataagctgctatgacaggaacatgagaactctgtacctgcggtttaatcttctatgtggaattctaaactatttgaggacataatagtgtggatctgtctttgggtgttgaagtccttgttaatgctgttaataccaaatgaatcagataacaattgacatacaagactggtatgcatatacgatgaagcatatgtgtgtgcatacagatttctatcaagcaagaaatttatgtgctcatttcattattttcagcatatagctgcttccagacgcgacgaacaatgtgtcgagcttcttctatgttactaaccttgggattgataattgataatcggtccctaagggctgtaggtaatatatatagccagtagacctgggcctaatgggtcttaatacccctcctcaaactcaaggtggaaatggaggatctgaagctgagtttgatcaagtgaaactgatgttgtgctcttgtttgtgctttggtgaagaaatctgccaattgatattctgagggcacatattgaagatcaatagtcttctgctgacaatgggatcgagtaaaggatgcatcaacacctatgtgtttagtaagttcatgcttcactggatcatgagcaatctgtatagcgctcaagttatcacataacagaggtgtagaagtgtcacaagagaccaagatcagccaagagccagcgcaaccaaataatttcagcagtggtagtagcaagtgcccgaagttcggcttcagcactagaacgagatatggccgcttgcttcttggatttccatgcaatgggagatgacccaaggagaatacagtaacctgtagtagaacaacggtcaacaggatcacttgcccaagtagcatctgaatatgcatgaagctgaagtgggctatctgaagcataaagtaaacatctggatcttgttccacgtaaataccgaagcacacgaagcaaatgaccataatgaactgaagtaggtgttgatacaaattggctcaacatatggacaacatgagcaatatcaggtctggtgatagtgagataaacaagactacccacaatatgacgatactgagttggatctgctagtggggtcccatccttcggacgaagttttaaatgaatatccatcggtgttgcaacagtgcgtgtatcagtaagtccagagcgatcaagaagatcttgtatatatttcgactgagacagataaaagcctttttgagtctgctgaacttcaatgcccaagaaatagctaagcggtcccaagtcagacatctgaaattccttactaagatgttgcttgacatgagaaatatgttctgagttgtcacctgtaatcagcatatcatccacatataatagtagtaaggtacgaccttttggagagacatgaacaaacaaggcaggatcatgttcactagaagaaaaaccagcagctgcgatgacagagatgaatcgctcaaaccaagcacgaggagcttgtttcagcccatacaatgcacgacgaagacgacaaacatgccctaagggagtatcaacccttggaggaggatgcatataaacttcttcttgtagattgccattaagaaaagcattcttgacatccatctgggatatagtccaagaagatgaggctgcaactgcaatcaaggttcgaacagtagtcatatgcgcaacaggtgcaaaagtctcatcataatcaagtccttgagtctgttgaaaaccacgggccacaagacgagctttatacctctcaatggaaccatctgattttgtcttaactttgaagacccatttacatgtgataggaacaacatgcgagggtaaaggaacaatatcccatgtaccagtgcgttcaagagcagccaattcatcaatcatagctagctgccactcaagaatcccagaagcttcctgatatgtagtgggttcaacaattgccacaccagcccgtggaaaaccatagcgatctggagcttcaatggtaccacggtcacggagacggtatccctgattaaaaacatcattaaactcattattgttagtacaagaatcgggtacaggatcagtatcaggaccagccgtaggaatagagcgggaacgacgaatgtaggtttggatgataggtggtttggaagagtaagaggtggatggcgtggaggtggaaggtggtgttatgggaatgagaacatcagatgtggatgtagaagatgatggttcagatgcaggaatggaaggaagacacatgaaagaagtagattctgtgggataataggtggagtgagtagattggttgtgaaagaaggggcgattttcattgaaactcacatctctagaaattcgaatacgacgagtagatggatcataacaacgatagcctttgtgttcaggactgtatccaaggaatacacactctacagattgagcagtcaatttagtccgtgttggggacttgttctcaaatgctatgagttaagaacaaggcaacacagaaaatgttaaacattaagatccttcgtccttcgaagcattatttcccttaggatataacgattcccggacgaaggtcatgaaggattaaccttcatcactataatatacattagtaaaagacgaagcatatgaaacataaaagatagcgtgaataatcgcataacattattcatttaactttattaactcatcataaaggaatagaaacaatattgaattataaaggtaccttcggcttggaaggaaatgaaaatacaagtgcgacgcaaaagcaaatgccaagtccgcgtgaacagtacgggggtactgttcacctatttataggcacggggtacaacccgtacaaaattacatacatgccctttacatttggtgataattctatagcattctatcgaggtctaaatggccttttcatctttaagtcggttcccctttctgcgaacatgccgaagctttcctgcttcacagcttcggcactgtgtcaaccttcgtatcttttgagcttctccctttctgattcaagtccgaagatacctgttcacacattatactccag

SEQ ID NO: 8958 - DNA, 5194 bp, Zea Mays
agaggactttgttgagaatgttccgtgcattctgttctggaacaagcattaccatactatagttatgatcaatggagtattaaattctctagtcactgattctaatttcctatatatgaaacgcggttcaaaacggcctcgatgagaccatccacgtcgcccttcgattcatcagccgtcggatcacgcttcaacggttcggtgaaacctccctgcctgcactactaatcgacctctgcgatgcttccagacgagccgaaagtgcggtaaagaagggaaaactatgcgtcttcctcccaggctgtagctacggcccattctcttctttcccagatccttccatcctccgtccaatctgctcgtctattctttgacttcccaaggccagaaccggtgacaatgtcgtgagccgccccttctcaagaacgagctggacgccaccccatcgctcaagaaggccattacaaggatggccacagcgctgtggcacaggacgagggaggttgccgctctgttggacgaaattcggacgccgaagaagccttccagacgagccgaaagtgcggtaaagaagggaaaactatgcgtcttcctcccaggctgtagctacggcccattctcttcttccccagatccttccatcctccgtccaatctgctcgtctattctttgacttcccaaggccagaaccggtgacaatgtcgtgagccgccccttctcaagaacgagctgccccttctcaagaacgagctggacgccaccccatcgctcaagaaggccattacaaggatggccacagcgctgtggcacaggacgagggaggttgccgctctgttggacgaaattcggacgccgaagaagcccatagaggagctagcgacggacgtgaagctgatcccgacgccggagaagttggaggagacgctgaaagcgcacggccgtagccggcggcgtaggctgaggcggcgacggtggcgacggatgacctcatgtccgttgaacgagagctcaacattggcatcgagccaccgaggctgggcggaaccctgtcaagcgcaaggcggaggtcaagctgccagagaggtaaagatccatgtcccccgatgtgatttcagattttgcttcacggttcgaaatcgagctgctttccaccgccccatcgctgccgcttgctccaccgcctccgccacctcctcatgctctggcgccgcctccccttgggctccagttacgcttcgtcgtccttgtccttcccgtccctcgtcgtgttcgattgggtctcgtgtgcatcatcttccaccgcttgtttcgacctaggttacatgtttcaccttctgattggtagggcatcatcttccactgcttctatacacaagagtgttctgttggggagaaacaacatggatcagaattttggattcgccaaatccggatgtacccaattgcaacttatcatggccatactaatagaagaacataagaaagaaacaactaacttgatgggaacaggtacaggtgggtatctaaagacggtacaaaatacatatgacacatgttgttagctctcttttgacaatactaaatcaatattaatttgatttcacttggtttgtttaacatagtgattctggtaagtccggtaccacactacacgcatagttaatttgtgaaagatgcctaccattatttaccaggctatttctgataattgttccatgacacaatgtttaatagtctatgcatccatgcagcatttagcaatgctagatcttgatagcgagacaatgttctttgatatttttaaaaggtcattgaggtaatcaggagggatgccgttatgcttaccatacaattaaaattggtccactaaatccattgttttgtttataactcttgttgtcttgtaaatctgaaacctgaggcgatagattattctaccaaggtagtagctgtaggccgttgctttgaatcagattttgttatggctgcaagtgaatatttttaccaggtggtcagataaactggattgcagtggtctctattacgcttcatgtacaaccactaagccttgttatatttggcatggcaactgacagcctctccatttaacctggttaggctagatttgtagggccataagctgctatgacaggaacatgagaactctgtacctgcggtttaatcttctatgtggaattctaaactatttgaggacataatagtgtggatctgtctttgggtgttgaagtccttgttaatgctgttaataccaaatgaatcagataacaattgacatacaagactggtatgcatatacgatgaagcatatgtgtgtgcatacagatttctatcaagcaagaaatttatgtgctcatttcattattttcagcatatagctgcttccagacgcgacgaacaatgtgtcgagcttcttctatgttactaaccttgggattgataattgataatcggtccctaagggctgtaggtaatatatatagccagtagacctgggcctaatgggtcttaatacccctcctcaaactcaaggtggaaatggaggatctgaagctgagtttgatcaagtgaaactgatgttgtgctcttgtttgtgctttggtgaagaaatctgccaattgatattctgagggcacatattgaagatcaatagtcttctgctgacaatgggatcgagtaaaggatgcatcaacacctatgtgtttagtaagttcatgcttcactggatcatgagcaatctgtatagcgctcaagttatcacataacagaggtgtagaagtgtcacaagagaccaagatcagccaagagccagcgcaaccaaataatttcagcagtggtagtagcaagtgcccgaagttcggcttcagcactagaacgagatatggccgcttgcttcttggatttccatgcaatgggagatgacccaaggagaatacagtaacctgtagtagaacaacggtcaacaggatcacttgcccaagtagcatctgaatatgcatgaagctgaagtgggctatctgaagcataaagtaaacatctggatcttgttccacgtaaataccgaagcacacgaagcaaatgaccataatgaactgaagtaggtgttgatacaaattggctcaacatatggacaacatgagcaatatcaggtctggtgatagtgagataaacaagactacccacaatatgacgatactgagttggatctgctagtggggtcccatccttcggacgaagttttaaatgaatatccatcggtgttgcaacagtgcgtgtatcagtaagtccagagcgatcaagaagatcttgtatatatttcgactgagacagataaaagcctttttgagtctgctgaacttcaatgcccaagaaatagctaagcggtcccaagtcagacatctgaaattccttactaagatgttgcttgacatgagaaatatgttctgagttgtcacctgtaatcagcatatcatccacatataatagtagtaaggtacgaccttttggagagacatgaacaaacaaggcaggatcatgttcactagaagaaaaaccagcagctgcgatgacagagatgaatcgctcaaaccaagcacgaggagcttgtttcagcccatacaatgcacgacgaagacgacaaacatgccctaagggagtatcaacccttggaggaggatgcatataaacttcttcttgtagattgccattaagaaaagcattcttgacatccatctgggatatagtccaagaagatgaggctgcaactgcaatcaaggttcgaacagtagtcatatgcgcaacaggtgcaaaagtctcatcataatcaagtccttgagtctgttgaaaaccacgggccacaagacgagctttatacctctcaatggaaccatctgattttgtcttaactttgaagacccatttacatgtgataggaacaacatgcgagggtaaaggaacaatatcccatgtaccagtgcgttcaagagcagccaattcatcaatcatagctagctgccactcaagaatcccagaagcttcctgatatgtagtgggttcaacaattgccacaccagcccgtggaaaaccatagcgatctggagcttcaatggtaccacggtcacggagacggtatccctgattaaaaacatcattaaactcattattgttagtacaagaatcgggtacaggatcagtatcaggaccagccgtaggaatagagcgggaacgacgaatgtaggtttggatgataggtggtttggaagagtaagaggtggatggcgtggaggtggaaggtggtgttatgggaatgagaacatcagatgtggatgtagaagatgatggttcagatgcaggaatggaaggaagacacatgaaagaagtagattctgtgggataataggtggagtgagtagattggttgtgaaagaaggggcgattttcattgaaactcacatctctagaaattcgaatacgacgagtagatggatcataacaacgatagcctttgtgttcaggactgtatccaaggaatacacactctacagattgagcagtcaatttagtccgtgttggggacttgttctcaaatgctatgagttaagaacaaggcaacacagaaaatgttaaacattaagatccttcgtccttcgaagcattatttcccttaggatataacgattcccggacgaaggtcatgaaggattaaccttcatcactataatatacattagtaaaagacgaagcatatgaaacataaaagatagcgtgaataatcgcataacattattcatttaactttattaactcatcataaaggaatagaaacaatattgaattataaaggtaccttcggcttggaaggaaatgaaaatacaagtgcgacgcaaaagcaaatgccaagtccgcgtgaacagtacgggggtactgttcacctatttataggcacggggtacaacccgtacaaaattacatacatgccctttacatttggtgataattctatagcattctatcgaggtctaaatggccttttcatctttaagtcggttcccctttctgcgaacatgccgaagctttcctgcttcacagcttcggcactgtgtcaaccttcgtatcttttgagcttctccctttctgattcaagtccgaagatacctgttcacacattatactccag

SEQ ID NO: 8959 - DNA, 5142 bp, Zea Mays
agaggactttgttgagaatgttccgtgcattctgttctggaacaagcattaccatactatagttatgatcaatggagtattaaattctctagtcactgattctaatttcctatatatgaaacgcggttcaaaacggcctcgatgagaccatccacgtcgcccttcgattcatcagccgtcggatcacgcttcaacggttcggtgaaacctccctgcctgcactactaatcgacctctgcgatgcttccagacgagccgaaagtgcggtaaagaagggaaaactatgcgtcttcctcccaggctgtagctacggcccattctcttctttcccagatccttccatcctccgtccaatctgctcgtctattctttgacttcccaaggccagaaccggtgacaatgtcgtgagccgccccttctcaagaacgagctggacgccaccccatcgctcaagaaggccattacaaggatggccacagcgctgtggcacaggacgagggaggttgccgctctgttggacgaaattcggacgccgaagaagccttccagacgagccgaaagtgcggtaaagaagggaaaactatgcgtcttcctcccaggctgtagctacggcccattctcttcttccccagatccttccatcctccgtccaatctgctcgtctattctttgacttcccaaggccagaaccggtgacaatgtcgtgagccgccccttctcaagaacgagctgccccttctcaagaacgagctggacgccaccccatcgctcaagaaggccattacaaggatggccacagcgctgtggcacaggacgagggaggttgccgctctgttggacgaaattcggacgccgaagaagcccatagaggagctagcgacggacgtgaagctgatcccgacgccggagaagttggaggagacgctgaaagcgcacggccgtagccggcggcgtaggctgaggcggcgacggtggcgacggatgacctcatgtccgttgaacgagagctcaacattggcatcgagccaccgaggctgggcggaaccctgtcaagcgcaaggcggaggtcaagctgccagagaggtaaagatccatgtcccccgatgtgatttcagattttgcttcacggttcgaaatcgagctgctttccaccgccccatcgctgccgcttgctccaccgcctccgccacctcctcatgctctggcgccgcctccccttgggctccagttacgcttcgtcgtccttgtccttcccgtccctcgtcgtgttcgattgggtctcgtgtgcatcatcttccaccgcttgtttcgacctaggttacatgtttcaccttctgattggtagggcatcatcttccactgcttctatacacaagagtgttctgttggggagaaacaacatggatcagaattttggattcgccaaatccggatgtacccaattgcaacttatcatggccatactaatagaagaacataagaaagaaacaactaacttgatgggaacaggtacaggtgggtatctaaagacggtacaaaatacatatgacacatgttgttagctctcttttgacaatactaaatcaatattaatttgatttcacttggtttgtttaacatagtgattctggtaagtccggtaccacactacacgcatagttaatttgtgaaagatgcctaccattatttaccaggctatttctgataattgttccatgacacaatgtttaatagtctatgcatccatgcagcatttagcaatgctagatcttgatagcgagacaatgttctttgatatttttaaaaggtcattgaggtaatcaggagggatgccgttatgcttaccatacaattaaaattggtccactaaatccattgttttgtttataactcttgttgtcttgtaaatctgaaacctgaggcgatagattattctaccaaggtagtagctgtaggccgttgctttgaatcagattttgttatggctgcaagtgaatatttttaccaggtggtcagataaactggattgcagtggtctctattacgcttcatgtacaaccactaaggctagatttgtagggccataagctgctatgacaggaacatgagaactctgtacctgcggtttaatcttctatgtggaattctaaactatttgaggacataatagtgtggatctgtctttgggtgttgaagtccttgttaatgctgttaataccaaatgaatcagataacaattgacatacaagactggtatgcatatacgatgaagcatatgtgtgtgcatacagatttctatcaagcaagaaatttatgtgctcatttcattattttcagcatatagctgcttccagacgcgacgaacaatgtgtcgagcttcttctatgttactaaccttgggattgataattgataatcggtccctaagggctgtaggtaatatatatagccagtagacctgggcctaatgggtcttaatacccctcctcaaactcaaggtggaaatggaggatctgaagctgagtttgatcaagtgaaactgatgttgtgctcttgtttgtgctttggtgaagaaatctgccaattgatattctgagggcacatattgaagatcaatagtcttctgctgacaatgggatcgagtaaaggatgcatcaacacctatgtgtttagtaagttcatgcttcactggatcatgagcaatctgtatagcgctcaagttatcacataacagaggtgtagaagtgtcacaagagaccaagatcagccaagagccagcgcaaccaaataatttcagcagtggtagtagcaagtgcccgaagttcggcttcagcactagaacgagatatggccgcttgcttcttggatttccatgcaatgggagatgacccaaggagaatacagtaacctgtagtagaacaacggtcaacaggatcacttgcccaagtagcatctgaatatgcatgaagctgaagtgggctatctgaagcataaagtaaacatctggatcttgttccacgtaaataccgaagcacacgaagcaaatgaccataatgaactgaagtaggtgttgatacaaattggctcaacatatggacaacatgagcaatatcaggtctggtgatagtgagataaacaagactacccacaatatgacgatactgagttggatctgctagtggggtcccatccttcggacgaagttttaaatgaatatccatcggtgttgcaacagtgcgtgtatcagtaagtccagagcgatcaagaagatcttgtatatatttcgactgagacagataaaagcctttttgagtctgctgaacttcaatgcccaagaaatagctaagcggtcccaagtcagacatctgaaattccttactaagatgttgcttgacatgagaaatatgttctgagttgtcacctgtaatcagcatatcatccacatataatagtagtaaggtacgaccttttggagagacatgaacaaacaaggcaggatcatgttcactagaagaaaaaccagcagctgcgatgacagagatgaatcgctcaaaccaagcacgaggagcttgtttcagcccatacaatgcacgacgaagacgacaaacatgccctaagggagtatcaacccttggaggaggatgcatataaacttcttcttgtagattgccattaagaaaagcattcttgacatccatctgggatatagtccaagaagatgaggctgcaactgcaatcaaggttcgaacagtagtcatatgcgcaacaggtgcaaaagtctcatcataatcaagtccttgagtctgttgaaaaccacgggccacaagacgagctttatacctctcaatggaaccatctgattttgtcttaactttgaagacccatttacatgtgataggaacaacatgcgagggtaaaggaacaatatcccatgtaccagtgcgttcaagagcagccaattcatcaatcatagctagctgccactcaagaatcccagaagcttcctgatatgtagtgggttcaacaattgccacaccagcccgtggaaaaccatagcgatctggagcttcaatggtaccacggtcacggagacggtatccctgattaaaaacatcattaaactcattattgttagtacaagaatcgggtacaggatcagtatcaggaccagccgtaggaatagagcgggaacgacgaatgtaggtttggatgataggtggtttggaagagtaagaggtggatggcgtggaggtggaaggtggtgttatgggaatgagaacatcagatgtggatgtagaagatgatggttcagatgcaggaatggaaggaagacacatgaaagaagtagattctgtgggataataggtggagtgagtagattggttgtgaaagaaggggcgattttcattgaaactcacatctctagaaattcgaatacgacgagtagatggatcataacaacgatagcctttgtgttcaggactgtatccaaggaatacacactctacagattgagcagtcaatttagtccgtgttggggacttgttctcaaatgctatgagttaagaacaaggcaacacagaaaatgttaaacattaagatccttcgtccttcgaagcattatttcccttaggatataacgattcccggacgaaggtcatgaaggattaaccttcatcactataatatacattagtaaaagacgaagcatatgaaacataaaagatagcgtgaataatcgcataacattattcatttaactttattaactcatcataaaggaatagaaacaatattgaattataaaggtaccttcggcttggaaggaaatgaaaatacaagtgcgacgcaaaagcaaatgccaagtccgcgtgaacagtacgggggtactgttcacctatttataggcacggggtacaacccgtacaaaattacatacatgccctttacatttggtgataattctatagcattctatcgaggtctaaatggccttttcatctttaagtcggttcccctttctgcgaacatgccgaagctttcctgcttcacagcttcggcactgtgtcaaccttcgtatcttttgagcttctccctttctgattcaagtccgaagatacctgttcacacattatactccag

SEQ ID NO: 8960 - DNA, 4957 bp, Zea Mays
cttggtttcgctgcaagaggactttgttgagaatgttccgtgcattctgttctggaacaagcattaccatactatagttatggtgaaaactcaacttttgctgtattttattactttaggagatatgttagctgccttctatttttcctttttgacctgttttgatcttatgcagatcaatggagtattaaattctctagtcactgattctaatttcctatatatgaaacgcggttcaaaacggcctcgatgagaccatccacgtcgcccttcgattcatcagccgtcggatcacgcttcaacggttcggtgaaacctccctgcctgcactactaatcgacctctgcgatgcttccagacgagccgaaagtgcggtaaagaagggaaaactatgcgtcttcctcccaggctgtagctacggcccattctcttctttcccagatccttccatcctccgtccaatctgctcgtctattctttgacttcccaaggccagaaccggtgacaatgtcgtgagccgccccttctcaagaacgagctggacgccaccccatcgctcaagaaggccattacaaggatggccacagcgctgtggcacaggacgagggaggttgccgctctgttggacgaaattcggacgccgaagaagccttccagacgagccgaaagtgcggtaaagaagggaaaactatgcgtcttcctcccaggctgtagctacggcccattctcttcttccccagatccttccatcctccgtccaatctgctcgtctattctttgacttcccaaggccagaaccggtgacaatgtcgtgagccgccccttctcaagaacgagctgccccttctcaagaacgagctggacgccaccccatcgctcaagaaggccattacaaggatggccacagcgctgtggcacaggacgagggaggttgccgctctgttggacgaaattcggacgccgaagaagcccatagaggagctagcgacggacgtgaagctgatcccgacgccggagaagttggaggagacgctgaaagcgcacggccgtagccggcggcgtaggctgaggcggcgacggtggcgacggatgacctcatgtccgttgaacgagagctcaacattggcatcgagccaccgaggctgggcggaaccctgtcaagcgcaaggcggaggtcaagctgccagagagagtgttctgttggggagaaacaacatggatcagaattttggattcgccaaatccggatgtacccaattgcaacttatcatggccatactaatagaagaacataagaaagaaacaactaacttgatgggaacaggtacaggtgggtatctaaagacggtacaaaatacatatgacacatgttgttagctctcttttgacaatactaaatcaatattaatttgatttcacttggtttgtttaacatagtgattctggtaagtccggtaccacactacacgcatagttaatttgtgaaagatgcctaccattatttaccaggctatttctgataattgttccatgacacaatgtttaatagtctatgcatccatgcagcatttagcaatgctagatcttgatagcgagacaatgttctttgatatttttaaaaggtcattgaggtaatcaggagggatgccgttatgcttaccatacaattaaaattggtccactaaatccattgttttgtttataactcttgttgtcttgtaaatctgaaacctgaggcgatagattattctaccaaggtagtagctgtaggccgttgctttgaatcagattttgttatggctgcaagtgaatatttttaccaggtggtcagataaactggattgcagtggtctctattacgcttcatgtacaaccactaaggctagatttgtagggccataagctgctatgacaggaacatgagaactctgtacctgcggtttaatcttctatgtggaattctaaactatttgaggacataatagtgtggatctgtctttgggtgttgaagtccttgttaatgctgttaataccaaatgaatcagataacaattgacatacaagactggtatgcatatacgatgaagcatatgtgtgtgcatacagatttctatcaagcaagaaatttatgtgctcatttcattattttcagcatatagctgcttccagacgcgacgaacaatgtgtcgagcttcttctatgttactaaccttgggattgataattgataatcggtccctaagggctgtaggtaatatatatagccagtagacctgggcctaatgggtcttaatacccctcctcaaactcaaggtggaaatggaggatctgaagctgagtttgatcaagtgaaactgatgttgtgctcttgtttgtgctttggtgaagaaatctgccaattgatattctgagggcacatattgaagatcaatagtcttctgctgacaatgggatcgagtaaaggatgcatcaacacctatgtgtttagtaagttcatgcttcactggatcatgagcaatctgtatagcgctcaagttatcacataacagaggtgtagaagtgtcacaagagaccaagatcagccaagagccagcgcaaccaaataatttcagcagtggtagtagcaagtgcccgaagttcggcttcagcactagaacgagatatggccgcttgcttcttggatttccatgcaatgggagatgacccaaggagaatacagtaacctgtagtagaacaacggtcaacaggatcacttgcccaagtagcatctgaatatgcatgaagctgaagtgggctatctgaagcataaagtaaacatctggatcttgttccacgtaaataccgaagcacacgaagcaaatgaccataatgaactgaagtaggtgttgatacaaattggctcaacatatggacaacatgagcaatatcaggtctggtgatagtgagataaacaagactacccacaatatgacgatactgagttggatctgctagtggggtcccatccttcggacgaagttttaaatgaatatccatcggtgttgcaacagtgcgtgtatcagtaagtccagagcgatcaagaagatcttgtatatatttcgactgagacagataaaagcctttttgagtctgctgaacttcaatgcccaagaaatagctaagcggtcccaagtcagacatctgaaattccttactaagatgttgcttgacatgagaaatatgttctgagttgtcacctgtaatcagcatatcatccacatataatagtagtaaggtacgaccttttggagagacatgaacaaacaaggcaggatcatgttcactagaagaaaaaccagcagctgcgatgacagagatgaatcgctcaaaccaagcacgaggagcttgtttcagcccatacaatgcacgacgaagacgacaaacatgccctaagggagtatcaacccttggaggaggatgcatataaacttcttcttgtagattgccattaagaaaagcattcttgacatccatctgggatatagtccaagaagatgaggctgcaactgcaatcaaggttcgaacagtagtcatatgcgcaacaggtgcaaaagtctcatcataatcaagtccttgagtctgttgaaaaccacgggccacaagacgagctttatacctctcaatggaaccatctgattttgtcttaactttgaagacccatttacatgtgataggaacaacatgcgagggtaaaggaacaatatcccatgtaccagtgcgttcaagagcagccaattcatcaatcatagctagctgccactcaagaatcccagaagcttcctgatatgtagtgggttcaacaattgccacaccagcccgtggaaaaccatagcgatctggagcttcaatggtaccacggtcacggagacggtatccctgattaaaaacatcattaaactcattattgttagtacaagaatcgggtacaggatcagtatcaggaccagccgtaggaatagagcgggaacgacgaatgtaggtttggatgataggtggtttggaagagtaagaggtggatggcgtggaggtggaaggtggtgttatgggaatgagaacatcagatgtggatgtagaagatgatggttcagatgcaggaatggaaggaagacacatgaaagaagtagattctgtgggataataggtggagtgagtagattggttgtgaaagaaggggcgattttcattgaaactcacatctctagaaattcgaatacgacgagtagatggatcataacaacgatagcctttgtgttcaggactgtatccaaggaatacacactctacagattgagcagtcaatttagtccgtgttggggacttgttctcaaatgctatgagttaagaacaaggcaacacagaaaatgttaaacattaagatccttcgtccttcgaagcattatttcccttaggatataacgattcccggacgaaggtcatgaaggattaaccttcatcactataatatacattagtaaaagacgaagcatatgaaacataaaagatagcgtgaataatcgcataacattattcatttaactttattaactcatcataaaggaatagaaacaatattgaattataaaggtaccttcggcttggaaggaaatgaaaatacaagtgcgacgcaaaagcaaatgccaagtccgcgtgaacagtacgggggtactgttcacctatttataggcacggggtacaacccgtacaaaattacatacatgccctttacatttggtgataattctatagcattctatcgaggtctaaatggccttttcatctttaagtcggttcccctttctgcgaacatgccgaagctttcctgcttcacagcttcggcactgtgtcaaccttcgtatcttttgagcttctccctttctgattcaagtccgaagatacctgttcacacattatactccag

SEQ ID NO: 8961 - DNA, 4835 bp, Zea Mays
ccatgttatccaccagataaatgatggcccatgcgcccttattgcagtctataagtgaaattgactttactttcaatttttttatttaatttcctcatgatttggatttattatgttttttttaccacatgcaatgttctattctcaggggggacatctcttttgaaccacatgaaactgtggtgtcaatggagtatctacttggccttgtcctcgctcttcttggaggaagtgtgaaaatgcaggactattctgatgaaagaaaaagtcagatattgaatgtggtgaagagtctggccggagggtttgatatggatgttatcttcaccagaacggatggttttacaatgactccagagtggttgcttctggattgcttagatctcaaccttcgacatggttggattgctgctaggaacgagctgccccttctcaagaacgagctggacgccaccccatcgctcaagaaggccattacaaggatggccacagcgctgtggcacaggacgagggaggttgccgctctgttggacgaaattcggacgccgaagaagcccatagaggagctagcgacggacgtgaagctgatcccgacgccggagaagttggaggagacgctgaaagcgcacggccgtagccggcggcgtaggctgaggcggcgacggtggcgacggatgacctcatgtccgttgaacgagagctcaacattggcatcgagccaccgaggctgggcggaaccctgtcaagcgcaaggcggaggtcaagctgccagagaggtaaagatccatgtcccccgatgtgatttcagattttgcttcacggttcgaaatcgagctgctttccaccgccccatcgctgccgcttgctccaccgcctccgccacctcctcatgctctggcgccgcctccccttgggctccagttacgcttcgtcgtccttgtccttcccgtccctcgtcgtgttcgattgggtctcgtgtgcatcatcttccaccgcttgtttcgacctaggttacatgtttcaccttctgattggtagggcatcatcttccactgcttctatacacaagagtgttctgttggggagaaacaacatggatcagaattttggattcgccaaatccggatgtacccaattgcaacttatcatggccatactaatagaagaacataagaaagaaacaactaacttgatgggaacaggtacaggtgggtatctaaagacggtacaaaatacatatgacacatgttgttagctctcttttgacaatactaaatcaatattaatttgatttcacttggtttgtttaacatagtgattctggtaagtccggtaccacactacacgcatagttaatttgtgaaagatgcctaccattatttaccaggctatttctgataattgttccatgacacaatgtttaatagtctatgcatccatgcagcatttagcaatgctagatcttgatagcgagacaatgttctttgatatttttaaaaggtcattgaggtaatcaggagggatgccgttatgcttaccatacaattaaaattggtccactaaatccattgttttgtttataactcttgttgtcttgtaaatctgaaacctgaggcgatagattattctaccaaggtagtagctgtaggccgttgctttgaatcagattttgttatggctgcaagtgaatatttttaccaggtggtcagataaactggattgcagtggtctctattacgcttcatgtacaaccactaaggctagatttgtagggccataagctgctatgacaggaacatgagaactctgtacctgcggtttaatcttctatgtggaattctaaactatttgaggacataatagtgtggatctgtctttgggtgttgaagtccttgttaatgctgttaataccaaatgaatcagataacaattgacatacaagactggtatgcatatacgatgaagcatatgtgtgtgcatacagatttctatcaagcaagaaatttatgtgctcatttcattattttcagcatatagctgcttccagacgcgacgaacaatgtgtcgagcttcttctatgttactaaccttgggattgataattgataatcggtccctaagggctgtaggtaatatatatagccagtagacctgggcctaatgggtcttaatacccctcctcaaactcaaggtggaaatggaggatctgaagctgagtttgatcaagtgaaactgatgttgtgctcttgtttgtgctttggtgaagaaatctgccaattgatattctgagggcacatattgaagatcaatagtcttctgctgacaatgggatcgagtaaaggatgcatcaacacctatgtgtttagtaagttcatgcttcactggatcatgagcaatctgtatagcgctcaagttatcacataacagaggtgtagaagtgtcacaagagaccaagatcagccaagagccagcgcaaccaaataatttcagcagtggtagtagcaagtgcccgaagttcggcttcagcactagaacgagatatggccgcttgcttcttggatttccatgcaatgggagatgacccaaggagaatacagtaacctgtagtagaacaacggtcaacaggatcacttgcccaagtagcatctgaatatgcatgaagctgaagtgggctatctgaagcataaagtaaacatctggatcttgttccacgtaaataccgaagcacacgaagcaaatgaccataatgaactgaagtaggtgttgatacaaattggctcaacatatggacaacatgagcaatatcaggtctggtgatagtgagataaacaagactacccacaatatgacgatactgagttggatctgctagtggggtcccatccttcggacgaagttttaaatgaatatccatcggtgttgcaacagtgcgtgtatcagtaagtccagagcgatcaagaagatcttgtatatatttcgactgagacagataaaagcctttttgagtctgctgaacttcaatgcccaagaaatagctaagcggtcccaagtcagacatctgaaattccttactaagatgttgcttgacatgagaaatatgttctgagttgtcacctgtaatcagcatatcatccacatataatagtagtaaggtacgaccttttggagagacatgaacaaacaaggcaggatcatgttcactagaagaaaaaccagcagctgcgatgacagagatgaatcgctcaaaccaagcacgaggagcttgtttcagcccatacaatgcacgacgaagacgacaaacatgccctaagggagtatcaacccttggaggaggatgcatataaacttcttcttgtagattgccattaagaaaagcattcttgacatccatctgggatatagtccaagaagatgaggctgcaactgcaatcaaggttcgaacagtagtcatatgcgcaacaggtgcaaaagtctcatcataatcaagtccttgagtctgttgaaaaccacgggccacaagacgagctttatacctctcaatggaaccatctgattttgtcttaactttgaagacccatttacatgtgataggaacaacatgcgagggtaaaggaacaatatcccatgtaccagtgcgttcaagagcagccaattcatcaatcatagctagctgccactcaagaatcccagaagcttcctgatatgtagtgggttcaacaattgccacaccagcccgtggaaaaccatagcgatctggagcttcaatggtaccacggtcacggagacggtatccctgattaaaaacatcattaaactcattattgttagtacaagaatcgggtacaggatcagtatcaggaccagccgtaggaatagagcgggaacgacgaatgtaggtttggatgataggtggtttggaagagtaagaggtggatggcgtggaggtggaaggtggtgttatgggaatgagaacatcagatgtggatgtagaagatgatggttcagatgcaggaatggaaggaagacacatgaaagaagtagattctgtgggataataggtggagtgagtagattggttgtgaaagaaggggcgattttcattgaaactcacatctctagaaattcgaatacgacgagtagatggatcataacaacgatagcctttgtgttcaggactgtatccaaggaatacacactctacagattgagcagtcaatttagtccgtgttggggacttgttctcaaatgctatgagttaagaacaaggcaacacagaaaatgttaaacattaagatccttcgtccttcgaagcattatttcccttaggatataacgattcccggacgaaggtcatgaaggattaaccttcatcactataatatacattagtaaaagacgaagcatatgaaacataaaagatagcgtgaataatcgcataacattattcatttaactttattaactcatcataaaggaatagaaacaatattgaattataaaggtaccttcggcttggaaggaaatgaaaatacaagtgcgacgcaaaagcaaatgccaagtccgcgtgaacagtacgggggtactgttcacctatttataggcacggggtacaacccgtacaaaattacatacatgccctttacatttggtgataattctatagcattctatcgaggtctaaatggccttttcatctttaagtcggttcccctttctgcgaacatgccgaagctttcctgcttcacagcttcggcactgtgtcaaccttcgtatcttttgagcttctccctttctgattcaagtccgaagatacctgttcacacattatactccag

SEQ ID NO: 8962 - DNA, 1359 bp, Zea Mays
gtccaagaaaccaggttgtattctagcattcgttcaaacacatcccttgcatccatggatccaccatcacctggctatggcagtagccagtaagcattgtgttccatgacaagaatttctgatcagcattgcatcgaacaacttgctagggtgatgtccccgttctggacagtggacatagtagcttgctagggtgatgtcccacgcactcaacagcgggcaatgggcggtggagctacagcctggcccttggcagccaacaggggcggaagtgaggtcgtgtggagccaggtccgtggagtggagttgcggaatcaggaacagccgtttgatatggggaaaaagaagaaaaggaacaaaaatgtccctgctgttgtgtggtatccgacaagggttatcgaatttcttggtcggcgcacacccattatcctcaaggaaaaggatacacggtgctccctagtagcaatatgcaacgttctcctgcttggagagaaaataaccctcgatttagatatcaagaaagtgttggagagccatctcatccatcttttccagaggcctcttttgtgtggcaatacacaaatgcagttggaacagaacttggaactatcagagttcaataaacaagttcttggtgtattgccgaagcttacatgcagcttatactttgatgtgacattttctagctcttgtggcttagagaagacctttgaaactgcactgtttggttttcttggtgtccctctacgccatggctggttggtagatccccaggatgctgagttggactcctcaatacgtggaagctcctactccaaactttcgtataatcttgctatctatgaatcaattcgacccaagacaaattcagggcctcaaaagcatggtcgatatgaagatgatatgttctattcagcgcttgcattctctaaaactggatcagaaaaagaacttgattctacttcttgtgcaacaatttcaacatttttgcagggccctcagctaacccgatatggattctcttccttacataatgacctcagagcgttacaacctactgtcctgatctggaatgaaaacttaattacaatatctaagtttgaagacaaaatatatgtgttgctgaacgatttgtccttgttgagaactgaaaccgatgctgtgtgggaaaggttaacacaggcaaatagtaaacagggggaaactaatacactggttctacatatccgacgctgtcgggtatgtttgtcggacaacagtttcttgcgcatggtctcgttggacatgcccgacactgacctagccgacgccatcggtctttctggcgggtaacagtttgctgcacaaagtcccgttggg

SEQ ID NO: 8963 - DNA, 2696 bp, Zea Mays
aaaaatcttctcatcgcgctcctcaagcgctttcctggcgtcttcgaggttgtcgaggagggcgtctactccccgctgtcgtcgctccccgccttgctctgccgcggccgtgcctcgccgccacaggtccaccgctcgagatcccggtcgacgctccggcctgatctccatttttggccttcggttggagatcggcacttctcggtgatgtccctttggctgcacggccacccaatcgggtgtttgggtcttcgatttgggtctgtagcgttggagatacccccttcaaactgctgccggtccggaagccgtgcctcctagccgcccacgctcgccgtccgtgatccgttctcgactgttggtgctccggactcacagtccatattgatggctacattatcatggtggatggaatggtcggtggagaatgttcgtgaggcatttttctcctatttcggggaaaatcagcacgtgagggtttctctgaatttggaagttaccacttagcaggtttccataccaaggctcaatacaatcaagtccgtagcgtctaccgatttcgccatatccccattttacttttctttgaaaccaggattccttgtataatttgttgatgatccgaaggtgccccttcttcatacatgtttgcaccggttcaaggggacccttggtggcagagagaggcatcgcacctgcttttcgctgaggtgcattattgcaagtggtgacgaagatttgattgaccgcttcagaattgacgctactttccatcgattcacggagatccttgggagttggtctcatgggtactatttcaaggaggaagctatcggcttgttattcagtcttctcaccgagaaatacaagttacctcagtctagaatatatgcctcatactttagtggtgatatgtcctcttgtttgagttcggacgacgagtcaagaaataccttgcagaaatatataggagcagaaagaatcttgccttccatgtccaaggttgatttttggatgcccggtgaaactggtccttgtgggccatgtattggttttttccttgattgttcggacaacaatgatggtgttgattccgtaaggaacataacggatggcaagcttgtcgagatatgccgtcttgtgtttgttgagttcgatcggcaagcagatggcgtcttggagcctttccaagctaagcatgtcttaacagggattaatcttgaatgtttagctgccattcttcaaaagaaagaaagccactatgacttagatgtatacgcttatgtaattcgtcaagtctactggggttaggaaatgaaggtcgcgagtatttcctgaagtgtgctgataaacaggctgtgaagtatggctatcaagtacttaagataaatgaagaggattacgacatgatgtcttcttcaatgcaccggtgcaaataacagagcatccatgttgttgatgcaattcttctaaatgaacctgatttatgtaccgagcttgaaagagaaataatcgacagaatagtcaaagatgaagtgatgatctacaaaaagactaaagcagagctgcagcaattgaagtaaaatactacagaaggttgcagcagtagctccagcaaacatgcctcattgggtgaagcacagttgcggaatcaggaacagccgtttgatatggggaaaaagaagaaaaggaacaaaaatgtccctgctgttgtgtggtatccgacaagggttatcgaatttcttggtcggcgcacacccattatcctcaaggaaaaggatacacggtgctccctagtagcaatatgcaacgttctcctgcttggagagaaaataaccctcgatttagatatcaagaaagtgttggagagccatctcatccatcttttccagaggcctcttttgtgtggcaatacacaaatgcagttggaacagaacttggaactatcagagttcaataaacaagttcttggtgtattgccgaagcttacatgcagcttatactttgatgtgacattttctagctcttgtggcttagagaagacctttgaaactgcactgtttggttttcttggtgtccctctacgccatggctggttggtagatccccaggatgctgagttggactcctcaatacgtggaagctcctactccaaactttcgtataatcttgctatctatgaatcaattcgacccaagacaaattcagggcctcaaaagcatggtcgatatgaagatgatatgttctattcagcgcttgcattctctaaaactggatcagaaaaagaacttgattctacttcttgtgcaacaatttcaacatttttgcagggccctcagctaacccgatatggattctcttccttacataatgacctcagagcgttacaacctactgtcctgatctggaatgaaaacttaattacaatatctaagtttgaagacaaaatatatgtgttgctgaacgatttgtccttgttgagaactgaaaccgatgctgtgtgggaaaggttaacacaggcaaatagtaaacagggggaaactaatacactggttctacatatccgacgctgtcgggtatgtttgtcggacaacagtttcttgcgcatggtctcgttggacatgcccgacactgacctagccgacgccatcggtctttctggcgggtaacagtttgctgcacaaagtcccgttggg

SEQ ID NO: 8964 - DNA, 2661 bp, Zea Mays
aaaaatcttctcatcgcgctcctcaagcgctttcctggcgtcttcgaggttgtcgaggagggcgtctactccccgctgtcgtcgctccccgccttgctctgccgcggccgtgcctcgccgccacaggtccaccgctcgagatcccggtcgacgctccggcctgatctccatttttggccttcggttggagatcggcacttctcggtgatgtccctttggctgcacggccacccaatcgggtgtttgggtcttcgatttgggtctgtagcgttggagatacccccttcaaactgctgccggtccggaagccgtgcctcctagccgcccacgctcgccgtccgtgatccgttctcgactgttggtgctccggactcacagtccatattgatggctacattatcatggtggatggaatggtcggtggagaatgttcgtgaggcatttttctcctatttcggggaaaatcagcacgtgagggtttctctgaatttggaagttaccacttagcaggtttccataccaaggctcaatacaatcaagtccgtagcgtctaccgatttcgccatatccccattttacttttctttgaaaccaggattccttgtataatttgttgatgatccgaaggtgccccttcttcatacatgtttgcaccggttcaaggggacccttggtggcagagagaggcatcgcacctgcttttcgctgaggtgcattattgcaagtggtgacgaagatttgattgaccgcttcagaattgacgctactttccatcgattcacggagatccttgggagttggtctcatgggtactatttcaaggaggaagctatcggcttgttattcagtcttctcaccgagaaatacaagttacctcagtctagaatatatgcctcatactttagtggtgatatgtcctcttgtttgagttcggacgacgagtcaagaaataccttgcagaaatatataggagcagaaagaatcttgccttccatgtccaaggttgatttttggatgcccggtgaaactggtccttgtgggccatgtattggttttttccttgattgttcggacaacaatgatggtgttgattccgtaaggaacataacggatggcaagcttgtcgagatatgccgtcttgtgtttgttgagttcgatcggcaagcagatggcgtcttggagcctttccaagctaagcatgtcttaacagggattaatcttgaatgtttagctgccattcttcaaaagaaagaaagccactatgacttagatgtatacgcttatgtaattcgtcaagtctactggggttaggaaatgaaggtcgcgagtatttcctgaagtgtgctgataaacaggctgtgaagtatggctatcaagtacttaagataaatgaagaggattacgacatgatgtcttcttcaatgcaccggtgcaaataacagagcatccagttaggtcacctgtcagtcttcatgattttcatgttgttgatgcaattcttctaaatgaacctgatttatgtaccgagcttgaaagagaaataatcgacagaatagtcaaagatgaagtgatgatctacaaaaagactaaagcagaggcaacgttctcctgcttggagagaaaataaccctcgatttagatatcaagaaagtgttggagagccatctcatccatcttttccagaggcctcttttgtgtggcaatacacaaatgcaggcatgcaactgtatatatgcaagtgttttgaaaatgaatgtccattaactcaaaagctaagctactgtccacttatactgcagttggaacagaacttggaactatcagagttcaataaacaagttcttggtgtattgccgaagcttacatgcagcttatactttgatgtgacattttctagctcttgtggcttagagaagacctttgaaactgcactgtttggttttcttggtgtccctctacgccatggctggttggtagatccccaggatgctgagttggactcctcaatacgtggaagctcctactccaaactttcgtataatcttgctatctatgaatcaattcgacccaagacaaattcagggcctcaaaagcatggtcgatatgaagatgatatgttctattcagcgcttgcattctctaaaactggatcagaaaaagaacttgattctacttcttgtaaatctcgacaacacaagtgttcaatttttctgcacaaaactatatttgcaagttcccgatacttcgtttctttgttcactatttttaggtgcaacaatttcaacatttttgcagggccctcagctaacccgatatggattctcttccttacataatgacctcagagcgttacaacctactgtcctgatctggaatgaaaacttaattacaatatctaagtttgaagacaaaatatatgtgttgctgaacgatttgtccttgttgagaactgaaaccgatgctgtgtgggaaaggttaacacaggcaaatagtaaacagggggaaactaatacactggttctacatatccgacgctgtcgggtatgtttgtcggacaacagtttcttgcgcatggtctcgttggacatgcccgacactgacctagccgacgccatcggtctttctggcgggtaacagtttgctgcacaaagtcccgttggg

SEQ ID NO: 8965 - DNA, 2413 bp, Zea Mays
aaaaatcttctcatcgcgctcctcaagcgctttcctggcgtcttcgaggttgtcgaggagggcgtctactccccgctgtcgtcgctccccgccttgctctgccgcggccgtgcctcgccgccacaggtccaccgctcgagatcccggtcgacgctccggcctgatctccatttttggccttcggttggagatcggcacttctcggtgatgtccctttggctgcacggccacccaatcgggtgtttgggtcttcgatttgggtctgtagcgttggagatacccccttcaaactgctgccggtccggaagccgtgcctcctagccgcccacgctcgccgtccgtgatccgttctcgactgttggtgctccggactcacagtccatattgatggctacattatcatggtggatggaatggtcggtggagaatgttcgtgaggcatttttctcctatttcggggaaaatcagcacgtgagggtttctctgaatttggaagttaccacttagcaggtttccataccaaggctcaatacaatcaagtccgtagcgtctaccgatttcgccatatccccattttacttttctttgaaaccaggattccttgtataatttgttgatgatccgaaggtgccccttcttcatacatgtttgcaccggttcaaggggacccttggtggcagagagaggcatcgcacctgcttttcgctgaggtgcattattgcaagtggtgacgaagatttgattgaccgcttcagaattgacgctactttccatcgattcacggagatccttgggagttggtctcatgggtactatttcaaggaggaagctatcggcttgttattcagtcttctcaccgagaaatacaagttacctcagtctagaatatatgcctcatactttagtggtgatatgtcctcttgtttgagttcggacgacgagtcaagaaataccttgcagaaatatataggagcagaaagaatcttgccttccatgtccaaggttgatttttggatgcccggtgaaactggtccttgtgggccatgtattggttttttccttgattgttcggacaacaatgatggtgttgattccgtaaggaacataacggatggcaagcttgtcgagatatgccgtcttgtgtttgttgagttcgatcggcaagcagatggcgtcttggagcctttccaagctaagcatgtcttaacagggattaatcttgaatgtttagctgccattcttcaaaagaaagaaagccactatgacttagatgtatacgcttatgtaattcgtcaagtctactggggttaggaaatgaaggtcgcgagtatttcctgaagtgtgctgataaacaggctgtgaagtatggctatcaagtacttaagataaatgaagaggattacgacattgttgttgatgcaattcttctaaatgaacctgatttatgtaccgagcttgaaagagaaataatcgacagaatagtcaaagatgaagtgatgatctacaaaaagactaaagcagaggcaacgttctcctgcttggagagaaaataaccctcgatttagatatcaagaaagtgttggagagccatctcatccatcttttccagaggcctcttttgtgtggcaatacacaaatgcagttggaacagaacttggaactatcagagttcaataaacaagttcttggtgtattgccgaagcttacatgcagcttatactttgatgtgacattttctagctcttgtggcttagagaagacctttgaaactgcactgtttggttttcttggtgtccctctacgccatggctggttggtagatccccaggatgctgagttggactcctcaatacgtggaagctcctactccaaactttcgtataatcttgctatctatgaatcaattcgacccaagacaaattcagggcctcaaaagcatggtcgatatgaagatgatatgttctattcagcgcttgcattctctaaaactggatcagaaaaagaacttgattctacttcttgtgcaacaatttcaacatttttgcagggccctcagctaacccgatatggattctcttccttacataatgacctcagagcgttacaacctactgtcctgatctggaatgaaaacttaattacaatatctaagtttgaagacaaaatatatgtgttgctgaacgatttgtccttgttgagaactgaaaccgatgctgtgtgggaaaggttaacacaggcaaatagtaaacagggggaaactaatacactggttctacatatccgacgctgtcgggtatgtttgtcggacaacagtttcttgcgcatggtctcgttggacatgcccgacactgacctagccgacgccatcggtctttctggcgggtaacagtttgctgcacaaagtcccgttggg

SEQ ID NO: 8966 - DNA, 2344 bp, Zea Mays
aaaaatcttctcatcgcgctcctcaagcgctttcctggcgtcttcgaggttgtcgaggagggcgtctactccccgctgtcgtcgctccccgccttgctctgccgcggccgtgcctcgccgccacaggtccaccgctcgagatcccggtcgacgctccggcctgatctccatttttggccttcggttggagatcggcacttctcggtgatgtccctttggctgcacggccacccaatcgggtgtttgggtcttcgatttgggtctgtagcgttggagatacccccttcaaactgctgccggtccggaagccgtgcctcctagccgcccacgctcgccgtccgtgatccgttctcgactgttggtgctccggactcacagtccatattgatggctacattatcatggtggatggaatggtcggtggagaatgttcgtgaggcatttttctcctatttcggggaaaatcagcacgtgaggttgccatctaccccagtgatccccgttgatgatccgaaggtgccccttcttcatacatgtttgcaccggttcaaggggacccttggtggcagagagaggcatcgcacctgcttttcgctgaggtgcattattgcaagtggtgacgaagatttgattgaccgcttcagaattgacgctactttccatcgattcacggagatccttgggagttggtctcatgggtactatttcaaggaggaagctatcggcttgttattcagtcttctcaccgagaaatacaagttacctcagtctagaatatatgcctcatactttagtggtgatatgtcctcttgtttgagttcggacgacgagtcaagaaataccttgcagaaatatataggagcagaaagaatcttgccttccatgtccaaggttgatttttggatgcccggtgaaactggtccttgtgggccatgtattggttttttccttgattgttcggacaacaatgatggtgttgattccgtaaggaacataacggatggcaagcttgtcgagatatgccgtcttgtgtttgttgagttcgatcggcaagcagatggcgtcttggagcctttccaagctaagcatgtcttaacagggattaatcttgaatgtttagctgccattcttcaaaagaaagaaagccactatgacttagatgtatacgcttatgtaattcgtcaagtctactggggttaggaaatgaaggtcgcgagtatttcctgaagtgtgctgataaacaggctgtgaagtatggctatcaagtacttaagataaatgaagaggattacgacatgatgtcttcttcaatgcaccggtgcaaataacagagcatccatgttgttgatgcaattcttctaaatgaacctgatttatgtaccgagcttgaaagagaaataatcgacagaatagtcaaagatgaagtgatgatctacaaaaagactaaagcagaggcaacgttctcctgcttggagagaaaataaccctcgatttagatatcaagaaagtgttggagagccatctcatccatcttttccagaggcctcttttgtgtggcaatacacaaatgcagttggaacagaacttggaactatcagagttcaataaacaagttcttggtgtattgccgaagcttacatgcagcttatactttgatgtgacattttctagctcttgtggcttagagaagacctttgaaactgcactgtttggttttcttggtgtccctctacgccatggctggttggtagatccccaggatgctgagttggactcctcaatacgtggaagctcctactccaaactttcgtataatcttgctatctatgaatcaattcgacccaagacaaattcagggcctcaaaagcatggtcgatatgaagatgatatgttctattcagcgcttgcattctctaaaactggatcagaaaaagaacttgattctacttcttgtgcaacaatttcaacatttttgcagggccctcagctaacccgatatggattctcttccttacataatgacctcagagcgttacaacctactgtcctgatctggaatgaaaacttaattacaatatctaagtttgaagacaaaatatatgtgttgctgaacgatttgtccttgttgagaactgaaaccgatgctgtgtgggaaaggttaacacaggcaaatagtaaacagggggaaactaatacactggttctacatatccgacgctgtcgggtatgtttgtcggacaacagtttcttgcgcatggtctcgttggacatgcccgacactgacctagccgacgccatcggtctttctggcgggtaacagtttgctgcacaaagtcccgttggg

SEQ ID NO: 8967 - DNA, 2389 bp, Zea Mays
aaaaatcttctcatcgcgctcctcaagcgctttcctggcgtcttcgaggttgtcgaggagggcgtctactccccgctgtcgtcgctccccgccttgctctgccgcggccgtgcctcgccgccacaggtccaccgctcgagatcccggtcgacgctccggcctgatctccatttttggccttcggttggagatcggcacttctcggtgatgtccctttggctgcacggccacccaatcgggtgtttgggtcttcgatttgggtctgtagcgttggagatacccccttcaaactgctgccggtccggaagccgtgcctcctagccgcccacgctcgccgtccgtgatccgttctcgactgttggtgctccggactcacagtccatattgatggctacattatcatggtggatggaatggtcggtggagaatgttcgtgaggcatttttctcctatttcggggaaaatcagcacgtgagggtttctctgaatttggaagttaccacttagcaggtttccataccaaggctcaatacaatcaagtccgtagcgtctaccgatttcgccatatccccattttacttttctttgaaaccaggattccttgtataatttgttgatgatccgaaggtgccccttcttcatacatgtttgcaccggttcaaggggacccttggtggcagagagaggcatcgcacctgcttttcgctgaggtgcattattgcaagtggtgacgaagatttgattgaccgcttcagaattgacgctactttccatcgattcacggagatccttgggagttggtctcatgggtactatttcaaggaggaagctatcggcttgttattcagtcttctcaccgagaaatacaagttacctcagtctagaatatatgcctcatactttagtggtgatatgtcctcttgtttgagttcggacgacgagtcaagaaataccttgcagaaatatataggagcagaaagaatcttgccttccatgtccaaggttgatttttggatgcccggtgaaactggtccttgtgggccatgtattggttttttccttgattgttcggacaacaatgatggtgttgattccgtaaggaacataacggatggcaagcttgtcgagatatgccgtcttgtgtttgttgagttcgatcggcaagcagatggcgtcttggagcctttccaagctaagcatgtcttaacagggattaatcttgaatgtttagctgccattcttcaaaagaaagaaagccactatgacttagatgtatacgcttatgtaattcgtcaagtctactggggttaggaaatgaaggtcgcgagtatttcctgaagtgtgctgataaacaggctgtgaagtatggctatcaagtacttaagataaatgaagaggattacgacattgttgttgatgcaattcttctaaatgaacctgatttatgtaccgagcttgaaagagaaataatcgacagaatagtcaaagatgaagtgatgatctacaaaaagactaaagcagaggcaacgttctcctgcttggagagaaaataaccctcgatttagatatcaagaaagtgttggagagccatctcatccatcttttccagaggcctcttttgtgtggcaatacacaaatgcaggcatgcaactgtatatatgcaagtgttttgaaaatgaatgtccattaactcaaaagctaagctactgtccacttatactgcagttggaacagaacttggaactatcagagttcaataaacaagttcttggtgtattgccgaagcttacatgcagcttatactttgatgtgacattttctagctcttgtggcttagagaagacctttgaaactgcactgtttggttttcttggtgtccctctacgccatggctggttggtagatccccaggatgctgagttggactcctcaatacgtggaagctcctactccaaactttcgtataatcttgctatctatgaatcaattcgacccaagacaaattcagggcctcaaaagcatggtcgatatgaagatgatatgttctattcagcgcttgcattctctaaaactggatcagaaaaagaacttgattctacttcttgtaaatctcgacaacacaaattctcttccttacataatgacctcagagcgttacaacctactgtcctgatctggaatgaaaacttaattacaatatctaagtttgaagacaaaatatatgtgttgctgaacgatttgtccttgttgagaactgaaaccgatgctgtgtgggaaaggttaacacagtttcttgcgcatggtctcgttggacatgcccgacactgacctagccgacgccatcggtctttctggcgggtaacagtttgctgcacaaagtcccgttggg

SEQ ID NO: 8968 - DNA, 2426 bp, Zea Mays
aaaaatcttctcatcgcgctcctcaagcgctttcctggcgtcttcgaggttgtcgaggagggcgtctactccccgctgtcgtcgctccccgccttgctctgccgcggccgtgcctcgccgccacaggtccaccgctcgagatcccggtcgacgctccggcctgatctccatttttggccttcggttggagatcggcacttctcggtgatgtccctttggctgcacggccacccaatcgggtgtttgggtcttcgatttgggtctgtagcgttggagatacccccttcaaactgctgccggtccggaagccgtgcctcctagccgcccacgctcgccgtccgtgatccgttctcgactgttggtgctccggactcacagtccatattgatggctacattatcatggtggatggaatggtcggtggagaatgttcgtgaggcatttttctcctatttcggggaaaatcagcacgtgagggtttctctgaatttggaagttaccacttagcaggtttccataccaaggctcaatacaatcaagtgccccttcttcatacatgtttgcaccggttcaaggggacccttggtggcagagagaggcatcgcacctgcttttcgctgaggtgcattattgcaagtggtgacgaagatttgattgaccgcttcagaattgacgctactttccatcgattcacggagatccttgggagttggtctcatgggtactatttcaaggaggaagctatcggcttgttattcagtcttctcaccgagaaatacaagttacctcagtctagaatatatgcctcatactttagtggtgatatgtcctcttgtttgagttcggacgacgagtcaagaaataccttgcagaaatatataggagcagaaagaatcttgccttccatgtccaaggttgatttttggatgcccggtgaaactggtccttgtgggccatgtattggttttttccttgattgttcggacaacaatgatggtgttgattccgtaaggaacataacggatggcaagcttgtcgagatatgccgtcttgtgtttgttgagttcgatcggcaagcagatggcgtcttggagcctttccaagctaagcatgtcttaacagggattaatcttgaatgtttagctgccattcttcaaaagaaagaaagccactatgacttagatgtatacgcttatgtaattcgtcaagtctactggcgtactggtaaaggtttcaaggattacacaggtaaggttggtgctgctgatacagatggagttgatacggcataccgcctagtcgcagatcacatgagaatgatcgctgttactaatgcacccggttctcaacttgggttaggaaatgaaggtcgcgagtatttcctgaagtgtgctgataaacaggctgtgaagtatggctatcaagtacttaagataaatgaagaggattacgacatgatgtcttcttcaatgcaccggtgcaaataacagagcatccatgttgttgatgcaattcttctaaatgaacctgatttatgtaccgagcttgaaagagaaataatcgacagaatagtcaaagatgaagtgatgatctacaaaaagactaaagcagaggcaacgttctcctgcttggagagaaaataaccctcgatttagatatcaagaaagtgttggagagccatctcatccatcttttccagaggcctcttttgtgtggcaatacacaaatgcagttggaacagaacttggaactatcagagttcaataaacaagttcttggtgtattgccgaagcttacatgcagcttatactttgatgtgacattttctagctcttgtggcttagagaagacctttgaaactgcactgtttggttttcttggtgtccctctacgccatggctggttggtagatccccaggatgctgagttggactcctcaatacgtggaagctcctactccaaactttcgtataatcttgctatctatgaatcaattcgacccaagacaaattcagggcctcaaaagcatggtcgatatgaagatgatatgttctattcagcgcttgcattctctaaaactggatcagaaaaagaacttgattctacttcttgtgcaacaatttcaacatttttgcagggccctcagctaacccgatatggattctcttccttacataatgacctcagagcgttacaacctactgtcctgatctggaatgaaaacttaattacaatatctaagtttgaagacaaaatatatgtgttgctgaacgatttgtccttgttgagaactgaaaccgatgctgtgtgggaaaggttaacacagtttcttgcgcatggtctcgttggacatgcccgacactgacctagccgacgccatcggtctttctggcgggtaacagtttgctgcacaaagtcccgttggg

SEQ ID NO: 8969 - DNA, 2419 bp, Zea Mays
aaaaatcttctcatcgcgctcctcaagcgctttcctggcgtcttcgaggttgtcgaggagggcgtctactccccgctgtcgtcgctccccgccttgctctgccgcggccgtgcctcgccgccacaggtccaccgctcgagatcccggtcgacgctccggcctgatctccatttttggccttcggttggagatcggcacttctcggtgatgtccctttggctgcacggccacccaatcgggtgtttgggtcttcgatttgggtctgtagcgttggagatacccccttcaaactgctgccggtccggaagccgtgcctcctagccgcccacgctcgccgtccgtgatccgttctcgactgttggtgctccggactcacagtccatattgatggctacattatcatggtggatggaatggtcggtggagaatgttcgtgaggcatttttctcctatttcggggaaaatcagcacgtgagggtttctctgaatttggaagttaccacttagcaggtttccataccaaggctcaatacaatcaagtccgtagcgtctaccgatttcgccatatccccattttacttttctttgaaaccaggattccttgtataatttgttgatgatccgaaggtgccccttcttcatacatgtttgcaccggttcaaggggacccttggtggcagagagaggcatcgcacctgcttttcgctgaggtgcattattgcaagtggtgacgaagatttgattgaccgcttcagaattgacgctactttccatcgattcacggagatccttgggagttggtctcatgggtactatttcaaggaggaagctatcggcttgttattcagtcttctcaccgagaaatacaagttacctcagtctagaatatatgcctcatactttagtggtgatatgtcctcttgtttgagttcggacgacgagtcaagaaataccttgcagaaatatataggagcagaaagaatcttgccttccatgtccaaggttgatttttggatgcccggtgaaactggtccttgtgggccatgtattggttttttccttgattgttcggacaacaatgatggtgttgattccgtaaggaacataacggatggcaagcttgtcgagatatgccgtcttgtgtttgttgagttcgatcggcaagcagatggcgtcttggagcctttccaagctaagcatgtcttaacagggattaatcttgaatgtttagctgccattcttcaaaagaaagaaagccactatgacttagatgtatacgcttatgtaattcgtcaagtctactggggttaggaaatgaaggtcgcgagtatttcctgaagtgtgctgataaacaggctgtgaagtatggctatcaagtacttaagataaatgaagaggattacgacattgttgttgatgcaattcttctaaatgaacctgatttatgtaccgagcttgaaagagaaataatcgacagaatagtcaaagatgaagtgatgatctacaaaaagactaaagcagaggcaacgttctcctgcttggagagaaaataaccctcgatttagatatcaagaaagtgttggagagccatctcatccatcttttccagaggcctcttttgtgtggcaatacacaaatgcaggcatgcaactgtatatatgcaagtgttttgaaaatgaatgtccattaactcaaaagctaagctactgtccacttatactgcagttggaacagaacttggaactatcagagttcaataaacaagttcttggtgtattgccgaagcttacatgcagcttatactttgatgtgacattttctagctcttgtggcttagagaagacctttgaaactgcactgtttggttttcttggtgtccctctacgccatggctggttggtagatccccaggatgctgagttggactcctcaatacgtggaagctcctactccaaactttcgtataatcttgctatctatgaatcaattcgacccaagacaaattcagggcctcaaaagcatggtcgatatgaagatgatatgttctattcagcgcttgcattctctaaaactggatcagaaaaagaacttgattctacttcttgtgcaacaatttcaacatttttgcagggccctcagctaacccgatatggattctcttccttacataatgacctcagagcgttacaacctactgtcctgatctggaatgaaaacttaattacaatatctaagtttgaagacaaaatatatgtgttgctgaacgatttgtccttgttgagaactgaaaccgatgctgtgtgggaaaggttaacacagtttcttgcgcatggtctcgttggacatgcccgacactgacctagccgacgccatcggtctttctggcgggtaacagtttgctgcacaaagtcccgttggg

SEQ ID NO: 8970 - DNA, 2345 bp, Zea Mays
aaaaatcttctcatcgcgctcctcaagcgctttcctggcgtcttcgaggttgtcgaggagggcgtctactccccgctgtcgtcgctccccgccttgctctgccgcggccgtgcctcgccgccacaggtccaccgctcgagatcccggtcgacgctccggcctgatctccatttttggccttcggttggagatcggcacttctcggtgatgtccctttggctgcacggccacccaatcgggtgtttgggtcttcgatttgggtctgtagcgttggagatacccccttcaaactgctgccggtccggaagccgtgcctcctagccgcccacgctcgccgtccgtgatccgttctcgactgttggtgctccggactcacagtccatattgatggctacattatcatggtggatggaatggtcggtggagaatgttcgtgaggcatttttctcctatttcggggaaaatcagcacgtgaggttgccatctaccccagtgatccccgttgatgatccgaaggtgccccttcttcatacatgtttgcaccggttcaaggggacccttggtggcagagagaggcatcgcacctgcttttcgctgaggtgcattattgcaagtggtgacgaagatttgattgaccgcttcagaattgacgctactttccatcgattcacggagatccttgggagttggtctcatgggtactatttcaaggaggaagctatcggcttgttattcagtcttctcaccgagaaatacaagttacctcagtctagaatatatgcctcatactttagtggtgatatgtcctcttgtttgagttcggacgacgagtcaagaaataccttgcagaaatatataggagcagaaagaatcttgccttccatgtccaaggttgatttttggatgcccggtgaaactggtccttgtgggccatgtattggttttttccttgattgttcggacaacaatgatggtgttgattccgtaaggaacataacggatggcaagcttgtcgagatatgccgtcttgtgtttgttgagttcgatcggcaagcagatggcgtcttggagcctttccaagctaagcatgtcttaacagggattaatcttgaatgtttagctgccattcttcaaaagaaagaaagccactatgacttagatgtatacgcttatgtaattcgtcaagtctactggggttaggaaatgaaggtcgcgagtatttcctgaagtgtgctgataaacaggctgtgaagtatggctatcaagtacttaagataaatgaagaggattacgacatgatgtcttcttcaatgcaccggtgcaaataacagagcatccatgttgttgatgcaattcttctaaatgaacctgatttatgtaccgagcttgaaagagaaataatcgacagaatagtcaaagatgaagtgatgatctacaaaaagactaaagcagagctgcagcaattgaagtaaaatactacagaaggttgcagcagtagctccagcaaacatgcctcattgggtgaagcacaggcaacgttctcctgcttggagagaaaataaccctcgatttagatatcaagaaagtgttggagagccatctcatccatcttttccagaggcctcttttgtgtggcaatacacaaatgcagttggaacagaacttggaactatcagagttcaataaacaagttcttggtgtattgccgaagcttacatgcagcttatactttgatgtgacattttctagctcttgtggcttagagaagacctttgaaactgcactgtttggttttcttggtgtccctctacgccatggctggttggtagatccccaggatgctgagttggactcctcaatacgtggaagctcctactccaaactttcgtataatcttgctatctatgaatcaattcgacccaagacaaattcagggcctcaaaagcatggtcgatatgaagatgatatgttctattcagcgcttgcattctctaaaactggatcagaaaaagaacttgattctacttcttgtgcaacaatttcaacatttttgcagggccctcagctaacccgatatggattctcttccttacataatgacctcagagcgttacaacctactgtcctgatctggaatgaaaacttaattacaatatctaagtttgaagacaaaatatatgtgttgctgaacgatttgtccttgttgagaactgaaaccgatgctgtgtgggaaaggttaacacagtttcttgcgcatggtctcgttggacatgcccgacactgacctagccgacgccatcggtctttctggcgggtaacagtttgctgcacaaagtcccgttggg

SEQ ID NO: 8971 - DNA, 2618 bp, Zea Mays
aaaaatcttctcatcgcgctcctcaagcgctttcctggcgtcttcgaggttgtcgaggagggcgtctactccccgctgtcgtcgctccccgccttgctctgccgcggccgtgcctcgccgccacaggtccaccgctcgagatcccggtcgacgctccggcctgatctccatttttggccttcggttggagatcggcacttctcggtgatgtccctttggctgcacggccacccaatcgggtgtttgggtcttcgatttgggtctgtagcgttggagatacccccttcaaactgctgccggtccggaagccgtgcctcctagccgcccacgctcgccgtccgtgatccgttctcgactgttggtgctccggactcacagtccatattgatggctacattatcatggtggatggaatggtcggtggagaatgttcgtgaggcatttttctcctatttcggggaaaatcagcacgtgagggtttctctgaatttggaagttaccacttagcaggtttccataccaaggctcaatacaatcaagtccgtagcgtctaccgatttcgccatatccccattttacttttctttgaaaccaggattccttgtataatttgttgatgatccgaaggtgccccttcttcatacatgtttgcaccggttcaaggggacccttggtggcagagagaggcatcgcacctgcttttcgctgaggtgcattattgcaagtggtgacgaagatttgattgaccgcttcagaattgacgctactttccatcgattcacggagatccttgggagttggtctcatgggtactatttcaaggaggaagctatcggcttgttattcagtcttctcaccgagaaatacaagttacctcagtctagaatatatgcctcatactttagtggtgatatgtcctcttgtttgagttcggacgacgagtcaagaaataccttgcagaaatatataggagcagaaagaatcttgccttccatgtccaaggttgatttttggatgcccggtgaaactggtccttgtgggccatgtattggttttttccttgattgttcggacaacaatgatggtgttgattccgtaaggaacataacggatggcaagcttgtcgagatatgccgtcttgtgtttgttgagttcgatcggcaagcagatggcgtcttggagcctttccaagctaagcatgtcttaacagggattaatcttgaatgtttagctgccattcttcaaaagaaagaaagccactatgacttagatgtatacgcttatgtaattcgtcaagtctactggggttaggaaatgaaggtcgcgagtatttcctgaagtgtgctgataaacaggctgtgaagtatggctatcaagtacttaagataaatgaagaggattacgacatgatgtcttcttcaatgcaccggtgcaaataacagagcatccatgttgttgatgcaattcttctaaatgaacctgatttatgtaccgagcttgaaagagaaataatcgacagaatagtcaaagatgaagtgatgatctacaaaaagactaaagcagagagggagtatacaggaaaacataatcataattatggctcaaggactgagttaccacagcagaagagacattaagtgcaaaaatcagctgcagcaattgaagtaaaatactacagaaggttgcagcagtagctccagcaaacatgcctcattgggtgaagcacaggcaacgttctcctgcttggagagaaaataaccctcgatttagatatcaagaaagtgttggagagccatctcatccatcttttccagaggcctcttttgtgtggcaatacacaaatgcagttggaacagaacttggaactatcagagttcaataaacaagttcttggtgtattgccgaagcttacatgcagcttatactttgatgtgacattttctagctcttgtggcttagagaagacctttgaaactgcactgtttggttttcttggtgtccctctacgccatggctggttggtagatccccaggatgctgagttggactcctcaatacgtggaagctcctactccaaactttcgtataatcttgctatctatgaatcaattcgacccaagacaaattcagggcctcaaaagcatggtcgatatgaagatgatatgttctattcagcgcttgcattctctaaaactggatcagaaaaagaacttgattctacttcttgtgcaacaatttcaacatttttgcagggccctcagctaacccgatatggattctcttccttacataatgacctcagagcgttacaacctactgtcctgatctggaatgaaaacttaattacaatatctaagtttgaagacaaaatatatgtgttgctgaacgatttgtccttgttgagaactgaaaccgatgctgtgtgggaaaggttaacacaggcaaatagtaaacagggggaaactaatacactggttctacatatccgacgctgtcgggtatgtttgtcggacaacagtttcttgcgcatggtctcgttggacatgcccgacactgacctagccgacgccatcggtctttctggcgggtaacagtttgctgcacaaagtcccgttggg

SEQ ID NO: 8972 - DNA, 2654 bp, Zea Mays
aaaaatcttctcatcgcgctcctcaagcgctttcctggcgtcttcgaggttgtcgaggagggcgtctactccccgctgtcgtcgctccccgccttgctctgccgcggccgtgcctcgccgccacaggtccaccgctcgagatcccggtcgacgctccggcctgatctccatttttggccttcggttggagatcggcacttctcggtgatgtccctttggctgcacggccacccaatcgggtgtttgggtcttcgatttgggtctgtagcgttggagatacccccttcaaactgctgccggtccggaagccgtgcctcctagccgcccacgctcgccgtccgtgatccgttctcgactgttggtgctccggactcacagtccatattgatggctacattatcatggtggatggaatggtcggtggagaatgttcgtgaggcatttttctcctatttcggggaaaatcagcacgtgagggtttctctgaatttggaagttaccacttagcaggtttccataccaaggctcaatacaatcaagtccgtagcgtctaccgatttcgccatatccccattttacttttctttgaaaccaggattccttgtataatttgttgatgatccgaaggtgccccttcttcatacatgtttgcaccggttcaaggggacccttggtggcagagagaggcatcgcacctgcttttcgctgaggtgcattattgcaagtggtgacgaagatttgattgaccgcttcagaattgacgctactttccatcgattcacggagatccttgggagttggtctcatgggtactatttcaaggaggaagctatcggcttgttattcagtcttctcaccgagaaatacaagttacctcagtctagaatatatgcctcatactttagtggtgatatgtcctcttgtttgagttcggacgacgagtcaagaaataccttgcagaaatatataggagcagaaagaatcttgccttccatgtccaaggttgatttttggatgcccggtgaaactggtccttgtgggccatgtattggttttttccttgattgttcggacaacaatgatggtgttgattccgtaaggaacataacggatggcaagcttgtcgagatatgccgtcttgtgtttgttgagttcgatcggcaagcagatggcgtcttggagcctttccaagctaagcatgtcttaacagggattaatcttgaatgtttagctgccattcttcaaaagaaagaaagccactatgacttagatgtatacgcttatgtaattcgtcaagtctactggggttaggaaatgaaggtcgcgagtatttcctgaagtgtgctgataaacaggctgtgaagtatggctatcaagtacttaagataaatgaagaggattacgacattgttgttgatgcaattcttctaaatgaacctgatttatgtaccgagcttgaaagagaaataatcgacagaatagtcaaagatgaagtgatgatctacaaaaagactaaagcagagctgcagcaattgaagtaaaatactacagaaggttgcagcagtagctccagcaaacatgcctcattgggtgaagcacagttgcggaatcaggaacagccgtttgatatggggaaaaagaagaaaaggaacaaaaatgtccctgctgttgtgtggtatccgacaagggttatcgaatttcttggtcggcgcacacccattatcctcaaggaaaaggatacacggtgctccctagtagcaatatgcaacgttctcctgcttggagagaaaataaccctcgatttagatatcaagaaagtgttggagagccatctcatccatcttttccagaggcctcttttgtgtggcaatacacaaatgcagttggaacagaacttggaactatcagagttcaataaacaagttcttggtgtattgccgaagcttacatgcagcttatactttgatgtgacattttctagctcttgtggcttagagaagacctttgaaactgcactgtttggttttcttggtgtccctctacgccatggctggttggtagatccccaggatgctgagttggactcctcaatacgtggaagctcctactccaaactttcgtataatcttgctatctatgaatcaattcgacccaagacaaattcagggcctcaaaagcatggtcgatatgaagatgatatgttctattcagcgcttgcattctctaaaactggatcagaaaaagaacttgattctacttcttgtgcaacaatttcaacatttttgcagggccctcagctaacccgatatggattctcttccttacataatgacctcagagcgttacaacctactgtcctgatctggaatgaaaacttaattacaatatctaagtttgaagacaaaatatatgtgttgctgaacgatttgtccttgttgagaactgaaaccgatgctgtgtgggaaaggttaacacaggcaaatagtaaacagggggaaactaatacactggttctacatatccgacgctgtcgggtatgtttgtcggacaacagtttcttgcgcatggtctcgttggacatgcccgacactgacctagccgacgccatcggtctttctggcgggtaacagtttgctgcacaaagtcccgttggg

SEQ ID NO: 8973 - DNA, 1110 bp, Zea Mays
gcgggcagcctaacggactcctggtcggtgggcccctatcgcacaacccaataaagagaaggtggggaccacgatgcggcgatccgagggcgatttcgtgcgctcctccccttaccggcgagctcgtcggtctggccccgctctggtgaccgctgcggccatcgaagatgcggtggattgcggctcctcatctgtgagcgggacgggtgtgtggaagagggctcccgccggcgagaaggtcccctcccttctcaatttggcaccgcttaggggtcaagttctgggttgtggcgatgaagcggtggcggcgacgcggcagcagacatggtggttccggccctccatccgccttgacggcgcgtgctccggtgccagcgaggggccagtaaagcttggtttgagcgatttgggagcaaccatcctcaacctcgacgacgacgcatctgacctcggtggcagcgatgtctactggcgatgtgctcagatccaagactaagacagagtggggtgcgtccccagccgttgtgttccattggttgtttcaaggccttggcgccatggtgcttgtcttggtatgcggtggccaactatctttggatggcagttcaggaggatgcagagccccatagggtcctctgtgtcagtttggtgtcacctccttgttgtatgcatcggttgtacatctagatgtacgtttttccttacaatctagatgtaaaaaaacacagatcaggagtaaaatggtttttttacctgtcactcatatttgacggaaggacagggaaggaaaaaaacaaaaacaggtctgatagggaacttcagattctggaggtcaatgaagaaagcgacgtttcttttgagggcagaattttcttgaattggaatcggggaaccaataccgtggaatcaacatacacctaaaataggtgtaaaaacatcatttttttctattgttcaatcgattgaaagcattgtaacattcagtcaattcctttatcgactccgcaacgtctaatgggtttagtccaaacccggttttgaccatcaagactgtgtaactgttaacagatctgtggttgtgtgttaatgggttttaacagttttggtttg

SEQ ID NO: 8974 - DNA, 2307 bp, Zea Mays
atggtgctgcagcggacgatctggtacgtgcaggcggacaatcttggcaacttcaacctgaacccgaacggttggccctcgttcgagttccatggtcaatctgtgttcaatctgaatcatgtttttttagtaaaatttcagtaggggcaaaccactcttgttttccttcaaaaaaaaggaaaatggtcaaggtagtgaatatgaattttgctaactgatgaatgttgactaccttgatttgatacatacttggttgtgtgtcctgccaaaaattatgtgttgaaaaactttgtatcccctgcgtagctcaagtgaaggtgcgactgttggaggaagacaacaatgcagggaagtttgggttctacagctactgccttaagtgtcataaggttgccaaagaagagcaccttaggcatcaagatgttattatcccttttgcgtggcacaagggaaagttggtagcatgggtgattggcaaagagacttggtctagcagctttcatgatattcagggtcttatgagtttccgttcttctatcgatcgctcattcctcctgcaccagccaaaagattgtagatgcacatcatgcaaggatttgatgtctactaaacagctttatggttgcttaatctcctactactcaattaactgttgggattggacgaccgatagaaaaacggaaactcataagaccctgcaagtgtgcatcacagttgcaccttcacttgagctacgcagcgggtacaaagttttccgacacatactttttggcaagtcacgtaaccaaaaataggcaactctggacatcataatggggaacaaaaaatgttcagaaacaggatattgtaataaatggacaaaactgaaaactacattagcaggatttaaggatgtagaaaactttactgttcatatgaagtgtacctacacaaaatgttcagaaataggatctaatttgcgctcagattctggtaatttcatttttggtgtgcttttggtataattaaaaaaatcaaagatatccataccatatttttaaatgggtaaaatgggaggggaacttcttcatattaatacggttgtggataggaattacatagaaacataggctagtaactcaggttgttgcaaagttacattaatttacaaattactaggacttatttaaggtaccaaggaaaaagaagctaagaaacatgaagcatcagctatgctctgaaacagttcaccattctctgtctctccttgatcttaactgcactaccatagttcagtcgtgtgatataattttgcttttgctttttttggggatttttggtgttagcccccattcagttgtaattgttcatgtattcaatattgctacatgatgtttgagctataacttgtttgcatcttttgtcgttatgatcgtatcaccatgtgctgaattgctgatggctgtttccaactggtttgcagggctactaatgttattattctctaaggtgtatgatgtctgtccaagatgggacttgatagtgcgcattggacttttggcatgtgtgggtagggagtaggtaggaggtgtgtgtgggaagaaggtgcctcaggatatggtagatcaagatgggtgtggtggtgtgatgaaacagcagcattatatatttgtgtgatgtaaatgcaatccttgttggagtctgacagtgtttgttggaaaggagaagagatttggttaatcgctccatctttatgctgtcacgtaggggttttttccatttgatttcctgtcagacataagctatcaagctagtactagagtagagtagatgaattgttcagaactcctatttcagggatgggaagcgtgcggtccaaacgtggcagcgtaagtacccgacgtccacggtggacgactgtgtcgctgtgtgcctcttcttgaaccggcgggcctctcaggcacaggagacgtgaagcctcctcatgaacaggccttgttgttcatgaagagctttggagggggtggcgctctattgtccctctacatccacatctaagagcagagccaccacaaacagagcaacgccaagaaagatccaagacgctgcctagctagtgtgcccaatacttaccatctaattctaactaacatcaaaaccatcaatggcggcggtggcgaacctgtcgtcgggtgggctggagccgacggtgaaagtgaaaccgctggatgtgacgtgctacgacaacacgaggacctgcatggctcctccctcgtcacggaactcgtcgtccggctgtccttgtcgttgttccccgtgatcgctgac

SEQ ID NO: 8975 - DNA, 2121 bp, Zea Mays
gcctgttgctactgcatcaggaacccatggtgctgcagcggacgatctggtacgtgcaggcggacaatcttggcaacttcaacctgaacccgaacggttggccctcgttcgagttccatgctcaagtgaaggtgcgactgttggaggaagacaacaatgcagggaagtttgggttctacagctactgccttaagtgtcataaggttgccaaagaagagcaccttaggcatcaagatgttattatcccttttgcgtggcacaagggaaagttggtagcatgggtgattggcaaagagacttggtctagcagctttcatgatattcagggtcttatgagtttccgttcttctatcgatcgctcattcctcctgcaccagccaaaagattgtagatgcacatcatgcaaggatttgatgtctactaaacagctttatggttgcttaatctcctactactcaattaactgttgggattggacgaccgatagaaaaacggaaactcataagaccctgcaagtgtgcatcacagttgcaccttcacttgagctacgcagcgggtacaaagttttccgacacatactttttggcaagtcacgtaaccaaaaataggcaactctggacatcataatggggaacaaaaaatgttcagaaacaggatattgtaataaatggacaaaactgaaaactacattagcaggatttaaggatgtagaaaactttactgttcatatgaagtgtacctacacaaaatgttcagaaataggatctaatttgcgctcagattctggtaatttcatttttggtgtgcttttggtataattaaaaaaatcaaagatatccataccatatttttaaatgggtaaaatgggaggggaacttcttcatattaatacggttgtggataggaattacatagaaacataggctagtaactcaggttgttgcaaagttacattaatttacaaattactaggacttatttaaggtaccaaggaaaaagaagctaagaaacatgaagcatcagctatgctctgaaacagttcaccattctctgtctctccttgatcttaactgcactaccatagttcagtcgtgtgatataattttgcttttgctttttttggggatttttggtgttagcccccattcagttgtaattgttcatgtattcaatattgctacatgatgtttgagctataacttgtttgcatcttttgtcgttatgatcgtatcaccatgtgctgaattgctgatggctgtttccaactggtttgcagggctactaatgttattattctctaaggtgtatgatgtctgtccaagatgggacttgatagtgcgcattggacttttggcatgtgtgggtagggagtaggtaggaggtgtgtgtgggaagaaggtgcctcaggatatggtagatcaagatgggtgtggtggtgtgatgaaacagcagcattatatatttgtgtgatgtaaatgcaatccttgttggagtctgacagtgtttgttggaaaggagaagagatttggttaatcgctccatctttatgctgtcacgtaggggttttttccatttgatttcctgtcagacataagctatcaagctagtactagagtagagtagatgaattgttcagaactcctatttcagggatgggaagcgtgcggtccaaacgtggcagcgtaagtacccgacgtccacggtggacgactgtgtcgctgtgtgcctcttcttgaaccggcgggcctctcaggcacaggagacgtgaagcctcctcatgaacaggccttgttgttcatgaagagctttggagggggtggcgctctattgtccctctacatccacatctaagagcagagccaccacaaacagagcaacgccaagaaagatccaagacgctgcctagctagtgtgcccaatacttaccatctaattctaactaacatcaaaaccatcaatggcggcggtggcgaacctgtcgtcgggtgggctggagccgacggtgaaagtgaaaccgctggatgtgacgtgctacgacaacacgaggacctgcatggctcctccctcgtcacggaactcgtcgtccggctgtccttgtcgttgttccccgtgatcgctgac

SEQ ID NO: 8976 - DNA, 1924 bp, Zea Mays
ctccgctcgccgccagatagtcgtcgccgctgctgcacaggtgcatgacacgctgcagcagttcccggagcgggcgtacgtgcggctgcggagcgaggtgcacggtgggtacttccacgccgacgaggacggggtgggtgtgtccctacgctggcgccgccacaggtcggtgcacgcggtgtggcaggtgcagcggatcctccatgacagcaccacctacgtcctcctccacagcgccacctacggccggtacctcgcggtctcgcccacccggcgccgtcggggcacagcggccaccgcgtcgtccagggggatacggcgagtggggtctggaccccatcctgtggaagcccatcggcccggggcacgccggctacgtcttcctgcgccacgtctccaaccgcctcctccgcgccaaccgcagtaggttctggttctagcactcgagcgtctccgtcgacgacttcgacaaccagagcacgatgatgcattggatggtcgaggccgtcacaccgagacccgccccgccggtccttcggccttcaactctagtgagctcgccgtccacattccttggctctccttgcgttgatttgggcgggagcaggggttttgcctttttggagcactaacgctggatgtttattgtctgtgtcggttttacaagaactgcaaaaatgtgatgattgtgtttcttgtacgtgtccgtttccaggcaaattctttctcaaaaaaaagtttccaggcaaattttgaagtcgtgtgggtctcttatgtagggagcagtagggttccgggttcttgaatccttgcttccctgcactttggtatgctttacggaagaatgttgaaccaaattagtacttcttaccttcccatcccattcggagacctaaaatttacgtgccttcttgagaacttactcaacaatggttattgtttgtcatatgttgatcttgtcagataacggtgtgttgtacatttgattcagtatctcttggttgatcacaatcaatgttgattgcctgtttgtgaacatcttgttcccattacaatgtgtattcaaaactagcttttgtgatgattgatgattacattccctcgggatcaaatttgtgccaagattacccacttttctggttggatttttgaatttcatatggagcagtagagttttctaggttcttgaatcctgttaatgtagttttcagttcttggtcatttcttgcaatatcttgtttctgaacatttttgttccccatcatgatgtccagagttgtctgtttctgaacaaaactagccattattaagaattgtttagaaatcaaaaccagtgttatagttgtctacttgttcagattttcttacacacagtgttccgtcgtgtgacagagttatctgtttctgaacaccttgttcccactacaatgtgtattcaaaactagagcttttgtgatgactgatgataacattcccttgggatcaaatttgtgccaagattacccacttctgtggttggaattttgaaatcatgtaggtaaagctcatatggaagagtagagttttctggattcttcaatccttgctcccctgcattttgtttgcttatgggaggaattcttgaccaaatttgtccatttcgccttcccatttctttcgaaattctgtctgttgtacatttgaataattttagagttatttttcatagtttttagttcttggtcatttcttgtcagatcatgtttcttaacattttgtgtaggtacacttcatatggagcggtaaagttttctacgttcttgaatcatgctcatatagtttccagttttgatcattttttgcaatatcctatttatgaacatttttgttcactatcatggtgtccagagttgcctatttctgaaaaaaaatagtcattattaag

SEQ ID NO: 8977 - DNA, 1906 bp, Zea Mays
cgttttataaaaacaaaacaaacaaaaacaaatcttacctgtcgttgctctccgccgccaccagtgcccgtagcgctcgccgccgccgccgccgccgccaccaatggagagcctccggctcgccgtcacccaccgaccggctctccctctcccgacctcccatagccacctccgccgccgccatctgcacctccacctccactcttaccccaatcccctctccctctcaccccccatcgcctcccacctctcacctatccctcgccgccacctgcccccgctcctcgcctccgcatcggcctctcaagcgagctctaagccggcggcgtcggcggcatctggcggtgctaaaccgctgcccctctttctctcgcttgccgccggcctcgccgtccgcttcctcgtgccgcggccggccgaggtaaccccagaggcctggcagctcctctccatcttcctctccaccatcgcggggctcgtcctcggcccgctccccgtcggtgcgtgggcgttccttggcctcacagccaccgtcgccacccgcacgctccccttcaccgccgcgttcggggcgttcactaacgaagtcatctggctcatcgtcatatccttcttcttcgcgcgcggctttgtcaaaaccggactcggcgaccgcgtcgccacgtacttcgtcaaatggctggggcgcagcactttgggcctatcctatgggcttgccatcagcgaggctctcatctcccctgccatgcccagcaccacggccagggctggaggtgttttccttcccatcgtcaagtcgctatcgctctcgtccggaagcaagcccaacgatccatcggcgaagaaactcggctcttatcttgtgcaatcgcagttacaggcagctgcgaactccagtgctctcttcttgacagcagctgcacagaacctgttgtgtctgaagttagcagaggagattggtgttagtatcggaaacccatggattacttggttcaaggtttctagcgtgccagcagttcttgggcttttagtgactccttatttgatttacaaaatattcccccctgaaataaaggacactcctgaagccccagcattagctgccgagaagctaaagaacatgggtccagtaacaaaaaatgaatgggtcatgattgggacgatgcttcttgcagtctcactatggatttttggggaaactattggcgtatccagcgttgttgctgcaatgattggactctcaatacttcttgtgcttggagtgctaaactgggaggattgtttgaatgagaagtctgcatgggacaccctagcttggtttgctattttagttggtttggctgggcagcttactaaccttgggattgtgtcctggatgtcgaattgtgttgccaaggttcttcaatctttctcattgagctggcctgcagcatttgttgtccttcaggcctcgtacttctttattcactatatatttgcaagccaaactgcacatgttggagctttatactcagcatttcttgcgatgcatttagcagctggtgtgccagctctaatgtcggcacttgctttggcatacaatgcaaacctctttggagcactaacacactatagtagcgggcaatctgcagtatactttggagcggggtatgttgaccttccggatgtattcaagctgggttttataacagccgcaatcaatgctgtaatttggggagttgctggtgcattatggtggaaatttttgggtctttattgagtgtcggggcagtgtaagtacgtgaaaatcgtaccatattatcaaacaagtaattcatgatccagcatcggaggtggccagggacattttactatgatttcttttaccaacccaacatcaggattttgggtgttacaccagatcttc

SEQ ID NO: 8978 - DNA, 1946 bp, Zea Mays
cgttttataaaaacaaaacaaacaaaaacaaatcttacctgtcgttgctctccgccgccaccagtgcccgtagcgctcgccgccgccgccgccgccgccaccaatggagagcctccggctcgccgtcacccaccgaccggctctccctctcccgacctcccatagccacctccgccgccgccatctgcacctccacctccactcttaccccaatcccctctccctctcaccccccatcgcctcccacctctcacctatccctcgccgccacctgcccccgctcctcgcctccgcatcggcctctcaagcgagctctaagccggcggcgtcggcggcatctggcggtgctaaaccgctgcccctctttctctcgcttgccgccggcctcgccgtccgcttcctcgtgccgcggccggccgaggtaaccccagaggcctggcagctcctctccatcttcctctccaccatcgcggggctcgtcctcggcccgctccccgtcggtgcgtgggcgttccttggcctcacagccaccgtcgccacccgcacgctccccttcaccgccgcgttcggggcgttcactaacgaagtcatctggctcatcgtcatatccttcttcttcgcgcgcggctttgtcaaaaccggactcggcgaccgcgtcgccacgtacttcgtcaaatggctggggcgcagcactttgggcctatcctatgggcttgccatcagcgaggctctcatctcccctgccatgcccagcaccacggccagggctggaggtgttttccttcccatcgtcaagtcgctatcgctctcgtccggaagcaagcccaacgatccatcggcgaagaaactcggctcttatcttgtgcaatcgcagttacagctgcgaactccagtgctctcttcttgacagcagctgcacagaacctgttgtgtctgaagttagcagaggagattggtgacactcctgaagccccagcattagctgccgagaagctaaagaacatgggtccagtaacaaaaaatgaatgggtcatgattgggacgatgcttcttgcagtctcactatggatttttggggaaactattggcgtatccagcgttgttgctgcaatgattggactctcaatacttcttgtgcttggagtgctaaactgggaggattgtttgaatgagaagtctgcatgggacaccctagcttggtttgctattttagttggtttggctgggcagcttactaaccttgggattgtgtcctggatgtcgaattgtgttgccaaggttcttcaatctttctcattgagctggcctgcagcatttgttgtccttcaggcctcgtacttctttattcactatatatttgcaagccaaactgcacatgttggagctttatactcagcatttcttgcgatgcatttagcagctggtgtgccagctctaatgtcggcacttgctttggcatacaatgcaaacctctttggagcactaacacactatagtagcgggcaatctgcagtatactttggagcggggtatgttgaccttccggatgtattcaagctgggttttataacagccgcaatcaatgctgtaatttggggagttgctggtgcattatggtggaaatttttgggtctttattgagtgtcggggcagtgtaagtacgtgaaaatcgtaccatattatcaaacaagtaattcatgatccagcatcggaggtggccaggtgggttcgtttttcttccgagggcctatgaatgcatcataacagaggaacgctcatctttagaagtttttgagcattatcatcaacctagaaagcagatatgttttcgtaggttcttaaatcgacggtcgttatatatcctttgatttgattgttgtaccctcgtatctcctccccaaggtaaataaaatgcatgagggacttttgaattttgatggtccaaa

SEQ ID NO: 8979 - DNA, 769 bp, Zea Mays
cttcgtcgtgctgggtgtccacgggtaccactagagaacgcgagggccgacttgggaccaggcaatgttctcgtggactaaccgtgcgaatggaaggccggtaatctcacgctgatgtggagtttcgtggcggtcagcggatcgtcgtggacatgggccatgcgactctcgattcacagccttgcaggtgatgaaggcggaccgtcctatcgttcatactgactaatcggtggaccgacacatgccataacatttttatttgtttttaataacaatctcaaggaaggtgttttttggaacttcggcattcagaagccttcgtgttttcgcggatcgagattgttatgaaaaaaatgacctagcaccatgaaggggctactgttaggggtcttcttgtctaccgaaggtcctcaagacgaagaaatcacctatgagcaactagcatgtgtgccgaagctgcagcaagcacatgaaaagcaccaaagaattacaacttcggctcatggtggttacgaaggtcaaaagtgatactaaaccaaagagaaaaaaagacatgttaacccctgatgtttgtattaggataatgtatacatgccaggttcataaatgtacttttgcttgggctgcgtcccttgcctacaaatagatgaacaataccccatgtattgttcacgctggattggaattgtactttcgcttttactttcaagcaagctgaaggtacaaatgtaatctacatcatgtatcactttgtcagcatatgataaat

SEQ ID NO: 8980 - DNA, 4598 bp, Zea Mays
ggtgtgaaaagatgaccgccatcgctcgggcttcgtcgtgctgggtgtccacgggtaccactagagaacgcgagggccgacttgggaccaggcaatgttctcgtggactaaccgtgcgaatggaaggccggtaatctcacgctgatgtggagtttcgtggcggtcagcggatcgtcgtggacatgggccatgcgactctcgattcacaggtaagaccccacaacccgtctatgcatggtctccacctcgcgtagctgtgttttacggtaaggtttgggctctttgttgctggggggtgtgcgatggcaatggcaccgccgcctagtgcctgcgccaccgtggtccggtatcagggaagaagaaacaaccctggccgttggatcttcatctggcgcccagaattagatgatgggtgcctggtccaggggattgcatgggaatcgctgattcgacgatggatgactgtgatgaaatctggacttaataaaatcacgatcgtctgatcgggatcgtgcggttgggagttgaattcaacttaagggtgcaggactaatccggggtcattgatcgctgatcctgtggcctaggaagcatatcattcgcgatattaaccgtaaccatagatcatgaatccaacgactcagaatctatcgtactccttcgccgaacaattttcctatggagaccctgcccttctgacaaactaacccgccgcccatcccttttgcaagagtgttacaaaggagtccttgaatttacaaaataaaccctaaactcttctgaaatagtggtcgcagtacaaggattaaataaaatgagtaaaattaataaagaaaaatatttctagcataaaaataattccagaaccttgtttaattcataagtattttagtttaactcgtttttaatccattccagttgcaataaattcatgttaatattgtttatcatctagtaaccttattttagtatgaaaacatggttaaaattatgtacttaatttgttttagatctaacacttaaatcctcagaaaatcataactctttaacagtaactccgaatttagtggttctcgagcctatgatcttgtagcagcgcgtaggatactcttatgttgtttgttcatatgctttggtgtaatgtaattatatccattacttgcttgattgtatgtattgctacgaataacggtgaggtcacgagaatctgaagaccaacttggtacctaggatctcaagtgtaaggcaagttgtgaccttgatcacttttctctttacccattaatgttcctgttaatcactgtgacatgcttagattaatttgatggtacctaataggcttccctagcattgtttatcccacaccttgcagacaaaagaactattgggtagttttgctattactctacctggttttgtgaaattaatgttatattttgatcatgttccagttatgctgttgttttaattattgttcatggcaagatcattgtgttaattggaacatggagcttaacttgagatatctgtgctatcacaagggtggcatgggacgcccttggctgactaattagaaaagctagtggaggactaccttacccgaaagaggcaagggcggtagaggagctgtgtatagggaggttctcgggttgatcatgctgcgatgacttttggacgagggattcctatattgcccttctcagaaaccatagcgggttttcaaagctagtggagctttgtaaaggcctcgtagtggatccctatccattcacctcagaagtgtctaagggccttgcaaaccctgggtagacgagatacacgacttgtgggtaaagggtgcaacctctgcagagtgtaaaactggtatatcagccgtgctcatggtcaagagcgacttaggactctcgcatgattaaattatggaattaaacttaatctgtcatatgcattgcattgtgggtgttattatcaattgtgatctcttatttaattgggttggtatctacttatacttagtaattaactgctaacaaaattttgaccaactctaaaagcaatgctcagctttaaccatctcctttggtaagccttacacttcacatgaggcccaccgtaagtgagctcatgcacattattccccacaacttgttgcgtgatgaacgtatgtgagctcacccttgttgtactcacattccctaggtcaagtacaggtaccacaggatgaggcgtgtgaaggatgttgtgatgagttcgtgagtggtctaggccgtcgtctccaagtcaactttagttgctagatcgttgtcttcatatgatgtaattatttaactattttgtatagaactctattatatattaaagttgtgacattcgtttctgtaccatgagtcatcatatgtgtgagacttgatcctagcacacatgtgaaccgcgccagggtttggccccctaaatcctggtgtgacagaagtggtatcagacgaatgttgactctaggacaaaacctatatagaacggacaacccttacctacttacctttgctactcagattctttataaacttatcttaatcttttctcatctattgttgctttactctgattattgttaccttttctcttccaatgacaaaggtggatttcacactttgaaatcctttacctaaagtgacctttaggaaaaggagacctaatcttaggaacaaaaacaaaactatttttgtaagtatctatacgcttgaatgtttgttcctatgataactgtttgatttggttctttgattgatcatgagttgtggagtaatatccacaattgcatctgcatatgcatataggcataaaaaatgtttatggccattcacaatatagacgaagtcgaagctcaccagcaacataaatacataagagataaaactgcttcggcagaacaaccaaagtctatgcttttgtgtgaagacgtagctcagcataaagtgttgttttgtaacaccccgtccaatcccggaccgacgatacttactcctgacagctctctaggatcatatattgaccccacagaccaacacgagtcttttgtgtgcactttgtcctcacccatgcgcacccgagaaaacttcccggtcggtcacccatcccaaattgctccaagccaagcacgcttaacttagaggttctttcgagatagacttccaaaaaagaagatgcaacttgttgatatgaatactctattaattctattaagccttggggtaggatatcaccatcccaggggccaggatatcaaaatccatccccttagaagatccgacgtcctcgtcggtcaaccccaatccaggaacctcccctcttggccacgtctgtatgtctagtatcatcatatgccatgctatatgaccactctgggtccacatgcgccatgcgccatatacccgaacccctagcccacatatgcccatgaaaccgcgagggttggctctgatactatttgtaacaccccgtccaatctcggatcggtggtacttactcctggcagctctctaggatcatatattggccccacagaccaacacgagtcttttgtgcgcactttgtcttcactcatgcgcacccgagaaaacttcctagtcggtcatccatcctaaattgctccaagccaagcacgcttaactttgaggttctttcaatataggcttctgaaaaagaagatgcaccttgttgatatgaatactctattaattctattaagccttgggccaggatatcaccatcccaggggccaggatcaagggcacaacttgcctttaacgagctcctgctcagcagtctctacctgatgaacccctggatcctctgtggatggctcgtctactcgcaacaatacaaacaaacatggtataaaaaaatataacatcacaccaaacaacagaatagaatgcacgataatattctacgtgtcgtaacgagatcgtaggaacaagaatcactaaattcagagttacagttatttagttatgaatttctaaagttatttagtagctagattagaataactcaagtgaataattttaattcaagttgcatgactaaacagagctactagttgatagacaatattattacaaaattaatgccactggattggatcaatttggagctaaaataaattaaatacgaatttcacaagtttctagaattatttgtgtagtgaaaatcactttctaaatttaattatctaatttccctgagctctggactaggcgcataaatccagagaggttgggggctaacctacaaaaatttcctagactcagtttaaccctgagttggatggcgggtttattactggggtttccacggtctcttatgtaagtttatcgaccgaaggggtatcggccagatctggccgttcgatccccaactgatgatgcaaattagatttgatttcttcgaaaagggtatggaatatagggcctcagatcaggatctaacggtccgcatttaatggaatccagcccagatctgaaccacacgattatgatccaaccgcccgaattccgcggggtgaaggggtacacaaaatttgatctacgccatccgtt

SEQ ID NO: 8981 - DNA, 2676 bp, Zea Mays
cgatggccgtggagctagctgcctgggaatgggataggatattttcccgtggcgggataaagcccaacgagcccgcgttacggatatcttcgccatccgttgcctcgcgagctcgccgccatggcattggctctccccctcgcccgcctcgtccccgcctgccagtgccagccttggccccacctgcgctttcggaagcgccacgtctccttcgccgctcacgccagttctcgcgccgccttcgctgcctgcgcggcggcccctgccctccaggtccaggcgccggaggcggaggcggaggcggagacggtcgagcaagtgggcccgaagacacgcctcgtcgcgcagaacatcccgtgggactgcacggccgacgaaatgcgcgcgctcttcgagagccacggctccgtcgtcggcgtcgagctttcaatgtacagcgccaataaaaacagagggttggcgtttgtaaccatgggttcagaagaggaggctcttgcagctctcacccatctcaattcaactattttaaatgataggaaaattaaggtggacttcgcaaggcctagaaagaagcaacctaagcaacctgctgtggtatcggatgacacggaaaagtgtggtatcagctgaagttatcttccataccaccactccgagacgatctgctggctacgcgtttgtttctttttcttcgaaagagagcgcaggggccgccatatctgctttcaacggaaagatattgatgggacggcccattaacgtgatgttcaaagatgaaaatggtgaaaagaatgaaccttcttctgtcccaaagaaggccgaggtggaaccatctgatgaccagagtgataagctaagcatgaactgttaacgaaacaaataggtcatatctgtcattacacacacatatatattctgacccatggtatttccttttcagaaatagttatgtcccttgttttattgatttgccaatctggtgtatgttcgtcgtgaggcaaacgtgagcgctgtgagggcgtcaaatcctcccgcgcgcgttgcaagggtcctaaatataaacttaattaggtttaataaatttgtctcgtctttttaattttatagtttctatatttaatactcgtaattactatttaaacattcggtgtgacataaattaaattttagttaggtggaaccaaacagagaattgaggggggttgcagtgaattaggagaggattttgacatatagggcatttgtagatttaagacaaacgaacatgagtcatgggcagccaatgaacatgattccatacgtattgttggccgacgaaaggaaaataagtatactcggacgtatttgcgtaggagcatagcagttggactggacatgccgtgtaatgcaccacgacgcggttaactcgggacggaagcaacgcaactcggcacgaagaaggaaaagccaccaccggttcctccgccgtccccgcggtttcagttccttgcttgcttgcttgctcttgctctccctctctcgtggaagccagccacacaaggcagaaagagagagtgacgttgtgttccatcccgttccgctgaagcaaccgctctcctacaccaaaccacccacaccactctaggtctctagccgatgcgatggatgtggatccagcagcggaccagcggaggaagaacaagggcgggctggagtcggagctggagcgccactacgacgacctgcagcgggagatgatgctgatggccgccgatcggccgcacaagcaactgcaacagcatcgacgtcacgggcaccgccccgatctgctccagaactgcgacctgcccccaccggccaagctcttcggccccgtacccaccctgcagaggctggagaccgctgctgccaaggaccacaaggccgacgacggcctgctgcgggcgctgcgcctgtcgcagtcgcgcgcgcgggaggcggaggacaagctggcggccgcgggcgccaccaacgtcgacctcgcggcgctgctcgtgcgggactccgtcgcgctctccgcccaccgccgctgggtcatgatgctggaggccgagaattccctgctccgaggaccacgacgagatgcggatggtccggaaccggaccacggagccggcggggtggccgcgtggtgggtcgcgctcgccgtctgcgtcggcgtcgccggcgtcggcctcgcgctcggcaggttcctctgctgaacaactgtgatggatcattctccttccttcctgctgctgtagaaagtgtaaatctacttcgagacgacgatcgatcgatcaatcaatcagtcaaaaaaaaaactgtaaatactgctacagtagtacggagtaggattggtctccaagttaaagtacccattcctgcacgctttctgctttagcttgtggaaacaatctgttgagaatttgatgcctgccgtgaggttccgtgtcactttccattgctcacagtcacagcacagaaattgtcgcgcattcatgtacgacgacaaggacttttccctgtagttgtaatccattttttttgaaaaaaacaattaattgattttacctgtaaattctccagttcttttacgggtaaattctaaaatgcgcaagcaattcttcaccaaatggaagcaggtcgagtcagtcctagatggggtcggtggcacct

SEQ ID NO: 8982 - DNA, 2662 bp, Zea Mays
cgatggccgtggagctagctgcctgggaatgggataggatattttcccgtggcgggataaagcccaacgagcccgcgttacggatatcttcgccatccgttgcctcgcgagctcgccgccatggcattggctctccccctcgcccgcctcgtccccgcctgccagtgccagccttggccccacctgcgctttcggaagcgccacgtctccttcgccgctcacgccagttctcgcgccgccttcgctgcctgcgcggcggcccctgccctccaggtccaggcgccggaggcggaggcggaggcggagacggtcgagcaagtgggcccgaagacacgcctcgtcgcgcagaacatcccgtgggactgcacggccgacgaaatgcgcgcgctcttcgagagccacggctccgtcgtcggcgtcgagcgccaataaaaacagagggttggcgtttgtaaccatgggttcagaagaggaggctcttgcagctctcacccatctcaattcaactattttaaatgataggaaaattaaggtggacttcgcaaggcctagaaagaagcaacctaagcaacctgctgtggtatcggatgacacggaaaagtgtggtatcagctgaagttatcttccataccaccactccgagacgatctgctggctacgcgtttgtttctttttcttcgaaagagagcgcaggggccgccatatctgctttcaacggaaagatattgatgggacggcccattaacgtgatgttcaaagatgaaaatggtgaaaagaatgaaccttcttctgtcccaaagaaggccgaggtggaaccatctgatgaccagagtgataagctaagcatgaactgttaacgaaacaaataggtcatatctgtcattacacacacatatatattctgacccatggtatttccttttcagaaatagttatgtcccttgttttattgatttgccaatctggtgtatgttcgtcgtgaggcaaacgtgagcgctgtgagggcgtcaaatcctcccgcgcgcgttgcaagggtcctaaatataaacttaattaggtttaataaatttgtctcgtctttttaattttatagtttctatatttaatactcgtaattactatttaaacattcggtgtgacataaattaaattttagttaggtggaaccaaacagagaattgaggggggttgcagtgaattaggagaggattttgacatatagggcatttgtagatttaagacaaacgaacatgagtcatgggcagccaatgaacatgattccatacgtattgttggccgacgaaaggaaaataagtatactcggacgtatttgcgtaggagcatagcagttggactggacatgccgtgtaatgcaccacgacgcggttaactcgggacggaagcaacgcaactcggcacgaagaaggaaaagccaccaccggttcctccgccgtccccgcggtttcagttccttgcttgcttgcttgctcttgctctccctctctcgtggaagccagccacacaaggcagaaagagagagtgacgttgtgttccatcccgttccgctgaagcaaccgctctcctacaccaaaccacccacaccactctaggtctctagccgatgcgatggatgtggatccagcagcggaccagcggaggaagaacaagggcgggctggagtcggagctggagcgccactacgacgacctgcagcgggagatgatgctgatggccgccgatcggccgcacaagcaactgcaacagcatcgacgtcacgggcaccgccccgatctgctccagaactgcgacctgcccccaccggccaagctcttcggccccgtacccaccctgcagaggctggagaccgctgctgccaaggaccacaaggccgacgacggcctgctgcgggcgctgcgcctgtcgcagtcgcgcgcgcgggaggcggaggacaagctggcggccgcgggcgccaccaacgtcgacctcgcggcgctgctcgtgcgggactccgtcgcgctctccgcccaccgccgctgggtcatgatgctggaggccgagaattccctgctccgaggaccacgacgagatgcggatggtccggaaccggaccacggagccggcggggtggccgcgtggtgggtcgcgctcgccgtctgcgtcggcgtcgccggcgtcggcctcgcgctcggcaggttcctctgctgaacaactgtgatggatcattctccttccttcctgctgctgtagaaagtgtaaatctacttcgagacgacgatcgatcgatcaatcaatcagtcaaaaaaaaaactgtaaatactgctacagtagtacggagtaggattggtctccaagttaaagtacccattcctgcacgctttctgctttagcttgtggaaacaatctgttgagaatttgatgcctgccgtgaggttccgtgtcactttccattgctcacagtcacagcacagaaattgtcgcgcattcatgtacgacgacaaggacttttccctgtagttgtaatccattttttttgaaaaaaacaattaattgattttacctgtaaattctccagttcttttacgggtaaattctaaaatgcgcaagcaattcttcaccaaatggaagcaggtcgagtcagtcctagatggggtcggtggcacct

SEQ ID NO: 8983 - DNA, 2249 bp, Zea Mays
cgatggccgtggagctagctgcctgggaatgggataggatattttcccgtggcgggataaagcccaacgagcccgcgttacggatatcttcgccatccgttgcctcgcgagctcgccgccatggcattggctctccccctcgcccgcctcgtccccgcctgccagtgccagccttggccccacctgcgctttcggaagcgccacgtctccttcgccgctcacgccagttctcgcgccgccttcgctgcctgcgcggcggcccctgccctccaggtccaggcgccggaggcggaggcggaggcggagacggtcgagcaagtgggcccgaagacacgcctcgtcgcgcagaacatcccgtgggactgcacggccgacgaaatgcgcgcgctcttcgagagccacggctccgtcgtcggcgtcgagctttcaatgtacagcgccaataaaaacagagggttggcgtttgtaaccatgggttcagaagaggaggctcttgcagctctcacccatctcaattcaactattttaaatgataggaaaattaaggtggacttcgcaaggcctagaaagaagcaacctaagcaacctgctgtggtatcggatgacacggaaaagtgtggtatcagctgaagttatcttccataccaccactccgagacgatctgctggctacgcgtttgtttctttttcttcgaaagagagcgcaggggccgccatatctgctttcaacggaaagatattgatgggacggcccattaacgtgatgttcaaagatgaaaatggtgaaaagaatgaaccttcttctgtcccaaagaaggccgaggtggaaccatctgatgaccagagtgataagctaagcatgaactgttaacgaaacaaataggtcatatctgtcattacacacacatatatattctgacccatggagcatagcagttggactggacatgccgtgtaatgcaccacgacgcggttaactcgggacggaagcaacgcaactcggcacgaagaaggaaaagccaccaccggttcctccgccgtccccgcggtttcagttccttgcttgcttgcttgctcttgctctccctctctcgtggaagccagccacacaaggcagaaagagagagtgacgttgtgttccatcccgttccgctgaagcaaccgctctcctacaccaaaccacccacaccactctaggtctctagccgatgcgatggatgtggatccagcagcggaccagcggaggaagaacaagggcgggctggagtcggagctggagcgccactacgacgacctgcagcgggagatgatgctgatggccgccgatcggccgcacaagcaactgcaacagcatcgacgtcacgggcaccgccccgatctgctccagaactgcgacctgcccccaccggccaagctcttcggccccgtacccaccctgcagaggctggagaccgctgctgccaaggaccacaaggccgacgacggcctgctgcgggcgctgcgcctgtcgcagtcgcgcgcgcgggaggcggaggacaagctggcggccgcgggcgccaccaacgtcgacctcgcggcgctgctcgtgcgggactccgtcgcgctctccgcccaccgccgctgggtcatgatgctggaggccgagaattccctgctccgaggaccacgacgagatgcggatggtccggaaccggaccacggagccggcggggtggccgcgtggtgggtcgcgctcgccgtctgcgtcggcgtcgccggcgtcggcctcgcgctcggcaggttcctctgctgaacaactgtgatggatcattctccttccttcctgctgctgtagaaagtgtaaatctacttcgagacgacgatcgatcgatcaatcaatcagtcaaaaaaaaaactgtaaatactgctacagtagtacggagtaggattggtctccaagttaaagtacccattcctgcacgctttctgctttagcttgtggaaacaatctgttgagaatttgatgcctgccgtgaggttccgtgtcactttccattgctcacagtcacagcacagaaattgtcgcgcattcatgtacgacgacaaggacttttccctgtagttgtaatccattttttttgaaaaaaacaattaattgattttacctgtaaattctccagttcttttacgggtaaattctaaaatgcgcaagcaattcttcaccaaatggaagcaggtcgagtcagtcctagatggggtcggtggcacct

SEQ ID NO: 8984 - DNA, 879 bp, Zea Mays
gaggccccctccccattctatctcattcccaattcctcatctgcttcgcttccccccaaatcgaatcctcatcgctccgtctatggcgactctaaccatgcagccgatcggtcccacccctgctccggctgcgcagcaagacccaagcaagggagagaatcctcctaccgtggatggtaccgatctgggtgacatcgactcgggaactcggatgtcgtttccgcggatttggcagccgccgccgtctgtggcggtcagcgtctaggctcttctacgattcctagctgggcacggtgggttctcggaggtgtggtttacacgctcgtgccgttctacaacagagttaggcatctcgaagacgagacggtgggattcgtggagaatgctgtggaggttgtggagcatttagctgaagtaacagagaagctagctgcgaatgtggctaagcaacttcctgaagatgggtctctgcagaaagcagtggaagaggttgaacacattgctgaggtagtggatgatgatgcggagaaggttgaagcagtcactgaaaagatcgacaaggtcagtgatgagattgatgctgctgtggagccggtcatcgcggagcttgaaaaggaactcgatcagagcacaacctcagacgatggagttgacacaaagaattgatcaactgcatgttaggtgtgctcttcattgtacatagcgtgtgtactgttgtttttcttctctctctcctctttggagaaactgcttgtacatatgtatgtatggaccatgaagattattggtactgtatcaagtcactatccataaataaatacacgttggcctgtgaaaaaaaatatactagctcgcagagctgtgaattattgattcgca

SEQ ID NO: 8985 - DNA, 600 bp, Zea Mays
gacgaggccccctccccattctatctcattcccaattcctcatctgcttcgcttccccccaaatcgaatcctcatcgctccgtctatggcgactctaaccatgcagccgatcggtcccacccctgctccggctgcgcagcaagacccaagcaagggagagaatcctcctaccgtggatggtaccgatctgggtgacatcgactcgggctgggttatcctcaagaactcggatgtcgtttccgcggatttggcagccgccgccgtctgtggcggtcagcgtctaggctcttctacgattcctagctgggcacggtgggttctcggaggtgtggtttacacgctcgtgccgttctacaacagagttaggcatctcgaagacgagacggtgggattcgtggagaatgctgtggaggttgtggagcatttagctgaagtaacagagaagctagctgcgaatgtggctaagcaacttcctgaagatgggtctctgcagaaagcagtggaagaggttgaacacattgctgaggtagtggatgatgatgcggagaaggttgaagcagtcactgaaaaggtagtgttctgcacagaaatgttgtacaa

SEQ ID NO: 8986 - DNA, 756 bp, Zea Mays
agtgactaccattttttccttctggagcgagcgagagcgaggtctcgatcgatttcatggcgctggaggcagtggtgttctctgagggactctttggctgctggaccatggcggctccggcagaaaatattgccgccgcggcggagataccgtcgccgctcccgctgccagcagccgccaggcggaagcggcggcggacgaggaacgccaagaacaggcaggaggtggagagccagcggatgacccacatcgccgtcgagcgcaaccgccgcaagcagatgaacgagtacctcgccgtgctccgctccctcatgccgccgtcctacgcgcaaaggggcgaccaggcgtccataattggcggcgccatcaactacgccaaggagctggagcagctgctgcagtccctcgaggcgcggaaacgacacgacggcttacacgccgcggcggcgcccttggctgccttccactacagtaaactgataaacatccgacggcctccttatctccgacggcggcctacgaggccatcgaagattagtttatgtccgacggccacaaaaggccctcggaaatagttcttatctccgacggcctcgtaggcggccgtcggagataaggttatgtccgacggctggcagcgtagccgtcggaggtaagattttttaatcccccaggaaaccggcgcgcggttcatttccacgcgcgcgcttcttttctcctctgtctctccccacgcgccgccgccgtcaactgcgc

SEQ ID NO: 8987 - DNA, 1335 bp, Zea Mays
cttggttcgacgcagcctctctgcaaaagaggcagggccacaaaggaagggtcaaagagggggttgagaaatcaagagacaggtcaaggagccgtagtccaaggccaagagacagagatgatagaaggcgaagtcgcagcaggagcaggagcagagaaaggcatgtccatgatagagatagggactatcgtcgtcggagcagaagtagaagccgaagtatgagttcaagccctgaccacaaaagtcatcgtagagcaagagatgatgttaagcgcaagagcagaagcaagagtagaagcaggagcaggagtagaagccgctcataccacagttcttcacctgcccggcgcagtgctagtcctcccaagagcccaccgccacagaggagccccactcctgaaaagcatgccaatggaaaagattcacctctgtcacgcagtgtatctccatcaccgaagcgtgcaagctcccgcagcccaggcagcgatagcaaggaataaagcttgttgatctggtgatgcttaaagagcagtcttcccatgggattgcagaacgttgagaaggctgtttgaacatgatggcagtagcaatctgcaatcaaccgctatccaagttatctgttcgtgagaggggttgctgtttaccggtagaatggtattgctcgggaccgactatggtggatgatgtcttgctgttagtctttgtcattggtgttgatatggggatgacacagctgatgatgtgacggtgctgatattgtatcgatattgatgctgatgctgcttacagtgaccatcttgatgcagtctatatttttgttcaagaggttctgaatcaaatcatgaaattccagatggatctcatgattgttctagttggaacaaggtgcagactggcagagatgctgaggggtgtgtgtactcatagtaacaatggtactcgtcgtcgtcgtaatatggctaataatctctacgggaatggaggtatcagttatgattagcgtgggtcctgttgatcatgtggtggtgaaccaatttattttggtccttctctatcatattgttttattattctgctagtgttgagtgactcgaatcagatgctctagatttattcattctcctaagcaccagtaatgaaatccatgaagacaatgcctctgtaccaaggctcaatattaacatgtcatctctgtctggaaatgtatttgtgaaatatggtttgtacggtacctgcccatttcgtttgtagtagagcacttgactataatatcagtacgtttaagatgtttggtgtgttaatgaaggtatgcaatagatgattaactagtactcc

SEQ ID NO: 8988 - DNA, 1469 bp, Zea Mays
cccaaacatgttttggttaatcttctgagattagcataccaatgtactagttatgctttgttacccaaacatgaatgaaggacatacctggcacagtggtgagaagccttcccactgagccgaaggcccttggttcgacgcagcctctctgcaaaagaggcagggccacaaaggaagggtcaaagagggggttgagaaatcaagagacaggtcaaggagccgtagtccaaggccaaggcacagagacagagatgatagaaggcgaagtcgcagcaggagcaggagcagagaaaggcatgtccatgatagagatagggactatcgtcgtcggagcagaagtagaagccgaagtatgagttcaagccctgaccacaaaagtcatcgtagagcaagagatgatgttaagcgcaagagcagaagcaagagtagaagcaggagcaggagtagaagccgctcataccacagttcttcacctgcccggcgcagtgctagtcctcccaagagcccaccgccacagaggagccccactcctgaaaagcatgccaatggaaaagattcacctctgtcacgcagtgtatctccatcaccgaagcgtgcaagctcccgcagcccaggcagcgatagcaaggaataaagcttgttgatctggtgatgcttaaagagcagtcttcccatgggattgcagaacgttgagaaggctgtttgaacatgatggcagtagcaatctgcaatcaaccgctatccaagttatctgttcgtgagaggggttgctgtttaccggtagaatggtattgctcgggaccgactatggtggatgatgtcttgctgttagtctttgtcattggtgttgatatggggatgacacagctgatgatgtgacggtgctgatattgtatcgatattgatgctgatgctgcttacagtgaccatcttgatgcagtctatatttttgttcaagaggttctgaatcaaatcatgaaattccagatggatctcatgattgttctagttggaacaaggtgcagactggcagagatgctgaggggtgtgtgtactcatagtaacaatggtactcgtcgtcgtcgtaatatggctaataatctctacgggaatggaggtatcagttatgattagcgtgggtcctgttgatcatgtggtggtgaaccaatttattttggtccttctctatcatattgttttattattctgctagtgttgagtgactcgaatcagatgctctagatttattcattctcctaagcaccagtaatgaaatccatgaagacaatgcctctgtaccaaggctcaatattaacatgtcatctctgtctggaaatgtatttgtgaaatatggtttgtacggtacctgcccatttcgtttgtagtagagcacttgactataatatcagtacgtttaagatgtttggtgtgttaatgaaggtatgcaatagatgattaactagtactcc

SEQ ID NO: 8989 - DNA, 1857 bp, Zea Mays
gttctgttgagtttcagctttgagatttggattgtcacgtaattcgtttccctgtcctccccctctcgctgagctgagcccacctactccctcccaccacttgcattcacacactcgattccgctgctctctccctcttcctctcccccgcggcggagccataaaccctaggcctcgccgtcgtcggaggcgccgccgtgatgtcgcactttggaaggacgggtccgccggacatccgcgacaccttctcgctgctcgtcctcaacatcagcttccgaaccacggccgacgaccttttcccgctcttcgagcgctgcggcaaggtcgtcgacgtcttcatcccgagggaccgcaggaccggggactcgaggggttttgcgttcgtgcggtacaagtacgccgacgaggcgcagaaggctatagatcggctcgatggccgtaatgtggatgggaggaacatcatggtgcagtttgcaaaccacaaaggaagggtcaaagagggggttgagaaatcaagagacaggtcaaggagccgtagtccaaggccaagagacagagatgatagaaggcgaagtcgcagcaggagcaggagcagagaaaggcatgtccatgatagagatagggactatcgtcgtcggagcagaagtagaagccgaagtatgagttcaagccctgaccacaaaagtcatcgtagagcaagagatgatgttaagcgcaagagcagaagcaagagtagaagcaggagcaggagtagaagccgctcataccacagttcttcacctgcccggcgcagtgctagtcctcccaagagcccaccgccacagaggagccccactcctgaaaagcatgccaatggaaaagattcacctctgtcacgcagtgtatctccatcaccgaagcgtgcaagctcccgcagcccaggcagcgatagcaaggaataaagcttgttgatctggtgatgcttaaagagcagtcttcccatgggattgcagaacgttgagaaggctgtttgaacatgatggcagtagcaatctgcaatcaaccgctatccaagttatctgttcgtgagaggggttgctgtttaccggtagaatggtattgctcgggaccgactatggtggatgatgtcttgctgttagtctttgtcattggtgttgatatggggatgacacagctgatgatgtgacggtgctgatattgtatcgatattgatgctgatgctgcttacagtgaccatcttgatgcagtctatatttttgttcaagaggttctgaatcaaatcatgaaattccagatggatctcatgattggtaagaaaacttgtacaataatgccttacatgctatgttggttcttacccctaccctactttggcaaatgctttgcatcagttctagttggaacaaggtgcagactggcagagatgctgaggggtgtgtgtactcatagtaacaatggtactcgtcgtcgtcgtaatatggctaataatctctacgggaatggaggtatcagttatgattagcgtgggtcctgttgatcatgtggtggtgaaccaatttattttggtccttctctatcatattgttttattattctgctagtgttgagtgactcgaatcagatgctctagatttattcattctcctaagcaccagtaatgaaatccatgaagacaatgcctctgtaccaaggctcaatattaacatgtcatctctgtctggaaatgtatttgtgaaatatggtttgtacggtacctgcccatttcgtttgtagtagagcacttgactataatatcagtacgtttaagatgtttggtgtgttaatgaaggtatgcaatagatgattaactagtactcc

SEQ ID NO: 8990 - DNA, 1902 bp, Zea Mays
cgagaaagcacgtcgcctggccgaccatgcgtttcagttttgagaaacaaatacgttcaaatgctgcgtagcgtagcgtaggcttaagaaggtcatgttctgttgagtttcagctttgagatttggattgtcacgtaattcgtttccctgtcctccccctctcgctgagctgagcccacctactccctcccaccacttgcattcacacactcgattccgctgctctctccctcttcctctcccccgcggcggagccataaaccctaggcctcgccgtcgtcggaggcgccgccgtgatgtcgcactttggaaggacgggtccgccggacatccgcgacaccttctcgctgctcgtcctcaacatcagcttccgaaccacggccgacgaccttttcccgctcttcgagcgctgcggcaaggtcgtcgacgtcttcatcccgagggaccgcaggaccggggactcgaggggttttgcgttcgtgcggtacaagtacgccgacgaggcgcagaaggctatagatcggctcgatggccgtaatgtggatgggaggaacatcatggtgcagtttgcaaagtacggccccaatgctgtgccaatccacaaaggaagggtcaaagagggggttgagaaatcaagagacaggtcaaggagccgtagtccaaggccaaggcacagagacagagatgatagaaggcgaagtcgcagcaggagcaggagcagagaaaggcatgtccatgatagagatagggactatcgtcgtcggagcagaagtagaagccgaagtatgagttcaagccctgaccacaaaagtcatcgtagagcaagagatgatgttaagcgcaagagcagaagcaagagtagaagcaggagcaggagtagaagccgctcataccacagttcttcacctgcccggcgcagtgctagtcctcccaagagcccaccgccacagaggagccccactcctgaaaagcatgccaatggaaaagattcacctctgtcacgcagtgtatctccatcaccgaagcgtgcaagctcccgcagcccaggcagcgatagcaaggaataaagcttgttgatctggtgatgcttaaagagcagtcttcccatgggattgcagaacgttgagaaggctgtttgaacatgatggcagtagcaatctgcaatcaaccgctatccaagttatctgttcgtgagaggggttgctgtttaccggtagaatggtattgctcgggaccgactatggtggatgatgtcttgctgttagtctttgtcattggtgttgatatggggatgacacagctgatgatgtgacggtgctgatattgtatcgatattgatgctgatgctgcttacagtgaccatcttgatgcagtctatatttttgttcaagaggttctgaatcaaatcatgaaattccagatggatctcatgattgttctagttggaacaaggtgcagactggcagagatgctgaggggtgtgtgtactcatagtaacaatggtactcgtcgtcgtcgtaatatggctaataatctctacgggaatggaggtatcagttatgattagcgtgggtcctgttgatcatgtggtggtgaaccaatttattttggtccttctctatcatattgttttattattctgctagtgttgagtgactcgaatcagatgctctagatttattcattctcctaagcaccagtaatgaaatccatgaagacaatgcctctgtaccaaggctcaatattaacatgtcatctctgtctggaaatgtatttgtgaaatatggtttgtacggtacctgcccatttcgtttgtagtagagcacttgactataatatcagtacgtttaagatgtttggtgtgttaatgaaggtatgcaatagatgattaactagtactcc

SEQ ID NO: 8991 - DNA, 578 bp, Zea Mays
gcatgcgcatgcgcatgtgctgcatcacaaatatctacgcctataatatgttctgttcatccaaagggaacatcagatcaagctaggactgctcgttcatagtagcttctattggaggcatggcttatgagctcatacacagcttctctcagttgcagcaaaaaagaggcatttctcagtcatcaaatgtagatgtgagctatgctatgcatggccaggaactcttgacagagagcaacaagccgcataaaatccagttgaccagaaacgagagagaaaaaaaatatgtgtggctcaagataggaacggcccctggcactgagatgagagcagagcaaaacaaatgcgagtgcaagtgcggcatcagctcaggctgtacgtgtgaacacggggggagtcaaaggtcagcaacctgcgcgagatgctcacatcacagggcccaagcaacagtgaacaaaagacaccaggcgccggtggaagaagcaccaatgcaccatcatccaccatgccatgtctcacagtgctggccatggacctggaagaaacaactggaaagtacaagagggcagagcacttca

SEQ ID NO: 8992 - DNA, 2195 bp, Zea Mays
tttccatcttcttgctcagcttcttccccacccacccccaatctattccctaaccctagtcgccatggaccgagacggcgacccggcgttccaccggaacgaggccatctccgccgtgcaggacgtcgaccagtactacggagaggacgacgatttcgacgagctctacaacgacgtcaacgtcggcgacgtcttcctccgcaacgcccatccgccgccgccgcccgcgcagcagaatcaccaccaccaccagcagcagctccctccaacgcccgcgcagcagaatcaccaccagcagctccctccaacgcccgcgcagcagaatcaccaccaccagcagcagctccctcctccgcccctgtcgcagccgctacaggccccgcctcattctctcccgccgccgccgccgcatgctccgccccagcagaaggcctacgcgcctgctgttgcagcgccgggtccgagtcagccgccgcctcagacgaatctcccgccgccaccttctcatcccccatccgcgtccgtgcttctgccgcctcagcaccaccagggcgacgggttccaccgtcctggagggaactacagcggtggtcctgtcgttgtcgccaacggagccggctttggcgggggcgatgtctccggcggcacgacgctgttcgtcggcgacctccactggtggactaccgacgctgatctggaggctgagctcagcaagtatgggacggtgaaggaggtgaggttcttcgacgagaaggccagcggcaagtccaaggggtactgccaggtcgacttctacgaccctggtgccgctgcttcctgcaaggagggcatgaacggccactcttttaatggccgtccatgtgttgtggcattcgcatctcccaacactgtgcgtcgcatgggcgaggcgcaggcgaagtcccagcaggccttggctgtacagacatcatcactgcaaccaaagggtggtagagggggtggtggtttcggaatgcctcatgccggtggtaattacagtggcggacgtggaggtgctgtatcaggaggcggtggtgggaactggggtagaggtggtggtggtagaggccctattggtaatatgaggaacaacagaatgggtccggcagttggccgtggaatcgggaatggcatggttgcgccgccacccccaatgctgcctcagggaggcatgctggggcaggggtttgatcctggttatggcgccatgggaaggatgggtggtgggtttggtaacttccctgttggaccaggtgctgggccgtttcctgggatgatgcagccatttcctccagttgttgcaccacacataaacccggccttctttggtcgtggtgcgatgggggctggtggggtggggatgtggcctgatcccggcatgggggcttggggtgtggaagaacaatcaaattatggggataatgcagtgtctgaccatcaatatggggaagggggaggccatgggaaggagaggccaccggatagggaatggtctggtgcaccagagaagaggctggacagagagaaagatatgcaccctcaacaggagcagccggagaggaggcaccggaatgagcgtgacatgggccgagagagagatcgcaactatgacagagacagggaaagagatcgtgacagagagagagaccgagacagagatagggacagacacagggatgacagagatcgttatggtgatcatcacaggcacagggaccgtgattcagagcgtaatgaagactgggacagggggaggtcatctgggaaacgcagcaggtccagggaagctgaccattctaaacgtagacggatgactgctcaatagtgtagctggctgagctacatctagtgtagaggctatgacgttccagggcagcgacctctttgcacccaggcattgttcagtaacaaccatcaactgcttactgcttgtagctgtgatggctttcactgcatatatctccgcggtctgttgtagcaataatttgagatatatcagcggttggaatctgttatgtgctacacaaagatcgccttccctggatgctagttgtctcatgtttttatgggtcgtcaaatatctaaaaacaaagacacagaaataaatcgaggtgtcgttctgttgctagatggaatattcagtatgtgagactttgtataaatataccggcttgctt

SEQ ID NO: 8993 - DNA, 1124 bp, Zea Mays
aacagcgtcaacttcaacaccagctccacctgctgcacctccgctcccgactccctccgcccacacggatcccgaaaaccctaaccctagacatcgccccgccgccgccatggaccccgccggcgacccggcgttccaccgcaacgaggctatctccgcggtccaggacgtagaccagtactacggagacgacgacgacttcgacgacctatacaacgacgtcaacgtcggggacggcttcctccacgcctcccaccaggcgccaccaccgcggcctccgactcagcaggccccaccgccgcagcagctccatcctccgccacagcagcagccccctccgccaccacagcagcagccgccggcccacaccctcccaccgccgccgccgcatgtcccgccgccgccgcagcaggaatgtttggttggaacctgttcagctgtgcggagatggacttccctggatgatagctgctgcctcttattgtgcgccgtgttaaatgtctgcgtttcccaaagatacaaatgatctatttagtgtgtaattcaggaccgatgcttttgcatccttgttgttgttgttaaagacaccagtatttctgccctagccttgtagggcgatgataaactggtctgtattatgactgtcctatgttcatccttcctctgttgtaacggagaaatgtgttttgacattcttgaggtttatccttcctgagatagctgacaggcagacatagctgcttccttgctaaatgttttgtggttgagaagagtccaggggaccagctgtaacgctccacctgtgttaagaacagtgtagcatatatattaaattttgttgccttatcaggttttagtcgccggcgttatttttttttatgttgcattacagtatcaatttcatcgaccatgcgtcggaggaaacatatctgattgtttcaatgataagaaatattcttaatctttagttctttaccatcaacatttttctttctgttatctgtgccactacgcctcctccctgcaaagctcattcacatttccattcccggctatcacgtgtctttctcattccccctcccacaaagcctattctcattcccacgtgcatcccacgtctagct

SEQ ID NO: 8994 - DNA, 1648 bp, Zea Mays
agacttccctctaattcccaaattttccagctaccgcctctcctgagtcgccgccccatccatcctcctcgtcgatctgctctagcctccaatcccgcttgggcatcgggcccagccaccctcgcgctagtgctaggctgctaaccatagccagtccttcctcctctcgcgtggccgcgcctgcatccggccacgggccaccgcgcacagccctagccagacaccgtgcacgacccagcctagccgcagcggtggaggcgcgcagccccaccccgccccgcacgaccaaatgaacagccgcaaccagcgaggctaggcccgcaacagcaacgcccttcgctcgccagcaacggcagtgcgtccgacatccttcgctcgcctagttgccctgcagatggccaggaccagcaccactgcggtctgcagcagcgcccctaactgttgaggataagaggaggttgacatgggatgacaagttgacaacctgctaattgcaatggtatgatttcctctattatattttgagctgctagaattaaaatgattgtatggatttgagttgtcgatctgctatattttggtcatgtaaaactacgctttgtgattaattagcaagtgtcatcaatgacatttaccggatgttcattgggaatttgggtgaaaaccgtgaaactgattctacatgatgtgattattgttttatttttcctctgcatttactttagagaactttagctgaagctcacttattccatagtctttgtgcttgctgtaagtgtaaggaaacatgccatatcacttgtcacattttcagggttcattttagcactcatttgcatcactagtacaaacagtcaaacggttaaccttcaccaagtatggtgatttcaggcatttcccttatgagcatgaacttgtttgaagtaatgaagttgccatttacagttcaattcactcttcttcaactaccaggaggattgctagcagaattgtttggccgaaggtttgtttagggtaacaaatcatcttgaatatgcacaaagtcagagtgtttatgcttatgaaaatactgatataatatgtcatctgcttatgaagtaggaactgccaactggtatatggttcataagctgaacatatccctatttgttttaacccctttacaagatgaaaatacttcatattacatagaggattgcatggaggcacctggggcctttgtcctccacctcctcaagtgcgtgcttgtcagcggtggtgtggctgcgttcctcgcccttgtgcatctttctcctattacgaccgcgtcctgcgtaatatggatacaatggaagcacttgcggccgagcctagaatagaagaaaaagaatctaagacccgtatagaagcagttgctcaagtattggcttcatcaaaatttattcaaattgttggtcttgtagctgcaaaaaagagaagcaataatgttggtgatgtgacacgtgtacaagcagcaatgttggtcttgtagcatcaagatttggttattgatgaatgatatctatgataaatatatgtgatgatcattgattatagtttaattataatgggttgtgcttcttatgctacattgccaccgatgatagttaaaaaataaaatgggctatat

SEQ ID NO: 8995 - DNA, 1256 bp, Zea Mays
agacttccctctaattcccaaattttccagctaccgcctctcctgagtcgccgccccatccatcctcctcgtcgatctgctctagcctccaatcccgcttgggcatcgggcccagccaccctcgcgctagtgctaggctgctaaccatagccagtccttcctcctctcgcgtggccgcgcctgcatccggccacgggccaccgcgcacagccctagccagacaccgtgcacgacccagcctagccgcagcggtggaggcgcgcagccccaccccgccccgcacgaccaaatgaacagccgcaaccagcgaggctaggcccgcaacagcaacgcccttcgctcgccagcaacggcagtgcgtccgacatccttcgctcgcctagttgccctgcagatggccaggaccagcaccactgcggtctgcagcagcgcccctaactgttgaggataagaggaggttgacatgggatgacaagttgacaacctgctaattgcaatggcatttcccttatgagcatgaacttgtttgaagtaatgaagttgccatttacagttcaattcactcttcttcaactaccaggaggattgctagcagaattgtttggccgaaggtttgtttagggtaacaaatcatcttgaatatgcacaaagtcagagtgtttatgcttatgaaaatactgatataatatgtcatctgcttatgaagtaggaactgccaactggtatatggttcataagctgaacatatccctatttgttttaacccctttacaagatgaaaatacttcatattacatagaggattgcatggaggcacctggggcctttgtcctccacctcctcaagtgcgtgcttgtcagcggtggtgtggctgcgttcctcgcccttgtgcatctttctcctattacgaccgcgtcctgcgtaatatggatacaatggaagcacttgcggccgagcctagaatagaagaaaaagaatctaagacccgtatagaagcagttgctcaagtattggcttcatcaaaatttattcaaattgttggtcttgtagctgcaaaaaagagaagcaataatgttggtgatgtgacacgtgtacaagcagcaatgttggtcttgtagcatcaagatttggttattgatgaatgatatctatgataaatatatgtgatgatcattgattatagtttaattataatgggttgtgcttcttatgctacattgccaccgatgatagttaaaaaataaaatgggctatat

SEQ ID NO: 8996 - DNA, 1845 bp, Zea Mays
agacttccctctaattcccaaattttccagctaccgcctctcctgagtcgccgccccatccatcctcctcgtcgatctgctctagcctccaatcccgcttgggcatcgggcccagccaccctcgcgctagtgctaggctgctaaccatagccagtccttcctcctctcgcgtggccgcgcctgcatccggccacgggccaccgcgcacagccctagccagacaccgtgcacgacccagcctagccgcagcggtggaggcgcgcagccccaccccgccccgcacgaccaaatgaacagccgcaaccagcgaggctaggcccgcaacagcaacgcccttcgctcgccagcaacggcagtgcgtccgacatccttcgctcgcctagttgccctgcagatggccaggaccagcaccactgcggtctgcagcagcgcccctaactgttgaggataagaggaggttgacatgggatgacaagttgacaacctgctaattgcaatgaggattgcatggaggcacctggggcctttgtcctccacctcctcaagtgcgtgcttgtcagcggtggtgtggctgcgttcctcgcccttgtgcatctttctcctattacgaccgcgtcctgcgtaatatggtatggctagcctactcttcacctcactggcatttcatcgaacacgctttatgcttattggcttcatgcctgactgtctatgttagtatcactctacaatagcatgcatattgtgtgtctccttaactgctgagtgcattttttgtccatgcataatgattatggtcaactaggcattagagatttagagtagacccaaattggtaggatcataattgattcagcttcaaaagaatggtatttccatgctcttgttcatatgctatttgtcacatgtgtaattaggcatcgtacaccaacattttgaaatgttagattcttggtgtgtgatgggacggtttcaaggcatgaagattataaaataaatttgccctgttctctaccatcttgaggtattcattatggtacttttctaatttgttagcatttaataattgtttgtttgaatgttactattacatattcccttaggtgatctttagaagtttataatggatttgctgctcggtaggcaacatatgtttcttctggatttgctgccatcttatgaataaacatccagtactgtgtcgttttgatgctgacacacttaccctcaacctcgctttatactccttactactaatatattagaggatcttaaaaaattactgtttttaaccagattaataaatatagtacttatgttttatctcttttgactatctacttttgtctccactccaatatacattgcacatatgcatgccatggtaatatacataaacatggtgtattcatcacctatcctcatgttccaagcttactttttttttagaaattgtatgtatgtacttttactaatcatttgcttggcttctgctaattttttatatcttactgttgataggatacaatggaagcacttgcggccgagcctagaatagaagaaaaagaatctaagacccgtatagaagcagttgctcaagtattggcttcatcaaaatttattcaaattgttggtcttgtagctgcaaaaaagagaagcaataatgttggtgatgtgacacgtgtacaagcagcaatgttggtcttgtagcatcaagatttggttattgatgaatgatatctatgataaatatatgtgatgatcattgattatagtttaattataatgggttgtgcttcttatgctacattgccaccgatgatagttaaaaaataaaatgggctatat

SEQ ID NO: 8997 - DNA, 980 bp, Zea Mays
agacttccctctaattcccaaattttccagctaccgcctctcctgagtcgccgccccatccatcctcctcgtcgatctgctctagcctccaatcccgcttgggcatcgggcccagccaccctcgcgctagtgctaggctgctaaccatagccagtccttcctcctctcgcgtggccgcgcctgcatccggccacgggccaccgcgcacagccctagccagacaccgtgcacgacccagcctagccgcagcggtggaggcgcgcagccccaccccgccccgcacgaccaaatgaacagccgcaaccagcgaggctaggcccgcaacagcaacgcccttcgctcgccagcaacggcagtgcgtccgacatccttcgctcgcctagttgccctgcagatggccaggaccagcaccactgcggtctgcagcagcgcccctaactgttgaggataagaggaggttgacatgggatgacaagttgacaacctgctaattgcaatgatgaaaatacttcatattacatagaggattgcatggaggcacctggggcctttgtcctccacctcctcaagtgcgtgcttgtcagcggtggtgtggctgcgttcctcgcccttgtgcatctttctcctattacgaccgcgtcctgcgtaatatggatacaatggaagcacttgcggccgagcctagaatagaagaaaaagaatctaagacccgtatagaagcagttgctcaagtattggcttcatcaaaatttattcaaattgttggtcttgtagctgcaaaaaagagaagcaataatgttggtgatgtgacacgtgtacaagcagcaatgttggtcttgtagcatcaagatttggttattgatgaatgatatctatgataaatatatgtgatgatcattgattatagtttaattataatgggttgtgcttcttatgctacattgccaccgatgatagttaaaaaataaaatgggctatat

SEQ ID NO: 8998 - DNA, 1014 bp, Zea Mays
agacttccctctaattcccaaattttccagctaccgcctctcctgagtcgccgccccatccatcctcctcgtcgatctgctctagcctccaatcccgcttgggcatcgggcccagccaccctcgcgctagtgctaggctgctaaccatagccagtccttcctcctctcgcgtggccgcgcctgcatccggccacgggccaccgcgcacagccctagccagacaccgtgcacgacccagcctagccgcagcggtggaggcgcgcagccccaccccgccccgcacgaccaaatgaacagccgcaaccagcgaggctaggcccgcaacagcaacgcccttcgctcgccagcaacggcagtgcgtccgacatccttcgctcgcctagttgccctgcagatggccaggaccagcaccactgcggtctgcagcagcgcccctaactgttgaggataagaggaggttgacatgggatgacaagttgacaacctgctaattgcaatgttcaattcactcttcttcaactaccaggaggattgctagcagaattgtttggccgaagaggattgcatggaggcacctggggcctttgtcctccacctcctcaagtgcgtgcttgtcagcggtggtgtggctgcgttcctcgcccttgtgcatctttctcctattacgaccgcgtcctgcgtaatatggatacaatggaagcacttgcggccgagcctagaatagaagaaaaagaatctaagacccgtatagaagcagttgctcaagtattggcttcatcaaaatttattcaaattgttggtcttgtagctgcaaaaaagagaagcaataatgttggtgatgtgacacgtgtacaagcagcaatgttggtcttgtagcatcaagatttggttattgatgaatgatatctatgataaatatatgtgatgatcattgattatagtttaattataatgggttgtgcttcttatgctacattgccaccgatgatagttaaaaaataaaatgggctatat

SEQ ID NO: 8999 - DNA, 1711 bp, Zea Mays
agacttccctctaattcccaaattttccagctaccgcctctcctgagtcgccgccccatccatcctcctcgtcgatctgctctagcctccaatcccgcttgggcatcgggcccagccaccctcgcgctagtgctaggctgctaaccatagccagtccttcctcctctcgcgtggccgcgcctgcatccggccacgggccaccgcgcacagccctagccagacaccgtgcacgacccagcctagccgcagcggtggaggcgcgcagccccaccccgccccgcacgaccaaatgaacagccgcaaccagcgaggctaggcccgcaacagcaacgcccttcgctcgccagcaacggcagtgcgtccgacatccttcgctcgcctagttgccctgcagatggccaggaccagcaccactgcggtctgcagcagcgcccctaactgttgaggataagaggaggttgacatgggatgacaagttgacaacctgctaattgcaatgttcaattcactcttcttcaactaccaggaggattgctagcagaattgtttggccgaagtaggaactgccaactggtatatggttcataagctgaacatatccctatttgttttaacccctttacaagatgaaaatacttcatattacatagaggattgcatggaggcacctggggcctttgtcctccacctcctcaagtgcgtgcttgtcagcggtggtgtggctgcgttcctcgcccttgtgcatctttctcctattacgaccgcgtcctgcgtaatatggcatcgtacaccaacattttgaaatgttagattcttggtgtgtgatgggacggtttcaaggcatgaagattataaaataaatttgccctgttctctaccatcttgaggtattcattatggtacttttctaatttgttagcatttaataattgtttgtttgaatgttactattacatattcccttaggtgatctttagaagtttataatggatttgctgctcggtaggcaacatatgtttcttctggatttgctgccatcttatgaataaacatccagtactgtgtcgttttgatgctgacacacttaccctcaacctcgctttatactccttactactaatatattagaggatcttaaaaaattactgtttttaaccagattaataaatatagtacttatgttttatctcttttgactatctacttttgtctccactccaatatacattgcacatatgcatgccatggtaatatacataaacatggtgtattcatcacctatcctcatgttccaagcttactttttttttagaaattgtatgtatgtacttttactaatcatttgcttggcttctgctaattttttatatcttactgttgataggatacaatggaagcacttgcggccgagcctagaatagaagaaaaagaatctaagacccgtatagaagcagttgctcaagtattggcttcatcaaaatttattcaaattgttggtcttgtagctgcaaaaaagagaagcaataatgttggtgatgtgacacgtgtacaagcagcaatgttggtcttgtagcatcaagatttggttattgatgaatgatatctatgataaatatatgtgatgatcattgattatagtttaattataatgggttgtgcttcttatgctacattgccaccgatgatagttaaaaaataaaatgggctatat

SEQ ID NO: 9000 - DNA, 746 bp, Zea Mays
cgcaccggcaccgcctataaatacttgtggcagccctcgccgagctgctccttccactgcaggttcctaacccccacccacctcgcccaaattgcaaccttccccgagtgctccaggtcccgtggccggcccccagatcctctccaatcccaatccaagtatcgaacggatcccatcggtggcgctcgagcgagcgagtgcggccggaaccgagcgaagatgggcatctcgagcatgccggcgcccgaggacagcctgctggggttcgtgctgtacaacacgacggagtcggtggtgcagcggctcccctgcggccacctcttccaccgcgcatgcctcgagacctggatcgactacgaccacgccacctgcccgctgtgccgccaccgcctcctgccccccgccgctgccgccgacgaggtgccccggattgcctgattagcgccctaggaattgagagtaggcgtagcactctgcacctcgcagcagcagtgtctctgtacaggttttttttttcttttcctttttgttcgggggagagagaggacagaacggagattgaaggaagaaaatggtggcaacaaagctgttcccctttcgtttctccgaagctctctgttgtctttattcattccaaaagtataatctactcgtatgaaccaagtactaaaatcctgcttgcttacgcaccaatctaacaagagaaatctggagttggttgcccttgcctcttctcttgatctgag

SEQ ID NO: 9001 - DNA, 1410 bp, Zea Mays
attttgttcaccctacatataaactatgcttgctcactcacaattcacaatgtagaactatttcccaacaatctatcgctcactcactgtgagctaaaatgtattcaagaatgcatcgtgtcagacctgagttctaataccacttgaaaccgaatcatcgatatatgacacgttcgctaggtcgcctgcaacgcggcgcatccacacgcacacaatagtggggttttaggtccgttggagtaacaccccaccaaaacctagaccattcgaagattacactctcaaccatatttaccgacctacaactatcaacgttcatcaaatccccatagttatttatcacttgcttcgccccgctgtcgctccacgtcgcgctcagcctccttgccgccggctcgggcggcgccacgcgcgaccaactgctggctacgctcggcggaggcgatgggccggacgcggccgacagcctgcacgctctcgccgagcaggtggcgcggatcgccttcgcggacgccgtcttcgccgacgcgtcgctgaagctgaggccggccttcgaggaggtcgccgtggggaagtacggcgccgagatccactccgtcgagttccagaaaaaggaggctggttctcggcaacgcgctcacttcagaggagcctgggcgaggaagctggacgcgtcggaaacaagagacggcgagttccacctcctcgacgggagctcggtcgaggcgccattcatgtccagcacagacgacgaccagtacattgcatcgtacggagacttgctcaggctcccgtacgagcaaggcggtgacaagcactcaagcagaggcagttctccatgtacatcctcctcccggaagcacgagactgcctccgggccttggcccggccgagaagctgagcgccgagcctgggttcctggacaagcacatcccaacgaggaaggtcccagttggggagaccaaggtccccaggttcaaggtgtccttcgtgttcgaagcgtccgagctgctcaataaggctctggggctctggctgccgtttagcgccgaagaagcagggctcgtcgtcggtgatccacccatgttgtatgtctcctccgttttccacaggtcggttgtggaggttcacgaggaagggaccgaggctgctgcggcatcggctgtcctgatgatggtggtgggtgcttcacttgggagcagcacggattgcagtttcatggcggatcaccctttcgtcttcctgatccgagaagacacaccaccggtgtggtgctgttcgtcggccatgtggtcaatcccctgctcgcttgaacgcataataagtggctttgtcttgtctgaaacaaacaaaggttgtgggatgatcagatgatgcattgtacttcgctctatgacgacgatgatcctt

SEQ ID NO: 9002 - DNA, 3032 bp, Zea Mays
attttgttcaccctacatataaactatgcttgctcactcacaattcacaatgtagaactatttcccaacaatctatcgctcactcactgtgagctaaaatgtattcaagaatgcatcgtgtcagacctgagttctaataccacttgaaaccgaatcatcgatatatgacacgttcgctaggtcgcctgcaacgcggcgcatccacacgcacacaatagtggggttttaggtccgttggagtaacaccccaccaaaacctagaccattcgaagattacactctcaaccatatttaccgacctacaactatcaacgttcatcaaatccccatagttatttatcacttgcttcgccccgctgtcgctccacgtcgcgctcagcctccttgccgccggctcgggcggcgccacgcgcgaccaactgctggctacgctcggcggaggcgatgggccggacgcggccgacagcctgcacgctctcgccgagcaggtggcgcggatcgccttcgcggacgccgtcttcgccgacgcgtcgctgaagctgaggccggccttcgaggaggtcgccgtggggaagtacggcgccgagatccactccgtcgagttccagaaaaagacctggacgtagcgaaatctagatctgccactggacgcagcgctgctccgcttcctggcttcatgctggtctccgtgctgttccgcttcggcgcttcctcctcttctccacttcggcagttcctgcttgtctccacttcggcgttgctgagctgctccgcttcggcgcttcttgctcgtctccacttcggtgctgctgagctgctccgctggcggactggacgcgactacgcgacgccccgacgcaggcacgcggctggaggctgtaggcggagacacggcttgtactgggcctattcgcttgtactaggccgcgaccggggctgcagcccgggcagccccggtcgtagatccgcccctggtcgtcaggatgcagaagctgctgctcgagtgaacgcatgggcagagagaaagccaagtcaggtacagtttgttggatcttttataggcctgacctatttattgaataaactatatggtgtgtaatagtggagaataccaatagtaccatattggaagtccaagggtcttttgacttgacttatatgatgagaattattccacctaacttgagaagtcaagaaatggataagggcgtgccacgcgcgccgctgccgccggagggccgggctccggcgtggcgtggcgaggcaggcgagcgggcgggcaggcaggcaggcgagcagacgtggttgtgttagttgcatcagctgcttgtctcttggcgtgcaacatgcaacccttctccttcagcttctctctgcgagaggttaagtagaggagaacccctggcatttggtacacgtgaacataaccatttcagagtcacagcccagccgcaagtgagattattcccatcccctggcatttggtacacgtgaacataaccatttcagagtcacagcccagccgcaagtgagagtattcccatctcgtgactctgtgcgtacagaaaaactcacattaggtttagggataatcaggctcgaactgatgacttccaccacgtcaaggtgacactctaccgctgacttatatcccttccccgtcccatcgagaaagagaattaacgaatcctaaggcaaaggggcgagaaacgcaaggccactcttcctccgggctttctttccgcactatcttcttcctggcgacatgacaagggaagctggacaaggatttggatcatcagagcgcatgagagggtatgatcagtttatttccttactgttttacgttctgcagattatatatgtttcatatattcatctgtgctgttttatatgtagcaatgattttatcttatctgttctgtcttattataatatgatatatctgtttgttttaattttacagtcatgctgtttatattactatctgtttagtttcaattgttcagtcattttatatgtttatcatatttatatgatttatatgattcatatgctttgtgttcttattatccacattgttatggatatttttgagatcttgatttctatgattaattatcttttatatgttatcatcataatgttaatttatagaattaaaatgatacggaaaatgcctataattataacacggtcaagggctgctgtcaccgggctccgtcgacgataccaggaggctggttctcggcaacgcgctcacttcagaggagcctgggcgaggaagctggacgcgtcggaaacaagagacggcgagttccacctcctcgacgggagctcggtcgaggcgccattcatgtccagcacagacgacgaccagtacattgcatcgtacggagacttgctcaggctcccgtacgagcaaggcggtgacaagcactcaagcagaggcagttctccatgtacatcctcctcccggaagcacgagactgcctccgggccttggcccggccgagaagctgagcgccgagcctgggttcctggacaagcacatcccaacgaggaaggtcccagttggggagaccaaggtccccaggttcaaggtgtccttcgtgttcgaagcgtccgagctgctcaataaggctctggggctctggctgccgtttagcgccgaagaagcagggctcgtcgtcggtgatccacccatgttgtatgtctcctccgttttccacaggtcggttgtggaggttcacgaggaagggaccgaggctgctgcggcatcggctgtcctgatgatggtggtgggtgcttcacttgggagcagcacggattgcagtttcatggcggatcaccctttcgtcttcctgatccgagaagacacaccaccggtgtggtgctgttcgtcggccatgtggtcaatcccctgctcgcttgaacgcataataagtggctttgtcttgtctgaaacaaacaaaggttgtgggatgatcagatgatgcattgtacttcgctctatgacgacgatgatcctt

SEQ ID NO: 9003 - DNA, 2478 bp, Zea Mays
attttgttcaccctacatataaactatgcttgctcactcacaattcacaatgtagaactatttcccaacaatctatcgctcactcactgtgagctaaaatgtattcaagaatgcatcgtgtcagacctgagttctaataccacttgaaaccgaatcatcgatatatgacacgttcgctaggtcgcctgcaacgcggcgcatccacacgcacacaatagtggggttttaggtccgttggagtaacaccccaccaaaacctagaccattcgaagattacactctcaaccatatttaccgacctacaactatcaacgttcatcaaatccccatagttatttatcacttgcttcgccccgctgtcgctccacgtcgcgctcagcctccttgccgccggctcgggcggcgccacgcgcgaccaactgctggctacgctcggcggaggcgatgggccggacgcggccgacagcctgcacgctctcgccgagcaggtggcgcggatcgccttcgcggacgccgtcttcgccgacgcgtcgctgaagctgaggccggccttcgaggaggtcgccgtggggaagtacggcgccgagatccactccgtcgagttccagaaaaaggtccgtctgatcaccacgcttcgctcgcaaacatctggtaacaaattaaagctgtatacatatgtactagattacaaatgtgtcgtactcagcggtggcggatccaggattgatccaagaagggcctaataagctaaggctataaaaaatataattaatgtttaatataacacaagaaacaagatataatctaaacatttaagaaatatgtaacccaaaaataaatcgatacgaattctaggaatacaataattaatacatatcgttcatgagttgatgttgcgagataaatttatcttccgagttcttaagccttaaaaatgcttcaaaatcttttcatcttaaatatctacaaacatatttttagctagtgaattgtattattacagtgaccgatctcgagtgaaatatatcatattcctacctttataaaacaaacaggaacaacttgagtcggtcggtcggccagatccaaaaccctggggaaccatagcgggtttaactgaagagaggaaaaataaaataattctggatttttttggcatgaattgtgggctagattggatccgattcaatccagattaaaccatagtctaatttaactgaatgaggctttaactggtggctggtgcttggctttctggagacctggacgtagcgaaatctagatctgccactggacgcagcgctgctccgcttcctggcttcatgctggtctccgtgctgttccgcttcggcgcttcctcctcttctccacttcggcagttcctgcttgtctccacttcggcgttgctgagctgctccgcttcggcgcttcttgctcgtctccacttcggtgctgctgagctgctccgctggcggactggacgcgactacgcgacgccccgacgcaggcacgcggctggaggctgtaggcggagacacggcttgtactgggcctattcgcttgtactaggccgcgaccggggctgcagcccgggcagccccggtcgtagatccgcccctggtcgtcaggatgcagaagctgctgctcgagtgaacgcatgggcagagagaaagccaagtcaggaggctggttctcggcaacgcgctcacttcagaggagcctgggcgaggaagctggacgcgtcggaaacaagagacggcgagttccacctcctcgacgggagctcggtcgaggcgccattcatgtccagcacagacgacgaccagtacattgcatcgtacggagacttgctcaggctcccgtacgagcaaggcggtgacaagcactcaagcagaggcagttctccatgtacatcctcctcccggaagcacgagactgcctccgggccttggcccggccgagaagctgagcgccgagcctgggttcctggacaagcacatcccaacgaggaaggtcccagttggggagaccaaggtccccaggttcaaggtgtccttcgtgttcgaagcgtccgagctgctcaataaggctctggggctctggctgccgtttagcgccgaagaagcagggctcgtcgtcggtgatccacccatgttgtatgtctcctccgttttccacaggtcggttgtggaggttcacgaggaagggaccgaggctgctgcggcatcggctgtcctgatgatggtggtgggtgcttcacttgggagcagcacggattgcagtttcatggcggatcaccctttcgtcttcctgatccgagaagacacaccaccggtgtggtgctgttcgtcggccatgtggtcaatcccctgctcgcttgaacgcataataagtggctttgtcttgtctgaaacaaacaaaggttgtgggatgatcagatgatgcattgtacttcgctctatgacgacgatgatcctt

SEQ ID NO: 9004 - DNA, 3257 bp, Zea Mays
attttgttcaccctacatataaactatgcttgctcactcacaattcacaatgtagaactatttcccaacaatctatcgctcactcactgtgagctaaaatgtattcaagaatgcatcgtgtcagacctgagttctaataccacttgaaaccgaatcatcgatatatgacacgttcgctaggtcgcctgcaacgcggcgcatccacacgcacacaatagtggggttttaggtccgttggagtaacaccccaccaaaacctagaccattcgaagattacactctcaaccatatttaccgacctacaactatcaacgttcatcaaatccccatagttatttatcacttgcttcgccccgctgtcgctccacgtcgcgctcagcctccttgccgccggctcgggcggcgccacgcgcgaccaactgctggctacgctcggcggaggcgatgggccggacgcggccgacagcctgcacgctctcgccgagcaggtggcgcggatcgccttcgcggacgccgtcttcgccgacgcgtcgctgaagctgaggccggccttcgaggaggtcgccgtggggaagtacggcgccgagatccactccgtcgagttccagaaaaaggtccgtctgatcaccacgcttcgctcgcaaacatctggtaacaaattaaagctgtatacatatgtactagattacaaatgtgtcgtactcagcggtggcggatccaggattgatccaagaagggcctaataagctaaggctataaaaaatataattaatgtttaatataacacaagaaacaagatataatctaaacatttaagaaatatgtaacccaaaaataaatcgatacgaattctaggaatacaataattaatacatatcgttcatgagttgatgttgcgagataaatttatcttccgagttcttaagccttaaaaatgcttcaaaatcttttcatcttaaatatctacaaacatatttttagctagtgaattgtattattacagtgaccgatctcgagtgaaatatatcatattcctacctttataaaacaaacaggaacaacttgagtcggtcggtcggccagatccaaaaccctggggaaccatagcgggtttaactgaagagaggaaaaataaaataattctggatttttttggcatgaattgtgggctagattggatccgattcaatccagattaaaccatagtctaatttaactgaatgaggctttaactggtggctggtgcttggctttctggagacctggacgtagcgaaatctagatctgccactggacgcagcgctgctccgcttcctggcttcatgctggtctccgtgctgttccgcttcggcgcttcctcctcttctccacttcggcagttcctgcttgtctccacttcggcgttgctgagctgctccgcttcggcgcttcttgctcgtctccacttcggtgctgctgagctgctccgctggcggactggacgcgactacgcgacgccccgacgcaggcacgcggctggaggctgtaggcggagacacggcttgtactgggcctattcgcttgtactaggccgcgaccggggctgcagcccgggcagccccggtcgtagatccgcccctggtcgtcaggatgcagaagctgctgctcgagtgaacgcatgggcagagagaaagccaagtcaggtacagtttgttggatcttttataggcctgacctatttattgaataaactatatggtgtgtaatagtggagaataccaatagtaccatattggaagtccaagggtcttttgacttgacttatatgatgagaattattccacctaacttgagaagtcaagaaatggataagggcgtgccacgcgcgccgctgccgccggagggccgggctccggcgtggcgtggcgaggcaggcgagcgggcgggcaggcaggcaggcgagcagacgtggttgtgttagttgcatcagctgcttgtctcttggcgtgcaacatgcaacccttctccttcagcttctctctgcgagaggttaagtagaggagaacccctggcatttggtacacgtgaacataaccatttcagagtcacagcccagccgcaagtgagattattcccatcccctggcatttggtacacgtgaacataaccatttcagagtcacagcccagccgcaagtgagagtattcccatctcgtgactctgtgcgtacagaaaaactcacattaggtttagggataatcaggctcgaactgatgacttccaccacgtcaaggtgacactctaccgctgacttatatcccttccccgtcccatcgagaaagagaattaacgaatcctaaggcaaaggggcgagaaacgcaaggccactcttcctccgggctttctttccgcactatcttcttcctggcgacatgacaagggaagctggacaaggatttggatcatcagagcgcatgagagggaggctggttctcggcaacgcgctcacttcagaggagcctgggcgaggaagctggacgcgtcggaaacaagagacggcgagttccacctcctcgacgggagctcggtcgaggcgccattcatgtccagcacagacgacgaccagtacattgcatcgtacggagacttgctcaggctcccgtacgagcaaggcggtgacaagcactcaagcagaggcagttctccatgtacatcctcctcccggaagcacgagactgcctccgggccttggcccggccgagaagctgagcgccgagcctgggttcctggacaagcacatcccaacgaggaaggtcccagttggggagaccaaggtccccaggttcaaggtgtccttcgtgttcgaagcgtccgagctgctcaataaggctctggggctctggctgccgtttagcgccgaagaagcagggctcgtcgtcggtgatccacccatgttgtatgtctcctccgttttccacaggtcggttgtggaggttcacgaggaagggaccgaggctgctgcggcatcggctgtcctgatgatggtggtgggtgcttcacttgggagcagcacggattgcagtttcatggcggatcaccctttcgtcttcctgatccgagaagacacaccaccggtgtggtgctgttcgtcggccatgtggtcaatcccctgctcgcttgaacgcataataagtggctttgtcttgtctgaaacaaacaaaggttgtgggatgatcagatgatgcattgtacttcgctctatgacgacgatgatcctt

SEQ ID NO: 9005 - DNA, 3608 bp, Zea Mays
attttgttcaccctacatataaactatgcttgctcactcacaattcacaatgtagaactatttcccaacaatctatcgctcactcactgtgagctaaaatgtattcaagaatgcatcgtgtcagacctgagttctaataccacttgaaaccgaatcatcgatatatgacacgttcgctaggtcgcctgcaacgcggcgcatccacacgcacacaatagtggggttttaggtccgttggagtaacaccccaccaaaacctagaccattcgaagattacactctcaaccatatttaccgacctacaactatcaacgttcatcaaatccccatagttatttatcacttgcttcgccccgctgtcgctccacgtcgcgctcagcctccttgccgccggctcgggcggcgccacgcgcgaccaactgctggctacgctcggcggaggcgatgggccggacgcggccgacagcctgcacgctctcgccgagcaggtggcgcggatcgccttcgcggacgccgtcttcgccgacgcgtcgctgaagctgaggccggccttcgaggaggtcgccgtggggaagtacggcgccgagatccactccgtcgagttccagaaaaagattacaaatgtgtcgtactcagcggtggcggatccaggattgatccaagaagggcctaataagctaaggctataaaaaatataattaatgtttaatataacacaagaaacaagatataatctaaacatttaagaaatatgtaacccaaaaataaatcgatacgaattctaggaatacaataattaatacatatcgttcatgagttgatgttgcgagataaatttatcttccgagttcttaagccttaaaaatgcttcaaaatcttttcatcttaaatatctacaaacatatttttagctagtgaattgtattattacagtgaccgatctcgagtgaaatatatcatattcctacctttataaaacaaacaggaacaacttgagtcggtcggtcggccagatccaaaaccctggggaaccatagcgggtttaactgaagagaggaaaaataaaataattctggatttttttggcatgaattgtgggctagattggatccgattcaatccagattaaaccatagtctaatttaactgaatgaggctttaactggtggctggtgcttggctttctggagacctggacgtagcgaaatctagatctgccactggacgcagcgctgctccgcttcctggcttcatgctggtctccgtgctgttccgcttcggcgcttcctcctcttctccacttcggcagttcctgcttgtctccacttcggcgttgctgagctgctccgcttcggcgcttcttgctcgtctccacttcggtgctgctgagctgctccgctggcggactggacgcgactacgcgacgccccgacgcaggcacgcggctggaggctgtaggcggagacacggcttgtactgggcctattcgcttgtactaggccgcgaccggggctgcagcccgggcagccccggtcgtagatccgcccctggtcgtcaggatgcagaagctgctgctcgagtgaacgcatgggcagagagaaagccaagtcaggtacagtttgttggatcttttataggcctgacctatttattgaataaactatatggtgtgtaatagtggagaataccaatagtaccatattggaagtccaagggtcttttgacttgacttatatgatgagaattattccacctaacttgagaagtcaagaaatggataagggcgtgccacgcgcgccgctgccgccggagggccgggctccggcgtggcgtggcgaggcaggcgagcgggcgggcaggcaggcaggcgagcagacgtggttgtgttagttgcatcagctgcttgtctcttggcgtgcaacatgcaacccttctccttcagcttctctctgcgagaggttaagtagaggagaacccctggcatttggtacacgtgaacataaccatttcagagtcacagcccagccgcaagtgagattattcccatcccctggcatttggtacacgtgaacataaccatttcagagtcacagcccagccgcaagtgagagtattcccatctcgtgactctgtgcgtacagaaaaactcacattaggtttagggataatcaggctcgaactgatgacttccaccacgtcaaggtgacactctaccgctgacttatatcccttccccgtcccatcgagaaagagaattaacgaatcctaaggcaaaggggcgagaaacgcaaggccactcttcctccgggctttctttccgcactatcttcttcctggcgacatgacaagggaagctggacaaggatttggatcatcagagcgcatgagagggtatgatcagtttatttccttactgttttacgttctgcagattatatatgtttcatatattcatctgtgctgttttatatgtagcaatgattttatcttatctgttctgtcttattataatatgatatatctgtttgttttaattttacagtcatgctgtttatattactatctgtttagtttcaattgttcagtcattttatatgtttatcatatttatatgatttatatgattcatatgctttgtgttcttattatccacattgttatggatatttttgagatcttgatttctatgattaattatcttttatatgttatcatcataatgttaatttatagaattaaaatgatacggaaaatgcctataattataacacggtcaagggctgctgtcaccgggctccgtcgacgataccaggaggctggttctcggcaacgcgctcacttcagaggagcctgggcgaggaagctggacgcgtcggaaacaagagacggcgagttccacctcctcgacgggagctcggtcgaggcgccattcatgtccagcacagacgacgaccagtacattgcatcgtacggagacttgctcaggctcccgtacgagcaaggcggtgacaagcactcaagcagaggcagttctccatgtacatcctcctcccggaagcacgagactgcctccgggccttggcccggccgagaagctgagcgccgagcctgggttcctggacaagcacatcccaacgaggaaggtcccagttggggagaccaaggtccccaggttcaaggtgtccttcgtgttcgaagcgtccgagctgctcaataaggctctggggctctggctgccgtttagcgccgaagaagcagggctcgtcgtcggtgatccacccatgttgtatgtctcctccgttttccacaggtcggttgtggaggttcacgaggaagggaccgaggctgctgcggcatcggctgtcctgatgatggtggtgggtgcttcacttgggagcagcacggattgcagtttcatggcggatcaccctttcgtcttcctgatccgagaagacacaccaccggtgtggtgctgttcgtcggccatgtggtcaatcccctgctcgcttgaacgcataataagtggctttgtcttgtctgaaacaaacaaaggttgtgggatgatcagatgatgcattgtacttcgctctatgacgacgatgatcctt

SEQ ID NO: 9006 - DNA, 2746 bp, Zea Mays
actggaaaggccgagttttagctccggttccagaaaaaaactcggaaccagatctcaaaccacacaatccacggctgctccttcgctggacaccgagaaaccgtcaaggcgcaacgaacgaacttgcagcaaaatttcccggagaccctcgagcaaaaatctggtctggttcaaactcgccttttgcctgtgggcggccgcgttcttacgggccatgtcgcagcgcgacggcgacctcgccgccggagctcatccggaagaaggagaccgccacgccgttcgaatggatggctccgacgatgagctggaccaacctacgagtaaagcgactgagcacatcacggctatggacgtgaggaaggggaaggatatgcaagggatcccctggaacgtgatgccgactacaagggacaagtacaggcagtcacggctgcaggggtacgccaactttgagaacgtgcctaattccggaaggctttctgagaaggaatgcatgcctgcagagaaaggccaactctactacgagtttcagcacagcacgaggtcggtgaaaccgaccatccgtcatttccaggcgagccatggttttcagtgttccttgttccgaatgtttgttttacttggttagttcattctacatacagccagccacccttccatgcaaccgtgcaaacttctaatctaggccacatcatgttgattcaagtgacacatgagcgtggataattttacatttaaccacccgttgctaatcacactttttcaaatcccctcccactctctccgcacgtccccttggatcaacatcatgtggttcagattagaagtttgcacagtttcacggagaggttagtttgcaccatatacgttccatgattgagatagtttatctgctctcctttttcccccttatctgttgaaggtttgtcaatcatgtcttgaagttgaattattctaggatattgttgattgcttggcatgtttctcatgtctaactagaaagatgaggatacttatcttgatgaacagtagtagtagtagctgttgtaactagtaaactacaaacgctctttgagtagtaccaccaagagcctagcctcctctgataccctccatatctatgtatccgatcatcggcaattcagttaaatttgcaatttttttggaatcctaacacagggacatacacaaattgaagtattctaaaaaatggatccacatttctgtttcacattgggagtcagctgccctattttaaggcagctacaatgcaggaccttgtagctctgtacatatgttataccgaaaagtcagatgccctgtcaagtcctgcgaatttgttaagcttgttccgtccctgtcttgcagttgaggaatttagtgtgggcaacaacaaggcacgatgtgtatcttatgtcaaacttttctgtgcttcattggtcagcaatgacttataagaagcaagaagtcattaatcttcaaggacatgtgacaccgtgcgagaagcaccatcggaatcactacgagggtttttatcagactccagtcagtactttggcggtgaagcataacttgcttgttactggtgggtttcatggggagataatatgcaagtttctggatcgtcaaggagtaagctactgttgcaagacaacaaatgatgacgacggtattactaattctctggagatatttgagaagcctagtggttctctgcacttccttgcgtcaaacaatgattgtggacttagagactttgacatggaaaagtttcgaatatgcaaccacttccattttgcttggcctgtgaatatggtaaacttgctgctattgtgggggacagtcctgatggacttctgattgacgctaattcaggaaagacggttcacaaactccatggccatttggattactcctttgcgtcggcatggaatccagacggccgaacattcgccacggggaaccaagacaagacgtgcagggtctgggacgtccgcaatctctccagatcagttgttgtattgggtggcaacatcggagccgtcaggtcgattcgctacacgccagacgggaagttcatggcgatgactgaacccgcggacttcatccacatcttcgatgttgagagtgggtacagcaggaagcaggagctggacttctttggtgagatcgcaggcatatcgttcagtcctgacactgaagctctctttgtcggtgtgcatgatcgcttcttcaactgctgcctcctccagttcagtcggcgacggttctactcgtaccttgattcaacactgtgagcttgtgctggtgtagacctgtgaggtcgacatcacaggctttagaagcaagaaagttgtggctatgttcataggtgttgctgtgaagaaactggagaacgatacgtttacttttgctgaacaagctgtaggtattcggcgacccatcttttctgggtgatcagagtctcaattaagattcccgctttctgttatctatcccatacttacaccgtacgactacgattagatcatcctatcctacgggcgagacgtgagtctacgtaattgattgagacctgctgagggctttgctttcacatgcatgcatatgtaatcatcgatcatggaattgctaataagctgtctgtttgaaactcagtttcagttattccttcttgttaccagcacttctctgctgtttcagtcagttacttaattggaggatcaaccagcattttaaaaacaca

SEQ ID NO: 9007 - DNA, 2041 bp, Zea Mays
actggaaaggccgagttttagctccggttccagaaaaaaactcggaaccagatctcaaaccacacaatccacggctgctccttcgctggacaccgagaaaccgtcaaggcgcaacgaacgaacttgcagcaaaatttcccggagaccctcgagcaaaaatctggtctggttcaaactcgccttttgcctgtgggcggccgcgttcttacgggccatgtcgcagcgcgacggcgacctcgccgccggagctcatccggaagaaggagaccgccacgccgttcgaatggatggctccgacgatgagctggaccaacctacgagtaaagcgactgagcacatcacggctatggacgtgaggaaggggaaggatatgcaagggatcccctggaacgtgatgccgactacaagggacaagtacaggcagtcacggctgcaggggaatgcatgcctgcagagaaaggccaactctactacgagtttcagcacagcacgagttgaggaatttagtgtgggcaacaacaaggcacgatgtgtatcttatgtcaaacttttctgtgcttcattggtcagcaatgacttataagaagcaagaagtcattaatcttcaaggacatgtgacaccgtgcgagaagcaccatcggaatcactacgagggtttttatcagactccagtcagtactttggcggtgaagcataacttgcttgttactggtgggtttcatggggagataatatgcaagtttctggatcgtcaaggagtaagctactgttgcaagacaacaaatgatgacgacggtattactaattctctggagatatttgagaagcctagtggttctctgcacttccttgcgtcaaacaatgattgtggacttagagactttgacatggaaaagtttcgaatatgcaaccacttccattttgcttggcctgtgaatgtaagcctgcagtgcttgttgaattttcaattttctatctaaatctagctgctgaagtcaatgctcatgttttgtcaaagagcatgtcttaaataaggacagaaacacattactgcatcctgtgttggcccctgttttaattttctgcagcatacatcgttgagcccagatggtaaacttgctgctattgtgggggacagtcctgatggacttctgattgacgctaattcaggaaagacggttcacaaactccatggccatttggattactcctttgcgtcggcatggaatccagacggccgaacattcgccacggggaaccaagacaagacgtgcagggtctgggacgtccgcaatctctccagatcagttgttgtattgggtggcaacatcggagccgtcaggtcgattcgctacacgccagacgggaagttcatggcgatgactgaacccgcggacttcatccacatcttcgatgttgagagtgggtacagcaggaagcaggagctggacttctttggtgagatcgcaggcatatcgttcagtcctgacactgaagctctctttgtcggtgtgcatgatcgcttcttcaactgctgcctcctccagttcagtcggcgacggttctactcgtaccttgattcaacactgtgagcttgtgctggtgtagacctgtgaggtcgacatcacaggctttagaagcaagaaagttgtggctatgttcataggtgttgctgtgaagaaactggagaacgatacgtttacttttgctgaacaagctgtaggtattcggcgacccatcttttctgggtgatcagagtctcaattaagattcccgctttctgttatctatcccatacttacaccgtacgactacgattagatcatcctatcctacgggcgagacgtgagtctacgtaattgattgagacctgctgagggctttgctttcacatgcatgcatatgtaatcatcgatcatggaattgctaataagctgtctgtttgaaactcagtttcagttattccttcttgttaccagcacttctctgctgtttcagtcagttacttaattggaggatcaaccagcattttaaaaacaca

SEQ ID NO: 9008 - DNA, 1889 bp, Zea Mays
ccacatcgtactggaaaggccgagttttagctccggttccagaaaaaaactcggaaccagatctcaaaccacacaatccacggctgctccttcgctggacaccgagaaaccgtcaaggcgcaacgaacgaacttgcagcaaaatttcccggagaccctcgagcaaaaatctgcgcgacggcgacctcgccgccggagctcatccggaagaaggagaccgccacgccgttcgaatggatggctccgacgatgagctggaccaacctacgagtaaagcgactgagcacatcacggctatggacgtgaggaaggggaaggatatgcaagggatcccctggaacgtgatgccgactacaagggacaagtacaggcagtcacggctgcaggggtacgccaactttgagaacgtgcctaattccggaaggctttctgagaaggaatgcatgcctgcagagaaaggccaactctactacgagtttcagcacagcacgagttgaggaatttagtgtgggcaacaacaaggcacgatgtgtatcttatgtcaaacttttctgtgcttcattggtcagcaatgacttataagaagcaagaagtcattaatcttcaaggacatgtgacaccgtgcgagaagcaccatcggaatcactacgagggtttttatcagactccagtcagtactttggcggtgaagcataacttgcttgttactggtgggtttcatggggagataatatgcaagtttctggatcgtcaaggagtaagctactgttgcaagacaacaaatgatgacgacggtattactaattctctggagatatttgagaagcctagtggttctctgcacttccttgcgtcaaacaatgattgtggacttagagactttgacatggaaaagtttcgaatatgcaaccacttccattttgcttggcctgtgaatcatacatcgttgagcccagatggtaaacttgctgctattgtgggggacagtcctgatggacttctgattgacgctaattcaggaaagacggttcacaaactccatggccatttggattactcctttgcgtcggcatggaatccagacggccgaacattcgccacggggaaccaagacaagacgtgcagggtctgggacgtccgcaatctctccagatcagttgttgtattgggtggcaacatcggagccgtcaggtcgattcgctacacgccagacgggaagttcatggcgatgactgaacccgcggacttcatccacatcttcgatgttgagagtgggtacagcaggaagcaggagctggacttctttggtgagatcgcaggcatatcgttcagtcctgacactgaagctctctttgtcggtgtgcatgatcgcttcttcaactgctgcctcctccagttcagtcggcgacggttctactcgtaccttgattcaacactgtgagcttgtgctggtgtagacctgtgaggtcgacatcacaggctttagaagcaagaaagttgtggctatgttcataggtgttgctgtgaagaaactggagaacgatacgtttacttttgctgaacaagctgtaggtattcggcgacccatcttttctgggtgatcagagtctcaattaagattcccgctttctgttatctatcccatacttacaccgtacgactacgattagatcatcctatcctacgggcgagacgtgagtctacgtaattgattgagacctgctgagggctttgctttcacatgcatgcatatgtaatcatcgatcatggaattgctaataagctgtctgtttgaaactcagtttcagttattccttcttgttaccagcacttctctgctgtttcagtcagttacttaattggaggatcaaccagcattttaaaaacaca

SEQ ID NO: 9009 - DNA, 1903 bp, Zea Mays
cttccttgtagtatttcagtgggcatttgccaccacatcgtactggaaaggccgagttttagctccggttccagaaaaaaactcggaaccagatctcaaaccacacaatccacggctgctccttcgctggacaccgagaaaccgtcaaggcgcaacgaacgaacttgcagcaaaatttcccggagaccctcgagcaaaaatctgcgcgacggcgacctcgccgccggagctcatccggaagaaggagaccgccacgccgttcgaatggatggctccgacgatgagctggaccaacctacgagtaaagcgactgagcacatcacggctatggacgtgaggaaggggaaggatatgcaagggatcccctggaacgtgatgccgactacaagggacaagtacaggcagtcacggctgcaggggaatgcatgcctgcagagaaaggccaactctactacgagtttcagcacagcacgaggtcggtgaaaccgaccatccgtcatttccagttgaggaatttagtgtgggcaacaacaaggcacgatgtgtatcttatgtcaaacttttctgtgcttcattggtcagcaatgacttataagaagcaagaagtcattaatcttcaaggacatgtgacaccgtgcgagaagcaccatcggaatcactacgagggtttttatcagactccagtcagtactttggcggtgaagcataacttgcttgttactggtgggtttcatggggagataatatgcaagtttctggatcgtcaaggagtaagctactgttgcaagacaacaaatgatgacgacggtattactaattctctggagatatttgagaagcctagtggttctctgcacttccttgcgtcaaacaatgattgtggacttagagactttgacatggaaaagtttcgaatatgcaaccacttccattttgcttggcctgtgaatcatacatcgttgagcccagatggtaaacttgctgctattgtgggggacagtcctgatggacttctgattgacgctaattcaggaaagacggttcacaaactccatggccatttggattactcctttgcgtcggcatggaatccagacggccgaacattcgccacggggaaccaagacaagacgtgcagggtctgggacgtccgcaatctctccagatcagttgttgtattgggtggcaacatcggagccgtcaggtcgattcgctacacgccagacgggaagttcatggcgatgactgaacccgcggacttcatccacatcttcgatgttgagagtgggtacagcaggaagcaggagctggacttctttggtgagatcgcaggcatatcgttcagtcctgacactgaagctctctttgtcggtgtgcatgatcgcttcttcaactgctgcctcctccagttcagtcggcgacggttctactcgtaccttgattcaacactgtgagcttgtgctggtgtagacctgtgaggtcgacatcacaggctttagaagcaagaaagttgtggctatgttcataggtgttgctgtgaagaaactggagaacgatacgtttacttttgctgaacaagctgtaggtattcggcgacccatcttttctgggtgatcagagtctcaattaagattcccgctttctgttatctatcccatacttacaccgtacgactacgattagatcatcctatcctacgggcgagacgtgagtctacgtaattgattgagacctgctgagggctttgctttcacatgcatgcatatgtaatcatcgatcatggaattgctaataagctgtctgtttgaaactcagtttcagttattccttcttgttaccagcacttctctgctgtttcagtcagttacttaattggaggatcaaccagcattttaaaaacaca

SEQ ID NO: 9010 - DNA, 1509 bp, Zea Mays
actggaaaggccgagttttagctccggttccagaaaaaaactcggaaccagatctcaaaccacacaatccacggctgctccttcgctggacaccgagaaaccgtcaaggcgcaacgaacgaacttgcagcaaaatttcccggagaccctcgagcaaaaatctggtctggttcaaactcgccttttgcctgtgggcggccgcgttcttacgggccatgtcgcagcgcgacggcgacctcgccgccggagctcatccggaagaaggagaccgccacgccgttcgaatggatggctccgacgatgagctggaccaacctacgagtaaagcgactgagcacatcacggctatggacgtgaggaaggggaaggatatgcaagggatcccctggaacgtgatgccgactacaagggacaagtacaggcagtcacggctgcaggggtacgccaactttgagaacgtgcctaattccggaaggctttctgagaaggaatgcatgcctgcagagaaaggccaactctactacgagtttcagcacagcacgaggtcggtgaaaccgaccatccgtcatttccaggcgagccatggttttcagtgttccttgttccgaatgtttgttttacttggttagttcattctacatacagccagccacccttccatgcaaccgtgcaaacttctaatctaggccacatcatgttgattcaagtgacacatgagcgtggataattttacatttaaccacccgttgctaatcacactttttcaaatcccctcccactctctccgcacgtccccttggatcaacatcatgtggttcagattagaagtttgcacagtttcacggagaggttagtttgcaccatatacgttccatgattgagatagtttatctgctctcctttttcccccttatctgttgaaggtttgtcaatcatgtcttgaagttgaattattctaggatattgttgattgcttggcatgtttctcatgtctaactagaaagatgaggatacttatcttgatgaacagtagtagtagtagctgttgtaactagtaaactacaaacgctctttgagtagtaccaccaagagcctagcctcctctgataccctccatatctatgtatccgatcatcggcaattcagttaaatttgcaatttttttggaatcctaacacagggacatacacaaattgaagtattctaaaaaatggatccacatttctgtttcacattgggagtcagctgccctattttaaggcagctacaatgcaggaccttgtagctctgtacatatgttataccgaaaagtcagatgccctgtcaagtcctgcgaatttgttaagcttgttccgtccctgtcttgcagttgaggaatttagtgtgggcaacaacaaggcacgatgtgtatcttatgtcaaacttttctgtgcttcattggtcagcaatgacttataagaagcaagaagtcattaatcttcaaggacatgtgacaccgtgcgagcctcat

SEQ ID NO: 9011 - DNA, 2667 bp, Zea Mays
gccgcctccccactgtcggtcgacacatgccgttccactgggtggaatttatggcgactcggacgcggcgctgcttttagtagtaaccaatgcagcttcctcctcagggcctggaagaagctgcgaccttctttgtgtgtgtgttttttttggcgacgagatctgacgacagtggcggcggttcgaggttcggtgcgagagcgcgacgtcccggaatcggcggcggcgaagatgtcggtgagccacgcggaggacatcgagatatcactgtgcgacggcaactcggaggacgagcggcggcggcgtaagatcggctcgctgcggcggaaggctatccacgcgctcaagaagcgagggaggcgccgcgtcgacttccgcttcccgccggcggccatctccatcgaggacgtccgcgacgccgaggaggagcgcgccgtcgcctccttccgggaccgcctcgccgcgcacggcttcctccccgacaagcacgatgactaccacatgatgctcaggttcctcaaggccaggaagtttgaagccgataaggcaatgcagatgtggtcggagatgctgaaatggaggaaggagttcggaactgacaccatcctcgaggattttgatttcgcagaactggatgatgtgctgcgctactaccctcagggctaccatggtgtggaccgcgaaggccggcccgtgtacattgagaggctagggaaggtggatcccaacaaactcatgcagatcacgtctgtggatcgctacatcaagtaccatgtccaggagtttgagagagccttcagggagaggttccctgcctgcacattggctgccaagaggcacattgactcgaccactaccatcttggacgtccagggtgtggggtttaagaatttctccaagactgccagagaacttgtgcaccggatgcagaagattgatagcgactattatcccgagtggatttaagtggatctggaacagcgtgaagggcttccttgacccaaagacttcatccaagattcatgtgcttggttcgaactaccagagcaggcttcttgaagtaatggattcgagtgagctgccagaattccttggcggttcatgcacatgtagtgacaagggtggttgtcttggatcgaacaaagggccgtggaatgatccttatatattgaagctgatccacaatttggaagctggatgcgcgagggaaatcaaacctgtttctgagggggaagaaagaaacagctcatcctttcggttggaacagatgaaatggcagggcttgctaagtgatacatcaaatgctgaatctggatctgatgttgatgattttggtgcatcatttgttcataaagtttctgactatggttgcttgactccagttcatgaggaagtaaagggcacagatcgtgtgacatacttcagctatgatgatcaaagccacccggatatggctcctgaatcttaccatggagcgcgacgagctactggaatggagcaccacaaaccaatggctgatttcagccaatattctgccaatagaaggcctggggacagtgctcttaacgtcaatggtacggccgctcaaagcggctgggaaaacgtggtgaagctagtggttacaactttggtcaagctcttctacttcatccggcttttcctctccacagccgagaggaggctcgagagcatccatcgccctgctccaccagcggccccagcagcggcagaggagccaagacctcgcgccatcagtgatgaagaggtgtgcgcctgcctgcagcgccttgacaatcttgagtcgatgtgcagtcacctcgccgccaaaccgccgcagatcccagaggacaaggaactcattctgttgagctcgttcgagcggatcagatccgttgaggctgacctcgagaggaccaaaagagtattgaatgcgaccgtggtgaagcagaaggcactggtggagactctggaatccgtacaggagtcgtcgtctagagtcaagaagaggatgttctgttcataggacattgagccgagctgagcaccagcagatcccaggaaccatgccatctgcgtcgtcattaaccaacaaactgtgaagctgacgtgcgaagctgccagcagccggagcggagccgccattttgacctcgtcgcgaccacccacttcgtcagccctccgaggaggatgaaccagcctacaccaaaatggaagagaagaccgtagcacccatgtcccttcctttcattcccactcgtttttgtagcctccgtacggttgtatttgttccctgccttccggcgctcccgttttttgattggtgaattctctgctccggccggccgccgagcgccatgccaagtgctgtgttacatcttcttttccttggtgccgtccgaatggctggagtcgttcttctgtatactgatgagtacagagtagtgacccccgcggcaggagctgagctggggagaagcacggtggcgagcttggtctggctgcagctcctgtgctgtcgtctgtacatggcacagactgcttctggtggccctgctaatacagattgctatgaaatggcctgtttgggttctgtgctgggatttgtcgctggatggattggtttaggccacctccccggctgacggcattgctgaacgtatggtgccc

SEQ ID NO: 9012 - DNA, 2880 bp, Zea Mays
ggggcacccaaaaaaaatcatccatcctgcaactactcatccatcctcgtctacgtacgggtatctgcgtacagcgcgtctccggataataaaatacgtttatataaagcagcccgggcaggtgcccacctccccctcccctcctccagttcccatcaagcagcaacaaactgagaggagacagaggggcgcaggagaaagagaggcagtgccgagcagggagagagagagagaatccccgacctctcgcctccgccctagccaccaaggttcctcctgatcgattgattcccatccatccaaaaccccaacaaaatcgtttctttttgtctccaccacgcagacgacagtggcggcggttcgaggttcggtgcgagagcgcgacgtcccggaatcggcggcggcgaagatgtcggtgagccacgcggaggacatcgagatatcactgtgcgacggcaactcggaggacgagcggcggcggcgtaagatcggctcgctgcggcggaaggctatccacgcgctcaagaagcgagggaggcgccgcgtcgacttccgcttcccgccggcggccatctccatcgaggacgtccgcgacgccgaggaggagcgcgccgtcgcctccttccgggaccgcctcgccgcgcacggcttcctccccgacaagcacgatgactaccacatgatgctcaggttcctcaaggccaggaagtttgaagccgataaggcaatgcagatgtggtcggagatgctgaaatggaggaaggagttcggaactgacaccatcctcgaggattttgatttcgcagaactggatgatgtgctgcgctactaccctcagggctaccatggtgtggaccgcgaaggccggcccgtgtacattgagaggctagggaaggtggatcccaacaaactcatgcagatcacgtctgtggatcgctacatcaagtaccatgtccaggagtttgagagagccttcagggagaggttccctgcctgcacattggctgccaagaggcacattgactcgaccactaccatcttggacgtccagggtgtggggtttaagaatttctccaagactgccagagaacttgtgcaccggatgcagaagattgatagcgactattatcccgagacactccaccaaatgtttgttgtgaacgctgggagtggatttaagtggatctggaacagcgtgaagggcttccttgacccaaagacttcatccaagattcatgtgcttggttcgaactaccagagcaggcttcttgaagtaatggattcgagtgagctgccagaattccttggcggttcatgcacatgtagtgacaagggtggttgtcttggatcgaacaaagggccgtggaatgatccttatatattgaagctgatccacaatttggaagctggatgcgcgagggaaatcaaacctgtttctgagggggaagaaagaaacagctcatcctttcggttggaacagatgaaatggcagggcttgctaagtgatacatcaaatgctgaatctggatctgatgttgatgattttggtgcatcatttgttcataaagtttctgactatggttgcttgactccagttcatgaggaagtaaagggcacagatcgtgtgacatacttcagctatgatgatcaaagccacccggatatggctcctgaatcttaccatggagcgcgacgagctactggaatggagcaccacaaaccaatggctgatttcagccaatattctgccaatagaaggcctggggacagtgctcttaacgtcaatggtacggccgctcaaagcggctgggaaaacgtggtgaagctagtggttacaactttggtcaagctcttctacttcatccggcttttcctctccacagccgagaggaggctcgagagcatccatcgccctgctccaccagcggccccagcagcggcagaggagccaagacctcgcgccatcagtgatgaagaggtgtgcgcctgcctgcagcgccttgacaatcttgagtcgatgtgcagtcacctcgccgccaaaccgccgcagatcccagaggacaaggaactcattctgttgagctcgttcgagcggatcagatccgttgaggctgacctcgagaggaccaaaagagtattgaatgcgaccgtggtgaagcagaaggcactggtggagactctggaatccgtacaggagtcgtcgtctagagtcaagaagaggatgttctgttcataggacattgagccgagctgagcaccagcagatcccaggaaccatgccatctgcgtcgtcattaaccaacaaactgtgaagctgacgtgcgaagctgccagcagccggagcggagccgccattttgacctcgtcgcgaccacccacttcgtcagccctccgaggaggatgaaccagcctacaccaaaatggaagagaagaccgtagcacccatgtcccttcctttcattcccactcgtttttgtagcctccgtacggttgtatttgttccctgccttccggcgctcccgttttttgattggtgaattctctgctccggccggccgccgagcgccatgccaagtgctgtgttacatcttcttttccttggtgccgtccgaatggctggagtcgttcttctgtatactgatgagtacagagtagtgacccccgcggcaggagctgagctggggagaagcacggtggcgagcttggtctggctgcagctcctgtgctgtcgtctgtacatggcacagactgcttctggtggccctgctaatacagattgctatgaaatggcctgtttgggttctgtgctgggatttgtcgctggatggattggtttaggccacctccccggctgacggcattgctgaacgtatggtgccc

SEQ ID NO: 9013 - DNA, 2879 bp, Zea Mays
cacatttccaggcgattgagaaggggggcacccaaaaaaaatcatccatcctgcaactactcatccatcctcgtctacgtacgggtatctgcgtacagcgcgtctccggataataaaatacgtttatataaagcagcccgggcaggtgcccacctccccctcccctcctccagttcccatcaagcagcaacaaactgagaggagacagaggggcgcaggagaaagagaggcagtgccgagcagggagagagagagagaatccccgacctctcgcctccgccctagccaccaaggttcctcctgatcgattgattcccatccatccaaaaccccaacaaaattggcggcggttcgaggttcggtgcgagagcgcgacgtcccggaatcggcggcggcgaagatgtcggtgagccacgcggaggacatcgagatatcactgtgcgacggcaactcggaggacgagcggcggcggcgtaagatcggctcgctgcggcggaaggctatccacgcgctcaagaagcgagggaggcgccgcgtcgacttccgcttcccgccggcggccatctccatcgaggacgtccgcgacgccgaggaggagcgcgccgtcgcctccttccgggaccgcctcgccgcgcacggcttcctccccgacaagcacgatgactaccacatgatgctcaggttcctcaaggccaggaagtttgaagccgataaggcaatgcagatgtggtcggagatgctgaaatggaggaaggagttcggaactgacaccatcctcgaggattttgatttcgcagaactggatgatgtgctgcgctactaccctcagggctaccatggtgtggaccgcgaaggccggcccgtgtacattgagaggctagggaaggtggatcccaacaaactcatgcagatcacgtctgtggatcgctacatcaagtaccatgtccaggagtttgagagagccttcagggagaggttccctgcctgcacattggctgccaagaggcacattgactcgaccactaccatcttggacgtccagggtgtggggtttaagaatttctccaagactgccagagaacttgtgcaccggatgcagaagattgatagcgactattatcccgagacactccaccaaatgtttgttgtgaacgctgggagtggatttaagtggatctggaacagcgtgaagggcttccttgacccaaagacttcatccaagattcatgtgcttggttcgaactaccagagcaggcttcttgaagtaatggattcgagtgagctgccagaattccttggcggttcatgcacatgtagtgacaagggtggttgtcttggatcgaacaaagggccgtggaatgatccttatatattgaagctgatccacaatttggaagctggatgcgcgagggaaatcaaacctgtttctgagggggaagaaagaaacagctcatcctttcggttggaacagatgaaagtaacatttggcagggcttgctaagtgatacatcaaatgctgaatctggatctgatgttgatgattttggtgcatcatttgttcataaagtttctgactatggttgcttgactccagttcatgaggaagtaaagggcacagatcgtgtgacatacttcagctatgatgatcaaagccacccggatatggctcctgaatcttaccatggagcgcgacgagctactggaatggagcaccacaaaccaatggctgatttcagccaatattctgccaatagaaggcctggggacagtgctcttaacgtcaatggtacggccgctcaaagcggctgggaaaacgtggtgaagctagtggttacaactttggtcaagctcttctacttcatccggcttttcctctccacagccgagaggaggctcgagagcatccatcgccctgctccaccagcggccccagcagcggcagaggagccaagacctcgcgccatcagtgatgaagaggtgtgcgcctgcctgcagcgccttgacaatcttgagtcgatgtgcagtcacctcgccgccaaaccgccgcagatcccagaggacaaggaactcattctgttgagctcgttcgagcggatcagatccgttgaggctgacctcgagaggaccaaaagagtattgaatgcgaccgtggtgaagcagaaggcactggtggagactctggaatccgtacaggagtcgtcgtctagagtcaagaagaggatgttctgttcataggacattgagccgagctgagcaccagcagatcccaggaaccatgccatctgcgtcgtcattaaccaacaaactgtgaagctgacgtgcgaagctgccagcagccggagcggagccgccattttgacctcgtcgcgaccacccacttcgtcagccctccgaggaggatgaaccagcctacaccaaaatggaagagaagaccgtagcacccatgtcccttcctttcattcccactcgtttttgtagcctccgtacggttgtatttgttccctgccttccggcgctcccgttttttgattggtgaattctctgctccggccggccgccgagcgccatgccaagtgctgtgttacatcttcttttccttggtgccgtccgaatggctggagtcgttcttctgtatactgatgagtacagagtagtgacccccgcggcaggagctgagctggggagaagcacggtggcgagcttggtctggctgcagctcctgtgctgtcgtctgtacatggcacagactgcttctggtggccctgctaatacagattgctatgaaatggcctgtttgggttctgtgctgggatttgtcgctggatggattggtttaggccacctccccggctgacggcattgctgaacgtatggtgccc

SEQ ID NO: 9014 - DNA, 2972 bp, Zea Mays
catcctccgagatccgaaaagggcgcggagggagatatctgaaccaaaatccaggtccaccccatccgctcagaaagcggacgcgccacatttccaggcgattgagaaggggggcacccaaaaaaaatcatccatcctgcaactactcatccatcctcgtctacgtacgggtatctgcgtacagcgcgtctccggataataaaatacgtttatataaagcagcccgggcaggtgcccacctccccctcccctcctccagttcccatcaagcagcaacaaactgagaggagacagaggggcgcaggagaaagagaggcagtgccgagcagggagagagagagagaatccccgacctctcgcctccgccctagccaccaaggttcctcctgatcgattgattcccatccatccaaaaccccaacaaaatacgacagtggcggcggttcgaggttcggtgcgagagcgcgacgtcccggaatcggcggcggcgaagatgtcggtgagccacgcggaggacatcgagatatcactgtgcgacggcaactcggaggacgagcggcggcggcgtaagatcggctcgctgcggcggaaggctatccacgcgctcaagaagcgagggaggcgccgcgtcgacttccgcttcccgccggcggccatctccatcgaggacgtccgcgacgccgaggaggagcgcgccgtcgcctccttccgggaccgcctcgccgcgcacggcttcctccccgacaagcacgatgactaccacatgatgctcaggttcctcaaggccaggaagtttgaagccgataaggcaatgcagatgtggtcggagatgctgaaatggaggaaggagttcggaactgacaccatcctcgaggattttgatttcgcagaactggatgatgtgctgcgctactaccctcagggctaccatggtgtggaccgcgaaggccggcccgtgtacattgagaggctagggaaggtggatcccaacaaactcatgcagatcacgtctgtggatcgctacatcaagtaccatgtccaggagtttgagagagccttcagggagaggttccctgcctgcacattggctgccaagaggcacattgactcgaccactaccatcttggacgtccagggtgtggggtttaagaatttctccaagactgccagagaacttgtgcaccggatgcagaagattgatagcgactattatcccgagacactccaccaaatgtttgttgtgaacgctgggagtggatttaagtggatctggaacagcgtgaagggcttccttgacccaaagacttcatccaagattcatgtgcttggttcgaactaccagagcaggcttcttgaagtaatggattcgagtgagctgccagaattccttggcggttcatgcacatgtagtgacaagggtggttgtcttggatcgaacaaagggccgtggaatgatccttatatattgaagctgatccacaatttggaagctggatgcgcgagggaaatcaaacctgtttctgagggggaagaaagaaacagctcatcctttcggttggaacagatgaaagtaacatttggcagggcttgctaagtgatacatcaaatgctgaatctggatctgatgttgatgattttggtgcatcatttgttcataaagtttctgactatggttgcttgactccagttcatgaggaagtaaagggcacagatcgtgtgacatacttcagctatgatgatcaaagccacccggatatggctcctgaatcttaccatggagcgcgacgagctactggaatggagcaccacaaaccaatggctgatttcagccaatattctgccaatagaaggcctggggacagtgctcttaacgtcaatggtacggccgctcaaagcggctgggaaaacgtggtgaagctagtggttacaactttggtcaagctcttctacttcatccggcttttcctctccacagccgagaggaggctcgagagcatccatcgccctgctccaccagcggccccagcagcggcagaggagccaagacctcgcgccatcagtgatgaagaggtgtgcgcctgcctgcagcgccttgacaatcttgagtcgatgtgcagtcacctcgccgccaaaccgccgcagatcccagaggacaaggaactcattctgttgagctcgttcgagcggatcagatccgttgaggctgacctcgagaggaccaaaagagtattgaatgcgaccgtggtgaagcagaaggcactggtggagactctggaatccgtacaggagtcgtcgtctagagtcaagaagaggatgttctgttcataggacattgagccgagctgagcaccagcagatcccaggaaccatgccatctgcgtcgtcattaaccaacaaactgtgaagctgacgtgcgaagctgccagcagccggagcggagccgccattttgacctcgtcgcgaccacccacttcgtcagccctccgaggaggatgaaccagcctacaccaaaatggaagagaagaccgtagcacccatgtcccttcctttcattcccactcgtttttgtagcctccgtacggttgtatttgttccctgccttccggcgctcccgttttttgattggtgaattctctgctccggccggccgccgagcgccatgccaagtgctgtgttacatcttcttttccttggtgccgtccgaatggctggagtcgttcttctgtatactgatgagtacagagtagtgacccccgcggcaggagctgagctggggagaagcacggtggcgagcttggtctggctgcagctcctgtgctgtcgtctgtacatggcacagactgcttctggtggccctgctaatacagattgctatgaaatggcctgtttgggttctgtgctgggatttgtcgctggatggattggtttaggccacctccccggctgacggcattgctgaacgtatggtgccc

SEQ ID NO: 9015 - DNA, 3546 bp, Zea Mays
ctcgccttcgcctgccttggacgaccaaatgatggtgtccccgtttgggcatttctcgatccacggcggcgtgcctacgtgcacggcgttccattctcctcggaggcctccccgggccgtccgtcgttatccctcctccttctcctccctcccggtgctgatccatccgtccatccatgatccatcctccgagatccgaaaagggcgcggagggagatatctgaaccaaaatccaggtccaccccatccgctcagaaagcggacgcgccacatttccaggcgattgagaaggggggcacccaaaaaaaatcatccatcctgcaactactcatccatcctcgtctacgtacgggtatctgcgtacagcgcgtctccggataataaaatacgtttatataaagcagcccgggcaggtgcccacctccccctcccctcctccagttcccatcaagcagcaacaaactgagaggagacagaggggcgcaggagaaagagaggcagtgccgagcagggagagagagagagaatccccgacctctcgcctccgccctagccaccaaggttcctcctgatcgattgattcccatccatccaaaaccccaacaaaatgtgagttctcatctcatcctctcctctcctatcccgcgagagatttccacctgttattttttttcctttccggtttcgtggatggggatctgttctgttctgcgtcgcgcgttttttgttctgatctgttccggcgaacggactggagctgctgtttgggatacattccgcccagaacccggttcctggcctgcgggagggagggaggagtaaatgagcggccgcgcgccgcctccccactgtcggtcgacacatgccgttccactgggtggaatttatggcgactcggacgcggcgctgcttttagtagtaaccaatgcagcttcctcctcagggcctggaagaagctgcgaccttctttgtgtgtgtgttttttttggcgacgagatctgacgacagtggcggcggttcgaggttcggtgcgagagcgcgacgtcccggaatcggcggcggcgaagatgtcggtgagccacgcggaggacatcgagatatcactgtgcgacggcaactcggaggacgagcggcggcggcgtaagatcggctcgctgcggcggaaggctatccacgcgctcaagaagcgagggaggcgccgcgtcgacttccgcttcccgccggcggccatctccatcgaggacgtccgcgacgccgaggaggagcgcgccgtcgcctccttccgggaccgcctcgccgcgcacggcttcctccccgacaagcacgatgactaccacatgatgctcaggttcctcaaggccaggaagtttgaagccgataaggcaatgcagatgtggtcggagatgctgaaatggaggaaggagttcggaactgacaccatcctcgaggattttgatttcgcagaactggatgatgtgctgcgctactaccctcagggctaccatggtgtggaccgcgaaggccggcccgtgtacattgagaggctagggaaggtggatcccaacaaactcatgcagatcacgtctgtggatcgctacatcaagtaccatgtccaggagtttgagagagccttcagggagaggttccctgcctgcacattggctgccaagaggcacattgactcgaccactaccatcttggacgtccagggtgtggggtttaagaatttctccaagactgccagagaacttgtgcaccggatgcagaagattgatagcgactattatcccgagacactccaccaaatgtttgttgtgaacgctgggagtggatttaagtggatctggaacagcgtgaagggcttccttgacccaaagacttcatccaagattcatgtgcttggttcgaactaccagagcaggcttcttgaagtaatggattcgagtgagctgccagaattccttggcggttcatgcacatgtagtgacaagggtggttgtcttggatcgaacaaagggccgtggaatgatccttatatattgaagctgatccacaatttggaagctggatgcgcgagggaaatcaaacctgtttctgagggggaagaaagaaacagctcatcctttcggttggaacagatgaaagtaacatttggcagggcttgctaagtgatacatcaaatgctgaatctggatctgatgttgatgattttggtgcatcatttgttcataaagtttctgactatggttgcttgactccagttcatgaggaagtaaagggcacagatcgtgtgacatacttcagctatgatgatcaaagccacccggatatggctcctgaatcttaccatggagcgcgacgagctactggaatggagcaccacaaaccaatggctgatttcagccaatattctgccaatagaaggcctggggacagtgctcttaacgtcaatggtacggccgctcaaagcggctgggaaaacgtggtgaagctagtggttacaactttggtcaagctcttctacttcatccggcttttcctctccacagccgagaggaggctcgagagcatccatcgccctgctccaccagcggccccagcagcggcagaggagccaagacctcgcgccatcagtgatgaagaggtgtgcgcctgcctgcagcgccttgacaatcttgagtcgatgtgcagtcacctcgccgccaaaccgccgcagatcccagaggacaaggaactcattctgttgagctcgttcgagcggatcagatccgttgaggctgacctcgagaggaccaaaagagtattgaatgcgaccgtggtgaagcagaaggcactggtggagactctggaatccgtacaggagtcgtcgtctagagtcaagaagaggatgttctgttcataggacattgagccgagctgagcaccagcagatcccaggaaccatgccatctgcgtcgtcattaaccaacaaactgtgaagctgacgtgcgaagctgccagcagccggagcggagccgccattttgacctcgtcgcgaccacccacttcgtcagccctccgaggaggatgaaccagcctacaccaaaatggaagagaagaccgtagcacccatgtcccttcctttcattcccactcgtttttgtagcctccgtacggttgtatttgttccctgccttccggcgctcccgttttttgattggtgaattctctgctccggccggccgccgagcgccatgccaagtgctgtgttacatcttcttttccttggtgccgtccgaatggctggagtcgttcttctgtatactgatgagtacagagtagtgacccccgcggcaggagctgagctggggagaagcacggtggcgagcttggtctggctgcagctcctgtgctgtcgtctgtacatggcacagactgcttctggtggccctgctaatacagattgctatgaaatggcctgtttgggttctgtgctgggatttgtcgctggatggattggtttaggccacctccccggctgacggcattgctgaacgtatggtgccc

SEQ ID NO: 9016 - DNA, 1135 bp, Zea Mays
gccacacttacaacaccgcaaagcatgcccagaataaggtagagtggcagctctggtgaatataatcttagtcagttttatgttgaaacaaagttaacagtaaaaaagttggagaaatacaactcatgttagatcacaaagtattccgaattaccaaactctaaatgtcaataaaaatgttaactcatgaatacactaataaaacggagttgtaaaatgtaaatacttctatgttgaatcacatgtgctgcatcatggtggtaaatagaacaggctgacatgaacctgccacatttgattattaaagactaaagcgcaatacaactatatttttttctcttggaaaagcaattaacaccaaacttaaaaagaaaaaagaacacatgttcaagttcttaccataagcctagaggaagattaaagagccagataaagtttgattgggcactagagcctaaagtaggaaatagaagctttatttgagttcccaagtttcaaaaagagaatgctagacaggcggctggaggaatatagaagttggagacataagatggcatggtgatgaacagtagctataaatgacttaaaatcggatgttcgcaacagagtttattacagatattcactaacatgaatgttacccaaaatagcaaaagcacaaaaaacgtacaggccatgtatcacaaaaatgacagactgaaattatctcaaaaatatggatgaaaattagagccaaaaataaggtgagaacgcatacttccctatatcttgaaggtaactaagaaacaactaccttattaacaccaaaaataatcagaataaagtaaaataccagcagcagattttagttcatacgtcggcacaataaatgctgccttttcccctagcagaacattggaaacagttgatgatataactgatgctaatataatcatagcagtagtaaatggtggagaattttctgctcgaagtggccgtaatactgtttcgatagcaaaaaagcacccagcaactgcagcattgaaacctaaagaccatagtaacacaagttaggagaggatataggggaagaaagtcagtagcatgaagaacatgaaggttgtaaaaaggaatttaagcaaatatttattattcc

SEQ ID NO: 9017 - DNA, 1637 bp, Zea Mays
ttattgtttcaagaggtaaagctagctcaaaaaatgttctcaccgtagatacatcctgttggctttaactatgcccttagagtgtatagggcttgaccattctaggacaccccaaaacacatgaatttcatgaactatagctcaaaaaaatattgaaaactatcaaagtcggtctaagagcgctggattcttaaaactgcatgtagttgagtgactagatagacaaatttaatgtacaagataaccaaaatcctttgaatcctatcccaaatttgatgcaaaaaataatcatttgagtggtggtgagtctacagaacatgaactcacgttggattcttaaaactacatgtagttgcctagatagacaaatttgatgtgcacgacaaccaaaatccttggaatcctatcccaaatttgatgcaaaaaataatcatgagtggtagcgagcctacaaaacataaagaactcatcgcaaagactacctagaaaaatagtctcgaccaaggtacatactgctctccttaatgtttcattaagaacgtctggtgcccgatagttccgggaccctaaaacatctaaaacccatgaactatatagctcataaaaatgctaaaaacatgaaaatcggtacgagtccaagagcataggacataaaaaatgtacccacaaaactgaacccaaaaaggaacaaagcatgttactgtacatatttcgtgtccgaacttcagcactccacaacgaaatctgacaacagcacaccgcacatgacacatctcttatatatcgatcacctcttaaacctcatcgtatatgtttgatacagaatgcatatcttggcaaaactcaagaatttacactttgatgaggagactctttaacagcagtgttcctaagttaaccctagttttatcggaatgtcactttatatatttcgtatcttatcttcttcgctacgaggtaaacaagccttcaattttgcatattcagtgcccattaactgcagtctgctggaaattctctctctggtatattgccttccaccgctcaagctcttccctgcagatccgtaacagcccaaacattagcatcaacttttttttgtttattgtaaagtaatatgaagcacaagggttctcctgtgtcagtcaatcggttacacctttgctcttgcacagttagtcaaatgctgaaaggctcttaagaaaaatctggttatttgttagtattctagagctagaaacgtcggtcctataaaacagaatcctggtttcacaatttctgtgaggtatctggagatcaaaactgtttgctcctgtcagatttgcaagtttcaaggttttctaagaattttggtgttattaatgataagacaggtctactaggaatttgagccatgaagaatgggtgctcgaaaactaaaacatgatcacctccagtttctcatccagtttacttccaagttttcaaaactttggttgtgtttaggggtggtaatggatcacgatccaaaattccaaatgtttattcatgatttgtttggacccttaattaattttagttcaaaaatgaatagaaataaagccttatccgaatacgatctgatccttagactttagtgtaaaatttaaagcccatta

SEQ ID NO: 9018 - DNA, 1791 bp, Zea Mays
caattatacaattttaaactattttaggtatccaaccatgaatccaaaatgaaagaagactttgctgtcttatcaggcgatgagaaaatggatgtgctatacagttctgcccctgaactcgttagcttgttgtctgagttgaaggatgcccatgaagaacttagggccataggacagctaacaagtgaggtcacgtcttgtctaggcaaagataaaatgcaaccttttgaagtgaagaaagcttgtttgcttgctcattgtcaagctattaccttctatctccttatgaaatctgaggggttgtccgtacaggatcatcctgtaatttctcgcttgatagagaccaagaatatggtagagaagataaagcaaatcactttgaatccagtgagccaaaaagggtgcgctgatgaccatagtatgcattgtggcaccatccaaacagataagatagtctcattggacaaacaggagggcaaatttagcaatgtactagcactggataaagtgaaacaaggtgctgaagtctctgaatcaagaaagagtgagccttgtaataacgattatcatgaagttaatgaacagaagaacaaggatgaacgaatgggcttgcatagccttgaaatgttgaaggtaagagcaaaccttgaggaaaggttaaagaaaaaagggctctataatttgacacgctcgaagccagagaagtcgtcaaaaaccaggacaactagtgataatggcctgcagacattggatgattttgatgatgaagtgctgaagaataaccaaatgatgaagcctagcaagcttgttgcagcagctgctaaatcaaataaaagcatgtttgtttctggtgatgatgaccttccgaagagagataatatcggagaaagacggagaaaacatgagcttcgcgtcctatcaagagtaggggctaactcagcagaggatcatgagctgccagatggtgacgcttctgaagaggaggaccaccatgagttgccagaaggtggtgatgaatctgaagacgacatccatcgggatgtcaaaagaaagaggactgaaaagctatcaaccaagaatgctctgtactcgccaactccgggcgttgaacatctggaggaagaaacagaaggcgatggcaagaggacgatttcgtatcagatcttgaagaacagggggttgactcgttccaggaataagaagaagaagaacccgcggaagaactacagggataagcacaagaacaagcttgtcaagcggaaaggccaagtgcgtgatatcaagaagcagtctggtccgtatggaggtgaaacgtctggcatcaacccgaatgtcagccgcagtgttcggttcaagagttgagttgatgcaagtagtatatttaggttggacatggaaggagttgtttctggtcttaacttggcattttctttattttttgtttgcatgtcattcgaacgcataaactccagaatttgtcttacggtattagatgagtacaattttgcttgcgaaaaatatcattatcaccgttgcctgtgtgtgtgaaaactaggtggtataattatcaaggaaatttgtatattatttcgaaccatatatattagtaggggctgtttatttagataaatgtccttaccgtgagacattgctagtagcatgacagcatgcataacatggcagcctttcattcttgacaataaccagctgtggaactgatatgggtccctaggtaattctacacatatgcagcctgttcacttggctttaatccgaacccgcttagacctt

SEQ ID NO: 9019 - DNA, 2109 bp, Zea Mays
agcgaaagtgatgacagcaaaggagaattgtccggtgacatggctgaagctgattatgaaggatgggacaaagggtatatttcgaaattaaaaagagcacagagggctgtcaaacaaattgctggaggtgatgatagcatggatgagcaggaggatgaaacacaagaaaatgtttggggcagaggtaaaaatgcatactatgctcctggtgaacaatctggtgatgatgaggtggattacgaggaggcacaaaggatacaaaaaaataaggaaaaaaggctgtctatgaaggattttggattagaagatggtgaaagtgatgaagagggtaatgcaacaaaggtatccaaccatgaatccaaaatgaaagaagactttgctgtcttatcaggcgatgagaaaatggatgtgctatacagttctgcccctgaactcgttagcttgttgtctgagttgaaggatgcccatgaagaacttagggccataggacagctaacaagtgaggtcacgtcttgtctaggcaaagataaaatgcaaccttttgaagtgaagaaagcttgtttgcttgctcattgtcaagctattaccttctatctccttatgaaatctgaggggttgtccgtacaggatcatcctgtaatttctcgcttgatagagaccaagaatatggtagagaagataaagcaaatcactttgaatccagtgagccaaaaagggtgcgctgatgaccatagtatgcattgtggcaccatccaaacagataagatagtctcattggacaaacaggagggcaaatttagcaatgtactagcactggataaagtgaaacaaggtgctgaagtctctgaatcaagaaagagtgagccttgtaataacgattatcatgaagttaatgaacagaagaacaaggatgaacgaatgggcttgcatagccttgaaatgttgaaggtaagagcaaaccttgaggaaaggttaaagaaaaaagggctctataatttgacacgctcgaagccagagaagtcgtcaaaaaccaggacaactagtgataaaagtggcctgcagacattggatgattttgatgatgaagtgctgaagaataaccaaatgatgaagcctagcaagcttgttgcagcagctgctaaatcaaataaaagcatgtttgtttctggtgatgatgaccttccgaagagagataatatcggagaaagacggagaaaacatgagcttcgcgtcctatcaagagtaggggctaactcagcagaggatcatgagctgccagatggtgacgcttctgaagaggaggaccaccatgagttgccagaaggtggtgatgaatctgaagacgacatccatcgggatgtcaaaagaaagaggactgaaaagctatcaaccaagaatgctctgtactcgccaactccgggcgttgaacatctggaggaagaaacagaaggcgatggcaagaggacgatttcgtatcagatcttgaagaacagggggttgactcgttccaggaataagaagaagaagaacccgcggaagaactacagggataagcacaagaacaagcttgtcaagcggaaaggccaagtgcgtgatatcaagaagcagtctggtccgtatggaggtgaaacgtctggcatcaacccgaatgtcagccgcagtgttcggttcaagagttgagttgatgcaagtagtatatttaggttggacatggaaggagttgtttctggtcttaacttggcattttctttattttttgtttgcatgtcattcgaacgcataaactccagaatttgtcttacggtattagatgagtacaattttgcttgcgaaaaatatcattatcaccgttgcctgtgtgtgtgaaaactaggtggtataattatcaaggaaatttgtatattatttcgaaccatatatattagtaggggctgtttatttagataaatgtccttaccgtgagacattgctagtagcatgacagcatgcataacatggcagcctttcattcttgacaataaccagctgtggaactgatatgggtccctaggtaattctacacatatgcagcctgttcacttggctttaatccgaacccgcttagacctt

SEQ ID NO: 9020 - DNA, 2564 bp, Zea Mays
acatcccacatctgtgagacacgagccgccgccagaagaccaccgcgcgccccggcccttcttccacgcctccgtcttccgcgcctggccacggcccaccgccgtccgcccttcgacgcctgacgcgccccggcaccgcccaggcaaggcggccgccggtagctacggacagcccaccgcgtccgcggcaccgcccaccggcagcagctaccggcaaccgcgcccgcggctctgtacccagggagtagcctatcatggggaagaggccgaggacaactctgcggcgcacgccagcacggggccttccaaagtccaagcgggccgacgagctgccatcgatgcctgattctgacaacgacgaaattgatgcatttcacaagcagcgggacatgatccctttcgacgccaatgatgtaagggagtcggaggatgatgatgtggagcagcccgtgtttgacctcaagggtgtttctgatagcgaaagtgatgacagcaaaggagaattgtccggtgacatggctgaagctgattatgaaggatgggacaaagggtatatttcgaaattaaaaagagcacagagggctgtcaaacaaattgctggaggtgatgatagcatggatgagcaggaggatgaaacacaagaaaatgtttggggcagaggtaaaaatgcatactatgctcctggtgaacaatctggtgatgatgaggtggattacgaggaggcacaaaggatacaaaaaaataaggaaaaaaggctgtctatgaaggattttggattagaagatggtgaaagtgatgaagagggtaatgcaacaaaggtatccaaccatgaatccaaaatgaaagaagactttgctgtcttatcaggcgatgagaaaatggatgtgctatacagcttgttgtctgagttgaaggatgcccatgaagaacttagggccataggacagctaacaagtgaggtcacgtcttgtctaggcaaagataaaatgcaaccttttgaagtgaagaaagcttgtttgcttgctcattgtcaagctattaccttctatctccttatgaaatctgaggggttgtccgtacaggatcatcctgtaatttctcgcttgatagagaccaagaatatggtagagaagataaagcaaatcactttgaatccagtgagccaaaaagggtgcgctgatgaccatagtatgcattgtggcaccatccaaacagataagatagtctcattggacaaacaggagggcaaatttagcaatgtactagcactggataaagtgaaacaaggtgctgaagtctctgaatcaagaaagagtgagccttgtaataacgattatcatgaagttaatgaacagaagaacaaggatgaacgaatgggcttgcatagccttgaaatgttgaaggtaagagcaaaccttgaggaaaggttaaagaaaaaagggctctataatttgacacgctcgaagccagagaagtcgtcaaaaaccaggacaactagtgataaaagtggcctgcagacattggatgattttgatgatgaagtgctgaagaataaccaaatgatgaagcctagcaagcttgttgcagcagctgctaaatcaaataaaagcatgtttgtttctggtgatgatgaccttccgaagagagataatatcggagaaagacggagaaaacatgagcttcgcgtcctatcaagagtaggggctaactcagcagaggatcatgagctgccagatggtgacgcttctgaagaggaggaccaccatgagttgccagaaggtggtgatgaatctgaagacgacatccatcgggatgtcaaaagaaagaggactgaaaagctatcaaccaagaatgctctgtactcgccaactccgggcgttgaacatctggaggaagaaacagaaggcgatggcaagaggacgatttcgtatcagatcttgaagaacagggggttgactcgttccaggaataagaagaagaagaacccgcggaagaactacagggataagcacaagaacaagcttgtcaagcggaaaggccaagtgcgtgatatcaagaagcagtctggtccgtatggaggtgaaacgtctggcatcaacccgaatgtcagccgcagtgttcggttcaagagttgagttgatgcaagtagtatatttaggttggacatggaaggagttgtttctggtcttaacttggcattttctttattttttgtttgcatgtcattcgaacgcataaactccagaatttgtcttacggtattagatgagtacaattttgcttgcgaaaaatatcattatcaccgttgcctgtgtgtgtgaaaactaggtggtataattatcaaggaaatttgtatattatttcgaaccatatatattagtaggggctgtttatttagataaatgtccttaccgtgagacattgctagtagcatgacagcatgcataacatggcagcctttcattcttgacaataaccagctgtggaactgatatgggtccctaggtaattctacacatatgcagcctgttcacttggctttaatccgaacccgcttagacctt

SEQ ID NO: 9021 - DNA, 2523 bp, Zea Mays
acatcccacatctgtgagacacgagccgccgccagaagaccaccgcgcgccccggcccttcttccacgcctccgtcttccgcgcctggccacggcccaccgccgtccgcccttcgacgcctgacgcgccccggcaccgcccaggcaaggcggccgccggtagctacggacagcccaccgcgtccgcggcaccgcccaccggcagcagctaccggcaaccgcgcccgcggctctgtacccagggagtagcctatcatggggaagaggccgaggacaactctgcggcgcacgccagcacggggccttccaaagtccaagcgggccgacgagctgccatcgatgcctgattctgacaacgacgaaattgatgcatttcacaagcagcgggacatgatccctttcgacgccaatgatgtaagggagtcggaggatgatgatgtggagcagcccgtgtttgacctcaagggtgtttctgatagcgaaagtgatgacagcaaaggagaattgtccggtgacatggctgaagctgattatgaaggatgggacaaagggtatatttcgaaatgaggatgaaacacaagaaaatgtttggggcagaggtaaaaatgcatactatgctcctggtgaacaatctggtgatgatgaggtggattacgaggaggcacaaaggatacaaaaaaataaggaaaaaaggctgtctatgaaggattttggattagaagatggtgaaagtgatgaagagggtaatgcaacaaaggtatccaaccatgaatccaaaatgaaagaagactttgctgtcttatcaggcgatgagaaaatggatgtgctatacagttctgcccctgaactcgttagcttgttgtctgagttgaaggatgcccatgaagaacttagggccataggacagctaacaagtgaggtcacgtcttgtctaggcaaagataaaatgcaaccttttgaagtgaagaaagcttgtttgcttgctcattgtcaagctattaccttctatctccttatgaaatctgaggggttgtccgtacaggatcatcctgtaatttctcgcttgatagagaccaagaatatggtagagaagataaagcaaatcactttgaatccagtgagccaaaaagggtgcgctgatgaccatagtatgcattgtggcaccatccaaacagataagatagtctcattggacaaacaggagggcaaatttagcaatgtactagcactggataaagtgaaacaaggtgctgaagtctctgaatcaagaaagagtgagccttgtaataacgattatcatgaagttaatgaacagaagaacaaggatgaacgaatgggcttgcatagccttgaaatgttgaaggtaagagcaaaccttgaggaaaggttaaagaaaaaagggctctataatttgacacgctcgaagccagagaagtcgtcaaaaaccaggacaactagtgataaaagtggcctgcagacattggatgattttgatgatgaagtgctgaagaataaccaaatgatgaagcctagcaagcttgttgcagcagctgctaaatcaaataaaagcatgtttgtttctggtgatgatgaccttccgaagagagataatatcggagaaagacggagaaaacatgagcttcgcgtcctatcaagagtaggggctaactcagcagaggatcatgagctgccagatggtgacgcttctgaagaggaggaccaccatgagttgccagaaggtggtgatgaatctgaagacgacatccatcgggatgtcaaaagaaagaggactgaaaagctatcaaccaagaatgctctgtactcgccaactccgggcgttgaacatctggaggaagaaacagaaggcgatggcaagaggacgatttcgtatcagatcttgaagaacagggggttgactcgttccaggaataagaagaagaagaacccgcggaagaactacagggataagcacaagaacaagcttgtcaagcggaaaggccaagtgcgtgatatcaagaagcagtctggtccgtatggaggtgaaacgtctggcatcaacccgaatgtcagccgcagtgttcggttcaagagttgagttgatgcaagtagtatatttaggttggacatggaaggagttgtttctggtcttaacttggcattttctttattttttgtttgcatgtcattcgaacgcataaactccagaatttgtcttacggtattagatgagtacaattttgcttgcgaaaaatatcattatcaccgttgcctgtgtgtgtgaaaactaggtggtataattatcaaggaaatttgtatattatttcgaaccatatatattagtaggggctgtttatttagataaatgtccttaccgtgagacattgctagtagcatgacagcatgcataacatggcagcctttcattcttgacaataaccagctgtggaactgatatgggtccctaggtaattctacacatatgcagcctgttcacttggctttaatccgaacccgcttagacctt

SEQ ID NO: 9022 - DNA, 2803 bp, Zea Mays
aggagccggagtcgccgtggaggcgttgttggctttgcgggtgtgacctgacgtcctgagtcctgacccgataagccacagcccaagctgcccacacagggacagggctttgtaaaacgcgccggacacgtgacagattggcccacgtatggtacggtacgggtcgttgtgttgtggaaacgcctcgtcttttatttcaaaatcgaaccctagcctgcgccacatcccacatctgtgagacacgagccgccgccagaagaccaccgcgcgccccggcccttcttccacgcctccgtcttccgcgcctggccacggcccaccgccgtccgcccttcgacgcctgacgcgccccggcaccgcccaggcaaggcggccgccggtagctacggacagcccaccgcgtccgcggcaccgcccaccggcagcagctaccggcaaccgcgcccgcggctctgtacccagggagtagcctatcatggggaagaggccgaggacaactctgcggcgcacgccagcacggggccttccaaagtccaagcgggccgacgagctgccatcgatgcctgattctgacaacgacgaaattgatgcatttcacaagcagcgggacatgatccctttcgacgccaatgatgtaagggagtcggaggatgatgatgtggagcagcccgtgtttgacctcaagggtgtttctgatagcgaaagtgatgacagcaaaggagaattgtccggtgacatggctgaagctgattatgaaggatgggacaaagggtatatttcgaaattaaaaagagcacagagggctgtcaaacaaattgctggaggtgatgatagcatggatgagcaggaggatgaaacacaagaaaatgtttggggcagaggtaaaaatgcatactatgctcctggtgaacaatctggtgatgatgaggtggattacgaggaggcacaaaggatacaaaaaaataaggaaaaaaggctgtctatgaaggattttggattagaagatggtgaaagtgatgaagagggtaatgcaacaaaggtatccaaccatgaatccaaaatgaaagaagactttgctgtcttatcaggcgatgagaaaatggatgtgctatacagttctgcccctgaactcgttagcttgttgtctgagttgaaggatgcccatgaagaacttagggccataggacagctaacaagtgaggtcacgtcttgtctaggcaaagataaaatgcaaccttttgaagtgaagaaagcttgtttgcttgctcattgtcaagctattaccttctatctccttatgaaatctgaggggttgtccgtacaggatcatcctgtaatttctcgcttgatagagaccaagaatatggtagagaagataaagcaaatcactttgaatccagtgagccaaaaagggtgcgctgatgaccatagtatgcattgtggcaccatccaaacagataagatagtctcattggacaaacaggagggcaaatttagcaatgtactagcactggataaagtgaaacaaggtgctgaagtctctgaatcaagaaagagtgagccttgtaataacgattatcatgaagttaatgaacagaagaacaaggatgaacgaatgggcttgcatagccttgaaatgttgaaggtaagagcaaaccttgaggaaaggttaaagaaaaaagggctctataatttgacacgctcgaagccagagaagtcgtcaaaaaccaggacaactagtgataatggcctgcagacattggatgattttgatgatgaagtgctgaagaataaccaaatgatgaagcctagcaagcttgttgcagcagctgctaaatcaaataaaagcatgtttgtttctggtgatgatgaccttccgaagagagataatatcggagaaagacggagaaaacatgagcttcgcgtcctatcaagagtaggggctaactcagcagaggatcatgagctgccagatggtgacgcttctgaagaggaggaccaccatgagttgccagaaggtggtgatgaatctgaagacgacatccatcgggatgtcaaaagaaagaggactgaaaagctatcaaccaagaatgctctgtactcgccaactccgggcgttgaacatctggaggaagaaacagaaggcgatggcaagaggacgatttcgtatcagatcttgaagaacagggggttgactcgttccaggaataagaagaagaagaacccgcggaagaactacagggataagcacaagaacaagcttgtcaagcggaaaggccaagtgcgtgatatcaagaagcagtctggtccgtatggaggtgaaacgtctggcatcaacccgaatgtcagccgcagtgttcggttcaagagttgagttgatgcaagtagtatatttaggttggacatggaaggagttgtttctggtcttaacttggcattttctttattttttgtttgcatgtcattcgaacgcataaactccagaatttgtcttacggtattagatgagtacaattttgcttgcgaaaaatatcattatcaccgttgcctgtgtgtgtgaaaactaggtggtataattatcaaggaaatttgtatattatttcgaaccatatatattagtaggggctgtttatttagataaatgtccttaccgtgagacattgctagtagcatgacagcatgcataacatggcagcctttcattcttgacaataaccagctgtggaactgatatgggtccctaggtaattctacacatatgcagcctgttcacttggctttaatccgaacccgcttagacctt

SEQ ID NO: 9023 - DNA, 2594 bp, Zea Mays
ggatcagctcattccggaccttattccgggtgaaaccaatgcacctggtttagaatttggtacagcccattaaaagtgttcgttttggcccgaactggaattgaaactggcccggattaaaatttcccttcacgccacggcctggaaccaacccttgtgtcgtaccctccggatcgaagcctggacgacgcgactggcacggcggcggcgcacagccccgacgacgaccctccccgctgccttctccccgggagtagcctatcatggggaagaggccgaggacaactctgcggcgcacgccagcacggggccttccaaagtccaagcgggccgacgagctgccatcgatgcctgattctgacaacgacgaaattgatgcatttcacaagcagcgggacatgatccctttcgacgccaatgatgtaagggagtcggaggatgatgatgtggagcagcccgtgtttgacctcaagggtgtttctgatagcgaaagtgatgacagcaaaggagaattgtccggtgacatggctgaagctgattatgaaggatgggacaaagggtatatttcgaaattaaaaagagcacagagggctgtcaaacaaattgctggaggtgatgatagcatggatgagcaggaggatgaaacacaagaaaatgtttggggcagaggtaaaaatgcatactatgctcctggtgaacaatctggtgatgatgaggtggattacgaggaggcacaaaggatacaaaaaaataaggaaaaaaggctgtctatgaaggattttggattagaagatggtgaaagtgatgaagagggtaatgcaacaaaggtatccaaccatgaatccaaaatgaaagaagactttgctgtcttatcaggcgatgagaaaatggatgtgctatacagttctgcccctgaactcgttagcttgttgtctgagttgaaggatgcccatgaagaacttagggccataggacagctaacaagtgaggtcacgtcttgtctaggcaaagataaaatgcaaccttttgaagtgaagaaagcttgtttgcttgctcattgtcaagctattaccttctatctccttatgaaatctgaggggttgtccgtacaggatcatcctgtaatttctcgcttgatagagaccaagaatatggtagagaagataaagcaaatcactttgaatccagtgagccaaaaagggtgcgctgatgaccatagtatgcattgtggcaccatccaaacagataagatagtctcattggacaaacaggagggcaaatttagcaatgtactagcactggataaagtgaaacaaggtgctgaagtctctgaatcaagaaagagtgagccttgtaataacgattatcatgaagttaatgaacagaagaacaaggatgaacgaatgggcttgcatagccttgaaatgttgaaggtaagagcaaaccttgaggaaaggttaaagaaaaaagggctctataatttgacacgctcgaagccagagaagtcgtcaaaaaccaggacaactagtgataaaagtggcctgcagacattggatgattttgatgatgaagtgctgaagaataaccaaatgatgaagcctagcaagcttgttgcagcagctgctaaatcaaataaaagcatgtttgtttctggtgatgatgaccttccgaagagagataatatcggagaaagacggagaaaacatgagcttcgcgtcctatcaagagtaggggctaactcagcagaggatcatgagctgccagatggtgacgcttctgaagaggaggaccaccatgagttgccagaaggtggtgatgaatctgaagacgacatccatcgggatgtcaaaagaaagaggactgaaaagctatcaaccaagaatgctctgtactcgccaactccgggcgttgaacatctggaggaagaaacagaaggcgatggcaagaggacgatttcgtatcagatcttgaagaacagggggttgactcgttccaggaataagaagaagaagaacccgcggaagaactacagggataagcacaagaacaagcttgtcaagcggaaaggccaagtgcgtgatatcaagaagcagtctggtccgtatggaggtgaaacgtctggcatcaacccgaatgtcagccgcagtgttcggttcaagagttgagttgatgcaagtagtatatttaggttggacatggaaggagttgtttctggtcttaacttggcattttctttattttttgtttgcatgtcattcgaacgcataaactccagaatttgtcttacggtattagatgagtacaattttgcttgcgaaaaatatcattatcaccgttgcctgtgtgtgtgaaaactaggtggtataattatcaaggaaatttgtatattatttcgaaccatatatattagtaggggctgtttatttagataaatgtccttaccgtgagacattgctagtagcatgacagcatgcataacatggcagcctttcattcttgacaataaccagctgtggaactgatatgggtccctaggtaattctacacatatgcagcctgttcacttggctttaatccgaacccgcttagacctt

SEQ ID NO: 9024 - DNA, 2564 bp, Zea Mays
cttaattcctgcctcaacattgattgtagttcgtctgcgcgtgcgggactgtgggtcagatgaattcagtgtaattcaaagcgggaacagataaaagtatgtctttgccgatgctattaagtaagaaatgccaaggcagctacaccgggagctttatttgaggataaaccccaatctgcaaatgatacatggagaaaactccactctgatcctctactcctaataaggcagcgggagcaggatgcgatttcaaggattaaaaacaatccaatcaagatggccgagataaagaaatctgttgaagctgagaaaaagcaaaaagaagagaagaaagcgaagaaaaagcacaagaagcatcaccaccataagtcaaagagtaagaggcatcactcagatgagaattctgattcagatgaaataagtgatggcaaagatgagagaaggaagaggtctcattcttctcttcataagaaagaagagaacatgtccaggcataagaagcagcacagagaagattcatcagattcagacgatgaaccgcagagaagaaagcaggatgtatcagaaaatgatgaaccgaggagaagactacatgacgacaatgaaccgaggagaagatggcaggatgacgttgaaccgaggagaagactgcatgacgacgatgaaccgagaagatggcaggatgacgttgaaccgaggagaagaagacaggatgatggtgaatcaaggagaagatggcaggacgacgatgaactaaggggaagacggcaggttgatgagaaaccaagggaaagaagctacgttaatcgtccaagatatgaccgctctgacgctgatgataggaggagacaccattcacctcgagacactaagcccaaaagagtggatgatggccacaaaactggaaattccacttctgaacaccattcccgctctgaacaaggctctggcgagcagacaaggcaagagagcgaacatgacaggaatagtggtccttcattgaaccgacgacgcggtggtgtccaccatatgtcagaagaggagaggttagctcgtctgcaccagatgcaggctgacgctgaggtccacgaggagcagagatggaagaggctcaagaaagctgcagacgacgatgctaaagaggcaacaactgtgaatgcaaaccagttcaaagggaagaacttcttggaagatgaaaagaagagcatatttggaacagataagggtggcagtgccacgattgaagagagcatcaggcgccgcgctttctactcgcagggtgggcgtgatgccgagggcaatgccttcaggcggtgaatatattgttttgttgtttgctgccttgttggactcatcttgccgtcgtgttcgttttattattgtacgtgaaagttgagaactatgtacaacaatttctcaataacagcaattttatatgcaacttcaaatttttgatacagaatttggcctaaactgcaccgaagagtgattgcctcggatttgatcttgctgacgtttcttctgggttggtaatgcaaaaaccttgcttattagactgtctccagccgcgtcccctaaaggaatattctctgtcctttacagaacactctaaaagattctgtcctctatatattctccgtctccagcagcgtcctctaaattccgtcctctaaagctacagtgttaacagattcacattttccatttctttttcatttttctttgttttgttcgcatttcacgctgcataaatgatacgtaaaaattgtattcattaattttgaaattaataaattcgaattgtcaatattaattacattgcttgttttgttgttgtgtaattgttctcgataacgcgccacatagtataatatccttggcaaaatatgttttcaaatggataagcttgcaccgtaagccagtactcttcttcgagaagccatagcctagcttcccttgcacggcaaccgcatggcttgtatccgaagcgtacttcctctataaatatcgagtgagccttccatacttcactcaaccttgcctttacaaactccacaaccatgaatccctacttagaaaacaattttcttgtgcggttgatggaagaaatggaagaggaagaagaagagttgaagttggcgaggcacatggtcaataggaggcgacgtgcacacaatgagtgtcgtcatggtggttcgattccagggcgtgttaggattcatcgtgatcacatgagcggcgatgcaagaatccgagcggactactttggagcgaacccggtgtacacggatgctcaatttcgtaggaggttccgcatgcgtcgccatgtgtttgagcgccttgttgatgttgtgcaacaagtggatccatattttattcagcgtccaaactgtgcgggtgagattggtctttctgctctacagaaagttgttgctgctgttcgaatctcttctacagacagttattcagcgtccaaactgtacgacgttagaacccaacactttgcaacaattcaagagtctgctcgaaaagatattgaacgagctttcggtgtactccagaag

SEQ ID NO: 9025 - DNA, 1848 bp, Zea Mays
cttgaacctgatgagcctgtgctgtcaagcaattgagttttaattcaagcgacagcatcttctgtggtgtgtttgatggccatgggccatacggtcattttgttgcaaagaaagttagagattcacttcctgtcaagttgcgcacacaatggcaaactagtgctaatgggggctctagtcctcatcaaaatggaagcatcaactccgaagaaacagggtctattgttgacgatgaatggggtgatggtgatgacactgaaaagctccctgagatgtttcttccactgaagcaatcttacctaaaagctttcaaattgatggacaaggaactcaagctgcatcccacagttgactgtttctgcagtggatctacggcagtaacattggtgaaacagggattggaccttgtaatcggaaatcttggggactcaagagcaattatggggacaagagacgcctctaacaatctaactgctctgcaactcacagttgatttgaagcctaaccttcccagggaagctgcgaggatacaacaatgtaaaggacgggtctttgctcttcaggatgagccagaagttgccagggtatggttgccaaataatgactctcctggattggcaatggcaagagccttcggggacttctgccttaaagattatggtttaatatctgttccagagatatcatatcgccgccttaccgaaaaggatgaatttataatactagccaccgatggggtatgggatgttctctcaaataaggaggctgtcgacatagtagcatcagccccatctcgtgcgacagcagccagggcccttgttgactgtgctgtcaggtcatggaggttgaagttcccaacatccaagagcgatgactgtgctgttgtctgcttattcttgggtcacgagaagtcggccgactcggttcaagggagtgaacccaatgtggagacagcagaacccaccgtggaggtttccagttccacacaggattccagtgcaggggttgacgaagacattgcagatgctggcatgcatgtatctagtgcagtgcacatttccgaggccacgctgcagcactccaccacgttaagggaggtcgacgagattgtaccggtcgacgaacctacagcctcgaaggagcctggaaggtgcgggtctgctcgcagcctggcagattgcatatcgacaaacgaggaagaggaatggtccgcgctcgaaggcgtgacacgggtgaattccctcctgaacctccctagactactgtcgggcgacaagcgatcgaccagctggaggaagcggcggtgaccggtgaggaagctctcctacaattctttgccgagttcaggtgggggttcatgcagaggcgcggctcaacccagtactggcattttcagccaggcgcgtgcaaaatcctttagtctctgggaatttgttatagctgatttttaggcttccccagattgttttgccggcaggcgcgggcgtttcagattgcttcttcattcttgtgcctttgccgggaggtgttcccagaaccattcttgggcttctctgtgtccgtttgtgcataaggaagtttttgttctgtgagaagcttcttttgtaaaacatgcagtgcctcctgatgttggatgggatgggatgctcgcctgcctcccgaggctgtcttaaaacatgcagttctttttttttggttgtcctgtgaaatccagactattctcaaccctctgatttggctgccagtcttgattgttgcatcgccttcgaatgtaaaggattgtgtcacatgatcaaatggggtgtaaatttcaaatgttcctatagaaaaaaaccatttacagatggc

SEQ ID NO: 9026 - DNA, 1843 bp, Zea Mays
gtttgttcagtattgaggccaggaatggttccagttagagtatcttgaggagcgccggctgaaggatctgatcaagaagcactcagagttcatcagctacccaatctctctctggatcgagaagaccactgagaaggaaatatctgatgatgaggacgaggaagataagaaggacgaggagggcaaggttgaggatgttgatgagaaggaagaaaaggaaaagaagaagaagaagatcaaggaggtttctcatgagtggcaattggttaacaagcagaagcctatctggatgagaaagcctgaggagattaccaaagaagagtatgctgctttctacaagagcttgaccaacgactgggaggagcatctcgccgttaagcacttctctgttgagggtcagcttgagttcaaggctgtcctgtttgtgccgaagagggccccctttgacctcttcgacaccaggaagaaactgaacaacatcaagctctatgtgcgccgtgtcttcatcatggacaactgtgaggagctgatcccagagtgactgagctttgtcaagggcattgttgactctgaggaccttcccctcaacatctcccgtgagaccctccagcagaacaagatcctcaaggtcatccggaagaacctggtgaagaagtgcattgagctgttctttgagattgctgagaacaaggaggactacaacaagttctatgaggccttctcgaagaacctgaagcttggcatccacgaggactccacgaacaggaacaagattgcggagctgctgaggtatcactccaccaagagcggagatgagctgacaagcctcaaggactatgtgactaggatgaaggagggccagaatgacatctactacatcactggcgagagcaagaaggccgtggagaactcccccttccttgagaagctgaagaagaagggctatgaagtcctgtacatggtggacgccatcgacgagtatgctattggccagctcaaggagttcgagggcaagaagctcgtctcggccaccaaggagggcctgaagctcgatgagagtgaggatgagaagaagcggaaggaggagcttaaggagaagttcgagggcctgtgcaaggtgatcaaggaggtgctgggcgacaaggtggagaaggttgtggtctctgaccgcgtggtggactccccctgctgcctggtgacgggcgagtacggctggacggccaacatggagaggatcatgaaggcacaggcgctcagggactcgagcatgtctgggtacatgtcctccaagaagaccatggagatcaacccggacaacgccatcatggaggagctgcgcaagcgcgcggaggccgacaagaacgacaagtctgtcaaggaccttgtcatgcttctgttcgagacggcgctgctcacctcgggcttcagccttgacgaccccaacaccttcggcggccgcatccaccgcatgctcaagctgggcctcagcatcgacgaggacgaggctccggaggccgacaccgacatgcctcctctggaggatgacgctggcgagagcaagatggaggaggtcgactagtctggctatcgtgtcttaattggtgtgtgcgtgttttttttacttttgctagcctgcaaacttcgtacgtttattattgtcggtataatagtgctccggctgcccatctctgcttgctcggtcagttttatatatgccagctgctcatcgcagcattctccctgtgcacaactccaaaatgcgggaagagatcaattattaaccgagtgaaaagtgtttatagaacatcgtcaagtctcttgtgcactttggcactttcagtca

SEQ ID NO: 9027 - DNA, 2282 bp, Zea Mays
gttttagttagctgagatcgctattatccatgcttggaagtttacacaaagccttggataagatcaggttcgagagtttgacggacaagagcaagctggatgcccagccggagctgttcatccacatcgtccctgacaaggccaacaatactctgacaatcattgacagtggcattggtatgaccaagtcagaccttgtgaacaaccttggtaccattgcacgatctggcacaaaagagttcatggaggcactggctgctggtgccgacgtgtccatgattggtcagtttggtgtcggtttctactcggcataccttgttgctgagagggttgtcgtgaccaccaagcacaacgatgatgagcagtatgtatgggagtctcaggccggtggctccttcactgtcacacgtgatacctctggggagcaacttggcaggggtacaaagatgaccctttacctcaaggatgatcagttagagtatcttgaggagcgccggctgaaggatctgatcaagaagcactcagagttcatcagctacccaatctctctctggatcgagaagaccactgagaaggaaatatctgatgatgaggacgaggaagataagaaggacgaggagggcaaggttgaggatgttgatgagaaggaagaaaaggaaaagaagaagaagaagatcaaggaggtttctcatgagtggcaattggttaacaagcagaagcctatctggatgagaaagcctgaggagattaccaaagaagagtatgctgctttctacaagagcttgaccaacgactgggaggagcatctcgccgttaagcacttctctgttgagggtcagcttgagttcaaggctgtcctgtttgtgccgaagagggccccctttgacctcttcgacaccaggaagaaactgaacaacatcaagctctatgtgcgccgtgtcttcatcatggacaactgtgaggagctgatcccagagtgactgagctttgtcaagggcattgttgactctgaggaccttcccctcaacatctcccgtgagaccctccagcagaacaagatcctcaaggtcatccggaagaacctggtgaagaagtgcattgagctgttctttgagattgctgagaacaaggaggactacaacaagttctatgaggccttctcgaagaacctgaagcttggcatccacgaggactccacgaacaggaacaagattgcggagctgctgaggtatcactccaccaagagcggagatgagctgacaagcctcaaggactatgtgactaggatgaaggagggccagaatgacatctactacatcactggcgagagcaagaaggccgtggagaactcccccttccttgagaagctgaagaagaagggctatgaagtcctgtacatggtggacgccatcgacgagtatgctattggccagctcaaggagttcgagggcaagaagctcgtctcggccaccaaggagggcctgaagctcgatgagagtgaggatgagaagaagcggaaggaggagcttaaggagaagttcgagggcctgtgcaaggtgatcaaggaggtgctgggcgacaaggtggagaaggttgtggtctctgaccgcgtggtggactccccctgctgcctggtgacgggcgagtacggctggacggccaacatggagaggatcatgaaggcacaggcgctcagggactcgagcatgtctgggtacatgtcctccaagaagaccatggagatcaacccggacaacgccatcatggaggagctgcgcaagcgcgcggaggccgacaagaacgacaagtctgtcaaggaccttgtcatgcttctgttcgagacggcgctgctcacctcgggcttcagccttgacgaccccaacaccttcggcggccgcatccaccgcatgctcaagctgggcctcagcatcgacgaggacgaggctccggaggccgacaccgacatgcctcctctggaggatgacgctggcgagagcaagatggaggaggtcgactagtctggctatcgtgtcttaattggtgtgtgcgtgttttttttacttttgctagcctgcaaacttcgtacgtttattattgtcggtataatagtgctccggctgcccatctctgcttgctcggtcagttttatatatgccagctgctcatcgcagcattctccctgtgcacaactccaaaatgcgggaagagatcaattattaaccgagtgaaaagtgtttatagaacatcgtcaagtctcttgtgcactttggcactttcagtca

SEQ ID NO: 9028 - DNA, 2309 bp, Zea Mays
atcctcaccccaacccccgatgaccctcgtctatttgcagaccaccgataacccccctccattcgcgggttctagaagccttggataagatcaggttcgagagtttgacggacaagagcaagctggatgcccagccggagctgttcatccacatcgtccctgacaaggccaacaatactctgacaatcattgacagtggcattggtatgaccaagtcagaccttgtgaacaaccttggtaccattgcacgatctggcacaaaagagttcatggaggcactggctgctggtgccgacgtgtccatgattggtcagtttggtgtcggtttctactcggcataccttgttgctgagagggttgtcgtgaccaccaagcacaacgatgatgagcagtatgtatgggagtctcaggccggtggctccttcactgtcacacgtgatacctctggggagcaacttggcaggggtacaaagatgaccctttacctcaaggatgatcagttagagtatcttgaggagcgccggctgaaggatctgatcaagaagcactcagagttcatcagctacccaatctctctctggatcgagaagaccactgagaaggaaatatctgatgatgaggacgaggaagataagaaggacgaggagggcaaggttgaggatgttgatgagaaggaagaaaaggaaaagaagaagaagaagatcaaggaggtttctcatgagtggcaattggttaacaagcagaagcctatctggatgagaaagcctgaggagattaccaaagaagagtatgctgctttctacaagagcttgaccaacgactgggaggagcatctcgccgttaagcacttctctgttgagggtcagcttgagttcaaggctgtcctgtttgtgccgaagagggccccctttgacctcttcgacaccaggaagaaactgaacaacatcaagctctatgtgcgccgtgtcttcatcatggacaactgtgaggagctgatcccagagtgactgagctttgtcaagggcattgttgactctgaggaccttcccctcaacatctcccgtgagaccctccagcagaacaagatcctcaaggtcatccggaagaacctggtgaagaagtgcattgagctgttctttgagattgctgagaacaaggaggactacaacaagttctatgaggccttctcgaagaacctgaagcttggcatccacgaggactccacgaacaggaacaagattgcggagctgctgaggtatcactccaccaagagcggagatgagctgacaagcctcaaggactatgtgactaggatgaaggagggccagaatgacatctactacatcactggcgagagcaagaaggccgtggagaactcccccttccttgagaagctgaagaagaagggctatgaagtcctgtacatggtggacgccatcgacgagtatgctattggccagctcaaggagttcgagggcaagaagctcgtctcggccaccaaggagggcctgaagctcgatgagagtgaggatgagaagaagcggaaggaggagcttaaggagaagttcgagggcctgtgcaaggtgatcaaggaggtgctgggcgacaaggtggagaaggttgtggtctctgaccgcgtggtggactccccctgctgcctggtgacgggcgagtacggctggacggccaacatggagaggatcatgaaggcacaggcgctcagggactcgagcatgtctgggtacatgtcctccaagaagaccatggagatcaacccggacaacgccatcatggaggagctgcgcaagcgcgcggaggccgacaagaacgacaagtctgtcaaggaccttgtcatgcttctgttcgagacggcgctgctcacctcgggcttcagccttgacgaccccaacaccttcggcggccgcatccaccgcatgctcaagctgggcctcagcatcgacgaggacgaggctccggaggccgacaccgacatgcctcctctggaggatgacgctggcgagagcaagatggaggaggtcgactagtctggctatcgtgtcttaattggtgtgtgcgtgttttttttacttttgctagcctgcaaacttcgtacgtttattattgtcggtataatagtgctccggctgcccatctctgcttgctcggtcagttttatatatgccagctgctcatcgcagcattctccctgtgcacaactccaaaatgcgggaagagatcaattattaaccgagtgaaaagtgtttatagaacatcgtcaagtctcttgtgcactttggcactttcagtca

SEQ ID NO: 9029 - DNA, 1514 bp, Zea Mays
agaaaatcctggctcgtgcgatgcgacctcttggctctcgctaggttgtatgtgtgtgtgtgtttaaaagcctaatctaccgcaccagcggcctctagtgtctcctcctcctctatccctcgcaaagcaaacacacacgcgctttctcggtgccaccaccagcagcaccccgtctccgtcccggcccccgacgcccggcgggacatgaagaaagacgaggagggcgccaatgccaccgtcgccggcgacggcgacgcacgacgacgttccgcgctccccgtccgcctgctgccgctccgaccagcggctcagcggattgaggggagccctggcggcggagaaggcgtcgtacgtgtcctggtgatgggtgcggatttggcatgcgggaaagccaggcatcgtttttttttaatttcccccctcggtggtgattgttgctagctgttgctgcttttgttgtcagttttagcccccttttttcaccttctctcttctttttgaccccccctcccaactactttgtagttttgccaatcacggttctactaagaacatatcggttatcggagagcgaaatgttcgtgcggattctgctctttatctctctccctctctctatgtataaagctggctaccatgctttggcaacacgcgcgacttaactgcagctgtgcaatgctacagcctacagcagctcaattaactaactagtccaatacgaaataggagtacctttctctcatcattcttcttttttacatgatgcaagcaaacaatgtccttcggtgatgattattaccttctgaaaccatgaatcctgcctgccttttgtttgtttgtgtttcaactgtgtgtctaatagtgcaatgcagttactgtttactgcagctactgtgcatgtaaagcgtggcataataatgtaatccccggtagattttcagcgctaagcatttctcgtgcagataagatagagcagcagcagcccgcagctgatccttaccgctgcggctgtgtatcaattaggcctcgccggctgcactagccatgatgaatcccatggagaagagaggagaagagaagagaagctagccacaaaagggatgaggtgacagatgagggggagagccagacagacaacctaactggcgaaccctatgcagtcagatgcccctgcctctgaccaggcaaaaacttcagcggtccccaacgatgcagcaaaatggcattcagaggcagtagtgatcggcgaaaccagacgggccctctgcgtgctgtattttgtgttgcacacaggatgggcatagcttggttctatgattgagctgtcattggtgatatgggaagcagcgggttctaagaactactcgtgtactgcctgatattattgttgtttgttctgggatgtgctgcgggcgtgcctgataaatgggcgatggcatgcatacagttgttctcaatcttgtgaccttgttaagaaccacatgataatgcgcatgtatgtatgtactccaagc

SEQ ID NO: 9030 - DNA, 1520 bp, Zea Mays
agaaaatcctggctcgtgcgatgcgacctcttggctctcgctaggttgtatgtgtgtgtgtgtttaaaagcctaatctaccgcaccagcggcctctagtgtctcctcctcctctatccctcgcaaagcaaacacacacgcgctttctcggtgccaccaccagcagcaccccgtctccgtcccggcccccgacgcccggcgggacatgaagaaagacgaggagggcgccaatgccaccgtcgccggcgacggcgacgcacgacgacgttccgcgctccccgtccgcctgctgccgctccggtgacgaccagcggctcagcggattgaggggagccctggcggcggagaaggcgtcgtacgtgtcctggtgatgggtgcggatttggcatgcgggaaagccaggcatcgtttttttttaatttcccccctcggtggtgattgttgctagctgttgctgcttttgttgtcagttttagcccccttttttcaccttctctcttctttttgaccccccctcccaactactttgtagttttgccaatcacggttctactaagaacatatcggttatcggagagcgaaatgttcgtgcggattctgctctttatctctctccctctctctatgtataaagctggctaccatgctttggcaacacgcgcgacttaactgcagctgtgcaatgctacagcctacagcagctcaattaactaactagtccaatacgaaataggagtacctttctctcatcattcttcttttttacatgatgcaagcaaacaatgtccttcggtgatgattattaccttctgaaaccatgaatcctgcctgccttttgtttgtttgtgtttcaactgtgtgtctaatagtgcaatgcagttactgtttactgcagctactgtgcatgtaaagcgtggcataataatgtaatccccggtagattttcagcgctaagcatttctcgtgcagataagatagagcagcagcagcccgcagctgatccttaccgctgcggctgtgtatcaattaggcctcgccggctgcactagccatgatgaatcccatggagaagagaggagaagagaagagaagctagccacaaaagggatgaggtgacagatgagggggagagccagacagacaacctaactggcgaaccctatgcagtcagatgcccctgcctctgaccaggcaaaaacttcagcggtccccaacgatgcagcaaaatggcattcagaggcagtagtgatcggcgaaaccagacgggccctctgcgtgctgtattttgtgttgcacacaggatgggcatagcttggttctatgattgagctgtcattggtgatatgggaagcagcgggttctaagaactactcgtgtactgcctgatattattgttgtttgttctgggatgtgctgcgggcgtgcctgataaatgggcgatggcatgcatacagttgttctcaatcttgtgaccttgttaagaaccacatgataatgcgcatgtatgtatgtactccaagc

SEQ ID NO: 9031 - DNA, 975 bp, Zea Mays
cagccagccatcgtcacactggtgagctctgcactctgcttagctccgagcttcagtgccttcgttgtttgctccacagtccacacacacacacgtccagctagctgcactgcaccaatggccgccgtcgaggtccaggtcccgactgccgctcccgtcgaggaggctgcccagctggccgccgcctccgccgtcgagaccccgaacgaggagaccgctgctccggcggtggagaccgaggtcgtcgtcgctaaggagccggagccggtggaggccgagactgagactgagaccaaggaggccgaggccgttgctgagccgaccgaggcagagcccaaggaagcagagccggaggccgccgtcgagaagtccgtcgagtgagtccagcccagcgccggacggcggccgatctagctcgctgcgtcagcctgtcacctggcgactggcgtgcgccgcgctggtgccactgccacggcaacagcacggcatggcgccggcataggtcgctaggaaaaacctgcttttgtgttcgggttcacgtcgtgtcctacgtggcgcggcgggccccgcctagtaaaggagcgtcgttttgtgttgtggtcgaataaataatgtgtctgtgtgctgattccgtgtcgggttagtgggcccagtgtcggtgctgatgtggcctacctttacagcacatcggtgggactgggccgttgagctcctgtgtcgtttaatatgtgtacggtgtacccatctagtatgtgtttcgagtgtgtagtaagtatatttgtgtcccatccatctttcgaaactttctttttgttaagctcttgaagcgtgaactctgttacgagctgctcgccctattctaaattataaaatattttagtattttcggcatataatttttattgttatatatctatagtaaaaataatgtatctaaaaatcaaaataaggtattttcaaaatatctcattgtta

SEQ ID NO: 9032 - DNA, 1201 bp, Zea Mays
cacacgccagccagccatcgtcacactggtgagctctgcactctgcttagctccgagcttcagtgccttcgttgtttgctccacagtccacacacacacacgtccagctagctgcactgcaccaatggccgccgtcgaggtccaggtcccgactgccgctcccgtcgaggaggctgcccagctggccgccgcctccgccgtcgagaccccgaacgaggagaccgctgctccggcggtggagaccgaggtcgtcgtcgctaaggagccggagccggtggaggccgagactgagactgagaccaaggaggccgaggccgttgctgagccgaccgaggcagagcccaaggaagcagagccggaggccgccgcgccggcagcagagacggaggccgccgcgccggcagcagagacggaggctgctgctgccccggtcgaggctgctgagccggagatagccgccgagaccaaagaggtggcggctgtggaggctaacgaggaggaggaggaggcagcgcctgctgttgctgccactcctgaggtcgcagcgaccgaggaggaagcggcggcccctgctcccgaggccgccgtcgagaagtccgtcgagtgagtccagcccagcgccggacggcggccgatctagctcgctgcgtcagcctgtcacctggcgactggcgtgcgccgcgctggtgccactgccacggcaacagcacggcatggcgccggcataggtcgctaggaaaaacctgcttttgtgttcgggttcacgtcgtgtcctacgtggcgcggcgggccccgcctagtaaaggagcgtcgttttgtgttgtggtcgaataaataatgtgtctgtgtgctgattccgtgtcgggttagtgggcccagtgtcggtgctgatgtggcctacctttacagcacatcggtgggactgggccgttgagctcctgtgtcgtttaatatgtgtacggtgtacccatctagtatgtgtttcgagtgtgtagtaagtatatttgtgtcccatccatctttcgaaactttctttttgttaagctcttgaagcgtgaactctgttacgagctgctcgccctattctaaattataaaatattttagtattttcggcatataatttttattgttatatatctatagtaaaaataatgtatctaaaaatcaaaataaggtattttcaaaatatctcattgtta

SEQ ID NO: 9033 - DNA, 1111 bp, Zea Mays
cacacgccagccagccatcgtcacactggtgagctctgcactctgcttagctccgagcttcagtgccttcgttgtttgctccacagtccacacacacacacgtccagctagctgcactgcaccaatggccgccgtcgaggtccaggtcccgactgccgctcccgtcgaggaggctgcccagctggccgccgcctccgccgtcgagaccccgaacgaggagaccgctgctccggcggtggagaccgaggtcgtcgtcgctaaggagccggagccggtggaggccgagactgagactgagaccaaggaggccgaggccgttgctgagccgaccgaggcagagcccaaggaagcagagccggagatagccgccgagaccaaagaggtggcggctgtggaggctaacgaggaggaggaggaggcagcgcctgctgttgctgccactcctgaggtcgcagcgaccgaggaggaagcggcggcccctgctcccgaggccgccgtcgagaagtccgtcgagtgagtccagcccagcgccggacggcggccgatctagctcgctgcgtcagcctgtcacctggcgactggcgtgcgccgcgctggtgccactgccacggcaacagcacggcatggcgccggcataggtcgctaggaaaaacctgcttttgtgttcgggttcacgtcgtgtcctacgtggcgcggcgggccccgcctagtaaaggagcgtcgttttgtgttgtggtcgaataaataatgtgtctgtgtgctgattccgtgtcgggttagtgggcccagtgtcggtgctgatgtggcctacctttacagcacatcggtgggactgggccgttgagctcctgtgtcgtttaatatgtgtacggtgtacccatctagtatgtgtttcgagtgtgtagtaagtatatttgtgtcccatccatctttcgaaactttctttttgttaagctcttgaagcgtgaactctgttacgagctgctcgccctattctaaattataaaatattttagtattttcggcatataatttttattgttatatatctatagtaaaaataatgtatctaaaaatcaaaataaggtattttcaaaatatctcattgtta

SEQ ID NO: 9034 - DNA, 1003 bp, Zea Mays
cacacgccagccagccatcgtcacactggtgagctctgcactctgcttagctccgagcttcagtgccttcgttgtttgctccacagtccacacacacacacgtccagctagctgcactgcaccaatggccgccgtcgaggtccaggtcccgactgccgctcccgtcgaggaggctgcccagctggccgccgcctccgccgccgagactgagactgagaccaaggaggccgaggccgttgctgagccgaccgagatagccgccgagaccaaagaggtggcggctgtggaggctaacgaggaggaggaggaggcagcgcctgctgttgctgccactcctgaggtcgcagcgaccgaggaggaagcggcggcccctgctcccgaggccgccgtcgagaagtccgtcgagtgagtccagcccagcgccggacggcggccgatctagctcgctgcgtcagcctgtcacctggcgactggcgtgcgccgcgctggtgccactgccacggcaacagcacggcatggcgccggcataggtcgctaggaaaaacctgcttttgtgttcgggttcacgtcgtgtcctacgtggcgcggcgggccccgcctagtaaaggagcgtcgttttgtgttgtggtcgaataaataatgtgtctgtgtgctgattccgtgtcgggttagtgggcccagtgtcggtgctgatgtggcctacctttacagcacatcggtgggactgggccgttgagctcctgtgtcgtttaatatgtgtacggtgtacccatctagtatgtgtttcgagtgtgtagtaagtatatttgtgtcccatccatctttcgaaactttctttttgttaagctcttgaagcgtgaactctgttacgagctgctcgccctattctaaattataaaatattttagtattttcggcatataatttttattgttatatatctatagtaaaaataatgtatctaaaaatcaaaataaggtattttcaaaatatctcattgtta

SEQ ID NO: 9035 - DNA, 868 bp, Zea Mays
caacacacgccagccagccatcgtcacactggtgagctctgcactctgcttagctccgagcttcagtgccttcgttgtttgctccacagtccacacacacacacgtccagctagctgcactgcaccaatggccgccgtcgaggtccaggtcccgactgccgctcccgtcgaggaggctgcccagctggccgagactgagactgagaccaaggaggccgaggccgttgctgagccgaccgagacggaggccgccgtcgagaagtccgtcgagtgagtccagcccagcgccggacggcggccgatctagctcgctgcgtcagcctgtcacctggcgactggcgtgcgccgcgctggtgccactgccacggcaacagcacggcatggcgccggcataggtcgctaggaaaaacctgcttttgtgttcgggttcacgtcgtgtcctacgtggcgcggcgggccccgcctagtaaaggagcgtcgttttgtgttgtggtcgaataaataatgtgtctgtgtgctgattccgtgtcgggttagtgggcccagtgtcggtgctgatgtggcctacctttacagcacatcggtgggactgggccgttgagctcctgtgtcgtttaatatgtgtacggtgtacccatctagtatgtgtttcgagtgtgtagtaagtatatttgtgtcccatccatctttcgaaactttctttttgttaagctcttgaagcgtgaactctgttacgagctgctcgccctattctaaattataaaatattttagtattttcggcatataatttttattgttatatatctatagtaaaaataatgtatctaaaaatcaaaataaggtattttcaaaatatctcattgtta

SEQ ID NO: 9036 - DNA, 1115 bp, Zea Mays
acaacacacgccagccagccatcgtcacactggtccaggtcccgactgccgctcccgtcgaggaggctgcccagctggccgccgcctccgccgtcgagaccccgaacgaggagaccgctgctccggcggtggagaccgaggtcgtcgtcgctaaggagccggagccggtggaggccgagactgagactgagaccaaggaggccgaggccgttgctgagccgaccgaggcagagcccaaggaagcagagccggaggccgccgcgccggcagcagagacggaggtcaaggaagcagagacggaggccgccgcgccggcagcagagacggaggctgctgctgccccggtcgaggctgctgagccggagatagccgccgagaccaaagaggtggcggctgtggaggctaacgaggaggaggaggaggcagcgcctgctgttgctgccactcctgaggtcgcagcgaccgaggaggaagcggcggcccctgctcccgaggccgccgtcgagaagtccgtcgagtgagtccagcccagcgccggacggcggccgatctagctcgctgcgtcagcctgtcacctggcgactggcgtgcgccgcgctggtgccactgccacggcaacagcacggcatggcgccggcataggtcgctaggaaaaacctgcttttgtgttcgggttcacgtcgtgtcctacgtggcgcggcgggccccgcctagtaaaggagcgtcgttttgtgttgtggtcgaataaataatgtgtctgtgtgctgattccgtgtcgggttagtgggcccagtgtcggtgctgatgtggcctacctttacagcacatcggtgggactgggccgttgagctcctgtgtcgtttaatatgtgtacggtgtacccatctagtatgtgtttcgagtgtgtagtaagtatatttgtgtcccatccatctttcgaaactttctttttgttaagctcttgaagcgtgaactctgttacgagctgctcgccctattctaaattataaaatattttagtattttcggcatataatttttattgttatatatctatagtaaaaataatgtatctaaaaatcaaaataaggtattttcaaaatatctcattgtta

SEQ ID NO: 9037 - DNA, 1158 bp, Zea Mays
cacaacacacgccagccagccatcgtcacactggtgagctctgcactctgcttagctccgagcttcagtgccttcgttgtttgctccacagtccacacacacacacgtccagctagctgcactgcaccaatggccgccgtcgaggtccaggtcccgactgccgctcccgtcgaggaggctgcccagctggccgccgcctccgccgtcgagaccccgaacgaggagaccgctgctccggcggtggagaccgaggtcgtcgtcgctaaggagccggagccggtggaggccgagactgagactgagaccaaggaggccgaggccgttgctgagccgaccgaggcagagcccaaggaagcagagccggaggccgccgcgccggaagcagagacggaggctgctgagccggagatagccgccgagaccaaagaggtggcggctgtggaggctaacgaggaggaggaggaggcagcgcctgctgttgctgccactcctgaggtcgcagcgaccgaggaggaagcggcggcccctgctcccgaggccgccgtcgagaagtccgtcgagtgagtccagcccagcgccggacggcggccgatctagctcgctgcgtcagcctgtcacctggcgactggcgtgcgccgcgctggtgccactgccacggcaacagcacggcatggcgccggcataggtcgctaggaaaaacctgcttttgtgttcgggttcacgtcgtgtcctacgtggcgcggcgggccccgcctagtaaaggagcgtcgttttgtgttgtggtcgaataaataatgtgtctgtgtgctgattccgtgtcgggttagtgggcccagtgtcggtgctgatgtggcctacctttacagcacatcggtgggactgggccgttgagctcctgtgtcgtttaatatgtgtacggtgtacccatctagtatgtgtttcgagtgtgtagtaagtatatttgtgtcccatccatctttcgaaactttctttttgttaagctcttgaagcgtgaactctgttacgagctgctcgccctattctaaattataaaatattttagtattttcggcatataatttttattgttatatatctatagtaaaaataatgtatctaaaaatcaaaataaggtattttcaaaatatctcattgtta

SEQ ID NO: 9038 - DNA, 512 bp, Zea Mays
cttactgttacatccgccgagaatctcagatccgactccgccaccactccaccttgatgcttgcccagccataaatagatggagcccagaaaccgcccttgccatcccgatccacgctgtcgtcaccaagcgtagccattggggagagcgcagaggggcgccaccatggccatgtgtgaggaggtgccccgactgcacctagatcccacctctgactgcaccatgaagctgcgcggggtcgtcggggagttcctagagaaggccgggtcagggtcgccgcgtttgtttttgccgttgctggagaagaacaggtggttcaagaggagccacacaacgaggagttcgattcgatctagatggcgtctcccaattgactttatggcgccaaggatggactttagttcgatctatatttatcttttattttgtaagactttcgctatgtaataaatactctgattatattgtgacatttatctctatacactctgttattatatgtgttgttttct

SEQ ID NO: 9039 - DNA, 3734 bp, Zea Mays
ccatcttctgtctacataaacaagctacctgcagcgcgatgtgctccactgcagtgctgctagttcgcacaggcgttgtgcttgtgtgtttggccgccttggcgcgagcgccgagcaaggtccatgctgccgccggcaccggggatgggctccttgctatccctaccaacgcctccctgtcgcactgcccctcttggtgcggggatgtccaaatctcctacccgttcgggatagggccgggctgcttccgtcaaggcttcgagctcacctgcgatcacacagctccttctcccaggctcttcttcgtgtcggggaacagctcgatccaggtgacttctgtacatatcggcatcagtagggttcgggtttcagctgttgggttcaacgtcaccatgagcgcaggcgtggacacctacacccagtcctggaaggcccctccaggtgtcatttcttatggaagtaattatctgttcactgttggatgtggtgtctacgtctacgtgttcggtgataatatgacagatatcattggttattgcacgagtatttgcacagataacagagagatcatggagagggcaaacacgccttatagtgcctgtacagggttaggctgctgcatgattccaatacgtggcggccaaggcatcactctcaaactaggtcgcctcaatagtaccattccacacttcggtgaagcgctctcccgtgtcaagattatcgtttcacaatactatgaattcgttgctgatgatgtttacacaagttgggtgaatacaagcaacgttgatgacatgctattttacattgcaatcatggaccaaccgagctgcgcgagtgcccagtcccaagagaacaagaatacctacgcatgcagtagtgaaagcatctgcgacgacgatctaccaccagtagtatctcaaggaggctacaattgcttctgccctggtcgtcaaatagagggcgtcaacccctatattgaagatggctgcatagcatattataacccagaggcaccgagtattaggaactgtatgagattatgtggaaacataagcgttccatttccttttgggattgaagaaggctgctacgcaaatgataacctacgactcaactgcacaagcaacggcactcttattcttgatcgagggtacgcacaatatcatgtgaccaatttgtcacttgatgatgggcttttgatggttacaaacatgctgaatgccacaagcttcaacaatatggagagggtagtcatcactaactatgacggttactatcacaacaacttccaaccaacttacatggcggttgtggatggtaattatgatttctctcaggaggatacaacaataaaatgggttatagcaaacataacttgtcagaaagcaatgcaaaataatgctacatatgcgtgcgtaagtgacaacagtatatgcaaagatgtcatgcaagggaatatacgtgacgggtaccgctgcaagtgttctgatggcttccaaggaaacccataccttcaaaataattgtacagatattgatgagtgccttattccaaataaatgcaatggaatatgccacaattttgatggaggcttcaattgtacaagttgccctcacgggaaagagtatgatccaaaaaatcataaatgtgtcatgtcagctaagcagcgtattctaatttttgggattgtaattgggcttgtttgtggtcttggatccataagttttgcacttggtgcaattgtactcaccggtaagtggaaaaaaggtatccaaaggagaattcgaagagagtacttcaagaaaaatcaaggtctactcttggagcaactaatatcaaatgaaaatgccacaaacaaaacaaagatattcactttggatgaactagaggaagcaaccaacaagtttgatgctactcgtgttctaggtcatggtgggcatggcactgtttacaaagggattttgtgtgatcagcgtgtcgtggctataaaaaaatctaaaatagtggagcaaatagagatagatcagttcatcaatgaggttgctattttatctcaaatcattcaccgcaatgtggtgaaactttttggttgttgcctagaagatgaggattgcaacggaagcatcaggagcacttgcttatttacactcagctgctgcaataccaattttccatagagatgtgaagtcttctaatatactcttggacgacaacttcactgtaaaggtttcagattttggtgcttcaagatctctatcccttgatgaaacacatgtggtgacaattgtccaaggaacattcggttatttagatccagagtattatcatactggttctctaactgagaagagtgatgtgtatagttttggagtgatacttgtggaacttttgacaagaaagaaaccaatttttatcaatgaatcgggtgccaaacaaaacttatctcattacttcattgaaggactacaggaagggactctcatggaaataatagattctcaagttgtggaagaggcagaccaagaagagattaatgaaatctcctcacttatagaagcgtgcttaagatccaaaggaggacatagaccaagcatgaaagaagtagatatgagattgcaatgtctaagaacaaagaggctacggaataaaacacatcttttgattgaaaagggtggagaaatggaacctttgttatgcgcagaagctcagcacccacatgaacgtatcaatccaatttataatgaggaacgtttaacaattccaatgatgtctgggtgttacagtttggagcaagaacttgcggcagcatctagtatgattcgctaacttggtatttgcttggatgttggacacatctatagtaaccatctatttttagagaggaactatatggtatattttgttcctttcgcataagactatggtatatatggtgtgtatatgtatataatatatatgacattgctatgtttacatataatgtaatttccgtatttcaaactgtaatgcgttttagttttgttttgattacaaatttggtactctaattgtaatagtttctaaaaccaatcataatatatagttataatacacttgagatttggaatttgtattagtattgaaataaacttgagatttggacaatgtaatagcattgaaaagtagaatttttatatttttatcacttaaaaaatcaaaagaaattctatattaggtaaatatgaatattacaagcatgggattacactaattcatgctcttttttaagaactcgatgctgattctttgttttggtgacatgtattcattcgctatggtccaagcacacatctggagttcattctgtccttcaaggaaagttttggcgtaaacacaatggcaaaagagaaacttcattattaacgacctacattattaacattagtatcatcgtagaacctcaggaacaagtttatgtcgccaccgaggtgtaaaacctgttattttattttaatggctcgttgaagagatgccctttaatcttatttttttctttctaaatttaacttttaaaatggcttcgcttagttttttttgttatgtagatgtagtttatgtatcgtttccattgctcggaatatacgtacctgacaattaatgtagaaaattagtttgcgatgatcgtatcactttttgaaccacgtcagttctatttattgtcacgccgccagtttactactggccgtcaacta

SEQ ID NO: 9040 - DNA, 3477 bp, Zea Mays
ggaaagcacaccatcttctgtctacataaacaagctacctgcagcgcgatgtgctccactgcagtgctgctagttcgcacaggcgttgtgcttgtgtgtttggccgccttggcgcgagcgccgagcaaggtccatgctgccgccggcaccggggatgggctccttgctatccctaccaacgcctccctgtcgcactgcccctcttggtgcggggatgtccaaatctcctacccgttcgggatagggccgggctgcttccgtcaaggcttcgagctcacctgcgatcacacagctccttctcccaggctcttcttcgtgtcggggaacagctcgatccaggtgacttctgtacatatcggcatcagtagggttcgggtttcagctgttgggttcaacgtcaccatgagcgcaggcgtggacacctacacccagtcctggaaggcccctccagataacagagagatcatggagagggcaaacacgccttatagtgcctgtacagggttaggctgctgcatgattccaatacgtggcggccaaggcatcactctcaaactaggtcgcctcaatagtaccattccacacttcggtgaagcgctctcccgtgtcaagattatcgtttcacaatactatgaattcgttgctgatgatgtttacacaagttgggtgaatacaagcaacgttgatgacatgctattttacattgcaatcatggaccaaccgagctgcgcgagtgcccagtcccaagagaacaagaatacctacgcatgcagtagtgaaagcatctgcgacgacgatctaccaccagtagtatctcaaggaggctacaattgcttctgccctggtcgtcaaatagagggcgtcaacccctatattgaagatggctgcatagcatattataacccagaggcaccgagtattaggaactgtatgagattatgtggaaacataagcgttccatttccttttgggattgaagaaggctgctacgcaaatgataacctacgactcaactgcacaagcaacggcactcttattcttgatcgagggtacgcacaatatcatgtgaccaatttgtcacttgatgatgggcttttgatggttacaaacatgctgaatgccacaagcttcaacaatatggagagggtagtcatcactaactatgacggttactatcacaacaacttccaaccaacttacatggcggttgtggatggtaattatgatttctctcaggaggatacaacaataaaatgggttatagcaaacataacttgtcagaaagcaatgcaaaataatgctacatatgcgtgcgtaagtgacaacagtatatgcaaagatgtcatgcaagggaatatacgtgacgggtaccgctgcaagtgttctgatggcttccaaggaaacccataccttcaaaataattgtacagggattgtaattgggcttgtttgtggtcttggatccataagttttgcacttggtgcaattgtactcaccggtaagtggaaaaaaggtatccaaaggagaattcgaagagagtacttcaagaaaaatcaaggtctactcttggagcaactaatatcaaatgaaaatgccacaaacaaaacaaagatattcactttggatgaactagaggaagcaaccaacaagtttgatgctactcgtgttctaggtcatggtgggcatggcactgtttacaaagggattttgtgtgatcagcgtgtcgtggctataaaaaaatctaaaatagtggagcaaatagagatagatcagttcatcaatgaggttgctattttatctcaaatcattcaccgcaatgtggtgaaactttttggttgttgcctagaagatgaggattgcaacggaagcatcaggagcacttgcttatttacactcagctgctgcaataccaattttccatagagatgtgaagtcttctaatatactcttggacgacaacttcactgtaaaggtttcagattttggtgcttcaagatctctatcccttgatgaaacacatgtggtgacaattgtccaaggaacattcggttatttagatccagagtattatcatactggttctctaactgagaagagtgatgtgtatagttttggagtgatacttgtggaacttttgacaagaaagaaaccaatttttatcaatgaatcgggtgccaaacaaaacttatctcattacttcattgaaggactacaggaagggactctcatggaaataatagattctcaagttgtggaagaggcagaccaagaagagattaatgaaatctcctcacttatagaagcgtgcttaagatccaaaggaggacatagaccaagcatgaaagaagtagatatgagattgcaatgtctaagaacaaagaggctacggaataaaacacatcttttgattgaaaagggtggagaaatggaacctttgttatgcgcagaagctcagcacccacatgaacgtatcaatccaatttataatgaggaacgtttaacaattccaatgatgtctgggtgttacagtttggagcaagaacttgcggcagcatctagtatgattcgctaacttggtatttgcttggatgttggacacatctatagtaaccatctatttttagagaggaactatatggtatattttgttcctttcgcataagactatggtatatatggtgtgtatatgtatataatatatatgacattgctatgtttacatataatgtaatttccgtatttcaaactgtaatgcgttttagttttgttttgattacaaatttggtactctaattgtaatagtttctaaaaccaatcataatatatagttataatacacttgagatttggaatttgtattagtattgaaataaacttgagatttggacaatgtaatagcattgaaaagtagaatttttatatttttatcacttaaaaaatcaaaagaaattctatattaggtaaatatgaatattacaagcatgggattacactaattcatgctcttttttaagaactcgatgctgattctttgttttggtgacatgtattcattcgctatggtccaagcacacatctggagttcattctgtccttcaaggaaagttttggcgtaaacacaatggcaaaagagaaacttcattattaacgacctacattattaacattagtatcatcgtagaacctcaggaacaagtttatgtcgccaccgaggtgtaaaacctgttattttattttaatggctcgttgaagagatgccctttaatcttatttttttctttctaaatttaacttttaaaatggcttcgcttagttttttttgttatgtagatgtagtttatgtatcgtttccattgctcggaatatacgtacctgacaattaatgtagaaaattagtttgcgatgatcgtatcactttttgaaccacgtcagttctatttattgtcacgccgccagtttactactggccgtcaacta

SEQ ID NO: 9041 - DNA, 3170 bp, Zea Mays
caggaaagcacaccatcttctgtctacataaacaagctacctgcagcgcgatgtgctccactgcagtgctgctagttcgcacaggcgttgtgcttgtgtgtttggccgccttggcgcgagcgccgagcaaggtccatgctgccgccggcaccggggatgggctccttgctatccctaccaacgcctccctgtcgcactgcccctcttggtgcggggatgtccaaatctcctacccgttcgggatagggccgggctgcttccgtcaaggcttcgagctcacctgcgatcacacagctccttctcccaggctcttcttcgtgtcggggaacagctcgatccaggtgacttctgtacatatcggcatcagtagggttcgggtttcagctgttgggttcaacgtcaccatgagcgcaggcgtggacacctacacccagtcctggaaggcccctccaggtgtcatttcttatggaaataacagagagatcatggagagggcaaacacgccttatagtgcctgtacagggttaggctgctgcatgattccaatacgtggcggccaaggcatcactctcaaactaggtcgcctcaatagtaccattccacacttcggtgaagcgctctcccgtgtcaagattatcgtttcacaatactatgaattcgttgctgatgatgtttacacaagttgggtgaatacaagcaacgttgatgacatgctattttacattgcaatcatggaccaaccgagctgcgcgagtgcccagtcccaagagaacaagaatacctacgcatgcagtagtgaaagcatctgcgacgacgatctaccaccagtagtatctcaaggaggctacaattgcttctgccctggtcgtcaaatagagggcgtcaacccctatattgaagatggctgcatagcatattataacccagaggcaccgagtattaggaactgtatgagattatgtggaaacataagcgttccatttccttttgggattgaagaaggctgctacgcaaatgataacctacgactcaactgcacaagcaacggcactcttattcttgatcgagggtacgcacaatatcatgtgaccaatttgtcacttgatgatgggcttttgatggttacaaacatgctgaatgccacaagcttcaacaatatggagagggtagtcatcactaactatgacggttactatcacaacaacttccaaccaacttacatggcggttgtggatgggattgtaattgggcttgtttgtggtcttggatccataagttttgcacttggtgcaattgtactcaccggtaagtggaaaaaaggtatccaaaggagaattcgaagagagtacttcaagaaaaatcaaggtcatggtgggcatggcactgtttacaaagggattttgtgtgatcagcgtgtcgtggctataaaaaaatctaaaatagtggagcaaatagagatagatcagttcatcaatgaggttgctattttatctcaaatcattcaccgcaatgtggtgaaactttttggttgttgcctagaagatgaggattgcaacggaagcatcaggagcacttgcttatttacactcagctgctgcaataccaattttccatagagatgtgaagtcttctaatatactcttggacgacaacttcactgtaaaggtttcagattttggtgcttcaagatctctatcccttgatgaaacacatgtggtgacaattgtccaaggaacattcggttatttagatccagagtattatcatactggttctctaactgagaagagtgatgtgtatagttttggagtgatacttgtggaacttttgacaagaaagaaaccaatttttatcaatgaatcgggtgccaaacaaaacttatctcattacttcattgaaggactacaggaagggactctcatggaaataatagattctcaagttgtggaagaggcagaccaagaagagattaatgaaatctcctcacttatagaagcgtgcttaagatccaaaggaggacatagaccaagcatgaaagaagtagatatgagattgcaatgtctaagaacaaagaggctacggaataaaacacatcttttgattgaaaagggtggagaaatggaacctttgttatgcgcagaagctcagcacccacatgaacgtatcaatccaatttataatgaggaacgtttaacaattccaatgatgtctgggtgttacagtttggagcaagaacttgcggcagcatctagtatgattcgctaacttggtatttgcttggatgttggacacatctatagtaaccatctatttttagagaggaactatatggtatattttgttcctttcgcataagactatggtatatatggtgtgtatatgtatataatatatatgacattgctatgtttacatataatgtaatttccgtatttcaaactgtaatgcgttttagttttgttttgattacaaatttggtactctaattgtaatagtttctaaaaccaatcataatatatagttataatacacttgagatttggaatttgtattagtattgaaataaacttgagatttggacaatgtaatagcattgaaaagtagaatttttatatttttatcacttaaaaaatcaaaagaaattctatattaggtaaatatgaatattacaagcatgggattacactaattcatgctcttttttaagaactcgatgctgattctttgttttggtgacatgtattcattcgctatggtccaagcacacatctggagttcattctgtccttcaaggaaagttttggcgtaaacacaatggcaaaagagaaacttcattattaacgacctacattattaacattagtatcatcgtagaacctcaggaacaagtttatgtcgccaccgaggtgtaaaacctgttattttattttaatggctcgttgaagagatgccctttaatcttatttttttctttctaaatttaacttttaaaatggcttcgcttagttttttttgttatgtagatgtagtttatgtatcgtttccattgctcggaatatacgtacctgacaattaatgtagaaaattagtttgcgatgatcgtatcactttttgaaccacgtcagttctatttattgtcacgccgccagtttactactggccgtcaacta

SEQ ID NO: 9042 - DNA, 1961 bp, Zea Mays
attgaattcaaaataggaactaaattgaattcttgctgtttgggactgcatgaccagttttagttgtgcaggtagttcaatgaagcaaattatgtttttttagaaatgttatatatgaaagttgtagttcacttctttatcttgtttgtgtaaaaatttcatgaccataggtctagtagtttaggagttacgattttttcaagtccagtttcagaatctgtccaaattctgtctaggtttcgaaaattggactgtttggctaagctaaactgagaatcagcccttagtaattatagaagaattgtagtacatttcttaagctttccaacaaattttggagcaccctttttggtggtctagaagtcaggttatggctgtttgaaatgtgatgtctgaatctgtctaaatctggacagcaatatttgtttgtattaactgacttcgatacacattgaattaatctgagatgtttataaatgaattgtagacaattatattagctttctaaaaagtctaggatcgcctgatttcgatgtctgaaactccagttatgaatttttgaaataaagagctgaattctgtccaaatctagacagaattaaagtttagcactgtttgaccttttaaactgtcgaatcaggttgtgatgataatataagagttatagaggactttctaagctttccagaaagtcctagtttactatttttggatgcttattttgtgagttatgaactaaacaaatagttgctgttctgctgtccaaattcagcaagcatttaaatgactatttggagtttcttttgtgtggatacctagatttagttagtccttgtcttgataaatgaagttgggtggctaattttcagatctgcacctgttatggctgtagtggattgagctaattgtattggctaatatagtgcaacaaaaatcatcaatgggttataagtgtttggtagtgttgactgccttgggcatgttctcaattaggtttattgtcttctttgctgtagaatagaatcgtgactgtagttgactagttttgtttttataggtatgatcatgtaactccattattgataacccattggtcatgatacttacaacctagaattagctttaccagtgttcttgtgtccttataattataaataatgggttgttcattagtgctaataatagtgttagtccgttggcagtgtgctccagtccatgagcttaagacttgtgtgtagtcttatgattgttcgatgcttgagttagatatatttaggtgtaaaagatgcgcttgtggtacttagtaatagcttcacatatagtgtgctcataggaattgtgatgacttgttttaagtatttatcttctttagtatagattatctattttgtgttcttgctcatgctcatatgcaatatgcatctccaataggtacgctagataattatgcgaattggagggcatggatcaggatggatcacaaggtggcattgatggacccatctcgatatggacgacttgatcaagtgtcaggattgttgatgctcgccaagcgaacgtcatctaaccacactaagctagtgtatcccaggttataattttgttctgttatggatggtgctaagtgccggtgggctcggccttcttatataagtatatctcatctttagctttcttattgaggattgtcacttaagctagcatgtattttaaaacttataaatgttttatacattcaaattgtaattcttttgaatcacttgcttttgtaatcaactctgatgatatacattgtaatcttgttataacttgtaaatgttgtaacttgtaaccattttgtaataaagaatttccgctgcaaatgttggtgtgtgatttgtatttacttaatcctgcgatcttggttgtaagtcgtttatccggggtccttgggacactcggacagatcctgttaagttgtt

SEQ ID NO: 9043 - DNA, 570 bp, Zea Mays
gcccaacctagctcgcccagccacctctgctgctcccatggtacgctagataattatgcgaattggagggcatggatcaggatggatcacaaggtggcattgatggacccatctcgatatggacgacttgatcaagtgtcaggattgttgatgctcgccaagcgaacgtcatctaaccacactaagctagtgtatcccaggttataattttgttctgttatggatggtgctaagtgccggtgggctcggccttcttatataagtatatctcatctttagctttcttattgaggattgtcacttaagctagcatgtattttaaaacttataaatgttttatacattcaaattgtaattcttttgaatcacttgcttttgtaatcaactctgatgatatacattgtaatcttgttataacttgtaaatgttgtaacttgtaaccattttgtaataaagaatttccgctgcaaatgttggtgtgtgatttgtatttacttaatcctgcgatcttggttgtaagtcgtttatccggggtccttgggacactcggacagatcctgttaagttgtt

SEQ ID NO: 9044 - DNA, 572 bp, Zea Mays
ctcgcccctgccctctgtccagcgccctccctgctgcccatggtacgctagataattatgcgaattggagggcatggatcaggatggatcacaaggtggcattgatggacccatctcgatatggacgacttgatcaagtgtcaggattgttgatgctcgccaagcgaacgtcatctaaccacactaagctagtgtatcccaggttataattttgttctgttatggatggtgctaagtgccggtgggctcggccttcttatataagtatatctcatctttagctttcttattgaggattgtcacttaagctagcatgtattttaaaacttataaatgttttatacattcaaattgtaattcttttgaatcacttgcttttgtaatcaactctgatgatatacattgtaatcttgttataacttgtaaatgttgtaacttgtaaccattttgtaataaagaatttccgctgcaaatgttggtgtgtgatttgtatttacttaatcctgcgatcttggttgtaagtcgtttatccggggtccttgggacactcggacagatcctgttaagttgtt

SEQ ID NO: 9045 - DNA, 1087 bp, Zea Mays
ctgaaatcgggtcggagcatgatgtcgtgagccaagtacgctagataattatgcgaattggagggcatggatcaggatggatcacaaggtggcattgatggacccatctcgatatggacgacttgatcaagtgtcaggattgttgatgctcgccaagcgaacgtcatctaaccacactaagctagtgtatcccaggcaagccccggtgcatttgccacctccttgttgttttaaaacttttatcacttatatggtgcattaggtgatatgagttaagtgatgaaacaattgatgcattaccattccttggaatttgattatcttccttgatacctgttttataaaaagaactaatgaggcttagctctgcttagataattaaaagttgttcttttttttaaaaaaagatgacgtgttacacgggatatgggaaattttattgaaaaggaaattgggatggtgaatccatatggtcatgatggattcaacatctagaaaagtacctctgtcaggtaccaaagattgggaaatggtttaaataaaatgagaccagacgttgagcaggaaaggtcgcccgtctgtgtcgattaaggaccgttctgattgttggtctgctgatttaggaccctttaactggccacatgcctcatcatgggtaagcttagcctcggctggaccaataccaaaaaggccggcccgcaatgggagtggagagatggcgagagtatcgtgtattcacctggcaagaggctggatggtggggtactgagctctcggttggcggggacccgttctggtcttgagaaaaccgtgggcgagttgacatatacaagggttaagtgctatatatgttgtgtggttggagatccccagctgggtattaatcgattcggatcgccgaacttctcagatatgaagactggatcttcgaccttcagcgtagataacaagtgaaactaaagtggataaaatgaagctagtgtaggccaagtgaatgctctagattaggaaaaatctagattcaggaaaagtacttaatttgtgaagtaaaagtttggcataaggatccactactagtaagcttttc

SEQ ID NO: 9046 - DNA, 1089 bp, Zea Mays
tcgaactggtggccgtcttcgttcttgctgaaatcgggtacgctagataattatgcgaattggagggcatggatcaggatggatcacaaggtggcattgatggacccatctcgatatggacgacttgatcaagtgtcaggattgttgatgctcgccaagcgaacgtcatctaaccacactaagctagtgtatcccaggcaagccccggtgcatttgccacctccttgttgttttaaaacttttatcacttatatggtgcattaggtgatatgagttaagtgatgaaacaattgatgcattaccattccttggaatttgattatcttccttgatacctgttttataaaaagaactaatgaggcttagctctgcttagataattaaaagttgttcttttttttaaaaaaagatgacgtgttacacgggatatgggaaattttattgaaaaggaaattgggatggtgaatccatatggtcatgatggattcaacatctagaaaagtacctctgtcaggtaccaaagattgggaaatggtttaaataaaatgagaccagacgttgagcaggaaaggtcgcccgtctgtgtcgattaaggaccgttctgattgttggtctgctgatttaggaccctttaactggccacatgcctcatcatgggtaagcttagcctcggctggaccaataccaaaaaggccggcccgcaatgggagtggagagatggcgagagtatcgtgtattcacctggcaagaggctggatggtggggtactgagctctcggttggcggggacccgttctggtcttgagaaaaccgtgggcgagttgacatatacaagggttaagtgctatatatgttgtgtggttggagatccccagctgggtattaatcgattcggatcgccgaacttctcagatatgaagactggatcttcgaccttcagcgtagataacaagtgaaactaaagtggataaaatgaagctagtgtaggccaagtgaatgctctagattaggaaaaatctagattcaggaaaagtacttaatttgtgaagtaaaagtttggcataaggatccactactagtaagcttttc

SEQ ID NO: 9047 - DNA, 1241 bp, Zea Mays
ggatagcccctcttccatctccttccccaagcacaagtcccatggtcgcccaacctagctcgcccagccacctctgctgctcccatggtggagaagaaggttaagttcaacgctccttaggtgtttgatgatatgctcgaactggtggccgtcttcgttcttgctgaaatcgggtcggagcatgatgtcgtacgctagataattatgcgaattggagggcatggatcaggatggatcacaaggtggcattgatggacccatctcgatatggacgacttgatcaagtgtcaggattgttgatgctcgccaagcgaacgtcatctaaccacactaagctagtgtatcccaggcaagccccggtgcatttgccacctccttgttgttttaaaacttttatcacttatatggtgcattaggtgatatgagttaagtgatgaaacaattgatgcattaccattccttggaatttgattatcttccttgatacctgttttataaaaagaactaatgaggcttagctctgcttagataattaaaagttgttcttttttttaaaaaaagatgacgtgttacacgggatatgggaaattttattgaaaaggaaattgggatggtgaatccatatggtcatgatggattcaacatctagaaaagtacctctgtcaggtaccaaagattgggaaatggtttaaataaaatgagaccagacgttgagcaggaaaggtcgcccgtctgtgtcgattaaggaccgttctgattgttggtctgctgatttaggaccctttaactggccacatgcctcatcatgggtaagcttagcctcggctggaccaataccaaaaaggccggcccgcaatgggagtggagagatggcgagagtatcgtgtattcacctggcaagaggctggatggtggggtactgagctctcggttggcggggacccgttctggtcttgagaaaaccgtgggcgagttgacatatacaagggttaagtgctatatatgttgtgtggttggagatccccagctgggtattaatcgattcggatcgccgaacttctcagatatgaagactggatcttcgaccttcagcgtagataacaagtgaaactaaagtggataaaatgaagctagtgtaggccaagtgaatgctctagattaggaaaaatctagattcaggaaaagtacttaatttgtgaagtaaaagtttggcataaggatccactactagtaagcttttc

SEQ ID NO: 9048 - DNA, 1094 bp, Zea Mays
ctcgcccctgccctctgtccagcgccctccctgctgcccatggtacgctagataattatgcgaattggagggcatggatcaggatggatcacaaggtggcattgatggacccatctcgatatggacgacttgatcaagtgtcaggattgttgatgctcgccaagcgaacgtcatctaaccacactaagctagtgtatcccaggcaagccccggtgcatttgccacctccttgttgttttaaaacttttatcacttatatggtgcattaggtgatatgagttaagtgatgaaacaattgatgcattaccattccttggaatttgattatcttccttgatacctgttttataaaaagaactaatgaggcttagctctgcttagataattaaaagttgttcttttttttaaaaaaagatgacgtgttacacgggatatgggaaattttattgaaaaggaaattgggatggtgaatccatatggtcatgatggattcaacatctagaaaagtacctctgtcaggtaccaaagattgggaaatggtttaaataaaatgagaccagacgttgagcaggaaaggtcgcccgtctgtgtcgattaaggaccgttctgattgttggtctgctgatttaggaccctttaactggccacatgcctcatcatgggtaagcttagcctcggctggaccaataccaaaaaggccggcccgcaatgggagtggagagatggcgagagtatcgtgtattcacctggcaagaggctggatggtggggtactgagctctcggttggcggggacccgttctggtcttgagaaaaccgtgggcgagttgacatatacaagggttaagtgctatatatgttgtgtggttggagatccccagctgggtattaatcgattcggatcgccgaacttctcagatatgaagactggatcttcgaccttcagcgtagataacaagtgaaactaaagtggataaaatgaagctagtgtaggccaagtgaatgctctagattaggaaaaatctagattcaggaaaagtacttaatttgtgaagtaaaagtttggcataaggatccactactagtaagcttttc

SEQ ID NO: 9049 - DNA, 2998 bp, Zea Mays
cacacagcacacaggaaagcacaccatcttctgtctccataaacaagctacctgcagcgatgtgctccactgcagtgctgctagttcgcacatgcgttgtgcttgtgtgtttggccgccttggcgcgagcgccggccaaggtccatgctgcctccggcaccggggatgggctccttgctatccctaccaacgcctccctgtcgcactgcccctcttggtgcggggatgtccaaatctcgtacccgttcgggatagggccgggctgcttccgtcaaggcttcgagctcacctgcgatcaaacagctccttctcccaggctcttcttcgtgtcgcggaacagctcgatccaggtgacttctctatatgtcggcagcagtgtggttttggcttcagctgttgggttcaacgtcaccatgagcgcaggcgtggacacctacaccaagtcttgggaggcccctactgccactggtgtcagtttttatgcagatcataattttctgtacactgttggatgtggtgtctacgtctacgtgttcggtgataatatgacagatatcattggttattgcacgagtatttgcacagataacagagagatcatggagagcgttggtgcctgtgaagggttaggctgctgcagcattctaatgcgtggcggccaaggcttcactctcaaactaggtcgcctcaatagtaccattccacagttcggtgaagcgctctccagtgtcaagattatcttttcggaatactatgaattcgttactgatgatgtttatgcaagttgggtgaatacaagcaatgttcatggcatagtacttgacattgcaatcacggaccaaccaagctgcgcgagtgcccggtcccaagagaacaaggatacctacgcatgcactagtgaaagcatctgcgacgacgttcaaggaggctacagttgcgtctgccctggtcaaatagagggcaacccctatattaaagatggctgcatagcatattacaacccagaggcaccgagtattaggaactgtacgagattatgtggaaacataagcgttccatttccttttgggatcgaagaaggctgttacgcaaatgataacctacgactcaactgcacaattaacgacactactcttattcttgatcgagggtacgcacagtattgtgtgaccaatttgtcacttgatgatgggcttttgatggttacaaacatgctgaatgccacaagcttcaacaatatggagagggtagtcatcactaactatgacggttactaccagaacggcttctattcaaccgatgaggacgttgtggatggtaattatgatttctctcaggaggatacaacaataaaatggtttatagcaaacataacttgtcagaaagcaatgcaaaataatgctacatatgcgtgcgtaagtgacaacagtatatgcaaagatgtcatgcgagggaatatacgtgacgggtaccgctgcaagtgttccgatggcttccaaggaaacccataccttcaaaataattgtacagatattaatgagtgctttattccaaataaatgcaatggaatatgccacaattttgatggaggcttcaattgtacaagttgccctcatgggaaagagtatgatccaaaaaatcaaaaatgtgtcatgtcagctaagcagcgtattctaatttttggtgagtcatgactttatgcaacaaattaaaagacatgaaatattcatggtctcatttaatggatgtagggattgtaattgggcttgtttgtggtcttggatccataagttttgcacttggtgcaattgtactcaccggtaagtggaaaaaaggtatccaaaggagaattcgaagagagtacttcaagaaaaatcaaggtctactcttggagcaactaatatcgaatgaaaatgctacaaacaaaacaaagatattcactttggatgaattagaggaagcaaccaacaagtttgatgctactcgtgttctaggtcatggtgggcatggcactgtttacaaagggattttggctgatcagcgtgtcgtggctataaaaaaatctaaaatagtggagcaaatagagatagatcagttcatcaatgaggttgctattttatctcaaatcattcaccgcaatgtggtgaagctttttggttgttgcctagaagatgaggtacccttgctagtctatgagttcatatcaaatggcactttgtatgacattcttcatgaaaatattgcaacaaaatgcttgttctcatgggatgatcgaattaggattgcaacggaagcatcaggagcacttgcttatctacactcagctgctgcaataccaattttccatagagatgtgaagtcttctaatatactcttggacgacaacttcactgtaaaggtttcagattttggtgcttcaagatctctatcccttgatgaaacacatgtggtgacaattgtccaaggaacatttggttatttagatccagagtactattatactggttctctaactgagaagagtgatgtgtatagttttggagtgatacttgtggaacttttgacaagaaagaaaccaatttttatcaatgaatcgagtgccaaacaaaacttatctcattacttcattgaaggactacaggaaggggctctcatggaaataatagattctcaagttgtggaagaggcagaccaagaagagattaatgatatctcctcacttatagaaacgtgcttaagatccaaaggagggcatagaccaagcatgaaagaagtagatatgagattgcaatgtctaagaacaaagaggctacggaataaaacacatcttttgattgaaaagggtggagaaatggaacctttgttatgcgtagaagctcagcacccacatgaacgtatcaatccaatttataatgaggaacatttaacaattccaatgatgtctgggtgctacagtttggagcaagaacttgcggcagcatccagtatggttcgctaa

SEQ ID NO: 9050 - DNA, 808 bp, Zea Mays
tctagttactagtcaggactaaaaatttgtcctcgtgtaaaaagctttgttcggttgagctggtattggcgggtattgtggtataatccacgagtgttatctcgatgtggatgaaatactagcccgtgacaaaagtggtgttcgtttggcccacgcttgtttccaaaccatggccaatccccatgaaagtcgtctatcccagcctggaatcaatccacgaatgaacagttgtggaactcatcccggccaacggcgtagaagcaatgacggcgacacgatttggaggaagtgacggcggcgacacaaggccccttccactgatggtttgggtttcttgcccgcgacggccacaaccgcccaaagagatggtagctcactcgtccctaccgagacgtgtcggatggcgttctgtagggcagaggcaaccttcagcgaggtcgaggagaagagactaggctgggcggcttggatactgaactgcaccatggcatcgttcgacgaggcagtgatgagggagtcgttggagcggtgggtctgggaatcggacttcagatacatgggctacttgtcctctgctggcagcacaaggctggtcatagaaagtttgccattgcaaggatatgtggtttcctttgtcagtaagatctagtctttgagtttcagagtttcagtgttagttttcgtcagtttcgtcagtcactgattgtgccttggaatcgatcacgtcgcgtgtcggcaaaattgtagccatgacagggtacttacttacctctggcagacagagtgcccatgcgtggttgtttggtgg

SEQ ID NO: 9051 - DNA, 1878 bp, Zea Mays
ctctatcagactcagtattgtgctgtttcagatttttgaaactgatttttcagtgacattggctgtactttggggtaccataacttttgttctatatgtttttagtcatgcgttgctatataaaataggtagagctacaagtagagaataattttggttaagggagagtggtctgttgctgcgaagaattggtagatcagagggcctgaacagggagggtgcaatggagaaatgagtgctgtttcagtgaaccagagtctgaattggggaaaactaaagaagaatctcgtctccctgtgatttcacttgtagttttaataaatgaagataagggggaagtgcttagcctaggtgctagtggctgctctccccacgggaaatatccaaattcgtactgttgtggagcagtggacagaggggaagaatctggatgggctgtcgagcagtagcagttcagggtggagtaaaaatatctgaagaaaatatcactggccactacggactccatgtacttctaggggaaactgaggataagaaagaaatgtgctggggggacaggtaacttggcacagccttatcaccccaaggataggattgaagatgtgaactctatcctatgtgttagctgtctgtctgcttggtggtgtgttgtccctgggagttttggccaccactgctgttccactgtgccttgcccttgcgtggtggtcatgcagtggggaggtcagaggtggagtatattagttttgttttcccctgcgataagtcctagtaaagccacaaatagcccattgcttgccatgacagttgaagcctagaactgaaacttgtggtgctcccgttgcttccatgacctgctcactgtgcctcaccattcttctatacatgtgttaacttctccagccactcctgtcgcccagttgctttgttcaagacagatgctcgacatcgtcctcctgtgtagtgacctcggccaccagccccttcacctcacagtggccagaacgtagtcgtgccaccacaattcatcgccgtgtttagtttcatcgtcgaccagccaacgtacgtcttccccaagcagtttcatgtacccaccgagaacttggactgtcagaaggagtgtaaattaaagatgaagtggttgtggaagaggagtttgctccagtgcttgttcatcaagtggatggagctatctaactggttattgggtagaagatctagaacctcttcactacaataaggcaagccccggtgcatttgccacctcccttgtgtttacaaaattttatcacttatatgttgcattaggtaataggagttgattgattaaacacttgatgcattaccatccttgaaagattgattaccataccttgtcacctgttttataaaagctagagatgcttagtcatgctgatagactaagaaaaatgtttttgatctatgactcatgtttttacaaacaagaaaatgggcttgggataatgaaggcatcaagacgttgataaattcattatcctggcatggcccctctgtcaggcgccaaaattttgaaatagtttaaaatgggaccagacgctgagcaggaaaggtcgtccgtctgtgtcgattaaggaccgtaccgattgttggcctgatgatctaggaccttttaactggccacatacctcgtcatgggtaagcctgaacccggctattccatacgtgaaaagacaaccgcgcactgggcgtgggagatggtgggagtagcagttaccctcctagcaagaagctgaatgttagggtaatgtgctcccgggtagcgcggaccagttcatgtagtggaggatccgtggggatggttgacatatgcaagggttaagtgctacatatatcgtg

SEQ ID NO: 9052 - DNA, 2073 bp, Zea Mays
ataatatttaagtctgaatatgtgtgtttttacccaacttcggggccttgtggtaataaatccaaaagagatttgggttaaaaatcagtagcaaaatgagataccagatgtagatgaacaagttttgttcaaagagtgggcttgcttctgtatggaatttagagaatagcctgctgcaaaaccctctatcagactcagtattgtgctgtttcagatttttgaaactgatttttcagtgacattggctgtactttggggtaccataacttttgttctatatgtttttagtcatgcgttgctatataaaataggtagagctacaagtagagaataattttggttaagggagagtggtctgttgctgcgaagaattggtagatcagagggcctgaacagggagggtgcaatggagaaatgagtgctgtttcagtgaaccagagtctgaattggggaaaactaaagaagaatctcgtctccctgtgatttcacttgtagttttaataaatgaagataagggggaagtgcttagcctaggtgctagtggctgctctccccacgggaaatatccaaattcgtactgttgtggagcagtggacagaggggaagaatctggatgggctgtcgagcagtagcagttcagggtggagtaaaaatatctgaagaaaatatcactggccactacggactccatgtacttctaggggaaactgaggataagaaagaaatgtgctggggggacaggtaacttggcacagccttatcaccccaaggataggattgaagatgtgaactctatcctatgtgttagctgtctgtctgcttggtggtgtgttgtccctgggagttttggccaccactgctgttccactgtgccttgcccttgcgtggtggtcatgcagtggggaggtcagaggtggagtatattagttttgttttcccctgcgataagtcctagtaaagccacaaatagcccattgcttgccatgacagttgaagcctagaactgaaacttgtggtgctcccgttgcttccatgacctgctcactgtgcctcaccattcttctatacatgtgttaacttctccagccactcctgtcgcccagttgctttgttcaagacagatgctcgacatcgtcctcctgtgtagtgacctcggccaccagccccttcacctcacagtggccagaacgtagtcgtgccaccacaattcatcgccgtgtttagtttcatcgtcgaccagccaacgtacgtcttccccaagcagtttcatgtacccaccgagaacttggactgtcagagctcccagcagaaggagtgtaaattaaagatgaagtggttgtggaagaggagtttgctccagtgcttgttcatcaagtggatggagctatctaactggttattgggtagaagatctagaacctcttcactacaataaggcaagccccggtgcatttgccacctcccttgtgtttacaaaattttatcacttatatgttgcattaggtaataggagttgattgattaaacacttgatgcattaccatccttgaaagattgattaccataccttgtcacctgttttataaaagctagagatgcttagtcatgctgatagactaagaaaaatgtttttgatctatgactcatgtttttacaaacaagaaaatgggcttgggataatgaaggcatcaagacgttgataaattcattatcctggcatggcccctctgtcaggcgccaaaattttgaaatagtttaaaatgggaccagacgctgagcaggaaaggtcgtccgtctgtgtcgattaaggaccgtaccgattgttggcctgatgatctaggaccttttaactggccacatacctcgtcatgggtaagcctgaacccggctattccatacgtgaaaagacaaccgcgcactgggcgtgggagatggtgggagtagcagttaccctcctagcaagaagctgaatgttagggtaatgtgctcccgggtagcgcggaccagttcatgtagtggaggatccgtggggatggttgacatatgcaagggttaagtgctacatatatcgtg

SEQ ID NO: 9053 - DNA, 602 bp, Zea Mays
ggagtatattagttttgttttcccctgcgataagtcctagtaaagccacaaatagcccattgcttgccatgacagttgaagcctagaactgaaacttgtggtgctctcgttgcttccatgacctgctcactgtgcctcaccattcttctatacatgtgttaacttctccagccactcctgtcgcccagttgctttgttcaagacagatgctcgacatcgtcctcctgtgtagtgacctcggccaccagccccttcacctcacagtggccagaacgtagtcgtgccaccacaattcatcgccgtgtttagtttcatcgtcgaccagccaacgtacgtctttcccaagcagtttcatgtacccaccgagaacttggactgtcagaaggagtgtaaattaaagatgaagtggttgtggaagaggagtttgttccagtgcttgttcatcaagtggatggagctatctaactggttattgggtagaagatctagaatctcttcactacaataaggcaagccccggtgcatttgccacctcccttgtgtttacaaaattttatcacttatatgttgcattaggtaataggagttgattgattaaacac

SEQ ID NO: 9054 - DNA, 852 bp, Zea Mays
actacggactccatgtacttctaggggaaactgaggataagaaagaaatgtgctggggggacaggtaacttggcacagccttatcaccccaaggataggattgaagatgtgaactctatcctatgtgttagctgtctgtctgcttggtggtgtgctgtccctgggagttttggccaccactgctgttccactgtgccttgcccttgcgtggtggtcatgcagtggggaggtcagaggtggagtatattagttttgttttcccctgcgataagtcctagtaaagccacaaatagcccattgcttgccatgacagttgaagcctagaactgaaacttgtggtgctctcgttgcttccatgacctgctcactgtgcctcaccattcttctatacatgtgttaacttctccagccactcctgtcgcccagttgctttgttcaagacagatgctcgacatcgtcctcctgtgtagtgacctcggccaccagccccttcacctcacagtggccagaacgtagtcgtgccaccacaattcatcgccgtgtttagtttcatcgtcgaccagccaacgtacgtctttcccaagcagtttcatgtacccaccgagaacttggactgtcagagctcccagcagaaggagtgtaaattaaagatgaagtggttgtggaagaggagtttgttccagtgcttgttcatcaagtggatggagctatctaactggttattgggtagaagatctagaatctcttcactacaataaggcaagccccggtgcatttgccacctcccttgtgtttacaaaattttatcacttatatgttgcattaggtaataggagttgattgattaaacac

SEQ ID NO: 9055 - DNA, 1668 bp, Zea Mays
cttcaaaattcgctttggcaaacatctcggatgctaactcgtgagaagacttaacaccggtcaagctccactagttttgagcatgcatggcggtggtctctccagcctccccgtgatataaattctccagtctccactcgttgtttccatgcatcgaagaaaaaacacgagaatacgtctgatttggcaagtcttgttggccgcagcgacgaccgtaacatcagaatgctactgttgccctgagattccaagaccaggtcgtccttctccttccactagctagcagaatgctagcttgccccacgcaactgcaacacacaggaaagcacaccatcatctgtctccataaacaaggcctgcagcgatgtgctccactgcagtgctgctagttcgcacatgcgttgtgcttgtgtgtttggccgccttggcgcgagcgccggccaaggtccatgctgccgccggcaccggggatgggctccttgctatccctaccaacgcctccctgtcgcactgcccctctcgctgcggggatgtccaaatctcgtacccgttcgggatagggccgggctgcttccggcaaggcttcgagctcagctgcgatcgcacaactccttctcccaggctcttcttcgtgtcggggaacagctcgatccaggtgacttcactatatgtccgcaacagtgtggtttgggtttcagctgttgggttcaacgtcaccatgagcgcaggcgtggacacctacaccaagtcttgggaggcccctactgccacggataacagagagatcatggagagcgcaaacactggttctggtgcctgtgaagggttaggctgctgcagcattccaatacgtggcggccaaggcttcactctcaaactagatgatgtttacgcaagttgggtggtgaatacaagcaatgttcacgccatgctacttaacattgcaatcacggatcaaccaagctgcgcgagtgcccagtcccaagagaacaaggatacctacgcatgcagtagtgaaagcatctgctacgactatctaccaccatcagtatctcaaagaggctacacttgcttctgccctggtcaaatagagggcaacccctatattgaagatggctgcatagcatattacaacccagaggcgcccaataggaactgtatgagattatgtggaaacataagcgttccatttccttttgggattcaagaaggctgttacgcaaatgataacctacgactcgactgcacaagtaacgacactcttattcttgatcgagggtacgcacagtatcgcgtgaccaatttgtcacttgatgatgggcttctgatggttacaaacatgttgaatgacacaagctccaacaatgtggggaggataatcatcactagtaacaatgacaaataccaggaggttatggatggtaattatgatttctctcaggaggacgtggcaataaaatgggttatatcaaacataacttgtcagaaagcaatgcaaaataatgctacatatgcgtgcgtaagtgacaacagtatatgcaaagatgtcatgcgaggaaatatacgtgacgggtaccgctgcaagtgttccgatggcttccaaggaaacccataccttcataataactgtacagagttcaaaaacgggttccattcaggtgctacaag

SEQ ID NO: 9056 - DNA, 3976 bp, Zea Mays
atggccgccgccctccgcctgcaacgccagagtctcgccgccagcccctttctcttctccgcccatggcctccgcaccgcaagctcgaggtcatcctcactacggtaacgcctccactctctctctctctctcctctctctcagtctctccccgtttattaatactacggtgggtgtgtgttagccaaacggtcgtttatttcagttactgcgaggtttttctgatctagttttcagctgtgctgtcctgggacggtcgcaactcactacaaaagggaaaataatcggagtttgttttcgagccatttcgtaatgatgcacgggtaggctgtgcaactcatgagctagaaatattttccgatctgctttattgacggtagaaaacttgattgaaatggctctttatgtctctccaaggccaaatatcagttaccatatcttcagttgatatgtttttggtctaagaacatagacgggttagacgggattggcaatcacgagcctatcaagacaaaggataagaaattttacgagagatctgaacgctagctttatcaaactcctcagcgaattaaaggctacctgaatctggcctcggaaaaaatcaaatatcagttaacatatcttcagttggtcttttcttggtataagaacattgacgggttagacgggattggcaatcacgagcctatcaagacaaaggataagaaattttacgagagatctgaacactagctttatcaaactcctcagtgaattaaaggctatctgaatctaagttaggaagcatcgagagatcacagttatagtcaaatactattcttttctcagatatcgctttcaagaagaaaaaaaaaacaccgagcacacttcaaaattcgctttggcaaacatctcggatgataactcgtgagaagacttaacaccggtcaagctccactagttttgagcatgcatgcatggcggtggtctctccagtctccccgtgatataaattctctagtctccactctccactcgttgtttccatgcatcgaagaaaaaacaggaggagaatacgtctgatttggcaagtcttgttggccgcagcgacgaccgtaacatcagaatgctactgttgccctgagattccaagaccaggtcgtccttctccttccactagctagcagaatgctagcttgccccacgcatgacgcaactgcaagtgagatttttttttattgttttttgttttcttctggcgcgcgctagctgttagcgtctctcagcatataaattaattaaaccagtctatatctatactacttattaaaaaggcgcgcagaaaaaaaatcaaactgtggctgctcaggaatcaaaccttggatctattgagcagaatgcttaaccttccaccctctagccaacgtgactcatattgaattgtgtacaacttcaactaagacgtcttttgtgtttaacccgtctctgtatgctcactgagtctaaaaaaacatttacagcttggctcttgatctttctgaaatttgggacgcagttcaggaaataaagaaaatacggaaaaagagtttagaaattgatttttagtttaaaaataattgtaaaaacccatttaattcatgggaatttcatattaaatccaaatgagttcattccaatttctataattctataatattattttttatcatataatacctctgttttgtcatgaaaacaacaataaaattaatttcctaattaatcctatatcaaatacataaaactttggaaattcgtaacttctccattttaattccaaattgaaccgttccagttgtgttagtcttgtatgaatatttactacgcagtaacaacattgattataccatatttcatacttttgctatccctaccaacgcctccctgtcgcactgcccctcttggtgcgggaatgtccaaatttcctacccgttcgggatagggccgggctgtttccggcaaggcttcgagctcagctgcgatcgcacaactccttctcccaggctcttcttcgtgtcggggaacagctcgatccgggtgacttctctacatgtccgcggcaattgggttatggcttctgctgttgggtacaacgtcaccatgagcgcaggcgtggacacctacaccaagtcttgggaggcccctactgccacgggtgtcagtttttatccagattataataatctgtacactgttggatgtggtgtctacgtctacgtgttcggtgataatatgacagatatcattggttcttgcacgagtatttgcacagataacagagagatcatggagagcgcaaacactggttctggtgcctgtgaagggttaggctgctgcagcattccaatacgtggcggccaaggcttcactctcaaactaggtcgcctcaatagtaccattccacagttcggtgaagcgctctccaatgtcaagattatcttttcgcaaaactatgacttcgttacagatgatgtttacgcaagttgggtggtgaatacaagcaatgttcacggcatgctacttaacattgcaatcacggaccaaccaagctgcgcgagtgcccagtcccaagagaacaaggatacctacgcatgcagtagtgaaagcatctgcgacgacgatctatcaccatcagggtttaacttaccgtatcgtgtgaccaatttgtcacttgatgatgggcttctgatggttacaaacatgctgaatgacacaagctccaacaatatggagagggtagtcctcgttaactatgacggttacaaccagaacggcttctattcaaccgacttctattcaaccgatgaggacgttgtggatgatattgatgagtgccttattccaaataaatgcaatggaatatgccacaatgttgatggcggtttcaattgtacaagttgccctcatgggaaagagtatgatccaaaaaagaaaaaatgtgtcatgtcagctaagcagcgtattctaatttttgggattgtaattgggcttgtttgtggtcttggatccataagttttgcacttggtgcaattatactcaccggtaagtggaaaaaaggcatccaaaggagaattcgaagagagtacttcaagaaaaatcaaggtctactcttggagcaactaatatcgaatgaaaatgctacaaccaaaacaaagatattcactttggatgaactagaggaagcaaccaacaagtttgatgctactcgtgttctaggtcatggtgggcatggcactgtttacaaagggattttgtctgatcagcgtgtcgtggctataaaaaaatctaaaatagtggagcaaatagagatagatcagttcatcaatgaggttgctattttatctcaaatcattcaccgcaatgtggtgaagctttttggttgttgcctagaagatgaggtacccttgctagtctatgagttcatatcgaatggcactctgtatgacattcttcatgaaaatattgcaacaaaatgcttgttgtcatgggatgatcgaattaggattgcaacggaagcatcaggagcacttgcttatctacactcagctgctgcaataccaattttccatagagatgtgaagtcttctaatatactcttggacgacaacttcactgtaaaggtttcagattttggtgcttcaagatctttatcccttgatgaaacacatgtggtgacaattgtccaaggaacattcggttatttagatccagagtattattatactggttctctaactgagaagagtgacgtgtatagttttggagtgatacttgtggaacttttgacaagaaagaaaccaatttttatcaatgaattgggtgccaaacaaaacttatctcattacttcattgaaggatacaggaagggactctcgtggaaataatagattctcaagttgtggaagaggcagaccaagaagagattaatgatatctcctcacttatagaagcgtg

SEQ ID NO: 9057 - DNA, 4207 bp, Zea Mays
gcggaacacactgtcggcatggccgccgccctccgcctgcaacgccagagtctcgccgccagcccctttctcttctccgcccatggcctccgcaccgcaagctcgaggtcatcctcactacggtaacgcctccactctctctctctctctcctctctctcagtctctccccgtttattaatactacggtgggtgtgtgttagccaaacggtcgtttatttcagttactgcgaggtttttctgatctagttttcagctgtgctgtcctgggacggtcgcaactcactacaaaagggaaaataatcggagtttgttttcgagccatttcgtaatgatgcacgggtaggctgtgcaactcatgagctagaaatattttccgatctgctttattgacggtagaaaacttgattgaaatggctctttatgtctctccaaggccaaatatcagttaccatatcttcagttgatatgtttttggtctaagaacatagacgggttagacgggattggcaatcacgagcctatcaagacaaaggataagaaattttacgagagatctgaacgctagctttatcaaactcctcagcgaattaaaggctacctgaatctggcctcggaaaaaatcaaatatcagttaacatatcttcagttggtcttttcttggtataagaacattgacgggttagacgggattggcaatcacgagcctatcaagacaaaggataagaaattttacgagagatctgaacactagctttatcaaactcctcagtgaattaaaggctatctgaatctaagttaggaagcatcgagagatcacagttatagtcaaatactattcttttctcagatatcgctttcaagaagaaaaaaaaaacaccgagcacacttcaaaattcgctttggcaaacatctcggatgataactcgtgagaagacttaacaccggtcaagctccactagttttgagcatgcatgcatggcggtggtctctccagtctccccgtgatataaattctctagtctccactctccactcgttgtttccatgcatcgaagaaaaaacaggaggagaatacgtctgatttggcaagtcttgttggccgcagcgacgaccgtaacatcagaatgctactgttgccctgagattccaagaccaggtcgtccttctccttccactagctagcagaatgctagcttgccccacgcatgacgcaactgcaagtgagatttttttttattgttttttgttttcttctggcgcgcgctagctgttagcgtctctcagcatataaattaattaaaccagtctatatctatactacttattaaaaaggcgcgcagaaaaaaaatcaaactgtggctgctcaggaatcaaaccttggatctattgagcagaatgcttaaccttccaccctctagccaacgtgactcatattgaattgtgtacaacttcaactaagacgtcttttgtgtttaacccgtctctgtatgctcactgagtctaaaaaaacatttacagcttggctcttgatctttctgaaatttgggacgcagttcaggaaataaagaaaatacggaaaaagagtttagaaattgatttttagtttaaaaataattgtaaaaacccatttaattcatgggaatttcatattaaatccaaatgagttcattccaatttctataattctataatattattttttatcatataatacctctgttttgtcatgaaaacaacaataaaattaatttcctaattaatcctatatcaaatacataaaactttggaaattcgtaacttctccattttaattccaaattgaaccgttccagttgtgttagtcttgtatgaatatttactacgcagtaacaacattgattataccatatttcatacttttgctatccctaccaacgcctccctgtcgcactgcccctcttggtgcgggaatgtccaaatttcctacccgttcgggatagggccgggctgtttccggcaaggcttcgagctcagctgcgatcgcacaactccttctcccaggctcttcttcgtgtcggggaacagctcgatccgggtgacttctctacatgtccgcggcaattgggttatggcttctgctgttgggtacaacgtcaccatgagcgcaggcgtggacacctacaccaagtcttgggaggcccctactgccacgggtgtcagtttttatccagattataataatctgtacactgttggatgtggtgtctacgtctacgtgttcggtgataatatgacagatatcattggttcttgcacgagtatttgcacagataacagagagatcatggagagcgcaaacactggttctggtgcctgtgaagggttaggctgctgcagcattccaatacgtggcggccaaggcttcactctcaaactaggtcgcctcaatagtaccattccacagttcggtgaagcgctctccaatgtcaagattatcttttcgcaaaactatgacttcgttacagatgatgtttacgcaagttgggtggtgaatacaagcaatgttcacggcatgctacttaacattgcaatcacggaccaaccaagctgcgcgagtgcccagtcccaagagaacaaggatacctacgcatgcagtagtgaaagcatctgcgacgacgatctatcaccatcagggtttaacttaccgtatcgtgtgaccaatttgtcacttgatgatgggcttctgatggttacaaacatgctgaatgacacaagctccaacaatatggagagggtagtcctcgttaactatgacggttacaaccagaacggcttctattcaaccgacttctattcaaccgatgaggacgttgtggatggtaattatgatttctctcaggaggatacaacaataaaatgggttatagcaaacataacttgtcacaaagcaatgcaaaataatgctacatatgcgtgtgtaagtgacaacagtatatgcaaagatgtcatgcgagggaatatacgtgacgggtaccgctgcaagtgttccaatggcttccaaggaaacccataccttcaaaataactgtacagatattgatgagtgccttattccaaataaatgcaatggaatatgccacaatgttgatggcggtttcaattgtacaagttgccctcatgggaaagagtatgatccaaaaaagaaaaaatgtgtcatgtcagctaagcagcgtattctaatttttgggattgtaattgggcttgtttgtggtcttggatccataagttttgcacttggtgcaattatactcaccggtaagtggaaaaaaggcatccaaaggagaattcgaagagagtacttcaagaaaaatcaaggtctactcttggagcaactaatatcgaatgaaaatgctacaaccaaaacaaagatattcactttggatgaactagaggaagcaaccaacaagtttgatgctactcgtgttctaggtcatggtgggcatggcactgtttacaaagggattttgtctgatcagcgtgtcgtggctataaaaaaatctaaaatagtggagcaaatagagatagatcagttcatcaatgaggttgctattttatctcaaatcattcaccgcaatgtggtgaagctttttggttgttgcctagaagatgaggtacccttgctagtctatgagttcatatcgaatggcactctgtatgacattcttcatgaaaatattgcaacaaaatgcttgttgtcatgggatgatcgaattaggattgcaacggaagcatcaggagcacttgcttatctacactcagctgctgcaataccaattttccatagagatgtgaagtcttctaatatactcttggacgacaacttcactgtaaaggtttcagattttggtgcttcaagatctttatcccttgatgaaacacatgtggtgacaattgtccaaggaacattcggttatttagatccagagtattattatactggttctctaactgagaagagtgacgtgtatagttttggagtgatacttgtggaacttttgacaagaaagaaaccaatttttatcaatgaattgggtgccaaacaaaacttatctcattacttcattgaaggatacaggaagggactctcgtggaaataatagattctcaagttgtggaagaggcagaccaagaagagattaatgatatctcctcacttatagaagcgtg

SEQ ID NO: 9058 - DNA, 2528 bp, Zea Mays
acctcgggtaaacacagccctcgatggctcgatgtttggatgcaaagacgtgcatataccatgtagtgattcacgtacaaaacgcgtactcatagatgcatcatgcatgaacggatgccgcagtttttgggcgctccgctgtgggctggaatgggccgcccaaactggtctgtcacgtgactttggttgggctaccgttggatccgcaacgacgagccgtggtgactgcgcagcgacgtccgagggagggagcgaccgctggtgtgcggaacacactgtcggcatggccgccgccctccgcctgcaacgccagagtctcgccgccagcccctttctcttctccgcccatggcctccgcaccgcaagctcgaggtcatcctcactacgctcgatccgggtgacttctctacatgtccgcggcaattgggttatggcttctgctgttgggtacaacgtcaccatgagcgcaggcgtggacacctacaccaagtcttgggaggcccctactgccacgggtgtcagtttttatccagattataataatctgtacactgttggatgtggtgtctacgtctacgtgttcggtgataatatgacagatatcattggttcttgcacgagtatttgcacagataacagagagatcatggagagcgcaaacactggttctggtgcctgtgaagggttaggctgctgcagcattccaatacgtggcggccaaggcttcactctcaaactaggtcgcctcaatagtaccattccacagttcggtgaagcgctctccaatgtcaagattatcttttcgcaaaactatgacttcgttacagatgatgtttacgcaagttgggtggtgaatacaagcaatgttcacggcatgctacttaacattgcaatcacggaccaaccaagctgcgcgagtgcccagtcccaagagaacaaggatacctacgcatgcagtagtgaaagcatctgcgacgacgatctatcaccatcagggtttaacttaccgtatcgtgtgaccaatttgtcacttgatgatgggcttctgatggttacaaacatgctgaatgacacaagctccaacaatatggagagggtagtcctcgttaactatgacggttacaaccagaacggcttctattcaaccgacttctattcaaccgatgaggacgttgtggatggtaattatgatttctctcaggaggatacaacaataaaatgggttatagcaaacataacttgtcacaaagcaatgcaaaataatgctacatatgcgtgtgtaagtgacaacagtatatgcaaagatgtcatgcgagggaatatacgtgacgggtaccgctgcaagtgttccaatggcttccaaggaaacccataccttcaaaataactgtacagatattgatgagtgccttattccaaataaatgcaatggaatatgccacaatgttgatggcggtttcaattgtacaagttgccctcatgggaaagagtatgatccaaaaaagaaaaaatgtgtcatgtcagctaagcagcgtattctaatttttgggattgtaattgggcttgtttgtggtcttggatccataagttttgcacttggtgcaattatactcaccggtaagtggaaaaaaggcatccaaaggagaattcgaagagagtacttcaagaaaaatcaaggtctactcttggagcaactaatatcgaatgaaaatgctacaaccaaaacaaagatattcactttggatgaactagaggaagcaaccaacaagtttgatgctactcgtgttctaggtcatggtgggcatggcactgtttacaaagggattttgtctgatcagcgtgtcgtggctataaaaaaatctaaaatagtggagcaaatagagatagatcagttcatcaatgaggttgctattttatctcaaatcattcaccgcaatgtggtgaagctttttggttgttgcctagaagatgaggtacccttgctagtctatgagttcatatcgaatggcactctgtatgacattcttcatgaaaatattgcaacaaaatgcttgttgtcatgggatgatcgaattaggattgcaacggaagcatcaggagcacttgcttatctacactcagctgctgcaataccaattttccatagagatgtgaagtcttctaatatactcttggacgacaacttcactgtaaaggtttcagattttggtgcttcaagatctttatcccttgatgaaacacatgtggtgacaattgtccaaggaacattcggttatttagatccagagtattattatactggttctctaactgagaagagtgacgtgtatagttttggagtgatacttgtggaacttttgacaagaaagaaaccaatttttatcaatgaattgggtgccaaacaaaacttatctcattacttcattgaaggatacaggaagggactctcgtggaaataatagattctcaagttgtggaagaggcagaccaagaagagattaatgatatctcctcacttatagaagcgtg

SEQ ID NO: 9059 - DNA, 3689 bp, Zea Mays
ctgcagacgggttggattgggctgggccggtgggttttgacgccggtcagatgccgtgggcgcgagttgtgtggcgggtgcctgggagggaactgcctaaagtttcatttgtttcggctcgttcagccgtcgtttcatcgtgaagaaaacctgtgccaggtcggtaacgattgtcggctggccactccgacacacacgacacgacacagaagacttgaggtgcatagctagtgagcgcgtgcaggaagtagactatctagcagacacggcccagtaaagagtaaatttgtttctggggttatatgaggataaagcttaataacgatgtaggttagttactttccgacaaataatgatcttagatcagatagtaactaggtatgtgaatccaagtagatgtataggatgggaaaaaaagactatttggttctaataaattaggcgggattaaaaggtaatctaataattaagtgaaaataacgatatttcagttcatggatccaaacaagtcatcagatttgtccaaaccaagaaactccaaacaagtactactacacatagttaaaagttattaaagatttgacctcgggtaaacacagccctcgatggctcgatgtttggatgcaaagacgtgcatataccatgtagtgattcacgtacaaaacgcgtactcatagatgcatcatgcatgaacggatgccgcagtttttgggcgctccgctgtgggctggaatgggccgcccaaactggtctgtcacgtgactttggttgggctaccgttggatccgcaacgacgagccgtggtgactgcgcagcgacgtccgagggagggagcgaccgctggtgtgcggaacacactgtcggcatggccgccgccctccgcctgcaacgccagagtctcgccgccagcccctttctcttctccgcccatggcctccgcaccgcaagctcgaggtcatcctcactacgctcgatccgggtgacttctctacatgtccgcggcaattgggttatggcttctgctgttgggtacaacgtcaccatgagcgcaggcgtggacacctacaccaagtcttgggaggcccctactgccacgggtgtcagtttttatccagattataataatctgtacactgttggatgtggtgtctacgtctacgtgttcggtgataatatgacagatatcattggttcttgcacgagtatttgcacagataacagagagatcatggagagcgcaaacactggttctggtgcctgtgaagggttaggctgctgcagcattccaatacgtggcggccaaggcttcactctcaaactaggtcgcctcaatagtaccattccacagttcggtgaagcgctctccaatgtcaagattatcttttcgcaaaactatgacttcgttacagatgatgtttacgcaagttgggtggtgaatacaagcaatgttcacggcatgctacttaacattgcaatcacggaccaaccaagctgcgcgagtgcccagtcccaagagaacaaggatacctacgcatgcagtagtgaaagcatctgcgacgacgatctatcaccatcagggtttaacttaccggtaaccaaaaaaaaccggacctcaccgagaaacgcgtttctcggatttctcgatttttttcgtttttctcaaaataatttcggacaaaattcagagaaaaaaagttcaattcaatcataaaaatatagattatttgtagataatggctaaaagaagtagatggtagcgttttggacctcttctttgtagcctaaatacatagttgtaggtttggacgaactggattcaaaatcgatgaaaatttcggccgataaataaaaaaccggatcccaccgataaacgtgattttcggttttctcgaaaaattttcgccgagaatgttttccctgatcaccatcagtatctcaaggaggctacagttgcttctgccctggtcaaatagagggcaacccctatattgaagatggctgcatagcatattacaacccagaggcgcccaataggaactgtatgagattatgtggaaacataaacgttccatttccttttgggattgaagaaggctgttccgcaaatgataacctacgactcaactgcacaagtaacgacactcttattcttgatcgagggtacacacagtatcgtgtgaccaatttgtcacttgatgatgggcttctgatggttacaaacatgctgaatgacacaagctccaacaatatggagagggtagtcctcgttaactatgacggttacaaccagaacggcttctattcaaccgacttctattcaaccgatgaggacgttgtggatggtaattatgatttctctcaggaggatacaacaataaaatgggttatagcaaacataacttgtcacaaagcaatgcaaaataatgctacatatgcgtgtgtaagtgacaacagtatatgcaaagatgtcatgcgagggaatatacgtgacgggtaccgctgcaagtgttccaatggcttccaaggaaacccataccttcaaaataactgtacagatattgatgagtgccttattccaaataaatgcaatggaatatgccacaatgttgatggcggtttcaattgtacaagttgccctcatgggaaagagtatgatccaaaaaagaaaaaatgtgtcatgtcagctaagcagcgtattctaatttttgggattgtaattgggcttgtttgtggtcttggatccataagttttgcacttggtgcaattatactcaccggtaagtggaaaaaaggcatccaaaggagaattcgaagagagtacttcaagaaaaatcaaggtctactcttggagcaactaatatcgaatgaaaatgctacaaccaaaacaaagatattcactttggatgaactagaggaagcaaccaacaagtttgatgctactcgtgttctaggtcatggtgggcatggcactgtttacaaagggattttgtctgatcagcgtgtcgtggctataaaaaaatctaaaatagtggagcaaatagagatagatcagttcatcaatgaggttgctattttatctcaaatcattcaccgcaatgtggtgaagctttttggttgttgcctagaagatgaggtacccttgctagtctatgagttcatatcgaatggcactctgtatgacattcttcatgaaaatattgcaacaaaatgcttgttgtcatgggatgatcgaattaggattgcaacggaagcatcaggagcacttgcttatctacactcagctgctgcaataccaattttccatagagatgtgaagtcttctaatatactcttggacgacaacttcactgtaaaggtttcagattttggtgcttcaagatctttatcccttgatgaaacacatgtggtgacaattgtccaaggaacattcggttatttagatccagagtattattatactggttctctaactgagaagagtgacgtgtatagttttggagtgatacttgtggaacttttgacaagaaagaaaccaatttttatcaatgaattgggtgccaaacaaaacttatctcattacttcattgaaggatacaggaagggactctcgtggaaataatagattctcaagttgtggaagaggcagaccaagaagagattaatgatatctcctcacttatagaagcgtg

SEQ ID NO: 9060 - DNA, 3476 bp, Zea Mays
ctgcagacgggttggattgggctgggccggtgggttttgacgccggtcagatgccgtgggcgcgagttgtgtggcgggtgcctgggagggaactgcctaaagtttcatttgtttcggctcgttcagccgtcgtttcatcgtgaagaaaacctgtgccaggtcggtaacgattgtcggctggccactccgacacacacgacacgacacagaagacttgaggtgcatagctagtgagcgcgtgcaggaagtagactatctagcagacacggcccagtaaagagtaaatttgtttctggggttatatgaggataaagcttaataacgatgtaggttagttactttccgacaaataatgatcttagatcagatagtaactaggtatgtgaatccaagtagatgtataggatgggaaaaaaagactatttggttctaataaattaggcgggattaaaaggtaatctaataattaagtgaaaataacgatatttcagttcatggatccaaacaagtcatcagatttgtccaaaccaagaaactccaaacaagtactactacacatagttaaaagttattaaagatttgacctcgggtaaacacagccctcgatggctcgatgtttggatgcaaagacgtgcatataccatgtagtgattcacgtacaaaacgcgtactcatagatgcatcatgcatgaacggatgccgcagtttttgggcgctccgctgtgggctggaatgggccgcccaaactggtctgtcacgtgactttggttgggctaccgttggatccgcaacgacgagccgtggtgactgcgcagcgacgtccgagggagggagcgaccgctggtgtgcggaacacactgtcggcatggccgccgccctccgcctgcaacgccagagtctcgccgccagcccctttctcttctccgcccatggcctccgcaccgcaagctcgaggtcatcctcactacgctcgatccgggtgacttctctacatgtccgcggcaattgggttatggcttctgctgttgggtacaacgtcaccatgagcgcaggcgtggacacctacaccaagtcttgggaggcccctactgccacgggtgtcagtttttatccagattataataatctgtacactgttggatgtggtgtctacgtctacgtgttcggtgataatatgacagatatcattggttcttgcacgagtatttgcacagataacagagagatcatggagagcgcaaacactggttctggtgcctgtgaagggttaggctgctgcagcattccaatacgtggcggccaaggcttcactctcaaactaggtcgcctcaatagtaccattccacagttcggtgaagcgctctccaatgtcaagattatcttttcgcaaaactatgacttcgttacagatgatgtttacgcaagttgggtggtgaatacaagcaatgttcacggcatgctacttaacattgcaatcacggaccaaccaagctgcgcgagtgcccagtcccaagagaacaaggatacctacgcatgcagtagtgaaagcatctgcgacgacgatctatcaccatcagggtttaacttaccggtaaccaaaaaaaaccggacctcaccgagaaacgcgtttctcggatttctcgatttttttcgtttttctcaaaataatttcggacaaaattcagagaaaaaaagttcaattcaatcataaaaatatagattatttgtagataatggctaaaagaagtagatggtagcgttttggacctcttctttgtagcctaaatacatagttgtaggtttggacgaactggattcaaaatcgatgaaaatttcggccgataaataaaaaaccggatcccaccgataaacgtgattttcggttttctcgaaaaattttcgccgagaatgttttccctgatcaccatcagtatctcaaggaggctacagttgcttctgccctggtcaaatagagggcaacccctatattgaagatggctgcatagcatattacaacccagaggcgcccaataggaactgtatgagattatgtggaaacataaacgttccatttccttttgggattgaagaaggctgttccgcaaatgataacctacgactcaactgcacaagtaacgacactcttattcttgatcgagggtacacacagtatcgtgtgaccaatttgtcacttgatgatgggcttctgatggttacaaacatgctgaatgacacaagctccaacaatatggagagggtagtcctcgttaactatgacggttacaaccagaacggcttctattcaaccgacttctattcaaccgatgaggacgttgtggatgatattgatgagtgccttattccaaataaatgcaatggaatatgccacaatgttgatggcggtttcaattgtacaagttgccctcatgggaaagagtatgatccaaaaaagaaaaaatgtgtcatgtcagctaagcagcgtattctaatttttgggattgtaattgggcttgtttgtggtcttggatccataagttttgcacttggtgcaattatactcaccggtaagtggaaaaaaggcatccaaaggagaattcgaagagagtacttcaagaaaaatcaaggtctactcttggagcaactaatatcgaatgaaaatgctacaaccaaaacaaagatattcactttggatgaactagaggaagcaaccaacaagtttgatgctactcgtgttctaggtcatggtgggcatggcactgtttacaaagggattttgtctgatcagcgtgtcgtggctataaaaaaatctaaaatagtggagcaaatagagatagatcagttcatcaatgaggttgctattttatctcaaatcattcaccgcaatgtggtgaagctttttggttgttgcctagaagatgaggtacccttgctagtctatgagttcatatcgaatggcactctgtatgacattcttcatgaaaatattgcaacaaaatgcttgttgtcatgggatgatcgaattaggattgcaacggaagcatcaggagcacttgcttatctacactcagctgctgcaataccaattttccatagagatgtgaagtcttctaatatactcttggacgacaacttcactgtaaaggtttcagattttggtgcttcaagatctttatcccttgatgaaacacatgtggtgacaattgtccaaggaacattcggttatttagatccagagtattattatactggttctctaactgagaagagtgacgtgtatagttttggagtgatacttgtggaacttttgacaagaaagaaaccaatttttatcaatgaattgggtgccaaacaaaacttatctcattacttcattgaaggatacaggaagggactctcgtggaaataatagattctcaagttgtggaagaggcagaccaagaagagattaatgatatctcctcacttatagaagcgtg

SEQ ID NO: 9061 - DNA, 2513 bp, Zea Mays
atacttgttgcccgccgcccgccgttggactccctgctcacctgcgcaccgctggctgctactcgcagcgccgccgtcgcctgtagttgatggcacccactggaggagcaccgtataatacgacctctagatctgtcccaacccctcgtctcttgttggagccgccttcacctcgtcttccattaatcgttggccaaactgcaccttcaggtagtgttgcggcatcaactgcaagtgcaaatccaatcgttagtcctgtggtgactgaaagtagtggcattgcacaagcagcacaaccaattctagtggattctgaaccagttaatattaatgatgatgatgatgagcatggtgcaaagaggcaaaagaagtgcacatcagaagtgtggcagtatttcaccagggaaacaaagactgtgacgataaatggcaagaattacacagaaaagtgggcatcttgcaattttccaaggtgcaagacaaaatatagatgtgagagcaccaaaggaacaactggattttggacccatcttaggactacacatagtgtggtcaaaggccaacaacagctagcagtagggaaggatcatgagaaagacataaatattgttgagccttacaagtatgatccagaagtcagcagtagaaagttttatttggcaatcatcatgcatgagtacccttccaatatagtcgagcatgagtatctcattgacttcctcaaatctttgcgccctagctttcctatcaagtctcgcatcattgttagaaaagagatcttgagcatatactctgaagaaaagaaaaaattgtatgcttacttgaagacctttaactgcagatttagtacaaccatggatatgtggacttctaatcagaacaaaggatatatgtgtgtcaccgcccattggatagatgatgattggcgtattcaaaagaggattattgatttcttccatgtagaagggcgacacacaggtgcaaagttgtatgttacctttagtgaatgtatggtcagatggaatcttgagaagaagttgttttcattaactctagacaacgcatctgcaaatgaggtagcagtcaaggatatagttaatgacctcaagacaagtgttggtgtatctatagtttgtgatggtgttttggaactaatgaaacatgcaaccgagtgtggtttggaaacaaataagggtatctcacttgatgtgtcaacaaggtggaattcaacttttctgatgttgagggatgctttatactataaggatgcttttactcaactcaagcttgctgatcggcgtaggtatgaacacatatctccaactcctgaggagtgggacaaggccaaaatgttgtttcatgccttgaaaaaattttatgatctgactgagcttctgtccggtactttatatccaactgccaacttgttctacaaaggcttttgtgagattagaagtttgcttggtgactggtctactagtgaagatatcaatattcgtgaaatggctatttccatgagcaaaaaatttgagaaatattggaacaaaagcaatgttgctcttgctgtggcaagtttccttgatccaaggtacaagagaaaagtagtagagttctacacaagaaagttctatggtgatgcacaataccatgctaagcttgaggaatttgttagtactctaagacaaatgtatcagttttatgtttcattagcacctacaaagaacacaccagaacacaacaaaactaggccatctgactggtgcatggaaaccgatgataaagaatttcaagaatatttgtgtgacacatattcttcagaattagactgctcaaatgacttagacaagtacatggctgcaaaactttttaagcatagcggacagttcgacattttagcatggtggaagaaccagggaaaggaatatccgactctttcacaaatggctcgtgatgtgcttgcaatacaagtgtccacagtggcatcagaatctgcctttagtgctagtgggcgagtggttgatccatatcgtagtcgtcttgatccagagatggtacaagcattggtttgcaccaaagattgggttgctgcagcaagaagagattctaagagtgttgcttccattattggtgaccttgaggttatagatgtcatgactaatctggcagctcaggatgatgacatagagagtgattcagatgtcatggatgaagacaaggagctgtagctcgtaggtggacaatgatacaactatcttagtttattaatatgtttggtcaggtgtatgtataacgcattggaagtttggaacttcccctatctggcaatttccatcgttagtggtagactagtagaaatgagacacaatgatgtcatgacatgtcttctagttaagtttctataaattgttaagttagtatgcgaacattttttttgttttgaatcgatatcgatgtgatttcgttccgacaacatcgatttcgatattttcgaaatctccgatatcataaccatt

SEQ ID NO: 9062 - DNA, 2363 bp, Zea Mays
tagaataatacttgttgcccgccgcccgccgttggactccctgctcacctgcgcaccgctggctgctactcgcagcgccgccgtcgcctgtagttgatggcacccactggaggagcaccgtataatacgacctctagatctgtcccaacccctcgtctcttgttggagccgccttcacctcgtcttccattaatcgttggccaaactgcaccttcaggtagtgttgcggcatcaactgcaagtgcaaatccaatcgttagtcctgtggtgactgaaagtagtggcattgcacaagcagcacaaccaattctagtggattctgaaccagttaatattaatgatgatgatgatgagcatggtgcaaagaggcaaaagaagtgcacatcagaagtgtggcagtatttcaccagggaaacaaagactgtgacgataaatggcaagaattacacagaaaagtgggcatcttgcaattttccaaggtgcaagacaaaatatagatgtgagagcaccaaaggaacaactggattttggacccatcttaggactacacatagtgtggtcaaaggccaacaacagctagcagtagggaaggatcatgagaaagacataaatattgttgagccttacaagtatgatccagaagtcagcagtagaaagttttatttggcaatcatcatgcatgagtacccttccaatatagtcgagcatgagtatctcattgacttcctcaaatctttgcgccctagctttcctatcaagtctcgcatcattgttagaaaagagatcttgagcatatactctgaagaaaagaaaaaattgtatgcttacttgaagacctttaactgcagatttagtacaaccatggatatgtggacttctaatcagaacaaaggatatatgtgtgtcaccgcccattggatagatgatgattggcgtattcaaaagaggattattgatttcttccatgtagaagggcgacacacaggtgcaaagttgtatgttacctttagtgaatgtatggtcagatggaatcttgagaagaagttgttttcattaactctagacaacgcatctgcaaatgaggtagcagtcaaggatatagttaatgacctcaagacaagtgttggtgtatctatagtttgtgatggtgttttggaactaatgaaacatgcaaccgagtgtggtttggaaacaaataagggtatctcacttgatgtgtcaacaaggtggaattcaacttttctgatgttgagggatgctttatactataaggatgcttttactcaactcaagcttgctgatcggcgtaggtatgaacacatatctccaactcctgaggagtgggacaaggccaaaatgttgtttcatgccttgaaaaaattttatgatctgactgagcttctgtccggtactttatatccaactgccaacttgttctacaaaggcttttgtgagattagaagtttgcttggtgactggtctactagtgaagatatcaatattcgtgaaatggctatttccatgagcaaaaaatttgagaaatattggaacaaaagcaatgttgctcttgctgtggcaagtttccttgatccaaggtacaagagaaaagtagtagagttctacacaagaaagttctatggtgatgcacaataccatgctaagcttgaggaatttgttagtactctaagacaaatgtatcagttttatgtttcattagcacctacaaagaacacaccagaacacaacaaaactaggccatctgactggtgcatggaaaccgatgataaagaatttcaagaatatttgtgtgacacatattcttcagaattagactgctcaaatgacttagacaagtacatggctgcaaaactttttaagcatagcggacagttcgacattttagcatggtggaagaaccagggaaaggaatatccgactctttcacaaatggctcgtgatgtgcttgcaatacaagtgtccacagtggcatcagaatctgcctttagtgctagtgggcgagtggttgatccatagagagtgattcagatgtcatggatgaagacaaggagctgtagctcgtaggtggacaatgatacaactatcttagtttattaatatgtttggtcaggtgtatgtataacgcattggaagtttggaacttcccctatctggcaatttccatcgttagtggtagactagtagaaatgagacacaatgatgtcatgacatgtcttctagttaagtttctataaattgttaagttagtatgcgaacattttttttgttttgaatcgatatcgatgtgatttcgttccgacaacatcgatttcgatattttcgaaatctccgatatcataaccatt

SEQ ID NO: 9063 - DNA, 1176 bp, Zea Mays
acacgaccacggaccacctcgccgccaccgccccgtccgcgtgtcaccgacggtcgacggcgaccatgcttccctcattcctctcgtgcgtggcgtcccctctcctcaccaccgcatgcaccccgaccgcctcgtcgcagcaggcggctgccgcagcccctcccctgcagtcgctgaggctcccgcctcagccagggaacaactacaggcccgtcgctacgacgctggtggctgcggccgcggcggggctcctgctgctgtccccggcgacggcgccgtcccgcgccgaggcggagttcacagtgtactatggcacggcggcgagcgcggcgaactacggcggatacggcgggaacgcgagcaagaaggacacggcggagtacgtgtacgacgtgccggaggggtggaaggagcggctggtgtccaaggtggagaagggcaccaacggcacggactcggagttcttcaacccgcgaaagcgggcggagaaggagtacctgacgttcctgtccgggatccgcgcgctggcgccgctcagcgccgtgctcgacaacctggcgctctccgacgtcgggctgctggaccagatctcgtccgccgacgacgtgcgctccgccgagcgcgccgacggcgccggccaggtgtactacgagtacgaggtggcgggcgccagcgcgcacagcctcatatcggtgacgtgcgcacggaacaagctgtacgcgcacttcgtcaccgcgcccaacgccgagtggagccgcgacgaggccatgctccgccgcttgcacgagtccttcaagaccatccagcccggcgccccgccaccggccacggagacctagctccatctgagcacgagcgagaaacctactgagcgattcgcggtgcgttgtaattgctagtaaaaatcatcagttttgtataggctactctgcctttttcctcagttcctctgccacggagcttggcctattcattttcaagtgtaagtgtaaactttgatgtatacacgaatgactccagacagttttgcaagttcttgcattagatatctgataatcacaaaggtattgtttttaatctttattctacagctctaatagcctggatcaagcatctctacctaactatttctctcagtggcccatacttatttcatcatggtatcaaaaaaaaaaa

SEQ ID NO: 9064 - DNA, 583 bp, Zea Mays
agtatccggtagggttttcctctcgcgccgccgcggaacacaacaccgcaccacactacccagcggaatccgcccacccgcacccggagcagaggagatatgtcgcaggggaagggaggagcgtcgaggaaggaggaggtggtcaccagggagtacaccatcaacctccacaagcgcctccacggctgcacattcaagaagaaggcacccaacgccatcaaggagatcaggaagtttgcgcagaaggccatgggcaccacggacattaggattgatgtgaagctcaacaagcacatctggagcagcgggatcaggagcgtgccgcggagggttcgtgtgaggatcgcccgcaagaggaacgacgaggaggatgccaaggaggagctctactcccttgtcaccgtcgcggagatccccgccgagggcttgaaagggctggggaccaaggtcgttgacgataccgattaagctgtcgcgttatctacatctttagagagttcctagtttgtatttgcaacagcaaaaccttttgtattcacaaagttgtctatttccgcaacagaattgcatggctaaaaaaaaa

SEQ ID NO: 9065 - DNA, 1477 bp, Zea Mays
agtatccggtagggttttcctctcgcgccgccgcggaacacaacaccgcaccacactacccagcggaatccgcccacccgcacccggagcagaggagatatgtcgcaggggaagggaggagcgtcgaggaaggaggaggtggtcaccagggagtacaccatcaacctccacaagcgcctccacggctggtacttctccctctggccaccttgctgcgggggctgcacactgttctcgctgcgagatctggctcgcttgcgagattcttcgtctcgctgctgatagtatttaggcgcggtagcggatggttttttctattcgatactactcgtagacgagatctggctcaactagtgtatgttctgtgtgatcagttatatactattcgtactctgcttaggagcacgaggagatgaaacagtacgatgaccttgcctgcttgtggtttgtagtatttgtagcggcactggtttggtattttcctcatttcatttgctaattagtttgtcgaaaggtaaatgtaataggcatctagctccgccctttattaccatttggaattgcaaaatttgctgccagttaggaattgatgaacctatattgagaaggcagatatagcctgtatatgctcaattaacattcttatcaggtaaaattctagtgactgttagagtttgcttttaacaaaccatgcaaggcttagaaacctcatgaatcatgactaatgagatagtgtgcatttcattgattttggctttgtctatgtatgagtatactcaaattgttaagcatgactagaaggttggctgctttgatccaatgtgtttttttcagttgctgaatgcttatccaagtgtcttctgttatctgcatgacctctcgttcctgcttgacattgtactcacattcaagaagaaggcacccaacgccatcaaggagatcaggaagtttgcgcagaaggccatgggcaccacggacattaggattgatgtgaagctcaacaagcacatctggagcagcgggatcaggagcgtgccgcggagggttcgtgtgaggatcgcccgcaagaggaacgacgaggaggatgccaaggaggagctctactcccttgtcaccgtcgcggagatccccgccgagggcttgaaagggctggggaccaaggtcgttgacgataccgattaagctgtcgcgttatctacatctttagagagttcctagtttgtatttgcaacagcaaaaccttttgtattcacaaagttgtctatttccgcaacagaattgcatggctagttttcttttcattgctgctgcatccttttcttcattatcgccccctgggaagtcgctgctcatgggacaagtttggaaatctccatgtgtggtgtttacgttatcaagttgtgttccttggataacttgtcagtatggttttagcaacttcgccctgtgatggcttggaatcccccatttcaatggc

SEQ ID NO: 9066 - DNA, 1776 bp, Zea Mays
cccttcccttcccataatattagctagggtgcggcggcatctccgtcgactacctggccgcggtggcatccttccccaaccccgacgataagatccgcagcctcgccctcaaggtgcaggggggcggcaacactggcaacgcgctcactgcagctgcacgcctcggcctccgtcccaggatcatttccaaggtagccaacgatgctcaaggaagaagcatcctcagcgaactccaaactgatggcgtggacacatcctacatcctggtcgcagagaacgggaactcacccttcacctacataatagttgatgaacagacgaaaactcgtacatgtatacacactcctggttctcctcccatggtgccagaagagctcacaaaggcaaacttgtcgtccgctttagatggcgtggacatcgtctacttcgatgtacgattgcatgacattgctttgcttgttgctgaagaggcaagtcaaagaaaaatccctattttgattgatgccgaaagaaagagggagggactggacgagcttctcaactttgcatcttacgttgtatgctctgcaaagtttcctcaggcttggacaggagcctcatcaatacctgttgctttagtatccatgctttcaaggttaccaaacatcaaatttgttattgtaactctgggggagaaaggttgcttgatgcttgagagaagcagtacagatgcttctgaggcaggggaaatagatgcagaggctttattcgaatcactagagaagagcattgatcagagttctactataccaaaatgtgttgcttccaaggtatgatgccttataatgcacatgggctgggtgtatttttttccacacataggtatattcctctatcaacttgaactatatgtacagatataatcgcactgtaggagctgcaatacacgtttttttttgtttgaaaattaaaattgaaatatggagcagcacacacatcaaaatctctgcttctagactaacacatttttttggagtatagcagcggcaatatgtatgatattcatggctcatgctcgcaattttgaatattatttttctaacccatttctttaagcttctgtttgttttcagtcaaacttgagaataagcgcggatggagtaagctcgataagtggcaggttacttctaggtacggccgaagttataccacctggtgaactcgtagatacaactggcgctggagatgcattcattggagcagttctatatggtttatgcaccagcatgccaccggagaggatgctaccttttgctgcacgagtggctggttgtggttgcagaggtctgggggctcgaaccagccttccccatcgcgcagacccacgcctggctggctattgatccgaattcagaagggctgcatcctccatgaccacctgcctgcaccccgtccaatggttgtgaatattccagtcccgatcagatcaaataagtcatcaactattagcagcacatgaagactatcattgtgatagctattattttgcgatgattatgcaactatatggttccaacttgctagctccaggcataccaggcctgtgcaccttttacgggtgtagaaagttatacaaattccgattgtcacgaggtgtggtgtgccctaatcaaagctaaaggtgaaattatcaaaacgatacaaaatcgattgtaaagaggtcttgaagtttaagacccattaaattttctatcaataaatgtagtctaatgtatctatcattcacacaaatcttct

SEQ ID NO: 9067 - DNA, 1776 bp, Zea Mays
acatcatcgcaccgcattggatttggtttggttttggttggaggtagttcgttttggcgggtagcgtagcgttgcagtgacaggcgagccgcgagcgtacagccattggagttttagagaagcagcacagaggaggggagaccggagatggtgccctgcgcccagcagccgcagctgcccacagctcctcctttccacactttccgtcaagcgggcaggagggttattccgcttcctcgtttacatcgccgcagccgccgtaccatcgccaccatggcctccgcctccggctcccccaacccagtcgtgctagggtgcggcggcatctccgtcgactacctggccgcggtggcatccttccccaaccccgacgataagatccgcagcctcgccctcaaggtgcaggggggcggcaacactggcaacgcgctcactgcagctgcacgcctcggcctccgtcccaggatcatttccaaggtagccaacgatgctcaaggaagaagcatcctcagcgaactccaaactgatggcgtggacacatcctacatcctggtcgcagagaacgggaactcacccttcacctacataatagttgatgaacagacgaaaactcgtacatgtatacacactcctggttctcctcccatggtgccagaagagctcacaaaggcaaacttgtcgtccgctttagatggcgtggacatcgtctacttcgatgtacgattgcatgacattgctttgcttgttgctgaagaggcaagtcaaagaaaaatccctattttgattgatgccgaaagaaagagggagggactggacgagcttctcaactttgcatcttacgttgtatgctctgcaaagtttcctcaggcttggacaggagcctcatcaatacctgttgctttagtatccatgctttcaaggttaccaaacatcaaatttgttattgtaactctgggggagaaaggttgcttgatgcttgagagaagcagtacagatgcttctgaggcaggggaaatagatgcagaggctttattcgaatcactagagaagagcattgatcagagttctactataccaaaatgtgttgcttccaagcttctgtttgttttcagtcaaacttgagaataagcgcggatggagtaagctcgataagtggcaggttacttctaggtacggccgaagttataccacctggtgaactcgtagatacaactggcgctggagatgcattcattggagcagttctatatggtttatgcaccagcatgccaccggagaggatgctaccttttgctgcacgagtggctggttgtggttgcagaggtctgggggctcgaaccagccttccccatcgcgcagacccacgcctggctggctattgatccgaattcagaagggctgcatcctccatgaccacctgcctgcaccccgtccaatggttgtgaatattccagtcccgatcagatcaaataagtcatcaactattagcagcacatgaagactatcattgtgatagctattattttgcgatgattatgcaactatatggttccaacttgctagctccaggcataccaggcctgtgcaccttttacgggtgtagaaagttatacaaattccgattgtcacgaggtgtggtgtgccctaatcaaagctaaaggtgaaattatcaaaacgatacaaaatcgattgtaaagaggtcttgaagtttaagacccattaaattttctatcaataaatgtagtctaatgtatctatcattcacacaaatcttct

SEQ ID NO: 9068 - DNA, 1754 bp, Zea Mays
acatcatcgcaccgcattggatttggtttggttttggttggaggtagttcgttttggcgggtagcgtagcgttgcagtgacaggcgagccgcgagcgtacagccattggagttttagagaagcagcacagaggaggggagaccggagatggtgccctgcgcccagcagccgcagctgcccacagctcctcctttccacactttccgtcaagcgggcaggagggttattccgcttcctcgtttacatcgccgcagccgccgtaccatcgccaccatggcctccgcctccggctcccccaacccagtcgtgctagggtgcggcggcatctccgtcgactacctggccgcggtggcatccttccccaaccccgacgataagatccgcagcctcgccctcaaggtgcaggggggcggcaacactggcaacgcgctcactgcagctgcacgcctcggcctccgtcccaggatcatttccaaggtagccaacgatgctcaaggaagaagcatcctcagcgaactccaaactgatggcgtggacacatcctacatcctggtcgcagagaacgggaactcacccttcacctacataatagttgatgaacagacgaaaactcgtacatgtatacacactcctggttctcctcccatggtgccagaagagctcacaaaggcaaacttgtcgtccgctttagatggcgtggacatcgtctacttcgatgtacgattgcatgacattgctttgcttgttgctgaagagtgcaggcaagtcaaagaaaaatccctattttgattgatgccgaaagaaagagggagggactggacgagcttctcaactttgcatcttacgttgtatgctctgcaaagtttcctcaggagcctcatcaatacctgttgctttagtatccatgctttcaaggttaccaaacatcaaatttgttattgtaactctgggggagaaaggttgcttgatgcttgagagaagcagtacagatgcttctgaggcaggggaaatagatgcagaggctttattcgaatcactagagaagagcattgatcagagttctactataccaaaatgtgttgcttccaagtcaaacttgagaataagcgcggatggagtaagctcgataagtggcaggttacttctaggtacggccgaagttataccacctggtgaactcgtagatacaactggcgctggagatgcattcattggagcagttctatatggtttatgcaccagcatgccaccggagaggatgctaccttttgctgcacgagtggctggttgtggttgcagaggtctgggggctcgaaccagccttccccatcgcgcagacccacgcctggctggctattgatccgaattcagaagggctgcatcctccatgaccacctgcctgcaccccgtccaatggttgtgaatattccagtcccgatcagatcaaataagtcatcaactattagcagcacatgaagactatcattgtgatagctattattttgcgatgattatgcaactatatggttccaacttgctagctccaggcataccaggcctgtgcaccttttacgggtgtagaaagttatacaaattccgattgtcacgaggtgtggtgtgccctaatcaaagctaaaggtgaaattatcaaaacgatacaaaatcgattgtaaagaggtcttgaagtttaagacccattaaattttctatcaataaatgtagtctaatgtatctatcattcacacaaatcttct

SEQ ID NO: 9069 - DNA, 1764 bp, Zea Mays
acatcatcgcaccgcattggatttggtttggttttggttggaggtagttcgttttggcgggtagcgtagcgttgcagtgacaggcgagccgcgagcgtacagccattggagttttagagaagcagcacagaggaggggagaccggagatggtgccctgcgcccagcagccgcagctgcccacagctcctcctttccacactttccgtcaagcgggcaggagggttattccgcttcctcgtttacatcgccgcagccgccgtaccatcgccaccatggcctccgcctccggctcccccaacccagtcgtgctagggtgcggcggcatctccgtcgactacctggccgcggtggcatccttccccaaccccgacgataagatccgcagcctcgccctcaaggtgcaggggggcggcaacactggcaacgcgctcactgcagctgcacgcctcggcctccgtcccaggatcatttccaaggtagccaacgatgctcaaggaagaagcatcctcagcgaactccaaactgatggcgtggacacatcctacatcctggtcgcagagaacgggaactcacccttcacctacataatagttgatgaacagacgaaaactcgtacatgtatacacactcctggttctcctcccatggtgccagaagagctcacaaaggcaaacttgtcgtccgctttagatggcgtggacatcgtctacttcgatgtacgattgcatgacattgctttgcttgttgctgaagagtgcaggcaagtcaaagaaaaatccctattttgattgatgccgaaagaaagagggagggactggacgagcttctcaactttgcatcttacgttgtatgctctgcaaagtttcctcaggcttggacaggagcctcatcaatacctgttgctttagtatccatgctttcaaggttaccaaacatcaaatttgttattgtaactctgggggagaaaggttgcttgatgcttgagagaagcagtacagatgcttctgaggcaggggaaatagatgcagaggctttattcgaatcactagagaagagcattgatcagagttctactataccaaaatgtgttgcttccaagtcaaacttgagaataagcgcggatggagtaagctcgataagtggcaggttacttctaggtacggccgaagttataccacctggtgaactcgtagatacaactggcgctggagatgcattcattggagcagttctatatggtttatgcaccagcatgccaccggagaggatgctaccttttgctgcacgagtggctggttgtggttgcagaggtctgggggctcgaaccagccttccccatcgcgcagacccacgcctggctggctattgatccgaattcagaagggctgcatcctccatgaccacctgcctgcaccccgtccaatggttgtgaatattccagtcccgatcagatcaaataagtcatcaactattagcagcacatgaagactatcattgtgatagctattattttgcgatgattatgcaactatatggttccaacttgctagctccaggcataccaggcctgtgcaccttttacgggtgtagaaagttatacaaattccgattgtcacgaggtgtggtgtgccctaatcaaagctaaaggtgaaattatcaaaacgatacaaaatcgattgtaaagaggtcttgaagtttaagacccattaaattttctatcaataaatgtagtctaatgtatctatcattcacacaaatcttct

SEQ ID NO: 9070 - DNA, 1069 bp, Zea Mays
cgcgtttgattcttcggcagacagaaacaataagcaagatgatgaggcgccaaagtgaaagaagctctccctctcctctctgcttcgcacgcctcgccaccttccacgacgagctcctacagtcctacctagacgtaagccggcgccgccatggtgatctcggtgcccgcggcccggcgctccacctccgtacgcgacgccgtgctgggcggcggcgggcggcagctgtaccagcccctccgctgcgccttctacgacggcctggccgccgcgctgtccgagtccgaggagccctccgactcggacgccgccgcccgcgtccccgctggctgcaagcggcaggcggcgaggaacgtgctgatcctgatgagcgacaccggcggcggccaccgcgcctccgccgaggccctgcgcgacgccttccgcatcgagttcggcgacgcctacaagatcagagggttcgagacacagatggagaagtggatggccgcctgcgactgcatcatcacaaaagctggtcctggtaccatcgcagaggcactcatacgagggcttcctatcatcctgaacgacttcatccctggacaggaagtcgggaacgtcccatatgtcgtggacaacggtgccggcgtgttctccaaggacccaggggaggccgcgagacaggtcgcccgctggttcagcagcagcagcacagacggggacgagctcaggagatactcgcgtaacgcgctgaggctagcgcagcccgaggcggtgttccacatcgtcagggacatccacaagcagctccagcgacagcctgccgcggtcacccggatcccctcccgctcgctgacctcgtccttcccgtaccatatgtgaaatcaagaatgctactgcagttacgttttctgctgcatgttggataatattatgcttgggacttgatgtatgcctaaccttttgaagaacctgtatattatattatattgtatataagaattgctctctgttctgttcatgagtgatttttgtgtatttctcgctactgaatactatttggaaagaagttaacatacattgtgac

SEQ ID NO: 9071 - DNA, 376 bp, Zea Mays
ctccatctgggcaccaagttcgccgacgagttcagggagtctctcaaggtagcacactatgcaggggccaacagcggacccaacgccaacggcagccggttcttcatcacctacgccaagcaaccgttctgaaaaaatattgaacagggtcacccaaaaatgtgcatgtctagaacgacagcttcagattaacgacaaccatgattttccaattgtgtggttttgatggagtcatgtatgggtaaccaggaggccatctaaataaatctgtatgcacttcaatcatgtgctaatattgattgtgcagtacatacatattaatatagtgatccatgatgtctcaacatttttagatggtaaaatcggtgcctctaag

SEQ ID NO: 9072 - DNA, 791 bp, Zea Mays
ccagcctctacatattatgcggcatcatcacgttcttttggccccattaggaaggagataaaaggctgttggcgttcaccaaaagaggcacacacatccattcagccaggggactggctagtcttcggttccgaaacaaaagggttgcctcagcaagccctcgaggattgctgcagagaaggcctaggcggcgggaccctccggattcccatggtggagacctacgtccggtgcctgaacctctccgtcagcgtcggagtcgcgctgtacgaagccgctagacagctgaactatgaacagcttcagtaccagcctgatgagctcccagaggaggcgcaggagcttttcccggcagaggacatttatgcgtgaaaacctctgcccgagaacaattacacgttacacgcattgatcacctcatttttgtgtgtgtgtgtgtgtactgtttgccgtgacacatgattgagctggagggaccacgcactgcacgattctgttgcgaattcaattccaggccgagtccttgtccagacggtgttgacatgctcattcaaaatggtgtacctgatctgcttggaagaatcgttttagtgccatgtataatttcgcagtcagaactcagaaggtgattagagtatgctgcgatggggtctcgttctgacttcttttttgtgtgtgtactggttactgaaccataagctttgttaactgcaactggacgctgcgtcctgttgcttctctgtcagtgtgtgtggtgaggaaggaaggttggtgcgggagctttactgcca

SEQ ID NO: 9073 - DNA, 1180 bp, Zea Mays
aacagatggaggccggcctgcgcgcgctaggccaccgctacttcggcggcggcggcggtggcctcggtgggttcgcggccgcgcgtgccacccggctccggcgccagcgccagcgccgcatggccgccttctgctccctcgctgttaatggagatgggaatggcgccgcgggtggccccgtggggagcggcgtcgaggtggcgcgcgccaggaggatgctccatgtcgtgctcgtctcgccgctgataccaggaaatacagggtccattgcaaggacatgtgcagcatctgcagttggcctgcatcttgtcggggtaagccattaggctataaggtagacgacacgaagttgaagcgcgcgggattggattattggccatacgttgttgtcaagattcatgactcttgggaccacttctgtgattatttcatgaaacaggaaggagataaaaggctgttggcgttcaccaaaagaggcacacacatccattcagccaggggactggctagtcttcggttccgaaacaaaagggttgcctcagcaagccctcgaggattgctgcagagaaggcctaggcggcgggaccctccggattcccatggtggagacctacgtccggtgcctgaacctctccgtcagcgtcggagtcgcgctgtacgaagccgctagacagctgaactatgaacagcttcagtaccagcctgatgagctcccagaggaggcgcaggagcttttcccggcagaggacatttatgcgtgaaaacctctgcccgagaacaattacacgttacacgcattgatcacctcatttttgtgtgtgtgtgtgtgtactgtttgccgtgacacatgattgagctggagggaccacgcactgcacgattctgttgcgaattcaattccaggccgagtccttgtccagacggtgttgacatgctcattcaaaatggtgtacctgatctgcttggaagaatcgttttagtgccatgtataatttcgcagtcagaactcagaaggtgattagagtatgctgcgatggggtctcgttctgacttcttttttgtgtgtgtactggttactgaaccataagctttgttaactgcaactggacgctgcgtcctgttgcttctctgtcagtgtgtgtggtgaggaaggaaggttggtgcgggagctttactgcca

SEQ ID NO: 9074 - DNA, 1298 bp, Zea Mays
aacagatggaggccggcctgcgcgcgctaggccaccgctacttcggcggcggcggcggtggcctcggtgggttcgcggccgcgcgtgccacccggctccggcgccagcgccagcgccgcatggccgccttctgctcccgtgagtggcaagggattcccccacttcccccctccacttcctaccgctccggcgtgtctgtgtatctgacgtccctccccacgctcgcaaacgtctctgcagtcgctgttaatggagatgggaatggcgccgcgggtggccccgtggggagcggcgtcgaggtggcgcgcgccaggaggatgctccatgtcgtgctcgtctcgccgctgataccaggaaatacagggtccattgcaaggacatgtgcagcatctgcagttggcctgcatcttgtcggggtaagccattaggctataaggtagacgacacgaagttgaagcgcgcgggattggattattggccatacgttgttgtcaagattcatgactcttgggaccacttctgtgattatttcatgaaacaggaaggagataaaaggctgttggcgttcaccaaaagaggcacacacatccattcagtgatttctcctacaggccaggggactggctagtcttcggttccgaaacaaaagggttgcctcagcaagccctcgaggattgctgcagagaaggcctaggcggcgggaccctccggattcccatggtggagacctacgtccggtgcctgaacctctccgtcagcgtcggagtcgcgctgtacgaagccgctagacagctgaactatgaacagcttcagtaccagcctgatgagctcccagaggaggcgcaggagcttttcccggcagaggacatttatgcgtgaaaacctctgcccgagaacaattacacgttacacgcattgatcacctcatttttgtgtgtgtgtgtgtgtactgtttgccgtgacacatgattgagctggagggaccacgcactgcacgattctgttgcgaattcaattccaggccgagtccttgtccagacggtgttgacatgctcattcaaaatggtgtacctgatctgcttggaagaatcgttttagtgccatgtataatttcgcagtcagaactcagaaggtgattagagtatgctgcgatggggtctcgttctgacttcttttttgtgtgtgtactggttactgaaccataagctttgttaactgcaactggacgctgcgtcctgttgcttctctgtcagtgtgtgtggtgaggaaggaaggttggtgcgggagctttactgcca

SEQ ID NO: 9075 - DNA, 1325 bp, Zea Mays
ctggcccactccacattttcccgtagcgacgaacccgggagcccatcactgcagcacaaagcagttcggaccgaaggcccacggcccgtttcccttccgccttatccctccgatcgctgtcggattattcgagagcaacagatggaggccggcctgcgcgcgctaggccaccgctacttcggcggcggcggcggtggcctcggtgggttcgcggccgcgcgtgccacccggctccggcgccagcgccagcgccgcatggccgccttctgctccctcgctgttaatggagatgggaatggcgccgcgggtggccccgtggggagcggcgtcgaggtggcgcgcgccaggaggatgctccatgtcgtgctcgtctcgccgctgataccaggaaatacagggtccattgcaaggacatgtgcagcatctgcagttggcctgcatcttgtcgggccattaggctataaggtagacgacacgaagttgaagcgcgcgggattggattattggccatacgttgttgtcaagattcatgactcttgggaccacttctgtgattatttcatgaaacaggaaggagataaaaggctgttggcgttcaccaaaagaggcacacacatccattcagatttctcctacaggccaggggactggctagtcttcggttccgaaacaaaagggttgcctcagcaagccctcgaggattgctgcagagaaggcctaggcggcgggaccctccggattcccatggtggagacctacgtccggtgcctgaacctctccgtcagcgtcggagtcgcgctgtacgaagccgctagacagctgaactatgaacagcttcagtaccagcctgatgagctcccagaggaggcgcaggagcttttcccggcagaggacatttatgcgtgaaaacctctgcccgagaacaattacacgttacacgcattgatcacctcatttttgtgtgtgtgtgtgtgtactgtttgccgtgacacatgattgagctggagggaccacgcactgcacgattctgttgcgaattcaattccaggccgagtccttgtccagacggtgttgacatgctcattcaaaatggtgtacctgatctgcttggaagaatcgttttagtgccatgtataatttcgcagtcagaactcagaaggtgattagagtatgctgcgatggggtctcgttctgacttcttttttgtgtgtgtactggttactgaaccataagctttgttaactgcaactggacgctgcgtcctgttgcttctctgtcagtgtgtgtggtgaggaaggaaggttggtgcgggagctttactgcca

SEQ ID NO: 9076 - DNA, 1311 bp, Zea Mays
ctggcccactccacattttcccgtagcgacgaacccgggagcccatcactgcagcacaaagcagttcggaccgaaggcccacggcccgtttcccttccgccttatccctccgatcgctgtcggattattcgagagcaacagatggaggccggcctgcgcgcgctaggccaccgctacttcggcggcggcggcggtggcctcggtgggttcgcggccgcgcgtgccacccggctccggcgccagcgccagcgccgcatggccgccttctgctccctcgctgttaatggagatgggaatggcgccgcgggtggccccgtggggagcggcgtcgaggtggcgcgcgccaggaggatgctccatgtcgtgctcgtctcgccgctgataccaggaaatacagggtccattgcaaggacatgtgcagcatctgcagttggcctgcatcttgtcgggccattaggctataaggtagacgacacgaagttgaagcgcgcgggattggattattggccatacgttgttgtcaagattcatgactcttgggaccacttctgtgattatttcatgaaacaggaaggagataaaaggctgttggcgttcaccaaaagaggcacacacatccattcagccaggggactggctagtcttcggttccgaaacaaaagggttgcctcagcaagccctcgaggattgctgcagagaaggcctaggcggcgggaccctccggattcccatggtggagacctacgtccggtgcctgaacctctccgtcagcgtcggagtcgcgctgtacgaagccgctagacagctgaactatgaacagcttcagtaccagcctgatgagctcccagaggaggcgcaggagcttttcccggcagaggacatttatgcgtgaaaacctctgcccgagaacaattacacgttacacgcattgatcacctcatttttgtgtgtgtgtgtgtgtactgtttgccgtgacacatgattgagctggagggaccacgcactgcacgattctgttgcgaattcaattccaggccgagtccttgtccagacggtgttgacatgctcattcaaaatggtgtacctgatctgcttggaagaatcgttttagtgccatgtataatttcgcagtcagaactcagaaggtgattagagtatgctgcgatggggtctcgttctgacttcttttttgtgtgtgtactggttactgaaccataagctttgttaactgcaactggacgctgcgtcctgttgcttctctgtcagtgtgtgtggtgaggaaggaaggttggtgcgggagctttactgcca

SEQ ID NO: 9077 - DNA, 951 bp, Zea Mays
acgggtttgcagctgacgctctccatcctcgttcttctcgctccgttcctctttccctcctcccctccgtcttggttcttcacacctggttcttctgtctcccgttgtctctatcgtctgctccggtgaacccgcatcgttcctattccttgtgctgcttccgtcgtcggctccagtaaatcactttgttcgccagctcgagatcgtggacggcttgctaaaatcagttaccataaacatgagagcattctcagtgacaaatagagcattttctattctctctatattaacaaaccatggaagacaatcctcagtaccatcttccctacttacctaccccgaacaacatcttatcacaagatgacgtacttggccttacaaccacgcaccagcgacatcattttccaaattatccacttctagcagccaaacaaacatggcccgacgattgctagcatatcccggtgtgccacagaatacagaggcggatgaacactacacagatcaacttaacaagaaggagctatcctcaccatcgaaaatgatgaagcacacccaagttgacaaagtcctagattctataattccagaaaaatgaagcttgttacatcctcatgacatgcatgaaggcatgtgtgttgatgcaacctctgggaaacaaatgctatcagctgctgacatatgctacttcaatactgcttgatatgtattgcactctcagttccgtctactgttggtccaaactgcatctgtgtatatacagacgagttgtattaaactttctaaatctgtgtatactaatgcaacctcttgaaaacagttgttagcccttgacacgtatgctattttaatgctacttaatatgtattgcaatttggttttcctgtacagaactgctacaattcacgttccaatattaatcggaagctactgcagcctagcaaaatttcc

SEQ ID NO: 9078 - DNA, 2258 bp, Zea Mays
acgggtttgcagctgacgctctccatcctcgttcttctcgctccgttcctctttccctcctcccctccgtcttggttcttcacacctggttcttctgtctcccgttgtctctatcgtctgctccggtgaacccgcatcgttcctattccttgtgctgcttccgtcgtcggctccagtaaatcactttgttcgccagctcgagatcgtggacggcttgctaaaatcagattattgttgacaccatcaccatttgaacgttgttgcttctcgagtcgccttatcatcctctcaatcttccgtctctctttgtattttgaataccaacatcaagaagatggtaagtacattccatacatgcatagaaaagaaacttaaaatgaaaaggaaagtataacagaccaaagaactttatctttctatctctaaattgtaatgtccgctggacaacaagttgattctgaagctcttgttgcctcttcagttcttccagtttcttctcttgagcaaccctaatctcatccggaaggtcctgaaaattaaacatggagcagtaactaaacaacatggctagatgaaaagggggctatactccattgatgtaatcagaaaataaaatggaagcatatgtgctattcttttatacatgtaggttgctcacataaagtggccttgattttaaataacacaaccatggtaagcttatacccccctcccgctgtagaattgaattacacaaccagttgccacttatgcataggggtggtaatgggctctagattttacattataaaatttaaggatcgaatcgcgttaggaccatgctctattcctttttttaactaaaatttattaagggccctaactgaaaaataaaattttggatcgtggtccattaccacccttatgcctacttgactctttccaatataagatgaagattctgtcggaaagcaattatatttagttgatgcatagaaagagacatgaacatatccattctacactgttctaaaacaaggtcaattaggcttcctcacttcccctctgacaagaacaaattccctttcaccatttttcgaccaatcagtttgagcagcatagttaaaatttcagtatgttagtatttcaatcaatacttgatacttaatgcagtgcagtaatccagctacaccatgaactttatcccactacatgatgaaatttatctttgcagttaccataaacatgagagcattctcagtgacaaatagagcattttctattctctctatattaacaaaccatggaagacaatcctcagtaccatcttccctacttacctaccccgaacaacatcttatcacaagatgacgtacttggccttacaaccacgcaccagcgacatcattttccaaattatccacttctagcagccaaacaaacatggcccgacgattgctagcatatcccggtgtgccacagaatacagaggcggatgaacactacacagatcaacttaacaagaaggagctatcctcaccatcgaaaatgtaagtattcgagtattataaaaaaagtaggataaacaacagatacattttaattttaccactaaaacttatgtccaggatgaagcacacccaagttgacaaagtcctagattctataattccagaaaaatgaagcttgttacatcctcatgacatgcatgaaggtataatactatatatactcctttgtgatacaaaacatattaccccccccccacattatctttcactcgccttagtacccattaaacagcaacaaataattaggcaaacattgttagcacaactaatcctatcttcctctttatgtaaaggaatttgcttttgcgtatctgtggagggcttcgtcacttttgaatgaaaaaacatctatgtacatataaatcacttggtgaagcctttctcaggcatgtgtgttgatgcaacctctgggaaacaaatgctatcagctgctgacatatgctacttcaatactgcttgatatgtattgcactctcagttccgtctactgttggtccaaactgcatctgtgtatatacagacgagttgtattaaactttctaaatctgtgtatactaatgcaacctcttgaaaacagttgttagcccttgacacgtatgctattttaatgctacttaatatgtattgcaatttggttttcctgtacagaactgctacaattcacgttccaatattaatcggaagctactgcagcctagcaaaatttcc

SEQ ID NO: 9079 - DNA, 1335 bp, Zea Mays
acgggtttgcagctgacgctctccatcctcgttcttctcgctccgttcctctttccctcctcccctccgtcttggttcttcacacctggttcttctgtctcccgttgtctctatcgtctgctccggtgaacccgcatcgttcctattccttgtgctgcttccgtcgtcggctccagtaaatcactttgttcgccagctcgagatcgtggacggcttgctaaaatcagttcttccagtttcttctcttgagcaaccctaatctcatccggaaggtcctgaaaattaaacatggagcagtaactaaacaacatggctagatgaaaagggggctatactccattgatgtaatcagaaaataaaatggaagcatatgtgctattcttttatacatgtaggttgctcacataaagtggccttgattttaaataacacaaccatggtaagcttatacccccctcccgctgtagaattgaattacacaaccagttgccacttatgcataggggtggtaatgggctctagattttacattataaaatttaaggatcgaatcgcgttaggaccatgctctattcctttttttaactaaaatttattaagggccctaactgaaaaataaaattttggatcgtggtccattaccacccttatgcctacttgactctttccaatataagatgaagattctgtcggaaagcaattatatttagttgatgcatagaaagagacatgaacatatccattctacactgttctaaaacaaggtcaattaggcttcctcacttcccctctgacaagaacaaattccctttcaccatttttcgaccaatcagtttgagcagcatagttaaaatttcagtatgttagtatttcaatcaatacttgatacttaatgcagtgcagtaatccagctacaccatgaactttatcccactacatgatgaaatttatctttgcagttaccataaacatgagagcattctcagtgacaaatagagcattttctattctctctatattaacaaaccatggaagacaatcctcagtaccatcttccctacttacctaccccgaacaacatcttatcacaagatgacgtacttggccttacaaccacgcaccagcgacatcattttccaaattatccacttctagcagccaaacaaacatggcccgacgattgctagcatatcccggtgtgccacagaatacagaggcggatgaacactacacagatcaacttaacaagaaggagctatcctcaccatcgaaaataactgctacaattcacgttccaatattaatcggaagctactgcagcctagcaaaatttcc

SEQ ID NO: 9080 - DNA, 911 bp, Zea Mays
acgggtttgcagctgacgctctccatcctcgttcttctcgctccgttcctctttccctcctcccctccgtcttggttcttcacacctggttcttctgtctcccgttgtctctatcgtctgctccggtgaacccgcatcgttcctattccttgtgctgcttccgtcgtcggctccagtaaatcactttgttcgccagctcgagatcgtggacggcttgctaaaatcagatgacgtacttggccttacaaccacgcaccagcgacatcattttccaaattatccacttctagcagccaaacaaacatggcccgacgattgctagcatatcccggtgtgccacagaatacagaggcggatgaacactacacagatcaacttaacaagaaggagctatcctcaccatcgaaaatgatgaagcacacccaagttgacaaagtcctagattctataattccagaaaaatgaagcttgttacatcctcatgacatgcatgaaggaatttgcttttgcgtatctgtggagggcttcgtcacttttgaatgaaaaaacatctatgtacatataaatcacttggtgaagcctttctcaggcatgtgtgttgatgcaacctctgggaaacaaatgctatcagctgctgacatatgctacttcaatactgcttgatatgtattgcactctcagttccgtctactgttggtccaaactgcatctgtgtatatacagacgagttgtattaaactttctaaatctgtgtatactaatgcaacctcttgaaaacagttgttagcccttgacacgtatgctattttaatgctacttaatatgtattgcaatttggttttcctgtacagaactgctacaattcacgttccaatattaatcggaagctactgcagcctagcaaaatttcc

SEQ ID NO: 9081 - DNA, 2326 bp, Zea Mays
acgggtttgcagctgacgctctccatcctcgttcttctcgctccgttcctctttccctcctcccctccgtcttggttcttcacacctggttcttctgtctcccgttgtctctatcgtctgctccggtgaacccgcatcgttcctattccttgtgctgcttccgtcgtcggctccagtaaatcactttgttcgccagctcgagatcgtggacggcttgctaaaatcaggtttgttttcattgggtttccatttctggaagtgattaaggcgaagtaaatcttctttcctcgaaacgtatacactttggtgcatctgtggaaatctgatttgttgggtttctgatctatttggctctttgcattttttaaatcccctcctacaaatcctgctacctccccgtctttttttgtttgtttggaaaatttgtttcgtatcttccctcctcgtttttttgcttcagttcgaaatcgatttggtgggtttctgatggcaaccctcgccaccgcctcatgggtacgtgccgagccgccttatctgttcgctcaccactttacattggttcttgcgcctgcgatttcggtgtcgtaggatcatgcttgtgcggatgtgatggtcgctgtggcttcgcgtcggtgggcggtgggatttgggctgggattctcgcgccttgtctctagggtttgggtttggtgcttcctcagtgcggaattggggattataattcctttaggtttgattttatctcgggtaactgcgggataatagcctagtagggaaatcgtggggattcttaaggattattaagtttctgatttatctctgccttatttagctcgtctgttgtggtggcttttccttcttgctgatgctgattatgcttccggttatgagccacaaaacaatattgatcggcaacctgtagttttgcctcagttcatcgcttgctgtctctgttaaatgaccaagaataaagtttagtacttcacacattaggcatccagtaaaacggtatcataattccaaaggtcagtaacgcaaacaaacaccttctaaatcttttccgtttgctgcagcagccatgagattctccttgatctgtttgcgacatttattcctctcttgaacaatatcttgactattccctccagtgaacagcgagacatatttctcattcttagggaagaactacaaatgagttgagatatagaagctttagctcaggattcaagcaggtacagataaaaaatggttgattagaacctccaatctaatgcaaagagaatgatacatcacagaaaacaaagttgtaatgatacttatatgtcatatcatcatgggcagggcagtaatgtaggaagcttactctaacatattcaagatcttctcgcaattttgacagattattgttgacaccatcaccatttgaacgttgttgcttctcgagtcgccttatcatcctctcaatcttccgtctctctttgtattttgaataccaacatcaagaagatgttaccataaacatgagagcattctcagtgacaaatagagcattttctattctctctatattaacaaaccatggaagacaatcctcagtaccatcttccctacttacctaccccgaacaacatcttatcacaagatgacgtacttggccttacaaccacgcaccagcgacatcattttccaaattatccacttctagcagccaaacaaacatggcccgacgattgctagcatatcccggtgtgccacagaatacagaggcggatgaacactacacagatcaacttaacaagaaggagctatcctcaccatcgaaaatgatgaagcacacccaagttgacaaagtcctagattctataattccagaaaaatgaagcttgttacatcctcatgacatgcatgaaggaatttgcttttgcgtatctgtggagggcttcgtcacttttgaatgaaaaaacatctatgtacatataaatcacttggtgaagcctttctcaggcatgtgtgttgatgcaacctctgggaaacaaatgctatcagctgctgacatatgctacttcaatactgcttgatatgtattgcactctcagttccgtctactgttggtccaaactgcatctgtgtatatacagacgagttgtattaaactttctaaatctgtgtatactaatgcaacctcttgaaaacagttgttagcccttgacacgtatgctattttaatgctacttaatatgtattgcaatttggttttcctgtacagaactgctacaattcacgttccaatattaatcggaagctactgcagcctagcaaaatttcc

SEQ ID NO: 9082 - DNA, 689 bp, Zea Mays
acgggtttgcagctgacgctctccatcctcgttcttctcgctccgttcctctttccctcctcccctccgtcttggttcttcacacctggttcttctgtctcccgttgtctctatcgtctgctccggtgaacccgcatcgttcctattccttgtgctgcttccgtcgtcggctccagtaaatcactttgttcgccagctcgagatcgtggacggcttgctaaaatcagttaccataaacatgagagcattctcagtgacaaatagagcattttctattctctctatattaacaaaccatggaagacaatcctcagtaccatcttccctacttacctaccccgaacaacatcttatcacaagatgacgtacttggccttacaaccacgcaccagcgacatcattttccaaattatccacttctagcagccaaacaaacatggcccgacgattgctagcatatcccggtgtgccacagaatacagaggcggatgaacactacacagatcaacttaacaagaaggagctatcctcaccatcgaaaatgatgaagcacacccaagttgacaaagtcctagattctataattccagaaaaatgaagcttgttacatcctcatgacatgcatgaagaactgctacaattcacgttccaatattaatcggaagctactgcagcctagcaaaatttcc

SEQ ID NO: 9083 - DNA, 2503 bp, Zea Mays
acgggtttgcagctgacgctctccatcctcgttcttctcgctccgttcctctttccctcctcccctccgtcttggttcttcacacctggttcttctgtctcccgttgtctctatcgtctgctccggtgaacccgcatcgttcctattccttgtgctgcttccgtcgtcggctccagtaaatcactttgttcgccagctcgagatcgtggacggcttgctaaaatcaggtttgttttcattgggtttccatttctggaagtgattaaggcgaagtaaatcttctttcctcgaaacgtatacactttggtgcatctgtggaaatctgatttgttgggtttctgatctatttggctctttgcattttttaaatcccctcctacaaatcctgctacctccccgtctttttttgtttgtttggaaaatttgtttcgtatcttccctcctcgtttttttgcttcagttcgaaatcgatttggtgggtttctgatggcaaccctcgccaccgcctcatgggtacgtgccgagccgccttatctgttcgctcaccactttacattggttcttgcgcctgcgatttcggtgtcgtaggatcatgcttgtgcggatgtgatggtcgctgtggcttcgcgtcggtgggcggtgggatttgggctgggattctcgcgccttgtctctagggtttgggtttggtgcttcctcagtgcggaattggggattataattcctttaggtttgattttatctcgggtaactgcgggataatagcctagtagggaaatcgtggggattcttaaggattattaagtttctgatttatctctgccttatttagctcgtctgttgtggtggcttttccttcttgctgatgctgattatgcttccggttatgagccacaaaacaatattgatcggcaacctgtagttttgcctcagttcatcgcttgctgtctctgttaaatgaccaagaataaagtttagtacttcacacattaggcatccagtaaaacggtatcataattccaaaggtcagtaacgcaaacaaacaccttctaaatcttttccgtttgctgcagcagccatgagattctccttgatctgtttgcgacatttattcctctcttgaacaatatcttgactattccctccagtgaacagcgagacatatttctcattcttagggaagaactacaaatgagttgagatatagaagctttagctcaggattcaagcaggtacagataaaaaatggttgattagaacctccaatctaatgcaaagagaatgatacatcacagaaaacaaagttgtaatgatacttatatgtcatatcatcatgggcagggcagtaatgtaggaagcttactctaacatattcaagatcttctcgcaattttgacagattattgttgacaccatcaccatttgaacgttgttgcttctcgagtcgccttatcatcctctcaatcttccgtctctctttgtattttgaataccaacatcaagaagatggtaagtacattccatacatgcatagaaaagaaacttaaaatgaaaaggaaagtataacagaccaaagaactttatctttctatctctaaattgtaatgtccgctggacaacaagttgattctgaagctcttgttgcctcttcagttcttccagtttcttctcttgagcaaccctaatctcatccggaaggtcctgaaaattaaacatggagcagtaactaaacaacatggctagatgaaaagggggctatactccattgatgtaatcagaaaataaaatggaagcatatgtgctattcttttatacatgtaggttgctcacataaagtggccttgattttaaataacacaaccatgttaccataaacatgagagcattctcagtgacaaatagagcattttctattctctctatattaacaaaccatggaagacaatcctcagtaccatcttccctacttacctaccccgaacaacatcttatcacaagatgacgtacttggccttacaaccacgcaccagcgacatcattttccaaattatccacttctagcagccaaacaaacatggcccgacgattgctagcatatcccggtgtgccacagaatacagaggcggatgaacactacacagatcaacttaacaagaaggagctatcctcaccatcgaaaatgcatgtgtgttgatgcaacctctgggaaacaaatgctatcagctgctgacatatgctacttcaatactgcttgatatgtattgcactctcagttccgtctactgttggtccaaactgcatctgtgtatatacagacgagttgtattaaactttctaaatctgtgtatactaatgcaacctcttgaaaacagttgttagcccttgacacgtatgctattttaatgctacttaatatgtattgcaatttggttttcctgtacagaactgctacaattcacgttccaatattaatcggaagctactgcagcctagcaaaatttcc

SEQ ID NO: 9084 - DNA, 1641 bp, Zea Mays
acgggtttgcagctgacgctctccatcctcgttcttctcgctccgttcctctttccctcctcccctccgtcttggttcttcacacctggttcttctgtctcccgttgtctctatcgtctgctccggtgaacccgcatcgttcctattccttgtgctgcttccgtcgtcggctccagtaaatcactttgttcgccagctcgagatcgtggacggcttgctaaaatcaggtttgttttcattgggtttccatttctggaagtgattaaggcgaagtaaatcttctttcctcgaaacgtatacactttggtgcatctgtggaaatctgatttgttgggtttctgatctatttggctctttgcattttttaaatcccctcctacaaatcctgctacctccccgtctttttttgtttgtttggaaaatttgtttcgtatcttccctcctcgtttttttgcttcagttcgaaatcgatttggtgggtttctgatggcaaccctcgccaccgcctcatggttaccataaacatgagagcattctcagtgacaaatagagcattttctattctctctatattaacaaaccatggaagacaatcctcagtaccatcttccctacttacctaccccgaacaacatcttatcacaagatgacgtacttggccttacaaccacgcaccagcgacatcattttccaaattatccacttctagcagccaaacaaacatggtatggaacttcttctttactattatttgcaactttttaaaaacatgttatatgactacaacctaatgaagttcatttgctaggcccgacgattgctagcatatcccggtgtgccacagaatacagaggcggatgaacactacacagatcaacttaacaagaaggagctatcctcaccatcgaaaatgtaagtattcgagtattataaaaaaagtaggataaacaacagatacattttaattttaccactaaaacttatgtccaggatgaagcacacccaagttgacaaagtcctagattctataattccagaaaaatgaagcttgttacatcctcatgacatgcatgaaggtataatactatatatactcctttgtgatacaaaacatattaccccccccccacattatctttcactcgccttagtacccattaaacagcaacaaataattaggcaaacattgttagcacaactaatcctatcttcctctttatgtaaaggaatttgcttttgcgtatctgtggagggcttcgtcacttttgaatgaaaaaacatctatgtacatataaatcacttggtgaagcctttctcaggcatgtgtgttgatgcaacctctgggaaacaaatgctatcagctgctgacatatgctacttcaatactgcttgatatgtattgcactctcagttccgtctactgttggtccaaactgcatctgtgtatatacagacgagttgtattaaactttctaaatctgtgtatactaatgcaacctcttgaaaacagttgttagcccttgacacgtatgctattttaatgctacttaatatgtattgcaatttggttttcctgtacagaactgctacaattcacgttccaatattaatcggaagctactgcagcctagcaaaatttcc

SEQ ID NO: 9085 - DNA, 3131 bp, Zea Mays
gttctcttcgtctctacgggtttgcagctgacgctctccatcctcgttcttctcgctccgttcctctttccctcctcccctccgtcttggttcttcacacctggttcttctgtctcccgttgtctctatcgtctgctccggtgaacccgcatcgttcctattccttgtgctgcttccgtcgtcggctccagtaaatcactttgttcgccagctcgagatcgtggacggcttgctaaaatcaggtttgttttcattgggtttccatttctggaagtgattaaggcgaagtaaatcttctttcctcgaaacgtatacactttggtgcatctgtggaaatctgatttgttgggtttctgatctatttggctctttgcattttttaaatcccctcctacaaatcctgctacctccccgtctttttttgtttgtttggaaaatttgtttcgtatcttccctcctcgtttttttgcttcagttcgaaatcgatttggtgggtttctgatggcaaccctcgccaccgcctcatgggtacgtgccgagccgccttatctgttcgctcaccactttacattggttcttgcgcctgcgatttcggtgtcgtaggatcatgcttgtgcggatgtgatggtcgctgtggcttcgcgtcggtgggcggtgggatttgggctgggattctcgcgccttgtctctagggtttgggtttggtgcttcctcagtgcggaattggggattataattcctttaggtttgattttatctcgggtaactgcgggataatagcctagtagggaaatcgtggggattcttaaggattattaagtttctgatttatctctgccttatttagctcgtctgttgtggtggcttttccttcttgctgatgctgattatgcttccggttatgagccacaaaacaatattgatcggcaacctgtagttttgcctcagttcatcgcttgctgtctctgttaaatgaccaagaataaagtttagtacttcacacattaggcatccagtaaaacggtatcataattccaaaggtcagtaacgcaaacaaacaccttctaaatcttttccgtttgctgcagcagccatgagattctccttgatctgtttgcgacatttattcctctcttgaacaatatcttgactattccctccagtgaacagcgagacatatttctcattcttagggaagaactacaaatgagttgagatatagaagctttagctcaggattcaagcaggtacagataaaaaatggttgattagaacctccaatctaatgcaaagagaatgatacatcacagaaaacaaagttgtaatgatacttatatgtcatatcatcatgggcagggcagtaatgtaggaagcttactctaacatattcaagatcttctcgcaattttgacagattattgttgacaccatcaccatttgaacgttgttgcttctcgagtcgccttatcatcctctcaatcttccgtctctctttgtattttgaataccaacatcaagaagatggtaagtacattccatacatgcatagaaaagaaacttaaaatgaaaaggaaagtataacagaccaaagaactttatctttctatctctaaattgtaatgtccgctggacaacaagttgattctgaagctcttgttgcctcttcagttcttccagtttcttctcttgagcaaccctaatctcatccggaaggtcctgaaaattaaacatggagcagtaactaaacaacatggctagatgaaaagggggctatactccattgatgtaatcagaaaataaaatggaagcatatgtgctattcttttatacatgtaggttgctcacataaagtggccttgattttaaataacacaaccatggtaagcttatacccccctcccgctgtagaattgaattacacaaccagttgccacttatgcataggggtggtaatgggctctagattttacattataaaatttaaggatcgaatcgcgttaggaccatgctctattcctttttttaactaaaatttattaagggccctaactgaaaaataaaattttggatcgtggtccattaccacccttatgcctacttgactctttccaatataagatgaagattctgtcggaaagcaattatatttagttgatgcatagaaagagacatgaacatatccattctacactgttctaaaacaaggtcaattaggcttcctcacttcccctctgacaagaacaaattccctttcaccatttttcgaccaatcagtttgagcagcatagttaaaatttcagtatgttagtatttcaatcaatacttgatacttaatgcagtgcagtaatccagctacaccatgaactttatcccactacatgatgaaatttatctttgcagttaccataaacatgagagcattctcagtgacaaatagagcattttctattctctctatattaacaaaccatggaagacaatcctcagtaccatcttccctacttacctaccccgaacaacatcttatcacaagatgacgtacttggccttacaaccacgcaccagcgacatcattttccaaattatccacttctagcagccaaacaaacatggcccgacgattgctagcatatcccggtgtgccacagaatacagaggcggatgaacactacacagatcaacttaacaagaaggagctatcctcaccatcgaaaatgaatttgcttttgcgtatctgtggagggcttcgtcacttttgaatgaaaaaacatctatgtacatataaatcacttggtgaagcctttctcaggcatgtgtgttgatgcaacctctgggaaacaaatgctatcagctgctgacatatgctacttcaatactgcttgatatgtattgcactctcagttccgtctactgttggtccaaactgcatctgtgtatatacagacgagttgtattaaactttctaaatctgtgtatactaatgcaacctcttgaaaacagttgttagcccttgacacgtatgctattttaatgctacttaatatgtattgcaatttggttttcctgtacagaactgctacaattcacgttccaatattaatcggaagctactgcagcctagcaaaatttcc

SEQ ID NO: 9086 - DNA, 3124 bp, Zea Mays
gttctcttcgtctctacgggtttgcagctgacgctctccatcctcgttcttctcgctccgttcctctttccctcctcccctccgtcttggttcttcacacctggttcttctgtctcccgttgtctctatcgtctgctccggtgaacccgcatcgttcctattccttgtgctgcttccgtcgtcggctccagtaaatcactttgttcgccagctcgagatcgtggacggcttgctaaaatcaggtttgttttcattgggtttccatttctggaagtgattaaggcgaagtaaatcttctttcctcgaaacgtatacactttggtgcatctgtggaaatctgatttgttgggtttctgatctatttggctctttgcattttttaaatcccctcctacaaatcctgctacctccccgtctttttttgtttgtttggaaaatttgtttcgtatcttccctcctcgtttttttgcttcagttcgaaatcgatttggtgggtttctgatggcaaccctcgccaccgcctcatgggtacgtgccgagccgccttatctgttcgctcaccactttacattggttcttgcgcctgcgatttcggtgtcgtaggatcatgcttgtgcggatgtgatggtcgctgtggcttcgcgtcggtgggcggtgggatttgggctgggattctcgcgccttgtctctagggtttgggtttggtgcttcctcagtgcggaattggggattataattcctttaggtttgattttatctcgggtaactgcgggataatagcctagtagggaaatcgtggggattcttaaggattattaagtttctgatttatctctgccttatttagctcgtctgttgtggtggcttttccttcttgctgatgctgattatgcttccggttatgagccacaaaacaatattgatcggcaacctgtagttttgcctcagttcatcgcttgctgtctctgttaaatgaccaagaataaagtttagtacttcacacattaggcatccagtaaaacggtatcataattccaaaggtcagtaacgcaaacaaacaccttctaaatcttttccgtttgctgcagcagccatgagattctccttgatctgtttgcgacatttattcctctcttgaacaatatcttgactattccctccagtgaacagcgagacatatttctcattcttagggaagaactacaaatgagttgagatatagaagctttagctcaggattcaagcaggtacagataaaaaatggttgattagaacctccaatctaatgcaaagagaatgatacatcacagaaaacaaagttgtaatgatacttatatgtcatatcatcatgggcagggcagtaatgtaggaagcttactctaacatattcaagatcttctcgcaattttgacagattattgttgacaccatcaccatttgaacgttgttgcttctcgagtcgccttatcatcctctcaatcttccgtctctctttgtattttgaataccaacatcaagaagatggtaagtacattccatacatgcatagaaaagaaacttaaaatgaaaaggaaagtataacagaccaaagaactttatctttctatctctaaattgtaatgtccgctggacaacaagttgattctgaagctcttgttgcctcttcagttcttccagtttcttctcttgagcaaccctaatctcatccggaaggtcctgaaaattaaacatggagcagtaactaaacaacatggctagatgaaaagggggctatactccattgatgtaatcagaaaataaaatggaagcatatgtgctattcttttatacatgtaggttgctcacataaagtggccttgattttaaataacacaaccatggtaagcttatacccccctcccgctgtagaattgaattacacaaccagttgccacttatgcataggggtggtaatgggctctagattttacattataaaatttaaggatcgaatcgcgttaggaccatgctctattcctttttttaactaaaatttattaagggccctaactgaaaaataaaattttggatcgtggtccattaccacccttatgcctacttgactctttccaatataagatgaagattctgtcggaaagcaattatatttagttgatgcatagaaagagacatgaacatatccattctacactgttctaaaacaaggtcaattaggcttcctcacttcccctctgacaagaacaaattccctttcaccatttttcgaccaatcagtttgagcagcatagttaaaatttcagtatgttagtatttcaatcaatacttgatacttaatgcagtgcagtaatccagctacaccatgaactttatcccactacatgatgaaatttatctttgcagttaccataaacatgagagcattctcagtgacaaatagagcattttctattctctctatattaacaaaccatggaagacaatcctcagtaccatcttccctacttacctaccccgaacaacatcttatcacaagatgacgtacttggccttacaaccacgcaccagcgacatcattttccaaattatccacttctagcagccaaacaaacatggcccgacgattgctagcatatcccggtgtgccacagaatacagaggcggatgaacactacacagatcaacttaacaagaaggagctatcctcaccatcgaaaatgatgaagcacacccaagttgacaaagtcctagattctataattccagaaaaatgaagcttgttacatcctcatgacatgcatgaaggcatgtgtgttgatgcaacctctgggaaacaaatgctatcagctgctgacatatgctacttcaatactgcttgatatgtattgcactctcagttccgtctactgttggtccaaactgcatctgtgtatatacagacgagttgtattaaactttctaaatctgtgtatactaatgcaacctcttgaaaacagttgttagcccttgacacgtatgctattttaatgctacttaatatgtattgcaatttggttttcctgtacagaactgctacaattcacgttccaatattaatcggaagctactgcagcctagcaaaatttcc

SEQ ID NO: 9087 - DNA, 1080 bp, Zea Mays
ctctcgttctcttcgtctctacgggtttgcagctgacgctctccatcctcgttcttctcgctccgttcctctttccctcctcccctccgtcttggttcttcacacctggttcttctgtctcccgttgtctctatcgtctgctccggtgaacccgcatcgttcctattccttgtgctgcttccgtcgtcggctccagtaaatcactttgttcgccagctcgagatcgtggacggcttgctaaaatcaggcccgacgattgctagcatatcccggtgtgccacagaatacagaggcggatgaacactacacagatcaacttaacaagaaggagctatcctcaccatcgaaaatgtaagtattcgagtattataaaaaaagtaggataaacaacagatacattttaattttaccactaaaacttatgtccaggatgaagcacacccaagttgacaaagtcctagattctataattccagaaaaatgaagcttgttacatcctcatgacatgcatgaaggtataatactatatatactcctttgtgatacaaaacatattaccccccccccacattatctttcactcgccttagtacccattaaacagcaacaaataattaggcaaacattgttagcacaactaatcctatcttcctctttatgtaaaggaatttgcttttgcgtatctgtggagggcttcgtcacttttgaatgaaaaaacatctatgtacatataaatcacttggtgaagcctttctcaggcatgtgtgttgatgcaacctctgggaaacaaatgctatcagctgctgacatatgctacttcaatactgcttgatatgtattgcactctcagttccgtctactgttggtccaaactgcatctgtgtatatacagacgagttgtattaaactttctaaatctgtgtatactaatgcaacctcttgaaaacagttgttagcccttgacacgtatgctattttaatgctacttaatatgtattgcaatttggttttcctgtacagaactgctacaattcacgttccaatattaatcggaagctactgcagcctagcaaaatttcc

SEQ ID NO: 9088 - DNA, 3222 bp, Zea Mays
ctctcgttctcttcgtctctacgggtttgcagctgacgctctccatcctcgttcttctcgctccgttcctctttccctcctcccctccgtcttggttcttcacacctggttcttctgtctcccgttgtctctatcgtctgctccggtgaacccgcatcgttcctattccttgtgctgcttccgtcgtcggctccagtaaatcactttgttcgccagctcgagatcgtggacggcttgctaaaatcaggtttgttttcattgggtttccatttctggaagtgattaaggcgaagtaaatcttctttcctcgaaacgtatacactttggtgcatctgtggaaatctgatttgttgggtttctgatctatttggctctttgcattttttaaatcccctcctacaaatcctgctacctccccgtctttttttgtttgtttggaaaatttgtttcgtatcttccctcctcgtttttttgcttcagttcgaaatcgatttggtgggtttctgatggcaaccctcgccaccgcctcatgggtacgtgccgagccgccttatctgttcgctcaccactttacattggttcttgcgcctgcgatttcggtgtcgtaggatcatgcttgtgcggatgtgatggtcgctgtggcttcgcgtcggtgggcggtgggatttgggctgggattctcgcgccttgtctctagggtttgggtttggtgcttcctcagtgcggaattggggattataattcctttaggtttgattttatctcgggtaactgcgggataatagcctagtagggaaatcgtggggattcttaaggattattaagtttctgatttatctctgccttatttagctcgtctgttgtggtggcttttccttcttgctgatgctgattatgcttccggttatgagccacaaaacaatattgatcggcaacctgtagttttgcctcagttcatcgcttgctgtctctgttaaatgaccaagaataaagtttagtacttcacacattaggcatccagtaaaacggtatcataattccaaaggtcagtaacgcaaacaaacaccttctaaatcttttccgtttgctgcagcagccatgagattctccttgatctgtttgcgacatttattcctctcttgaacaatatcttgactattccctccagtgaacagcgagacatatttctcattcttagggaagaactacaaatgagttgagatatagaagctttagctcaggattcaagcaggtacagataaaaaatggttgattagaacctccaatctaatgcaaagagaatgatacatcacagaaaacaaagttgtaatgatacttatatgtcatatcatcatgggcagggcagtaatgtaggaagcttactctaacatattcaagatcttctcgcaattttgacagattattgttgacaccatcaccatttgaacgttgttgcttctcgagtcgccttatcatcctctcaatcttccgtctctctttgtattttgaataccaacatcaagaagatggtaagtacattccatacatgcatagaaaagaaacttaaaatgaaaaggaaagtataacagaccaaagaactttatctttctatctctaaattgtaatgtccgctggacaacaagttgattctgaagctcttgttgcctcttcagttcttccagtttcttctcttgagcaaccctaatctcatccggaaggtcctgaaaattaaacatggagcagtaactaaacaacatggctagatgaaaagggggctatactccattgatgtaatcagaaaataaaatggaagcatatgtgctattcttttatacatgtaggttgctcacataaagtggccttgattttaaataacacaaccatggtaagcttatacccccctcccgctgtagaattgaattacacaaccagttgccacttatgcataggggtggtaatgggctctagattttacattataaaatttaaggatcgaatcgcgttaggaccatgctctattcctttttttaactaaaatttattaagggccctaactgaaaaataaaattttggatcgtggtccattaccacccttatgcctacttgactctttccaatataagatgaagattctgtcggaaagcaattatatttagttgatgcatagaaagagacatgaacatatccattctacactgttctaaaacaaggtcaattaggcttcctcacttcccctctgacaagaacaaattccctttcaccatttttcgaccaatcagtttgagcagcatagttaaaatttcagtatgttagtatttcaatcaatacttgatacttaatgcagtgcagtaatccagctacaccatgaactttatcccactacatgatgaaatttatctttgcagttaccataaacatgagagcattctcagtgacaaatagagcattttctattctctctatattaacaaaccatggaagacaatcctcagtaccatcttccctacttacctaccccgaacaacatcttatcacaagatgacgtacttggccttacaaccacgcaccagcgacatcattttccaaattatccacttctagcagccaaacaaacatggcccgacgattgctagcatatcccggtgtgccacagaatacagaggcggatgaacactacacagatcaacttaacaagaaggagctatcctcaccatcgaaaatgatgaagcacacccaagttgacaaagtcctagattctataattccagaaaaatgaagcttgttacatcctcatgacatgcatgaaggaatttgcttttgcgtatctgtggagggcttcgtcacttttgaatgaaaaaacatctatgtacatataaatcacttggtgaagcctttctcaggcatgtgtgttgatgcaacctctgggaaacaaatgctatcagctgctgacatatgctacttcaatactgcttgatatgtattgcactctcagttccgtctactgttggtccaaactgcatctgtgtatatacagacgagttgtattaaactttctaaatctgtgtatactaatgcaacctcttgaaaacagttgttagcccttgacacgtatgctattttaatgctacttaatatgtattgcaatttggttttcctgtacagaactgctacaattcacgttccaatattaatcggaagctactgcagcctagcaaaatttcc

SEQ ID NO: 9089 - DNA, 3121 bp, Zea Mays
cattcatggacgtcttacattgctccacggccatctatttctggattgttctaggtgacgtttgcttcgtgtggacgactctcgttctcttcgtctctacgggtttgcagctgacgctctccatcctcgttcttctcgctccgttcctctttccctcctcccctccgtcttggttcttcacacctggttcttctgtctcccgttgtctctatcgtctgctccggtgaacccgcatcgttcctattccttgtgctgcttccgtcgtcggctccagtaaatcactttgttcgccagctcgagatcgtggacggcttgctaaaatcaggtttgttttcattgggtttccatttctggaagtgattaaggcgaagtaaatcttctttcctcgaaacgtatacactttggtgcatctgtggaaatctgatttgttgggtttctgatctatttggctctttgcattttttaaatcccctcctacaaatcctgctacctccccgtctttttttgtttgtttggaaaatttgtttcgtatcttccctcctcgtttttttgcttcagttcgaaatcgatttggtgggtttctgatggcaaccctcgccaccgcctcatgggtacgtgccgagccgccttatctgttcgctcaccactttacattggttcttgcgcctgcgatttcggtgtcgtaggatcatgcttgtgcggatgtgatggtcgctgtggcttcgcgtcggtgggcggtgggatttgggctgggattctcgcgccttgtctctagggtttgggtttggtgcttcctcagtgcggaattggggattataattcctttaggtttgattttatctcgggtaactgcgggataatagcctagtagggaaatcgtggggattcttaaggattattaagtttctgatttatctctgccttatttagctcgtctgttgtggtggcttttccttcttgctgatgctgattatgcttccggttatgagccacaaaacaatattgatcggcaacctgtagttttgcctcagttcatcgcttgctgtctctgttaaatgaccaagaataaagtttagtacttcacacattaggcatccagtaaaacggtatcataattccaaaggtcagtaacgcaaacaaacaccttctaaatcttttccgtttgctgcagcagccatgagattctccttgatctgtttgcgacatttattcctctcttgaacaatatcttgactattccctccagtgaacagcgagacatatttctcattcttagggaagaactacaaatgagttgagatatagaagctttagctcaggattcaagcaggtacagataaaaaatggttgattagaacctccaatctaatgcaaagagaatgatacatcacagaaaacaaagttgtaatgatacttatatgtcatatcatcatgggcagggcagtaatgtaggaagcttactctaacatattcaagatcttctcgcaattttgacagattattgttgacaccatcaccatttgaacgttgttgcttctcgagtcgccttatcatcctctcaatcttccgtctctctttgtattttgaataccaacatcaagaagatggtaagtacattccatacatgcatagaaaagaaacttaaaatgaaaaggaaagtataacagaccaaagaactttatctttctatctctaaattgtaatgtccgctggacaacaagttgattctgaagctcttgttgcctcttcagttcttccagtttcttctcttgagcaaccctaatctcatccggaaggtcctgaaaattaaacatggagcagtaactaaacaacatggctagatgaaaagggggctatactccattgatgtaatcagaaaataaaatggaagcatatgtgctattcttttatacatgtaggttgctcacataaagtggccttgattttaaataacacaaccatggtaagcttatacccccctcccgctgtagaattgaattacacaaccagttgccacttatgcataggggtggtaatgggctctagattttacattataaaatttaaggatcgaatcgcgttaggaccatgctctattcctttttttaactaaaatttattaagggccctaactgaaaaataaaattttggatcgtggtccattaccacccttatgcctacttgactctttccaatataagatgaagattctgtcggaaagcaattatatttagttgatgcatagaaagagacatgaacatatccattctacactgttctaaaacaaggtcaattaggcttcctcacttcccctctgacaagaacaaattccctttcaccatttttcgaccaatcagtttgagcagcatagttaaaatttcagtatgttagtatttcaatcaatacttgatacttaatgcagtgcagtaatccagctacaccatgaactttatcccactacatgatgaaatttatctttgcagttaccataaacatgagagcattctcagtgacaaatagagcattttctattctctctatattaacaaaccatggaagacaatcctcagtaccatcttccctacttacctaccccgaacaacatcttatcacaagatgacgtacttggccttacaaccacgcaccagcgacatcattttccaaattatccacttctagcagccaaacaaacatggcccgacgattgctagcatatcccggtgtgccacagaatacagaggcggatgaacactacacagatcaacttaacaagaaggagctatcctcaccatcgaaaatgcatgtgtgttgatgcaacctctgggaaacaaatgctatcagctgctgacatatgctacttcaatactgcttgatatgtattgcactctcagttccgtctactgttggtccaaactgcatctgtgtatatacagacgagttgtattaaactttctaaatctgtgtatactaatgcaacctcttgaaaacagttgttagcccttgacacgtatgctattttaatgctacttaatatgtattgcaatttggttttcctgtacagaactgctacaattcacgttccaatattaatcggaagctactgcagcctagcaaaatttcc

SEQ ID NO: 9090 - DNA, 1869 bp, Zea Mays
caaaaagtcgtcaagcacgcacaaagccacaaagcctggagtagagtactacagagagccaagacttatgatgaagagcacttgggtggaacgaactacattcgccaagataacaggagcctgtccgagaactggagcggcatcggtttggaccatgatcatgatggcctagaagacgaggtggcgttctcggatttcgacaaccgcaacaccttctcttcgtcgaacagcgagctccgtttctcttcgtcaaatgagcacctgcggaacagaaaggcgtgcagaaaccacccgtcgctccttccgcccgccctctctgccgacagtttgcttaggtcagtcagcaggatgacggactcgactgaatttaaggccgttacgacgtgcaatacctgcaagcccgcaacgatcagtagggacgacaccgaagctgctgatgccaggtccttgaagaacctcaacagcaccgcgccgctgtcaaactcccggacaaggcgcaatgggccacacattctctcctggctcttaccgaagtcaaagaggaagccaaaaccagatgtgtccccaaacaccgtcgaatgcgagaacatgtcgcagcttctgaaggactggggtgtgttctcactggattccctgaggaaagaggtcgttgaggccaatgagcacagggacgccgcgctccaagaggtatcagagatgaaactatcactaggagagctgactgccaagctagtgagcctggaagcatactgttcggaattgaagaaggctctaaagcaagcgacgagcgcgaagaacatgcagtctcactcaaagagatcggctaggccagttagcgggagcagagacagcttcttgcccgtcagtcacgaagttatggtggaagggttcttgcagatagtatcggaggctcgtctctccataaaacagttctgcaaggtattgatacagcaagtcgaagatactgacaacgggctatcagataagctaaatctgctcctacgaccgtaccagatcacgctgagtgacaagcacccgaagctagtgctgtaccacctcgaagctctgatgaaccaagcgatgtaccaggacttcgagaactgcacgttccagaagaacgggtcgcccaggtgcctggacccgaagcaggagcagcaggagagcttcgcctcgttcgtcgcgctgcgcaacctgagctggaacgaggtcctgaagaagggcaccaagcaccactgcgaggacctgggccgcttctgcgaccagaagatgagctgcgtcgtgtccatcctgaactggtcgtggccgtgggccgagcagctgctgcagtgcttcttcgtggcgtccaagtgtgtctggctgctccacctactggccttctccttcgtcccgccgctgaccatcctacgggtcgaggaggaccgggcgttcgaccagacgtacatggaggacgtgctgctggacaagcagcggtcacggaatggtccgccgccgtcgtcgtcgcaggtgaaactcatggtgacgcctgggttctatgtccaggacaggctgctcaaatgcagggtgctctgcaggtacagcggctagatctctatcgctgattggattggaggtgcttcgagtgttcttctttgactgattgttagttattagtgtgatgcagtagtatctgttctgctaggttgcaaagtgctatactgggacgccagaatatcattattttgacccttggcatgcccgtcagcatctctgtaacataagagagtcatgttgtgtaagaaagatgtgtgcaagattttagctcaacaggtttcctcttaacttttcgaagggaagaaaggggacctttttttatgaacagatgcatcagcc

SEQ ID NO: 9091 - DNA, 2075 bp, Zea Mays
cgacgacgaccccccgggcagaggcgtatgcatgtagcccaaggaagcagtgggggctagatttccccgtgcctcgttttctcggcacttgcgtcggcaagcatctccttcttctcagacagacacacggtgttggaccgacgatgatgacggtcggtttctgatccgtttctctcagctccaacgcagagaaggagagagaggaagacagccagacagaaactacaccggaagcacgcgaggacacaagacaaaggaaagctggaaagacttatgatgaagagcacttgggtggaacgaactacattcgccaagataacaggagcctgtccgagaactggagcggcatcggtttggaccatgatcatgatggcctagaagacgaggtggcgttctcggatttcgacaaccgcaacaccttctcttcgtcgaacagcgagctccgtttctcttcgtcaaatgagcacctgcggaacagaaaggcgtgcagaaaccacccgtcgctccttccgcccgccctctctgccgacagtttgcttaggtcagtcagcaggatgacggactcgactgaatttaaggccgttacgacgtgcaatacctgcaagcccgcaacgatcagtagggacgacaccgaagctgctgatgccaggtccttgaagaacctcaacagcaccgcgccgctgtcaaactcccggacaaggcgcaatgggccacacattctctcctggctcttaccgaagtcaaagaggaagccaaaaccagatgtgtccccaaacaccgtcgaatgcgagaacatgtcgcagcttctgaaggactggggtgtgttctcactggattccctgaggaaagaggtcgttgaggccaatgagcacagggacgccgcgctccaagaggtatcagagatgaaactatcactaggagagctgactgccaagctagtgagcctggaagcatactgttcggaattgaagaaggctctaaagcaagcgacgagcgcgaagaacatgcagtctcactcaaagagatcggctaggccagttagcgggagcagagacagcttcttgcccgtcagtcacgaagttatggtggaagggttcttgcagatagtatcggaggctcgtctctccataaaacagttctgcaaggtattgatacagcaagtcgaagatactgacaacgggctatcagataagctaaatctgctcctacgaccgtaccagatcacgctgagtgacaagcacccgaagctagtgctgtaccacctcgaagctctgatgaaccaagcgatgtaccaggacttcgagaactgcacgttccagaagaacgggtcgcccaggtgcctggacccgaagcaggagcagcaggagagcttcgcctcgttcgtcgcgctgcgcaacctgagctggaacgaggtcctgaagaagggcaccaagcaccactgcgaggacctgggccgcttctgcgaccagaagatgagctgcgtcgtgtccatcctgaactggtcgtggccgtgggccgagcagctgctgcagtgcttcttcgtggcgtccaagtgtgtctggctgctccacctactggccttctccttcgtcccgccgctgaccatcctacgggtcgaggaggaccgggcgttcgaccagacgtacatggaggacgtgctgctggacaagcagcggtcacggaatggtccgccgccgtcgtcgtcgcaggtgaaactcatggtgacgcctgggttctatgtccaggacaggctgctcaaatgcagggtgctctgcaggtacagcggctagatctctatcgctgattggattggaggtgcttcgagtgttcttctttgactgattgttagttattagtgtgatgcagtagtatctgttctgctaggttgcaaagtgctatactgggacgccagaatatcattattttgacccttggcatgcccgtcagcatctctgtaacataagagagtcatgttgtgtaagaaagatgtgtgcaagattttagctcaacaggtttcctcttaacttttcgaagggaagaaaggggacctttttttatgaacagatgcatcagcc

SEQ ID NO: 9092 - DNA, 1130 bp, Zea Mays
ttttcatggcgggtggtgcataacttccttgcgtcccccgatggctgaagaagagtggcctagattagggtcgggtggtgtccgaagtttctcgatgtctggtgggatggatccgaagaacaagaacattccaaatcccccatgggatcgttggggacaaaaagatactgcccagggttctcaatcctggaacagaaaccgcaatcttagctggagattgaagtcgcagcctgggaaatctgatctccatgagggtttactgtcttcttcctctggagatggcattcaatcagaaaaagaaggaaagaaaattggtggagcaaggaagcctcaaaatccgaaagataacaagtgatatctacagcaaggctaggggttggaagccaatcgacagacgcattcagtgaagcttttgttgggtgcctgtcattttgattcacctgttctgtttgctgtaatatctcctggtagcgtcaggctggaaaaccttgtcttagctcgctactttagctgttagtttcctgctgctttagttcagactcgttgatcttttcttttggtcagctttatgatgatattctggtgcttctagtcgtatgttctattcaggtcgtgttgcagggtagttgataattgtgtgtcttgtcggctcttaatttctggggtcatttatgatcacgtaagaactaagtcttttctatttcgtaatgaaataggggtatcccctttgtcaaaaaaaatgtaggtcacaaatttaatagttggcacaaaaaatgagtaaaaatgccactgcttatttgtttttttttggttgacataaacatatcaaggatggaagtgaattaagtattccgttgaactatggaatcacattctgcaagtctgatgtacaatagtactcttatataaataatctcttcgattgcatttgtaatccgtgctgtacaggtcttttgtgttgtagaaatatccatttcattgaaaagaactgtaactatctatccaattgcattttttaatctgtatagcgtacatcgatctatacaagtgtcttgtgttgtagaatctcagggcccctttgtgagactatccgcaaccctaaatttctactctaaaaaaatatgttatcc

SEQ ID NO: 9093 - DNA, 6586 bp, Zea Mays
agtttatacatacataaaaaaagggtcaatgtgagcgtatctgtttggactggagctgctcttccgatccaagcgtggaagcatcattaccactcgactctatagccactagtcactcagtcaatcatccacctgcgctgccgctggaatttaattaaaaaaaaagagcccgatcgatccagcaaagtgcatcacgccgttcacggcttcaggacatagggagctcccaagttctcctcctcctcctcctccacctcctcctcgtcgtcgtcttctctctcaggtctcagccatcgtatcgtccggacccaccgtatccccagtccgccggcggccgtcgattcattatcccggccgcccgggctgcccgtaagtcaagcggcggcggcggcggcggctaaggtatagccaaggctggagcgaggccggtgcggccgaccatccctgtgtgtgcaccctgcagaaccaacctcacccccgatcaaggttcttggatggcgggcgtgtgcgggagcccgttctgctccagggaagcttcagctccagctccagcgtcatgtggacgatgggacgaactactcaactcctccacctgcgcgaacaacatcctggcgaccggcgccgctgcgctgctcgccgtcgtcctcgcgctgcagctgctcgtcagggtcgcaaggaacggactacgacacgcgcccgtcgtcgcgctcagctcgccgctgcagcgggccgccgtggcggccaacgcctgcctgggcctggcctacctgggcctcgcggcgtggatgctggggacggacctgacccagcgcgcctccgtctacctcccacaccggtggctggtgagcctggcccaggggctctgcctgctcctcgccggcttcgccttcagcgtcagggcgcagctgctcggagcggcgttcctccgggtctgggcggctctgctggccgcgtacgccgcgttcgtttgctgcacctcggtcgtgcacatggtcgcagacaaggtgctggccgtgaagacgtgcttggatgttctgtccctgcctggtgcgctgctgctccttgtgtacggcattcggcacgccagggaagaagaagaaggagatggtaacggaggaaccgaaagttctttgtataagcctctgaacgccgaggctcacgacgacggtgcggccgactcgcgtgtcaccccgtttgctaaagccggggttttcagcatcatgacgttctggtggctgaaccccatgatgaagaagggttacgagaagcctctcgaggagaaagacatgccgctcctaggcccctcggaccgagcgtacagccagtacctgatgttcttggacaacctgaacaggaagaagcagctgcaggcacacggcaacccgtcggtcttctggaccatcgtctcttctcacaagagcgcgatcttggtctcgggtctcttcgcgttgctcaaagtgctcacgctgtctgcaggcccagtgcttctgaaagccttcatcaatgtctcgcttgggaaaggttccttcaagtacgagggctttgttctggccgcggcaatgttcgctatcaagtgctgtgagtctctgtcccagaggcagtggtactttcgcacccggaggctagggctccaggtgaggtcgctcctgtcggccgccatctacaagaagcagcagaagctgtcgggctcttcgaagctgaagcattcctctggagagatcataaactacgtcaccgtcgacgcctaccggatcggcgagttcccgtactggttccaccagacgtggacgacaagcgtccagctctgcatcgctctggggatcctgtacaatgcggttggtcttgccatgattgcatcgctggtcgtcatcgttctcactgtgatctgcaacgctcctctgtccaagctgcagcacaagtttcagactaggcttatggaagcacagggcgtgaggctgaaggcgatgtcggagtccttgatccacatgaaggtcttaaaactctatgcgtgggagacgcatttcaagaaggtcattgaggggttgagggagattgagatcaagtggctgtcggcgttcaaccttaggaaatccttcaatggtttcgtgttctggacatcaccggttctggtctcggctgcaaccttcctcacatgctatcttctgaaaatccctcttgatgcaagcaatgttttcacgtttgtggccactctgcgccttgttcaagacccaattaggcagatgccggatgtgattggagtcgttatacaggctaaagttgctttcactaggataacgaagtttcttgatgcgcctgagctgagtggacaggccaggaagaaatactgtgtgggagatgaatatcgtatagtgatgaactcttgcagtttttcatgggatgagaacccgtcaaaaccaactctgaagaatataaacttggtggtcaaggctggggagaaggttgcaatatgtggcgaggtaggatcaggaaagtcaacactattggctgcagttcttggagaggttcctaaaacagaaggcatgatccaaatttgtgggaaaacagcatatgtttctcaaaatgcatggatccaaacaggaacggtgcaagacaatattctctttggatcttcaatggacaggcaaaggtaccaagaaacgcttgagaggtgttctttagtaaaagaccttgaaatgcttccatatggagaccatactcaaatcggggagaggggcgtaaatcttagcggtggccagaagcagcgtgttcagcttgctcgtgcattataccaaaatgcagacatttatcttctcgatgaccctttcagcgctgttgatgcccacacagcaactagtctttttaacgaatatgtcatgggagctctgtcagataagactgtccttttggtgacccatcaagtcgattttttgcctgtatttgattctgttctgttaatgtcagatggtgaaattattcgtgctgcaccttatcaagatttattggcacattgtcaagaatttcagaacctcgtaaatgcccataaagacactattggtgtttcagatcttaacagagtcagatcccatagaacaaatgaaaacaagggatcgattgatattcatggaagcttatacaaagagtctttgaagccatcaccagcagatcagctgatcaagacagaggaaagagaaatgggtgacactggtctcaagccttatatcctttacttgcgccagaataaaggcttcttcaatggctctatggatcgatagcacttgttgttcttgggatccaaacatcaagatctttattttcccagttactcaactcattgttccgtgcgccaatgtccttttttgattctacccctcttggaaggatacttagccgggtatcttcagatttgagcattgttgatcttgatgttccatttggattgatgcttgctcttggtgccagcataaatgcatatagcaatctgggggtgttggctgttgttacatggcaagttctgttcgtctctgtgccgatgatggttttggcactcaggttgcagaagtactatttagcctcagctaaggaactgatgaggatcaatggcactaccaaatcagctctggctaatcacttgggagagtcggttgcagggtctataacaataagggctttcgaggaagaagatcgtttctttgagaaaaattcggaacttgttgacaagaatgctgcttcatatttctataattttgcagcgactgaatggctgattcaacgcctggaaacaatgagtgctgcagttctttctttttctgccttcatcatggctctcctccctgcaggaacttttagctctggctttataggaatggcgttgtcttatggtctgtccctgaacaattcctttgttttctctatccaaaaccagtgccagctatcaaaccagataatctctgtggaaagggtgaaccagtacatggacataccaagtgaagcagcagaggtcattgaagaaaatcgaccatcaccaaactggccccaagttggtagggtggagcttagagatctgaagatcagatacagggaagatgctccccttgtactgcatggaatcacatgcacttttgaaggcggagataagattggtatagtcggccggacaggaagtggaaagacgactttaatcggtgcattgtttcgtcttgttgagccaactggggggaaaataattattgactctgtagatatcaccacaattggcttacatgaccttcgttcacgtttgggtatcattccacaagatccgacactctttcagggaaccataagatataatctagatcctcttgagcaattttcggatcaacagatatgggaggttcttgacaaatgtcagcttcttgaagctgtccaggagaaggaacagggattggactcacttgttgtggaggatggctcgaactggagcatgggtcagaggcagctcttctgtttgggacgtgcactgctaagaagatgccgtgtcttagtcctcgacgaggccactgcatctatagacaatgctaccgatgcgatccttcagaaaacaatcaggacagagttcagagactgcactgtcatcactgtcgctcaccgtatacccactgtcatggactgcagtatggtacttgcactgagcgacgggaaactggtggagtatgacaagcctacgaagctcatggaaaccgaagggtctctcttccgtgacctcgtcaaagagtactggtcgtacgcatcgaatgggaatatctagaagccacctccaaactacgaccgtttgcatgtttccactcgctgcatcctcttgaaaggagatacaagaatctgggcttgcacatccgaagaactattgtatctgaaatcttgagaaaaggcgtcaggcattgtcatgaaatgcttgttgtcaagttttcaccactcgtttttcagcaactttttggtagtttctgttttgggtcattgcttcccttccaggcgctgaataaaagaaaacatgtctccatccccccccccccttcttctcccctccaaaaaaaagtagaggaaatcctcaacatttctttgctcacagtgatactttatgctcataacaaaaattcttaggcttggtgctcaacactattccattcagaatttgtggtgtatgcttacattcgtacaaagctgtagtagggtatatgatgtctgtttttttggggtgcaatcatggcttttcagcaccctcttgttcatgtttgatgtatattcatcggtgtctggagccaagcaatttggtggtaactctgttttttcactgcatgtgcatgctggatgattgtagatccttgcggcttatgtaggtcacaaattggaatggatgaactgaatgaatgcaccaagcaaggcccaaaaccagagatcctctgaacgcgaaggataggatggcgaaaaagaaaaggcgaaagttcccttgggccggggctccttcttcctcccttgtttccgctcctgtcgcgcatggcgcacatcaagctggttcgcgggaggaggatgttgggccgtcgtctacagtacgatgtgtggcccaaggagttctcgcgccctctcgcatcgcgtctccgggtgcttgggaaggatggtgccagggggttgcgtcgcttgccccagcccaagcccatgtgtcgcggcttcagctccctgccgagattccctgctctccagcggtcgccaaaaccagaaaaagaaggaaagaaaattggtggagcaaggaagcctcaaaatccgaaagataacaagtgatatctacagcaaggctaggggttggaagccaatcgacagacgcattcagtgaagcttttgttgggtgcctgtcattttgattcacctgttctgtttgctgtaatatctcctggtagcgtcaggctggaaaaccttgtcttagctcgctactttagctgttagtttcctgctgctttagttcagactcgttgatcttttcttttggtcagctttatgatgatattctggtgcttctagtcgtatgttctattcaggtcgtgttgcagggtagttgataattgtgtgtcttgtcggctcttaatttctggggtcatttatgatcacgtaagaactaagtcttttctatttcgtaatgaaataggggtatcccctttgtcaaaaaaaatgtaggtcacaaatttaatagttggcacaaaaaatgagtaaaaatgccactgcttatttgtttttttttggttgacataaacatatcaaggatggaagtgaattaagtattccgttgaactatggaatcacattctgcaagtctgatgtacaatagtactcttatataaataatctcttcgattgcatttgtaatccgtgctgtacaggtcttttgtgttgtagaaatatccatttcattgaaaagaactgtaactatctatccaattgcattttttaatctgtatagcgtacatcgatctatacaagtgtcttgtgttgtagaatctcagggcccctttgtgagactatccgcaaccctaaatttctactctaaaaaaatatgttatcc

SEQ ID NO: 9094 - DNA, 5050 bp, Zea Mays
atggcgggcgtgtgcgggagcccgttctgctccagggaagcttcagctccagctccagcgtcatgtggacgatgggacgaactactcaactcctccacctgcgcgaacaacatcctggcgaccggcgccgctgcgctgctcgccgtcgtcctcgcgctgcagctgctcgtcagggtcgcaaggaacggactacgacacgcgcccgtcgtcgcgctcagctcgccgctgcagcgggccgccgtggcggccaacgcctgcctgggcctggcctacctgggcctcgcggcgtggatgctggggacggacctgacccagcgcgcctccgtctacctcccacaccggtggctggtgagcctggcccaggggctctgcctgctcctcgccggcttcgccttcagcgtcagggcgcagctgctcggagcggcgttcctccgggtctgggcggctctgctggccgcgtacgccgcgttcgtttgctgcacctcggtcgtgcacatggtcgcagacaaggtgctggccgtgaagacgtgcttggatgttctgtccctgcctggtgcgctgctgctccttgtgtacggcattcggcacgccagggaagaagaagaaggagatggtaacggaggaaccgaaagttctttgtataagcctctgaacgccgaggctcacgacgacggtgcggccgactcgcgtgtcaccccgtttgctaaagccggggttttcagcatcatgacgttctggtggctgaaccccatgatgaagaagggttacgagaagcctctcgaggagaaagacatgccgctcctaggcccctcggaccgagcgtacagccagtacctgatgttcttggacaacctgaacaggaagaagcagctgcaggcacacggcaacccgtcggtcttctggaccatcgtctcttctcacaagagcgcgatcttggtctcgggtctcttcgcgttgctcaaagtgctcacgctgtctgcaggcccagtgcttctgaaagccttcatcaatgtctcgcttgggaaaggttccttcaagtacgagggctttgttctggccgcggcaatgttcgctatcaagtgctgtgagtctctgtcccagaggcagtggtactttcgcacccggaggctagggctccaggtgaggtcgctcctgtcggccgccatctacaagaagcagcagaagctgtcgggctcttcgaagctgaagcattcctctggagagatcataaactacgtcaccgtcgacgcctaccggatcggcgagttcccgtactggttccaccagacgtggacgacaagcgtccagctctgcatcgctctggggatcctgtacaatgcggttggtcttgccatgattgcatcgctggtcgtcatcgttctcactgtgatctgcaacgctcctctgtccaagctgcagcacaagtttcagactaggcttatggaagcacagggcgtgaggctgaaggcgatgtcggagtccttgatccacatgaaggtcttaaaactctatgcgtgggagacgcatttcaagaaggtcattgaggggttgagggagattgagatcaagtggctgtcggcgttcaaccttaggaaatccttcaatggtttcgtgttctggacatcaccggttctggtctcggctgcaaccttcctcacatgctatcttctgaaaatccctcttgatgcaagcaatgttttcacgtttgtggccactctgcgccttgttcaagacccaattaggcagatgccggatgtgattggagtcgttatacaggctaaagttgctttcactaggataacgaagtttcttgatgcgcctgagctgagtggacaggccaggaagaaatactgtgtgggagatgaatatcgtatagtgatgaactcttgcagtttttcatgggatgagaacccgtcaaaaccaactctgaagaatataaacttggtggtcaaggctggggagaaggttgcaatatgtggcgaggtaggatcaggaaagtcaacactattggctgcagttcttggagaggttcctaaaacagaaggcatggaacggtgcaagacaatattctctttggatcttcaatggacaggcaaaggtaccaagaaacgcttgagaggtgttctttagtaaaagaccttgaaatgcttccatatggagaccatactcaaatcggggagaggggcgtaaatcttagcggtggccagaagcagcgtgttcagcttgctcgtgcattataccaaaatgcagacatttatcttctcgatgaccctttcagcgctgttgatgcccacacagcaactagtctttttaacgaatatgtcatgggagctctgtcagataagactgtccttttggtgacccatcaagtcgattttttgcctgtatttgattctgttctgttaatgtcagatggtgaaattattcgtgctgcaccttatcaagatttattggcacattgtcaagaatttcagaacctcgtaaatgcccataaagacactattggtgtttcagatcttaacagagtcagatcccatagaacaaatgaaaacaagggatcgattgatattcatggaagcttatacaaagagtctttgaagccatcaccagcagatcagctgatcaagacagaggaaagagaaatgggtgacactggtctcaagccttatatcctttacttgcgccagaataaaggcttcttcaatggctctatgggtattctttgccatgtgattttcgtatgtggccaaatagcacagaattcatggatggctgctaatgtccagaatcctgatgttggtacacttaagttgatttctgtgtacattgcaattggattcatcacagtgttcttcttgctgtttagatcgatagcacttgttgttcttgggatccaaacatcaagatctttattttcccagttactcaactcattgttccgtgcgccaatgtccttttttgattctacccctcttggaaggatacttagccgggtaaggatacttaaacaaattgttcatatccctgagatatattgggtggtatcttcagatttgagcattgttgatcttgatgttccatttggattgatgcttgctcttggtgccagcataaatgcatatagcaatctgggggtgttggctgttgttacatggcaagttctgttcgtctctgtgccgatgatggttttggcactcaggttgcagaagtactatttagcctcagctaaggaactgatgaggatcaatggcactaccaaatcagctctggctaatcacttgggagagtcggttgcagggtctataacaataagggctttcgaggaagaagatcgtttctttgagaaaaattcggaacttgttgacaagaatgctgcttcatatttctataattttgcagcgactgaatggctgattcaacgcctggaaacaatgagtgctgcagttctttctttttctgccttcatcatggctctcctccctgcaggaacttttagctctggctttataggaatggcgttgtcttatggtctgtccctgaacaattcctttgttttctctatccaaaaccagtgccagctatcaaaccagataatctctgtggaaagggtgaaccagtacatggacataccaagtgaagcagcagaggtcattgaagaaaatcgaccatcaccaaactggccccaagttggtagggtggagcttagagatctgaagatcagatacagggaagatgctccccttgtactgcatggaatcacatgcacttttgaaggcggagataagattggtatagtcggccggacaggaagtggaaagacgactttaatcggtgcattgtttcgtcttgttgagccaactggggggaaaataattattgactctgtagatatcaccacaattggcttacatgaccttcgttcacgtttgggtatcattccacaagatccgacactctttcagggaaccataagatataatctagatcctcttgagcaattttcggatcaacagatatgggaggttcttgacaaatgtcagcttcttgaagctgtccaggagaaggaacagggattggactcacttgttgtggaggatggctcgaactggagcatgggtcagaggcagctcttctgtttgggacgtgcactgctaagaagatgccgtgtcttagtcctcgacgaggccactgcatctatagacaatgctaccgatgcgatccttcagaaaacaatcaggacagagttcagagactgcactgtcatcactgtcgctcaccgtatacccactgtcatggactgcagtatggtacttgcactgagcgacgggaaactggtggagtatgacaagcctacgaagctcatggaaaccgaagggtctctcttccgtgacctcgtcaaagagtactggtcgtacgcatcgaatgggaatatctagaagccacctccaaactacgaccgtttgcatgtttccactcgctgcatcctcttgaaaggagatacaagaatctgggcttgcacatccgaagaactattgtatctgaaatcttgagaaaaggcgtcaggcattgtcatgaaatgcttgttgtcaagttttcaccactcgtttttcagcaactttttggtagtttctgttttgggtcattgcttcccttccaggcgctgaataaaagaaaacatgtctccatccccccccccccttcttctcccctccaaaaaaaagtagaggaaatcctcaacatttctttgctcacagtgatactttatgctcataacaaaaattcttaggcttggtgctcaacactattccattcagaatttgtggtgtatgcttacattcgtacaaagctgtagtagggtatatgatgtctgtttttttggggtgcaatcatggcttttcagcaccctcttgttcatgtttgatgtatattcatcggtgtctggagccaagcaatttggtggtaactctgttttttcactgcatgtgcatgctggatgattgtagatccttgcggcttatgtaggtcacaaattggaatggatgaactgaat

SEQ ID NO: 9095 - DNA, 5058 bp, Zea Mays
atggcgggcgtgtgcgggagcccgttctgctccagggaagcttcagctccagctccagcgtcatgtggacgatgggacgaactactcaactcctccacctgcgcgaacaacatcctggcgaccggcgccgctgcgctgctcgccgtcgtcctcgcgctgcagctgctcgtcagggtcgcaaggaacggactacgacacgcgcccgtcgtcgcgctcagctcgccgctgcagcgggccgccgtggcggccaacgcctgcctgggcctggcctacctgggcctcgcggcgtggatgctggggacggacctgacccagcgcgcctccgtctacctcccacaccggtggctggtgagcctggcccaggggctctgcctgctcctcgccggcttcgccttcagcgtcagggcgcagctgctcggagcggcgttcctccgggtctgggcggctctgctggccgcgtacgccgcgttcgtttgctgcacctcggtcgtgcacatggtcgcagacaaggtgctggccgtgaagacgtgcttggatgttctgtccctgcctggtgcgctgctgctccttgtgtacggcattcggcacgccagggaagaagaagaaggagatggtaacggaggaaccgaaagttctttgtataagcctctgaacgccgaggctcacgacgacggtgcggccgactcgcgtgtcaccccgtttgctaaagccggggttttcagcatcatgacgttctggtggctgaaccccatgatgaagaagggttacgagaagcctctcgaggagaaagacatgccgctcctaggcccctcggaccgagcgtacagccagtacctgatgttcttggacaacctgaacaggaagaagcagctgcaggcacacggcaacccgtcggtcttctggaccatcgtctcttctcacaagagcgcgatcttggtctcgggtctcttcgcgttgctcaaagtgctcacgctgtctgcaggcccagtgcttctgaaagccttcatcaatgtctcgcttgggaaaggttccttcaagtacgagggctttgttctggccgcggcaatgttcgctatcaagtgctgtgagtctctgtcccagaggcagtggtactttcgcacccggaggctagggctccaggtgaggtcgctcctgtcggccgccatctacaagaagcagcagaagctgtcgggctcttcgaagctgaagcattcctctggagagatcataaactacgtcaccgtcgacgcctaccggatcggcgagttcccgtactggttccaccagacgtggacgacaagcgtccagctctgcatcgctctggggatcctgtacaatgcggttggtcttgccatgattgcatcgctggtcgtcatcgttctcactgtgatctgcaacgctcctctgtccaagctgcagcacaagtttcagactaggcttatggaagcacagggcgtgaggctgaaggcgatgtcggagtccttgatccacatgaaggtcttaaaactctatgcgtgggagacgcatttcaagaaggtcattgaggggttgagggagattgagatcaagtggctgtcggcgttcaaccttaggaaatccttcaatggtttcgtgttctggacatcaccggttctggtctcggctgcaaccttcctcacatgctatcttctgaaaatccctcttgatgcaagcaatgttttcacgtttgtggccactctgcgccttgttcaagacccaattaggcagatgccggatgtgattggagtcgttatacaggctaaagttgctttcactaggataacgaagtttcttgatgcgcctgagctgagtggacaggccaggaagaaatactgtgtgggagatgaatatcgtatagtgatgaactcttgcagtttttcatgggatgagaacccgtcaaaaccaactctgaagaatataaacttggtggtcaaggctggggagaaggttgcaatatgtggcgaggtaggatcaggaaagtcaacactattggctgcagttcttggagaggttcctaaaacagaaggcatgatccaaatttgtgggaaaacagcatatgtttctcaaaatgcatggatccaaacaggaacggtgcaagacaatattctctttggatcttcaatggacaggcaaaggtaccaagaaacgcttgagaggtgttctttagtaaaagaccttgaaatgcttccatatggagaccatactcaaatcggggagaggggcgtaaatcttagcggtggccagaagcagcgtgttcagcttgctcgtgcattataccaaaatgcagacatttatcttctcgatgaccctttcagcgctgttgatgcccacacagcaactagtctttttaacgaatatgtcatgggagctctgtcagataagactgtccttttggtgacccatcaagtcgattttttgcctgtatttgattctgttctgttaatgtcagatggtgaaattattcgtgctgcaccttatcaagatttattggcacattgtcaagaatttcagaacctcgtaaatgcccataaagacactattggtgtttcagatcttaacagagtcagatcccatagaacaaatgaaaacaagggatcgattgatattcatggaagcttatacaaagagtctttgaagccatcaccagcagatcagctgatcaagacagaggaaagagaaatgggtgacactggtctcaagccttatatcctttacttgcgccagaataaaggcttcttcaatggctctatgggtattctttgccatgtgattttcgtatgtggccaaatagcacagaattcatggatggctgctaatgtccagaatcctgatgttggtacacttaagttgatttctgtgtacattgcaattggattcatcacagtgttcttcttgctgtttagatcgatagcacttgttgttcttgggatccaaacatcaagatctttattttcccagttactcaactcattgttccgtgcgccaatgtccttttttgattctacccctcttggaaggatacttagccggggtatcttcagatttgagcattgttgatcttgatgttccatttggattgatgcttgctcttggtgccagcataaatgcatatagcaatctgggggtgttggctgttgttacatggcaagttctgttcgtctctgtgccgatgatggttttggcactcaggttgcagaagtactatttagcctcagctaaggaactgatgaggatcaatggcactaccaaatcagctctggctaatcacttgggagagtcggttgcagggtctataacaataagggctttcgaggaagaagatcgtttctttgagaaaaattcggaacttgttgacaagaatgctgcttcatatttctataattttgcagcgactgaatggctgattcaacgcctggaaacaatgagtgctgcagttctttctttttctgccttcatcatggctctcctccctgcaggaacttttagctctggctttataggaatggcgttgtcttatggtctgtccctgaacaattcctttgttttctctatccaaaaccagtgccagctatcaaaccagataatctctgtggaaagggtgaaccagtacatggacataccaagtgaagcagcagaggtcattgaagaaaatcgaccatcaccaaactggccccaagttggtagggtggagcttagagatctgaagatcagatacagggaagatgctccccttgtactgcatggaatcacatgcacttttgaaggcggagataagattggtatagtcggccggacaggaagtggaaagacgactttaatcggtgcattgtttcgtcttgttgagccaactggggggaaaataattattgactctgtagatatcaccacaattggcttacatgaccttcgttcacgtttgggtatcattccacaagatccgacactctttcagggaaccataagatataatctagatcctcttgagcaattttcggatcaacagatatgggaggttcttgacaaatgtcagcttcttgaagctgtccaggagaaggaacagggattggactcacttgttgtggaggatggctcgaactggagcatgggtcagaggcagctcttctgtttgggacgtgcactgctaagaagatgccgtgtcttagtcctcgacgaggccactgcatctatagacaatgctaccgatgcgatccttcagaaaacaatcaggacagagttcagagactgcactgtcatcactgtcgctcaccgtatacccactgtcatggactgcagtatggtacttgcactgagcgacgggaaactggtggagtatgacaagcctacgaagctcatggaaaccgaagggtctctcttccgtgacctcgtcaaagagtactggtcgtacgcatcgaatgggaatatctagaagccacctccaaactacgaccgtttgcatgtttccactcgctgcatcctcttgaaaggagatacaagaatctgggcttgcacatccgaagaactattgtatctgaaatcttgagaaaaggcgtcaggcattgtcatgaaatgcttgttgtcaagttttcaccactcgtttttcagcaactttttggtagtttctgttttgggtcattgcttcccttccaggcgctgaataaaagaaaacatgtctccatccccccccccccttcttctcccctccaaaaaaaagtagaggaaatcctcaacatttctttgctcacagtgatactttatgctcataacaaaaattcttaggcttggtgctcaacactattccattcagaatttgtggtgtatgcttacattcgtacaaagctgtagtagggtatatgatgtctgtttttttggggtgcaatcatggcttttcagcaccctcttgttcatgtttgatgtatattcatcggtgtctggagccaagcaatttggtggtaactctgttttttcactgcatgtgcatgctggatgattgtagatccttgcggcttatgtaggtcacaaattggaatggatgaactgaat

SEQ ID NO: 9096 - DNA, 5507 bp, Zea Mays
ctcgactctatagccactagtcactcagtcaatcatccacctgcgctgccgctggaatttaattaaaaaaaaagagcccgatcgatccagcaaagtgcatcacgccgttcacggcttcaggacatagggagctcccaagttctcctcctcctcctcctccacctcctcctcgtcgtcgtcttctctctcaggtctcagccatcgtatcgtccggacccaccgtatccccagtccgccggcggccgtcgattcattatcccggccgcccgggctgcccgtaagtcaagcggcggcggcggcggcggctaaggtatagccaaggctggagcgaggccggtgcggccgaccatccctgtgtgtgcaccctgcagaaccaacctcacccccgatcaaggttcttggatggcgggcgtgtgcgggagcccgttctgctccagggaagcttcagctccagctccagcgtcatgtggacgatgggacgaactactcaactcctccacctgcgcgaacaacatcctggcgaccggcgccgctgcgctgctcgccgtcgtcctcgcgctgcagctgctcgtcagggtcgcaaggaacggactacgacacgcgcccgtcgtcgcgctcagctcgccgctgcagcgggccgccgtggcggccaacgcctgcctgggcctggcctacctgggcctcgcggcgtggatgctggggacggacctgacccagcgcgcctccgtctacctcccacaccggtggctggtgagcctggcccaggggctctgcctgctcctcgccggcttcgccttcagcgtcagggcgcagctgctcggagcggcgttcctccgggtctgggcggctctgctggccgcgtacgccgcgttcgtttgctgcacctcggtcgtgcacatggtcgcagacaaggtgctggccgtgaagacgtgcttggatgttctgtccctgcctggtgcgctgctgctccttgtgtacggcattcggcacgccagggaagaagaagaaggagatggtaacggaggaaccgaaagttctttgtataagcctctgaacgccgaggctcacgacgacggtgcggccgactcgcgtgtcaccccgtttgctaaagccggggttttcagcatcatgacgttctggtggctgaaccccatgatgaagaagggttacgagaagcctctcgaggagaaagacatgccgctcctaggcccctcggaccgagcgtacagccagtacctgatgttcttggacaacctgaacaggaagaagcagctgcaggcacacggcaacccgtcggtcttctggaccatcgtctcttctcacaagagcgcgatcttggtctcgggtctcttcgcgttgctcaaagtgctcacgctgtctgcaggcccagtgcttctgaaagccttcatcaatgtctcgcttgggaaaggttccttcaagtacgagggctttgttctggccgcggcaatgttcgctatcaagtgctgtgagtctctgtcccagaggcagtggtactttcgcacccggaggctagggctccaggtgaggtcgctcctgtcggccgccatctacaagaagcagcagaagctgtcgggctcttcgaagctgaagcattcctctggagagatcataaactacgtcaccgtcgacgcctaccggatcggcgagttcccgtactggttccaccagacgtggacgacaagcgtccagctctgcatcgctctggggatcctgtacaatgcggttggtcttgccatgattgcatcgctggtcgtcatcgttctcactgtgatctgcaacgctcctctgtccaagctgcagcacaagtttcagactaggcttatggaagcacagggcgtgaggctgaaggcgatgtcggagtccttgatccacatgaaggtcttaaaactctatgcgtgggagacgcatttcaagaaggtcattgaggggttgagggagattgagatcaagtggctgtcggcgttcaaccttaggaaatccttcaatggtttcgtgttctggacatcaccggttctggtctcggctgcaaccttcctcacatgctatcttctgaaaatccctcttgatgcaagcaatgttttcacgtttgtggccactctgcgccttgttcaagacccaattaggcagatgccggatgtgattggagtcgttatacaggctaaagttgctttcactaggataacgaagtttcttgatgcgcctgagctgagtggacaggccaggaagaaatactgtgtgggagatgaatatcgtatagtgatgaactcttgcagtttttcatgggatgagaacccgtcaaaaccaactctgaagaatataaacttggtggtcaaggctggggagaaggttgcaatatgtggcgaggtaggatcaggaaagtcaacactattggctgcagttcttggagaggttcctaaaacagaaggcatgatccaaatttgtgggaaaacagcatatgtttctcaaaatgcatggatccaaacaggaacggtgcaagacaatattctctttggatcttcaatggacaggcaaaggtaccaagaaacgcttgagaggtgttctttagtaaaagaccttgaaatgcttccatatggagaccatactcaaatcggggagaggggcgtaaatcttagcggtggccagaagcagcgtgttcagcttgctcgtgcattataccaaaatgcagacatttatcttctcgatgaccctttcagcgctgttgatgcccacacagcaactagtctttttaacgaatatgtcatgggagctctgtcagataagactgtccttttggtgacccatcaagtcgattttttgcctgtatttgattctgttctgttaatgtcagatggtgaaattattcgtgctgcaccttatcaagatttattggcacattgtcaagaatttcagaacctcgtaaatgcccataaagacactattggtgtttcagatcttaacagagtcagatcccatagaacaaatgaaaacaagggatcgattgatattcatggaagcttatacaaagagtctttgaagccatcaccagcagatcagctgatcaagacagaggaaagagaaatgggtgacactggtctcaagccttatatcctttacttgcgccagaataaaggcttcttcaatggctctatgggtattctttgccatgtgattttcgtatgtggccaaatagcacagaattcatggatggctgctaatgtccagaatcctgatgttggtacacttaagttgatttctgtgtacattgcaattggattcatcacagtgttcttcttgctgtttagatcgatagcacttgttgttcttgggatccaaacatcaagatctttattttcccagttactcaactcattgttccgtgcgccaatgtccttttttgattctacccctcttggaaggatacttagccgggtaaggatacttaaacaaattgttcatatccctgagatatattgggtggtatcttcagatttgagcattgttgatcttgatgttccatttggattgatgcttgctcttggtgccagcataaatgcatatagcaatctgggggtgttggctgttgttacatggcaagttctgttcgtctctgtgccgatgatggttttggcactcaggttgcagaagtactatttagcctcagctaaggaactgatgaggatcaatggcactaccaaatcagctctggctaatcacttgggagagtcggttgcagggtctataacaataagggctttcgaggaagaagatcgtttctttgagaaaaattcggaacttgttgacaagaatgctgcttcatatttctataattttgcagcgactgaatggctgattcaacgcctggaaacaatgagtgctgcagttctttctttttctgccttcatcatggctctcctccctgcaggaacttttagctctggctttataggaatggcgttgtcttatggtctgtccctgaacaattcctttgttttctctatccaaaaccagtgccagctatcaaaccagataatctctgtggaaagggtgaaccagtacatggacataccaagtgaagcagcagaggtcattgaagaaaatcgaccatcaccaaactggccccaagttggtagggtggagcttagagatctgaagatcagatacagggaagatgctccccttgtactgcatggaatcacatgcacttttgaaggcggagataagattggtatagtcggccggacaggaagtggaaagacgactttaatcggtgcattgtttcgtcttgttgagccaactggggggaaaataattattgactctgtagatatcaccacaattggcttacatgaccttcgttcacgtttgggtatcattccacaagatccgacactctttcagggaaccataagatataatctagatcctcttgagcaattttcggatcaacagatatgggaggttcttgacaaatgtcagcttcttgaagctgtccaggagaaggaacagggattggactcacttgttgtggaggatggctcgaactggagcatgggtcagaggcagctcttctgtttgggacgtgcactgctaagaagatgccgtgtcttagtcctcgacgaggccactgcatctatagacaatgctaccgatgcgatccttcagaaaacaatcaggacagagttcagagactgcactgtcatcactgtcgctcaccgtatacccactgtcatggactgcagtatggtacttgcactgagcgacgggaaactggtggagtatgacaagcctacgaagctcatggaaaccgaagggtctctcttccgtgacctcgtcaaagagtactggtcgtacgcatcgaatgggaatatctagaagccacctccaaactacgaccgtttgcatgtttccactcgctgcatcctcttgaaaggagatacaagaatctgggcttgcacatccgaagaactattgtatctgaaatcttgagaaaaggcgtcaggcattgtcatgaaatgcttgttgtcaagttttcaccactcgtttttcagcaactttttggtagtttctgttttgggtcattgcttcccttccaggcgctgaataaaagaaaacatgtctccatccccccccccccttcttctcccctccaaaaaaaagtagaggaaatcctcaacatttctttgctcacagtgatactttatgctcataacaaaaattcttaggcttggtgctcaacactattccattcagaatttgtggtgtatgcttacattcgtacaaagctgtagtagggtatatgatgtctgtttttttggggtgcaatcatggcttttcagcaccctcttgttcatgtttgatgtatattcatcggtgtctggagccaagcaatttggtggtaactctgttttttcactgcatgtgcatgctggatgattgtagatccttgcggcttatgtaggtcacaaattggaatggatgaactgaat

SEQ ID NO: 9097 - DNA, 5404 bp, Zea Mays
ctcgactctatagccactagtcactcagtcaatcatccacctgcgctgccgctggaatttaattaaaaaaaaagagcccgatcgatccagcaaagtgcatcacgccgttcacggcttcaggacatagggagctcccaagttctcctcctcctcctcctccacctcctcctcgtcgtcgtcttctctctcaggtctcagccatcgtatcgtccggacccaccgtatccccagtccgccggcggccgtcgattcattatcccggccgcccgggctgcccgtaagtcaagcggcggcggcggcggcggctaaggtatagccaaggctggagcgaggccggtgcggccgaccatccctgtgtgtgcaccctgcagaaccaacctcacccccgatcaaggttcttggatggcgggcgtgtgcgggagcccgttctgctccagggaagcttcagctccagctccagcgtcatgtggacgatgggacgaactactcaactcctccacctgcgcgaacaacatcctggcgaccggcgccgctgcgctgctcgccgtcgtcctcgcgctgcagctgctcgtcagggtcgcaaggaacggactacgacacgcgcccgtcgtcgcgctcagctcgccgctgcagcgggccgccgtggcggccaacgcctgcctgggcctggcctacctgggcctcgcggcgtggatgctggggacggacctgacccagcgcgcctccgtctacctcccacaccggtggctggtgagcctggcccaggggctctgcctgctcctcgccggcttcgccttcagcgtcagggcgcagctgctcggagcggcgttcctccgggtctgggcggctctgctggccgcgtacgccgcgttcgtttgctgcacctcggtcgtgcacatggtcgcagacaaggtgctggccgtgaagacgtgcttggatgttctgtccctgcctggtgcgctgctgctccttgtgtacggcattcggcacgccagggaagaagaagaaggagatggtaacggaggaaccgaaagttctttgtataagcctctgaacgccgaggctcacgacgacggtgcggccgactcgcgtgtcaccccgtttgctaaagccggggttttcagcatcatgacgttctggtggctgaaccccatgatgaagaagggttacgagaagcctctcgaggagaaagacatgccgctcctaggcccctcggaccgagcgtacagccagtacctgatgttcttggacaacctgaacaggaagaagcagctgcaggcacacggcaacccgtcggtcttctggaccatcgtctcttctcacaagagcgcgatcttggtctcgggtctcttcgcgttgctcaaagtgctcacgctgtctgcaggcccagtgcttctgaaagccttcatcaatgtctcgcttgggaaaggttccttcaagtacgagggctttgttctggccgcggcaatgttcgctatcaagtgctgtgagtctctgtcccagaggcagtggtactttcgcacccggaggctagggctccaggtgaggtcgctcctgtcggccgccatctacaagaagcagcagaagctgtcgggctcttcgaagctgaagcattcctctggagagatcataaactacgtcaccgtcgacgcctaccggatcggcgagttcccgtactggttccaccagacgtggacgacaagcgtccagctctgcatcgctctggggatcctgtacaatgcggttggtcttgccatgattgcatcgctggtcgtcatcgttctcactgtgatctgcaacgctcctctgtccaagctgcagcacaagtttcagactaggcttatggaagcacagggcgtgaggctgaaggcgatgtcggagtccttgatccacatgaaggtcttaaaactctatgcgtgggagacgcatttcaagaaggtcattgaggggttgagggagattgagatcaagtggctgtcggcgttcaaccttaggaaatccttcaatggtttcgtgttctggacatcaccggttctggtctcggctgcaaccttcctcacatgctatcttctgaaaatccctcttgatgcaagcaatgttttcacgtttgtggccactctgcgccttgttcaagacccaattaggcagatgccggatgtgattggagtcgttatacaggctaaagttgctttcactaggataacgaagtttcttgatgcgcctgagctgagtggacaggccaggaagaaatactgtgtgggagatgaatatcgtatagtgatgaactcttgcagtttttcatgggatgagaacccgtcaaaaccaactctgaagaatataaacttggtggtcaaggctggggagaaggttgcaatatgtggcgaggtaggatcaggaaagtcaacactattggctgcagttcttggagaggttcctaaaacagaaggcatggaacggtgcaagacaatattctctttggatcttcaatggacaggcaaaggtaccaagaaacgcttgagaggtgttctttagtaaaagaccttgaaatgcttccatatggagaccatactcaaatcggggagaggggcgtaaatcttagcggtggccagaagcagcgtgttcagcttgctcgtgcattataccaaaatgcagacatttatcttctcgatgaccctttcagcgctgttgatgcccacacagcaactagtctttttaacgaatatgtcatgggagctctgtcagataagactgtccttttggtgacccatcaagtcgattttttgcctgtatttgattctgttctgttaatgtcagatggtgaaattattcgtgctgcaccttatcaagatttattggcacattgtcaagaatttcagaacctcgtaaatgcccataaagacactattggtgtttcagatcttaacagagtcagatcccatagaacaaatgaaaacaagggatcgattgatattcatggaagcttatacaaagagtctttgaagccatcaccagcagatcagctgatcaagacagaggaaagagaaatgggtgacactggtctcaagccttatatcctttacttgcgccagaataaaggcttcttcaatggctctatgggtattctttgccatgtgattttcgtatgtggccaaatagcacagaattcatggatggctgctaatgtccagaatcctgatgttggtacacttaagttgatttctgtgtacattgcaattggattcatcacagtgttcttcttgctgtttagatcgatagcacttgttgttcttgggatccaaacatcaagatctttattttcccagttactcaactcattgttccgtgcgccaatgtccttttttgattctacccctcttggaaggatacttagccgggtatcttcagatttgagcattgttgatcttgatgttccatttggattgatgcttgctcttggtgccagcataaatgcatatagcaatctgggggtgttggctgttgttacatggcaagttctgttcgtctctgtgccgatgatggttttggcactcaggttgcagaagtactatttagcctcagctaaggaactgatgaggatcaatggcactaccaaatcagctctggctaatcacttgggagagtcggttgcagggtctataacaataagggctttcgaggaagaagatcgtttctttgagaaaaattcggaacttgttgacaagaatgctgcttcatatttctataattttgcagcgactgaatggctgattcaacgcctggaaacaatgagtgctgcagttctttctttttctgccttcatcatggctctcctccctgcaggaacttttagctctggctttataggaatggcgttgtcttatggtctgtccctgaacaattcctttgttttctctatccaaaaccagtgccagctatcaaaccagataatctctgtggaaagggtgaaccagtacatggacataccaagtgaagcagcagaggtcattgaagaaaatcgaccatcaccaaactggccccaagttggtagggtggagcttagagatctgaagatcagatacagggaagatgctccccttgtactgcatggaatcacatgcacttttgaaggcggagataagattggtatagtcggccggacaggaagtggaaagacgactttaatcggtgcattgtttcgtcttgttgagccaactggggggaaaataattattgactctgtagatatcaccacaattggcttacatgaccttcgttcacgtttgggtatcattccacaagatccgacactctttcagggaaccataagatataatctagatcctcttgagcaattttcggatcaacagatatgggaggttcttgacaaatgtcagcttcttgaagctgtccaggagaaggaacagggattggactcacttgttgtggaggatggctcgaactggagcatgggtcagaggcagctcttctgtttgggacgtgcactgctaagaagatgccgtgtcttagtcctcgacgaggccactgcatctatagacaatgctaccgatgcgatccttcagaaaacaatcaggacagagttcagagactgcactgtcatcactgtcgctcaccgtatacccactgtcatggactgcagtatggtacttgcactgagcgacgggaaactggtggagtatgacaagcctacgaagctcatggaaaccgaagggtctctcttccgtgacctcgtcaaagagtactggtcgtacgcatcgaatgggaatatctagaagccacctccaaactacgaccgtttgcatgtttccactcgctgcatcctcttgaaaggagatacaagaatctgggcttgcacatccgaagaactattgtatctgaaatcttgagaaaaggcgtcaggcattgtcatgaaatgcttgttgtcaagttttcaccactcgtttttcagcaactttttggtagtttctgttttgggtcattgcttcccttccaggcgctgaataaaagaaaacatgtctccatccccccccccccttcttctcccctccaaaaaaaagtagaggaaatcctcaacatttctttgctcacagtgatactttatgctcataacaaaaattcttaggcttggtgctcaacactattccattcagaatttgtggtgtatgcttacattcgtacaaagctgtagtagggtatatgatgtctgtttttttggggtgcaatcatggcttttcagcaccctcttgttcatgtttgatgtatattcatcggtgtctggagccaagcaatttggtggtaactctgttttttcactgcatgtgcatgctggatgattgtagatccttgcggcttatgtaggtcacaaattggaatggatgaactgaat

SEQ ID NO: 9098 - DNA, 5388 bp, Zea Mays
ctcgactctatagccactagtcactcagtcaatcatccacctgcgctgccgctggaatttaattaaaaaaaaagagcccgatcgatccagcaaagtgcatcacgccgttcacggcttcaggacatagggagctcccaagttctcctcctcctcctcctccacctcctcctcgtcgtcgtcttctctctcaggtctcagccatcgtatcgtccggacccaccgtatccccagtccgccggcggccgtcgattcattatcccggccgcccgggctgcccgtaagtcaagcggcggcggcggcggcggctaaggtatagccaaggctggagcgaggccggtgcggccgaccatccctgtgtgtgcaccctgcagaaccaacctcacccccgatcaaggttcttggatggcgggcgtgtgcgggagcccgttctgctccagggaagcttcagctccagctccagcgtcatgtggacgatgggacgaactactcaactcctccacctgcgcgaacaacatcctggcgaccggcgccgctgcgctgctcgccgtcgtcctcgcgctgcagctgctcgtcagggtcgcaaggaacggactacgacacgcgcccgtcgtcgcgctcagctcgccgctgcagcgggccgccgtggcggccaacgcctgcctgggcctggcctacctgggcctcgcggcgtggatgctggggacggacctgacccagcgcgcctccgtctacctcccacaccggtggctggtgagcctggcccaggggctctgcctgctcctcgccggcttcgccttcagcgtcagggcgcagctgctcggagcggcgttcctccgggtctgggcggctctgctggccgcgtacgccgcgttcgtttgctgcacctcggtcgtgcacatggtcgcagacaaggtgctggccgtgaagacgtgcttggatgttctgtccctgcctggtgcgctgctgctccttgtgtacggcattcggcacgccagggaagaagaagaaggagatggtaacggaggaaccgaaagttctttgtataagcctctgaacgccgaggctcacgacgacggtgcggccgactcgcgtgtcaccccgtttgctaaagccggggttttcagcatcatgacgttctggtggctgaaccccatgatgaagaagggttacgagaagcctctcgaggagaaagacatgccgctcctaggcccctcggaccgagcgtacagccagtacctgatgttcttggacaacctgaacaggaagaagcagctgcaggcacacggcaacccgtcggtcttctggaccatcgtctcttctcacaagagcgcgatcttggtctcgggtctcttcgcgttgctcaaagtgctcacgctgtctgcaggcccagtgcttctgaaagccttcatcaatgtctcgcttgggaaaggttccttcaagtacgagggctttgttctggccgcggcaatgttcgctatcaagtgctgtgagtctctgtcccagaggcagtggtactttcgcacccggaggctagggctccaggtgaggtcgctcctgtcggccgccatctacaagaagcagcagaagctgtcgggctcttcgaagctgaagcattcctctggagagatcataaactacgtcaccgtcgacgcctaccggatcggcgagttcccgtactggttccaccagacgtggacgacaagcgtccagctctgcatcgctctggggatcctgtacaatgcggttggtcttgccatgattgcatcgctggtcgtcatcgttctcactgtgatctgcaacgctcctctgtccaagctgcagcacaagtttcagactaggcttatggaagcacagggcgtgaggctgaaggcgatgtcggagtccttgatccacatgaaggtcttaaaactctatgcgtgggagacgcatttcaagaaggtcattgaggggttgagggagattgagatcaagtggctgtcggcgttcaaccttaggaaatccttcaatggtttcgtgttctggacatcaccggttctggtctcggctgcaaccttcctcacatgctatcttctgaaaatccctcttgatgcaagcaatgttttcacgtttgtggccactctgcgccttgttcaagacccaattaggcagatgccggatgtgattggagtcgttatacaggctaaagttgctttcactaggataacgaagtttcttgatgcgcctgagctgagtggacaggccaggaagaaatactgtgtgggagatgaatatcgtatagtgatgaactcttgcagtttttcatgggatgagaacccgtcaaaaccaactctgaagaatataaacttggtggtcaaggctggggagaaggttgcaatatgtggcgaggtaggatcaggaaagtcaacactattggctgcagttcttggagaggttcctaaaacagaaggcatgatccaaatttgtgggaaaacagcatatgtttctcaaaatgcatggatccaaacaggaacggtgcaagacaatattctctttggatcttcaatggacaggcaaaggtaccaagaaacgcttgagaggtgttctttagtaaaagaccttgaaatgcttccatatggagaccatactcaaatcggggagaggggcgtaaatcttagcggtggccagaagcagcgtgttcagcttgctcgtgcattataccaaaatgcagacatttatcttctcgatgaccctttcagcgctgttgatgcccacacagcaactagtctttttaacgaatatgtcatgggagctctgtcagataagactgtccttttggtgacccatcaagtcgattttttgcctgtatttgattctgttctgttaatgtcagatggtgaaattattcgtgctgcaccttatcaagatttattggcacattgtcaagaatttcagaacctcgtaaatgcccataaagacactattggtgtttcagatcttaacagagtcagatcccatagaacaaatgaaaacaagggatcgattgatattcatggaagcttatacaaagagtctttgaagccatcaccagcagatcagctgatcaagacagaggaaagagaaatgggtgacactggtctcaagccttatatcctttacttgcgccagaataaaggcttcttcaatggctctatgggtattctttgccatgtgattttcgtatgtggccaaatagcacagaattcatggatggctgctaatgtccagaatcctgatgttggtacacttaagttgatttctgtgtacattgcaattggattcatcacagtgttcttcttgctgtttagatcgatagcacttgttgttcttgggatccaaacatcaagatctttattttcccagttactcaactcattgttccgtgcgccaatgtccttttttgattctacccctcttggaaggatacttagccgggtatcttcagatttgagcattgttgatcttgatgttccatttggattgatgcttgctcttggtgccagcataaatgcatatagcaatctgggggtgttggctgttgttacatggcaagttctgttcgtctctgtgccgatgatggttttggcactcaggttgcagaagtactatttagcctcagctaaggaactgatgaggatcaatggcactaccaaatcagctctggctaatcacttgggagagtcggttgcagggtctataacaataagggctttcgaggaagaagatcgtttctttgagaaaaattcggaacttgttgacaagaatgctgcttcatatttctataattttgcagcgactgaatggctgattcaacgcctggaaacaatgagtgctgcagttctttctttttctgccttcatcatggctctcctccctgcaggaacttttagctctgtgccagctatcaaaccagataatctctgtggaaagggtgaaccagtacatggacataccaagtgaagcagcagaggtcattgaagaaaatcgaccatcaccaaactggccccaagttggtagggtggagcttagagatctgaagatcagatacagggaagatgctccccttgtactgcatggaatcacatgcacttttgaaggcggagataagattggtatagtcggccggacaggaagtggaaagacgactttaatcggtgcattgtttcgtcttgttgagccaactggggggaaaataattattgactctgtagatatcaccacaattggcttacatgaccttcgttcacgtttgggtatcattccacaagatccgacactctttcagggaaccataagatataatctagatcctcttgagcaattttcggatcaacagatatgggaggttcttgacaaatgtcagcttcttgaagctgtccaggagaaggaacagggattggactcacttgttgtggaggatggctcgaactggagcatgggtcagaggcagctcttctgtttgggacgtgcactgctaagaagatgccgtgtcttagtcctcgacgaggccactgcatctatagacaatgctaccgatgcgatccttcagaaaacaatcaggacagagttcagagactgcactgtcatcactgtcgctcaccgtatacccactgtcatggactgcagtatggtacttgcactgagcgacgggaaactggtggagtatgacaagcctacgaagctcatggaaaccgaagggtctctcttccgtgacctcgtcaaagagtactggtcgtacgcatcgaatgggaatatctagaagccacctccaaactacgaccgtttgcatgtttccactcgctgcatcctcttgaaaggagatacaagaatctgggcttgcacatccgaagaactattgtatctgaaatcttgagaaaaggcgtcaggcattgtcatgaaatgcttgttgtcaagttttcaccactcgtttttcagcaactttttggtagtttctgttttgggtcattgcttcccttccaggcgctgaataaaagaaaacatgtctccatccccccccccccttcttctcccctccaaaaaaaagtagaggaaatcctcaacatttctttgctcacagtgatactttatgctcataacaaaaattcttaggcttggtgctcaacactattccattcagaatttgtggtgtatgcttacattcgtacaaagctgtagtagggtatatgatgtctgtttttttggggtgcaatcatggcttttcagcaccctcttgttcatgtttgatgtatattcatcggtgtctggagccaagcaatttggtggtaactctgttttttcactgcatgtgcatgctggatgattgtagatccttgcggcttatgtaggtcacaaattggaatggatgaactgaat

SEQ ID NO: 9099 - DNA, 5461 bp, Zea Mays
ctcgactctatagccactagtcactcagtcaatcatccacctgcgctgccgctggaatttaattaaaaaaaaagagcccgatcgatccagcaaagtgcatcacgccgttcacggcttcaggacatagggagctcccaagttctcctcctcctcctcctccacctcctcctcgtcgtcgtcttctctctcaggtctcagccatcgtatcgtccggacccaccgtatccccagtccgccggcggccgtcgattcattatcccggccgcccgggctgcccgtaagtcaagcggcggcggcggcggcggctaaggtatagccaaggctggagcgaggccggtgcggccgaccatccctgtgtgtgcaccctgcagaaccaacctcacccccgatcaaggttcttggatggcgggcgtgtgcgggagcccgttctgctccagggaagcttcagctccagctccagcgtcatgtggacgatgggacgaactactcaactcctccacctgcgcgaacaacatcctggcgaccggcgccgctgcgctgctcgccgtcgtcctcgcgctgcagctgctcgtcagggtcgcaaggaacggactacgacacgcgcccgtcgtcgcgctcagctcgccgctgcagcgggccgccgtggcggccaacgcctgcctgggcctggcctacctgggcctcgcggcgtggatgctggggacggacctgacccagcgcgcctccgtctacctcccacaccggtggctggtgagcctggcccaggggctctgcctgctcctcgccggcttcgccttcagcgtcagggcgcagctgctcggagcggcgttcctccgggtctgggcggctctgctggccgcgtacgccgcgttcgtttgctgcacctcggtcgtgcacatggtcgcagacaaggtgctggccgtgaagacgtgcttggatgttctgtccctgcctggtgcgctgctgctccttgtgtacggcattcggcacgccagggaagaagaagaaggagatggtaacggaggaaccgaaagttctttgtataagcctctgaacgccgaggctcacgacgacggtgcggccgactcgcgtgtcaccccgtttgctaaagccggggttttcagcatcatgacgttctggtggctgaaccccatgatgaagaagggttacgagaagcctctcgaggagaaagacatgccgctcctaggcccctcggaccgagcgtacagccagtacctgatgttcttggacaacctgaacaggaagaagcagctgcaggcacacggcaacccgtcggtcttctggaccatcgtctcttctcacaagagcgcgatcttggtctcgggtctcttcgcgttgctcaaagtgctcacgctgtctgcaggcccagtgcttctgaaagccttcatcaatgtctcgcttgggaaaggttccttcaagtacgagggctttgttctggccgcggcaatgttcgctatcaagtgctgtgagtctctgtcccagaggcagtggtactttcgcacccggaggctagggctccaggtgaggtcgctcctgtcggccgccatctacaagaagcagcagaagctgtcgggctcttcgaagctgaagcattcctctggagagatcataaactacgtcaccgtcgacgcctaccggatcggcgagttcccgtactggttccaccagacgtggacgacaagcgtccagctctgcatcgctctggggatcctgtacaatgcggttggtcttgccatgattgcatcgctggtcgtcatcgttctcactgtgatctgcaacgctcctctgtccaagctgcagcacaagtttcagactaggcttatggaagcacagggcgtgaggctgaaggcgatgtcggagtccttgatccacatgaaggtcttaaaactctatgcgtgggagacgcatttcaagaaggtcattgaggggttgagggagattgagatcaagtggctgtcggcgttcaaccttaggaaatccttcaatggtttcgtgttctggacatcaccggttctggtctcggctgcaaccttcctcacatgctatcttctgaaaatccctcttgatgcaagcaatgttttcacgtttgtggccactctgcgccttgttcaagacccaattaggcagatgccggatgtgattggagtcgttatacaggctaaagttgctttcactaggataacgaagtttcttgatgcgcctgagctgagtggacaggccaggaagaaatactgtgtgggagatgaatatcgtatagtgatgaactcttgcagtttttcatgggatgagaacccgtcaaaaccaactctgaagaatataaacttggtggtcaaggctggggagaaggttgcaatatgtggcgaggtaggatcaggaaagtcaacactattggctgcagttcttggagaggttcctaaaacagaaggcatgatccaaatttgtgggaaaacagcatatgtttctcaaaatgcatggatccaaacaggaacggtgcaagacaatattctctttggatcttcaatggacaggcaaaggtaccaagaaacgcttgagaggtgttctttagtaaaagaccttgaaatgcttccatatggagaccatactcaaatcggggagaggggcgtaaatcttagcggtggccagaagcagcgtgttcagcttgctcgtgcattataccaaaatgcagacatttatcttctcgatgaccctttcagcgctgttgatgcccacacagcaactagtctttttaacgaatatgtcatgggagctctgtcagataagactgtccttttggtgacccatcaagtcgattttttgcctgtatttgattctgttctgttaatgtcagatggtgaaattattcgtgctgcaccttatcaagatttattggcacattgtcaagaatttcagaacctcgtaaatgcccataaagacactattggtgtttcagatcttaacagagtcagatcccatagaacaaatgaaaacaagggatcgattgatattcatggaagcttatacaaagagtctttgaagccatcaccagcagatcagctgatcaagacagaggaaagagaaatgggtgacactggtctcaagccttatatcctttacttgcgccagaataaaggcttcttcaatggctctatgggtattctttgccatgtgattttcgtatgtggccaaatagcacagaattcatggatggctgctaatgtccagaatcctgatgttggtacacttaagttgatttctgtgtacattgcaattggattcatcacagtgttcttcttgctgtttagatcgatagcacttgttgttcttgggatccaaacatcaagatctttattttcccagttactcaactcattgttccgtgcgccaatgtccttttttgattctacccctcttggaaggatacttagccgggtgtatcttcagatttgagcattgttgatcttgatgttccatttggattgatgcttgctcttggtgccagcataaatgcatatagcaatctgggggtgttggctgttgttacatggcaagttctgttcgtctctgtgccgatgatggttttggcactcaggttgcagaagtactatttagcctcagctaaggaactgatgaggatcaatggcactaccaaatcagctctggctaatcacttgggagagtcggttgcagggtctataacaataagggctttcgaggaagaagatcgtttctttgagaaaaattcggaacttgttgacaagaatgctgcttcatatttctataattttgcagcgactgaatggctgattcaacgcctggaaacaatgagtgctgcagttctttctttttctgccttcatcatggctctcctccctgcaggaacttttagctctggctttataggaatggcgttgtcttatggtctgtccctgaacaattcctttgttttctctatccaaaaccagtgccagctatcaaaccagataatctctgtggaaagggtgaaccagtacatggacataccaagtgaagcagcagaggtcattgaagaaaatcgaccatcaccaaactggccccaagttggtagggtggagcttagagatctgaagatcagatacagggaagatgctccccttgtactgcatggaatcacatgcacttttgaaggcggagataagattggtatagtcggccggacaggaagtggaaagacgactttaatcggtgcattgtttcgtcttgttgagccaactggggggaaaataattattgactctgtagatatcaccacaattggcttacatgaccttcgttcacgtttgggtatcattccacaagatccgacactctttcagggaaccataagatataatctagatcctcttgagcaattttcggatcaacagatatgggaggttcttgacaaatgtcagcttcttgaagctgtccaggagaaggaacagggattggactcacttgttgtggaggatggctcgaactggagcatgggtcagaggcagctcttctgtttgggacgtgcactgctaagaagatgccgtgtcttagtcctcgacgaggccactgcatctatagacaatgctaccgatgcgatccttcagaaaacaatcaggacagagttcagagactgcactgtcatcactgtcgctcaccgtatacccactgtcatggactgcagtatggtacttgcactgagcgacgggaaactggtggagtatgacaagcctacgaagctcatggaaaccgaagggtctctcttccgtgacctcgtcaaagagtactggtcgtacgcatcgaatgggaatatctagaagccacctccaaactacgaccgtttgcatgtttccactcgctgcatcctcttgaaaggagatacaagaatctgggcttgcacatccgaagaactattgtatctgaaatcttgagaaaaggcgtcaggcattgtcatgaaatgcttgttgtcaagttttcaccactcgtttttcagcaactttttggtagtttctgttttgggtcattgcttcccttccaggcgctgaataaaagaaaacatgtctccatccccccccccccttcttctcccctccaaaaaaaagtagaggaaatcctcaacatttctttgctcacagtgatactttatgctcataacaaaaattcttaggcttggtgctcaacactattccattcagaatttgtggtgtatgcttacattcgtacaaagctgtagtagggtatatgatgtctgtttttttggggtgcaatcatggcttttcagcaccctcttgttcatgtttgatgtatattcatcggtgtctggagccaagcaatttggtggtaactctgttttttcactgcatgtgcatgctggatgattgtagatccttgcggcttatgtaggtcacaaattggaatggatgaactgaat

SEQ ID NO: 9100 - DNA, 1529 bp, Zea Mays
ttattagatggaaacctcattattggttccaccagctgcctgaattcgaccagctaaagaagagctgccgcaaacgcctcgcaggccacaacgagcgccggaggaggccgccgcctggaccccttgcgtcacgatacggccgtcacgctgcgtcgctcggcgagcccggcaggctcagaagcttcatgctggatttctcgtacccgagggtctcaagcgccatgaggggtgggtttccggcggtgaggcccggtggtgaaagggtgcctggcggtatccagtggcaagcgggcttggatcctcgtcaccaccaaggcgcggtcgcgggatacggcgcccactatgggagcgagggtggtagctcgtcgtcggcgaggccgccggtgttccctggcccggagctgcccccaggtggatgccttgcaggagtccccgcggactccagctgtgctctctctcttctgtcaactcagccatgggatgctgcccacagccacagccacagccacgctgcgccaacagcgggtttcgacggcggcagccctgtggcgccctccctcatggcggcgagtagctacatcgcgccgagcccctggaccgagaccgactcctggggccacgaaggcgggcggagcgtgcctcagctgccacctgacgacgtccccctcggcgaggtgcactccggctcgagcagccaccacggccagttctcaggtgagctcgagctcgccctgcagggaaacaggccagcgccagggtcggcggcaccgccagcgccgcgcaataatcagggctccgcgggcacgttcgaccaggctggcaacacgatggactggtcgctctaggccgggggccgaaataaagcgcagcagatcctagccgcgcagggagatggaggaggctgaaagtctgatgctgcacgctgcttgcttagcttagagcatccagcatgataagagtgatgaactgatgcggtgtcaggagactagtttattctgtgcttcaccatgaactcgtctgtcgcggcgtctatgtagacagacggcacacgtccgtggttcgaagttaccagtatgcttgtcggggactttgctcgcgatgcattaatctcattgttcaccatccagaaatctcatgttctctactcgtttgctggcccgtccatgctgccgctgctgtggtctttacatcaccatggctccgcctccatgcatcatcatttctactgaataataatgtgcttgtaccctccaacgttgccgcctggcattgccaagaatcggttccaagggggtgttgtttaagtaaagcgagaccacaggcacagcgcggctttgcagcatgctcttggcaccagtggtgtggtgtggtgttgctgctgatagactgaccgacggcagaatgagatccacgcagcagcttctttcaaatccacaaaattttctcagtggagaacaccagcacctttcctgcgaaagattttttccccttcccttgcgaattcatttcccttttgcccaaccacacag

SEQ ID NO: 9101 - DNA, 2665 bp, Zea Mays
aaatagaaagttaaaaataaatagtttctcgtagaaattctaagtcggacaacaaacaagcaggagagaagaatcagtgatctgtgctgtgagtacctgacctcttccagacagcctctgaaatccccttcggcccttcctgctccagcgggagcgcaccagcaatgtcgtcggcggggccaccgccgccgctgccgccgtggagcaggctggaggggcaggtggtgctggtgacgggcgcttcctccggcatcggacgcgacttctgcctcgacctggcgcgcgccggctgccgcgtcgtcgccgccgcccgccgcgccgatcgtctccgctcgctctgcgacgagatcaacgcctccgctgcctcccgagccccccgcgcggtggctgtggaggtcgacgtcgccgccggtggttcggccctggaggcggcggtgcagaaggcctgggacgcctttggccgtatcgacgccttggtcaacaacgccggcatacgaggtgcagtgcattctccattagattggcccgaggatgagtgggacagaatcatcaagacgaaccttaccggatcatggctcgtggccaaacatgtctgtcgacgcatgcgtgatgccaagctgaagggttcagtggttaacatcacctctattgctggccttaaccgtgggcatctgcctggctccacgggatacgcatcctcaaaggctgctgtgcattatgccaccaagattatggctttggaattgggcgcggatcgcatcagagtgaactcgattgcacctggactcttcaaatcagagataactgctcctctgtttcaaaagaggtggttgagcaccgttgcttcaaagatagtgccgcttaaggagcatggcgctactgatcctgcattgacgtcgctggtccgttttctgatccatgaagcatcgtcgtatgtgactggcaacatcttcattgtagactcagtgctactggacacgagcactaccagctgtgaaggttcgcttttgggaactgtaccagtccgtctaggttactcttagaatttgtccccctgctgtgtaggatctatggtttcatgcttgtaagatatgggcagcgctatgctgcgtggttggctgcaggatgtctttttgtgtttttagggtagtaatgaactatgctatgcgtgcaatcctgcaaggaccatactcatgtacatcgcgagtatgtagtctagggctgaacaaatcagagaggcagagacactgctccccttggtatttctactatttgctgctactaccacccttctctttgtcgcagtacaccaaaatagtgaacttcttagagcctaaaccctaggaagttagccctaaactctaggaagttagctaaactctcaaaagtgaagccatcccgtcggaagtttggctctcggaaattttttgtcggaagttagcttaacttcctagagccctctaggaaattagctaacttactacaaccaaaggagcctctcggaagttctgtgcattcgtgggatttcgtttggtcaactgtgtcatgttcggcgatttagcgtgatccagcagctaacatgtttaattatgaattgtatcgagggatgtctgatttgtatttgttcacaagatagctacttttgataaagcagctggtttccaggtaacgtgttctcctgccaatttgcttacacactattctattctacattgagcttaacagtcagacttttgacaggcacttatccaccccagctgctcttgaaggtaaaaactcattgaatggaaaaggcatccccgttttttcttcttaagccagtgatactaagcacattatgttggttttgtttgcttgacatgttgatctgggggattgaaggttgaaaactctacacggtattcttagattggaaaccatgtttttaatccatcataaagttattagtcttacagattcagttttatgactgatccgcaagtcatgaacatcctatgcatcttacagtgcttattgatttgcagcagcacaattttagttttctcacgcagcataattggttctatctcgtgttgcttctttgggctgctattacgagtcattttgctgattctctttcgccttatattacaggttaccacagctcttagtctgaggttttatattcaaccgttgcttagctaagactccacaaagctctgctgaaaagataaaagccttcaccttgtcatcgagtcaaagctaacctaagccaatcgaggtcgaaggaggtagcttcggggtgatgcgctgtggcttactatgcaagagacatggatacatgcaggagacgaagataaaggttacggaagacttgatctgcaagatgtatagatgggaaagtacaatattactgtcgtaatgtatgtagcggtcatgtatatggtttgtggacatgtttgtaatttcatacaaagttatatcccacgattctaaatagaggaataatgccatgcatagacacacactttcgagcctagatcacagaaccactcagtcttcgaagataccttcgagctcccgcttgtgaagttgaatgtatacttgtaatcatttggtatcttgtaaggagtaaaataaatatgagtttgcacattcagatgagtgatatgttttactcttcttg

SEQ ID NO: 9102 - DNA, 3105 bp, Zea Mays
aaatagaaagttaaaaataaatagtttctcgtagaaattctaagtcggacaacaaacaagcaggagagaagaatcagtgatctgtgctgtgagtacctgacctcttccagacagcctctgaaatccccttcggcccttcctgctccagcgggagcgcaccagcaatgtcgtcggcggggccaccgccgccgctgccgccgtggagcaggctggaggggcaggtggtgctggtgacgggcgcttcctccggcatcggacgcgacttctgcctcgacctggcgcgcgccggctgccgcgtcgtcgccgccgcccgccgcgccgatcgtctccgctcgctctgcgacgagatcaacgcctccgctgcctcccgagccccccgcgcggtggctgtggaggtcgacgtcgccgccggtggttcggccctggaggcggcggtgcagaaggcctgggacgcctttggccgtatcgacgccttggtcaacaacgccggcatacgaggtgcagtgcattctccattagattggcccgaggatgagtgggacagaatcatcaagacgaaccttaccggatcatggctcgtggccaaacatgtctgtcgacgcatgcgtgatgccaagctgaagggttcagtggttaacatcacctctattgctggccttaaccgtgggcatctgcctggctccacgggatacgcatcctcaaaggctgctgtgcattatgccaccaagattatggctttggaattgggcgcggatcgcatcagagtgaactcgattgcacctggactcttcaaatcagagataactgctcctctgtttcaaaagaggtggttgagcaccgttgcttcaaagatagtgccgcttaaggagcatggcgctactgatcctgcattgacgtcgctggtccgttttctgatccatgaagcatcgtcgtatgtgactggcaacatcttcattgtagactcaggtgccaccatacctggtgttccgatattctcatccctagcaatggaatcaagacggaatgaagacggcaacaacgacaactctccaacaacaacaacaaagatctgctacgttgcaggcctggcggagacgcacaggtcctcaacccgtcctgtctgtctcttctgcagctattcgaggctgacgtttacagtgtgctagatggatctacaaacaagactcataaaagtgttaccggaaaaaggttagcttcatgctaggcaatctgtctagactattgttcccacatcatggcgacacttttacatgcatgccatggcaacaaactttacatgggtctcacacatcaccttccaagaaggttgccaagaaactttttagagatgaagacaaaggagacgatgatgttgttggttccgcagacgctgatgctgagtaacgtgctactggacacgagcactaccagctgtgaaggttcgcttttgggaactgtaccagtccgtctaggttactcttagaatttgtccccctgctgtgtaggatctatggtttcatgcttgtaagatatgggcagcgctatgctgcgtggttggctgcaggatgtctttttgtgtttttagggtagtaatgaactatgctatgcgtgcaatcctgcaaggaccatactcatgtacatcgcgagtatgtagtctagggctgaacaaatcagagaggcagagacactgctccccttggtatttctactatttgctgctactaccacccttctctttgtcgcagtacaccaaaatagtgaacttcttagagcctaaaccctaggaagttagccctaaactctaggaagttagctaaactctcaaaagtgaagccatcccgtcggaagtttggctctcggaaattttttgtcggaagttagcttaacttcctagagccctctaggaaattagctaacttactacaaccaaaggagcctctcggaagttctgtgcattcgtgggatttcgtttggtcaactgtgtcatgttcggcgatttagcgtgatccagcagctaacatgtttaattatgaattgtatcgagggatgtctgatttgtatttgttcacaagatagctacttttgataaagcagctggtttccaggtaacgtgttctcctgccaatttgcttacacactattctattctacattgagcttaacagtcagacttttgacaggcacttatccaccccagctgctcttgaaggtaaaaactcattgaatggaaaaggcatccccgttttttcttcttaagccagtgatactaagcacattatgttggttttgtttgcttgacatgttgatctgggggattgaaggttgaaaactctacacggtattcttagattggaaaccatgtttttaatccatcataaagttattagtcttacagattcagttttatgactgatccgcaagtcatgaacatcctatgcatcttacagtgcttattgatttgcagcagcacaattttagttttctcacgcagcataattggttctatctcgtgttgcttctttgggctgctattacgagtcattttgctgattctctttcgccttatattacaggttaccacagctcttagtctgaggttttatattcaaccgttgcttagctaagactccacaaagctctgctgaaaagataaaagccttcaccttgtcatcgagtcaaagctaacctaagccaatcgaggtcgaaggaggtagcttcggggtgatgcgctgtggcttactatgcaagagacatggatacatgcaggagacgaagataaaggttacggaagacttgatctgcaagatgtatagatgggaaagtacaatattactgtcgtaatgtatgtagcggtcatgtatatggtttgtggacatgtttgtaatttcatacaaagttatatcccacgattctaaatagaggaataatgccatgcatagacacacactttcgagcctagatcacagaaccactcagtcttcgaagataccttcgagctcccgcttgtgaagttgaatgtatacttgtaatcatttggtatcttgtaaggagtaaaataaatatgagtttgcacattcagatgagtgatatgttttactcttcttg

SEQ ID NO: 9103 - DNA, 2301 bp, Zea Mays
aaatagaaagttaaaaataaatagtttctcgtagaaattctaagtcggacaacaaacaagcaggagagaagaatcagtgatctgtgctgtgagtacctgacctcttccagacagcctctgaaatccccttcggcccttcctgctccagcgggagcgcaccagcaatgtcgtcggcggggccaccgccgccgctgccgccgtggagcaggctggaggggcaggtggtgctggtgacgggcgcttcctccggcatcggacgcgacttctgcctcgacctggcgcgcgccggctgccgcgtcgtcgccgccgcccgccgcgccgatcgtctccgctcgctctgcgacgagatcaacgcctccgctgcctcccgagccccccgcgcggtggctgtggaggtcgacgtcgccgccggtggttcggccctggaggcggcggtgcagaaggcctgggacgcctttggccgtatcgacgccttggtcaacaacgccggcatacgaggtgcagtgcattctccattagattggcccgaggatgagtgggacagaatcatcaagacgaaccttaccggatcatggctcgtggccaaacatgtctgtcgacgcatgcgtgatgccaagctgaagggttcagtggttaacatcacctctattgctggccttaaccgtgggcatctgcctggctccacgggatacgcatcctcaaaggctgctgtgcattatgccaccaagattatggctttggaattgggcgcggatcgcatcagagtgaactcgattgcacctggactcttcaaatcagagataactgctcctctgtttcaaaagaggtggttgagcaccgttgcttcaaagatagtgccgcttaaggagcatggcgctactgatcctgcattgacgtcgctggtccgttttctgatccatgaagcatcgtcgtatgtgactggcaacatcttcattgtagactcagtgctactggacacgagcactaccagctgtgaaggttcgcttttgggaactgtaccagtccgtctaggttactcttagaatttgtccccctgctgtgtaggatctatggtttcatgcttgtaagatatgggcagcgctatgctgcgtggttggctgcaggatgtctttttgtgtttttagggtagtaatgaactatgctatgcgtgcaatcctgcaaggaccatactcatgtacatcgcgagtatgtagtctagggctgaacaaatcagagaggcagagacactgctccccttggtatttctactatttgctgctactaccacccttctctttgtcgcagtacaccaaaatagtgaacttcttagagcctaaaccctaggaagttagccctaaactctaggaagttagctaaactctcaaaagtgaagccatcccgtcggaagtttggctctcggaaattttttgtcggaagttagcttaacttcctagagccctctaggaaattagctaacttactacaaccaaaggagcctctcggaagttctgtgcattcgtgggatttcgtttggtcaactgtgtcatgttcggcgatttagcgtgatccagcagctaacatgtttaattatgaattgtatcgagggatgtctgatttgtatttgttcacaagatagctacttttgataaagcagctggtttccaggtaacgtgttctcctgccaatttgcttacacactattctattctacattgagcttaacagtcagacttttgacaggcacttatccaccccagctgctcttgaaggttaccacagctcttagtctgaggttttatattcaaccgttgcttagctaagactccacaaagctctgctgaaaagataaaagccttcaccttgtcatcgagtcaaagctaacctaagccaatcgaggtcgaaggaggtagcttcggggtgatgcgctgtggcttactatgcaagagacatggatacatgcaggagacgaagataaaggttacggaagacttgatctgcaagatgtatagatgggaaagtacaatattactgtcgtaatgtatgtagcggtcatgtatatggtttgtggacatgtttgtaatttcatacaaagttatatcccacgattctaaatagaggaataatgccatgcatagacacacactttcgagcctagatcacagaaccactcagtcttcgaagataccttcgagctcccgcttgtgaagttgaatgtatacttgtaatcatttggtatcttgtaaggagtaaaataaatatgagtttgcacattcagatgagtgatatgttttactcttcttg

SEQ ID NO: 9104 - DNA, 2951 bp, Zea Mays
aaatagaaagttaaaaataaatagtttctcgtagaaattctaagtcggacaacaaacaagcaggagagaagaatcagtgatctgtgctgtgagtacctgacctcttccagacagcctctgaaatccccttcggcccttcctgctccagcgggagcgcaccagcaatgtcgtcggcggggccaccgccgccgctgccgccgtggagcaggctggaggggcaggtggtgctggtgacgggcgcttcctccggcatcggacgcgacttctgcctcgacctggcgcgcgccggctgccgcgtcgtcgccgccgcccgccgcgccgatcgtctccgctcgctctgcgacgagatcaacgcctccgctgcctcccgagccccccgcgcggtggctgtggaggtcgacgtcgccgccggtggttcggccctggaggcggcggtgcagaaggcctgggacgcctttggccgtatcgacgccttggtcaacaacgccggcatacgaggtgcagtgcattctccattagattggcccgaggatgagtgggacagaatcatcaagacgaaccttaccggatcatggctcgtggccaaacatgtctgtcgacgcatgcgtgatgccaagctgaagggttcagtggttaacatcacctctattgctggccttaaccgtgggcatctgcctggctccacgggatacgcatcctcaaaggctgctgtgcattatgccaccaagattatggctttggaattgggcgcggatcgcatcagagtgaactcgattgcacctggactcttcaaatcagagataactgctcctctgtttcaaaagaggtggttgagcaccgttgcttcaaagatagtgccgcttaaggagcatggcgctactgatcctgcattgacgtcgctggtccgttttctgatccatgaagcatcgtcgtatgtgactggcaacatcttcattgtagactcagagcaatggaatcaagacggaatgaagacggcaacaacgacaactctccaacaacaacaacaaagatctgctacgttgcaggcctggcggagacgcacaggtcctcaacccgtcctgtctgtctcttctgcagctattcgaggctgacgtttacagtgtgctagatggatctacaaacaagactcataaaagtgttaccggaaaaaggttgccaagaaactttttagagatgaagacaaaggagacgatgatgttgttggttccgcagacgctgatgctgagtaacgtgctactggacacgagcactaccagctgtgaaggttcgcttttgggaactgtaccagtccgtctaggttactcttagaatttgtccccctgctgtgtaggatctatggtttcatgcttgtaagatatgggcagcgctatgctgcgtggttggctgcaggatgtctttttgtgtttttagggtagtaatgaactatgctatgcgtgcaatcctgcaaggaccatactcatgtacatcgcgagtatgtagtctagggctgaacaaatcagagaggcagagacactgctccccttggtatttctactatttgctgctactaccacccttctctttgtcgcagtacaccaaaatagtgaacttcttagagcctaaaccctaggaagttagccctaaactctaggaagttagctaaactctcaaaagtgaagccatcccgtcggaagtttggctctcggaaattttttgtcggaagttagcttaacttcctagagccctctaggaaattagctaacttactacaaccaaaggagcctctcggaagttctgtgcattcgtgggatttcgtttggtcaactgtgtcatgttcggcgatttagcgtgatccagcagctaacatgtttaattatgaattgtatcgagggatgtctgatttgtatttgttcacaagatagctacttttgataaagcagctggtttccaggtaacgtgttctcctgccaatttgcttacacactattctattctacattgagcttaacagtcagacttttgacaggcacttatccaccccagctgctcttgaaggtaaaaactcattgaatggaaaaggcatccccgttttttcttcttaagccagtgatactaagcacattatgttggttttgtttgcttgacatgttgatctgggggattgaaggttgaaaactctacacggtattcttagattggaaaccatgtttttaatccatcataaagttattagtcttacagattcagttttatgactgatccgcaagtcatgaacatcctatgcatcttacagtgcttattgatttgcagcagcacaattttagttttctcacgcagcataattggttctatctcgtgttgcttctttgggctgctattacgagtcattttgctgattctctttcgccttatattacaggttaccacagctcttagtctgaggttttatattcaaccgttgcttagctaagactccacaaagctctgctgaaaagataaaagccttcaccttgtcatcgagtcaaagctaacctaagccaatcgaggtcgaaggaggtagcttcggggtgatgcgctgtggcttactatgcaagagacatggatacatgcaggagacgaagataaaggttacggaagacttgatctgcaagatgtatagatgggaaagtacaatattactgtcgtaatgtatgtagcggtcatgtatatggtttgtggacatgtttgtaatttcatacaaagttatatcccacgattctaaatagaggaataatgccatgcatagacacacactttcgagcctagatcacagaaccactcagtcttcgaagataccttcgagctcccgcttgtgaagttgaatgtatacttgtaatcatttggtatcttgtaaggagtaaaataaatatgagtttgcacattcagatgagtgatatgttttactcttcttg

SEQ ID NO: 9105 - DNA, 2775 bp, Zea Mays
aaatagaaagttaaaaataaatagtttctcgtagaaattctaagtcggacaacaaacaagcaggagagaagaatcagtgatctgtgctgtgagtacctgacctcttccagacagcctctgaaatccccttcggcccttcctgctccagcgggagcgcaccagcaatgtcgtcggcggggccaccgccgccgctgccgccgtggagcaggctggaggggcaggtggtgctggtgacgggcgcttcctccggcatcggacgcgacttctgcctcgacctggcgcgcgccggctgccgcgtcgtcgccgccgcccgccgcgccgatcgtctccgctcgctctgcgacgagatcaacgcctccgctgcctcccgagccccccgcgcggtggctgtggaggtcgacgtcgccgccggtggttcggccctggaggcggcggtgcagaaggcctgggacgcctttggccgtatcgacgccttggtcaacaacgccggcatacgaggtgcagtgcattctccattagattggcccgaggatgagtgggacagaatcatcaagacgaaccttaccggatcatggctcgtggccaaacatgtctgtcgacgcatgcgtgatgccaagctgaagggttcagtggttaacatcacctctattgctggccttaaccgtgggcatctgcctggctccacgggatacgcatcctcaaaggctgctgtgcattatgccaccaagattatggctttggaattgggcgcggatcgcatcagagtgaactcgattgcacctggactcttcaaatcagagataactgctcctctgtttcaaaagaggtggttgagcaccgttgcttcaaagatagtgccgcttaaggagcatggcgctactgatcctgcattgacgtcgctggtccgttttctgatccatgaagcatcgtcgtatgtgactggcaacatcttcattgtagactcagatctgctacgttgcaggcctggcggagacgcacaggtcctcaacccgtcctgtctgtctcttctgcagctattcgaggctgacgtttacagtgtgctagatggatctacaaacaagactcataaaagtgttaccggaaaaaggttgccaagaaactttttagagatgaagacaaaggagacgatgatgttgttggttccgcagacgctgatgctgagtaacgtgctactggacacgagcactaccagctgtgaaggttcgcttttgggaactgtaccagtccgtctaggttactcttagaatttgtccccctgctgtgtaggatctatggtttcatgcttgtaagatatgggcagcgctatgctgcgtggttggctgcaggatgtctttttgtgtttttagggtagtaatgaactatgctatgcgtgcaatcctgcaaggaccatactcatgtacatcgcgagtatgtagtctagggctgaacaaatcagagaggcagagacactgctccccttggtatttctactatttgctgctactaccacccttctctttgtcgcagtacaccaaaatagtgaacttcttagagcctaaaccctaggaagttagccctaaactctaggaagttagctaaactctcaaaagtgaagccatcccgtcggaagtttggctctcggaaattttttgtcggaagttagcttaacttcctagagccctctaggaaattagctaacttactacaaccaaaggagcctctcggaagttctgtgcattcgtgggatttcgtttggtcaactgtgtcatgttcggcgatttagcgtgatccagcagctaacatgtttaattatgaattgtatcgagggatgtctgatttgtatttgttcacaagatagctacttttgataaagcagctggtttccaggtaacgtgttctcctgccaatttgcttacacactattctattctacattgagcttaacagtcagacttttgacaggcacttatccaccccagctgctcttgaaggttgaaaactctacacggtattcttagattggaaaccatgtttttaatccatcataaagttattagtcttacagattcagttttatgactgatccgcaagtcatgaacatcctatgcatcttacagtgcttattgatttgcagcagcacaattttagttttctcacgcagcataattggttctatctcgtgttgcttctttgggctgctattacgagtcattttgctgattctctttcgccttatattacaggttaccacagctcttagtctgaggttttatattcaaccgttgcttagctaagactccacaaagctctgctgaaaagataaaagccttcaccttgtcatcgagtcaaagctaacctaagccaatcgaggtcgaaggaggtagcttcggggtgatgcgctgtggcttactatgcaagagacatggatacatgcaggagacgaagataaaggttacggaagacttgatctgcaagatgtatagatgggaaagtacaatattactgtcgtaatgtatgtagcggtcatgtatatggtttgtggacatgtttgtaatttcatacaaagttatatcccacgattctaaatagaggaataatgccatgcatagacacacactttcgagcctagatcacagaaccactcagtcttcgaagataccttcgagctcccgcttgtgaagttgaatgtatacttgtaatcatttggtatcttgtaaggagtaaaataaatatgagtttgcacattcagatgagtgatatgttttactcttcttg

SEQ ID NO: 9106 - DNA, 2512 bp, Zea Mays
aaatagaaagttaaaaataaatagtttctcgtagaaattctaagtcggacaacaaacaagcaggagagaagaatcagtgatctgtgctgtgagtacctgacctcttccagacagcctctgaaatccccttcggcccttcctgctccagcgggagcgcaccagcaatgtcgtcggcggggccaccgccgccgctgccgccgtggagcaggctggaggggcaggtggtgctggtgacgggcgcttcctccggcatcggacgcgacttctgcctcgacctggcgcgcgccggctgccgcgtcgtcgccgccgcccgccgcgccgatcgtctccgctcgctctgcgacgagatcaacgcctccgctgcctcccgagccccccgcgcggtggctgtggaggtcgacgtcgccgccggtggttcggccctggaggcggcggtgcagaaggcctgggacgcctttggccgtatcgacgccttggtcaacaacgccggcatacgaggtgcagtgcattctccattagattggcccgaggatgagtgggacagaatcatcaagacgaaccttaccggatcatggctcgtggccaaacatgtctgtcgacgcatgcgtgatgccaagctgaagggttcagtggttaacatcacctctattgctggccttaaccgtgggcatctgcctggctccacgggatacgcatcctcaaaggctgctgtgcattatgccaccaagattatggctttggaattgggcgcggatcgcatcagagtgaactcgattgcacctggactcttcaaatcagagataactgctcctctgtttcaaaagaggtggttgagcaccgttgcttcaaagatagtgccgcttaaggagcatggcgctactgatcctgcattgacgtcgctggtccgttttctgatccatgaagcatcgtcgtatgtgactggcaacatcttcattgtagactcagagcaatggaatcaagacggaatgaagacggcaacaacgacaactctccaacaacaacaacaaagatctgctacgttgcaggcctggcggagacgcacaggtcctcaacccgtcctgtctgtctcttctgcagctattcgaggctgacgtttacagtgtgctagatggatctacaaacaagactcataaaagtgttaccggaaaaaggttgccaagaaactttttagagatgaagacaaaggagacgatgatgttgttggttccgcagacgctgatgctgagtaacgtgctactggacacgagcactaccagctgtgaaggttcgcttttgggaactgtaccagtccgtctaggttactcttagaatttgtccccctgctgtgtaggatctatggtttcatgcttgtaagatatgggcagcgctatgctgcgtggttggctgcaggatgtctttttgtgtttttagggtagtaatgaactatgctatgcgtgcaatcctgcaaggaccatactcatgtacatcgcgagtatgtagtctagggctgaacaaatcagagaggcagagacactgctccccttggtatttctactatttgctgctactaccacccttctctttgtcgcagtacaccaaaatagtgaacttcttagagcctaaaccctaggaagttagccctaaactctaggaagttagctaaactctcaaaagtgaagccatcccgtcggaagtttggctctcggaaattttttgtcggaagttagcttaacttcctagagccctctaggaaattagctaacttactacaaccaaaggagcctctcggaagttctgtgcattcgtgggatttcgtttggtcaactgtgtcatgttcggcgatttagcgtgatccagcagctaacatgtttaattatgaattgtatcgagggatgtctgatttgtatttgttcacaagatagctacttttgataaagcagctggtttccaggcacttatccaccccagctgctcttgaaggttaccacagctcttagtctgaggttttatattcaaccgttgcttagctaagactccacaaagctctgctgaaaagataaaagccttcaccttgtcatcgagtcaaagctaacctaagccaatcgaggtcgaaggaggtagcttcggggtgatgcgctgtggcttactatgcaagagacatggatacatgcaggagacgaagataaaggttacggaagacttgatctgcaagatgtatagatgggaaagtacaatattactgtcgtaatgtatgtagcggtcatgtatatggtttgtggacatgtttgtaatttcatacaaagttatatcccacgattctaaatagaggaataatgccatgcatagacacacactttcgagcctagatcacagaaccactcagtcttcgaagataccttcgagctcccgcttgtgaagttgaatgtatacttgtaatcatttggtatcttgtaaggagtaaaataaatatgagtttgcacattcagatgagtgatatgttttactcttcttg

SEQ ID NO: 9107 - DNA, 2769 bp, Zea Mays
aaatagaaagttaaaaataaatagtttctcgtagaaattctaagtcggacaacaaacaagcaggagagaagaatcagtgatctgtgctgtgagtacctgacctcttccagacagcctctgaaatccccttcggcccttcctgctccagcgggagcgcaccagcaatgtcgtcggcggggccaccgccgccgctgccgccgtggagcaggctggaggggcaggtggtgctggtgacgggcgcttcctccggcatcggacgcgacttctgcctcgacctggcgcgcgccggctgccgcgtcgtcgccgccgcccgccgcgccgatcgtctccgctcgctctgcgacgagatcaacgcctccgctgcctcccgagccccccgcgcggtggctgtggaggtcgacgtcgccgccggtggttcggccctggaggcggcggtgcagaaggcctgggacgcctttggccgtatcgacgccttggtcaacaacgccggcatacgaggtgcagtgcattctccattagattggcccgaggatgagtgggacagaatcatcaagacgaaccttaccggatcatggctcgtggccaaacatgtctgtcgacgcatgcgtgatgccaagctgaagggttcagtggttaacatcacctctattgctggccttaaccgtgggcatctgcctggctccacgggatacgcatcctcaaaggctgctgtgcattatgccaccaagattatggctttggaattgggcgcggatcgcatcagagtgaactcgattgcacctggactcttcaaatcagagataactgctcctctgtttcaaaagaggtggttgagcaccgttgcttcaaagatagtgccgcttaaggagcatggcgctactgatcctgcattgacgtcgctggtccgttttctgatccatgaagcatcgtcgtatgtgactggcaacatcttcattgtagactcagatctgctacgttgcaggcctggcggagacgcacaggtcctcaacccgtcctgtctgtctcttctgcagctattcgaggctgacgtttacagtgtgctagatggatctacaaacaagactcataaaagtgttaccggaaaaaggttagcttcatgctaggcaatctgtctagactattgttcccacatcatggcgacacttttacatgcatgccatggcaacaaactttacatgggtctcacacatcaccttccaagaaggttgccaagaaactttttagagatgaagacaaaggagacgatgatgttgttggttccgcagacgctgatgctgagtaacgtgctactggacacgagcactaccagctgtgaaggttcgcttttgggaactgtaccagtccgtctaggttactcttagaatttgtccccctgctgtgtaggatctatggtttcatgcttgtaagatatgggcagcgctatgctgcgtggttggctgcaggatgtctttttgtgtttttagggtagtaatgaactatgctatgcgtgcaatcctgcaaggaccatactcatgtacatcgcgagtatgtagtctagggctgaacaaatcagagaggcagagacactgctccccttggtatttctactatttgctgctactaccacccttctctttgtcgcagtacaccaaaatagtgaacttcttagagcctaaaccctaggaagttagccctaaactctaggaagttagctaaactctcaaaagtgaagccatcccgtcggaagtttggctctcggaaattttttgtcggaagttagcttaacttcctagagccctctaggaaattagctaacttactacaaccaaaggagcctctcggaagttctgtgcattcgtgggatttcgtttggtcaactgtgtcatgttcggcgatttagcgtgatccagcagctaacatgtttaattatgaattgtatcgagggatgtctgatttgtatttgttcacaagatagctacttttgataaagcagctggtttccaggtaacgtgttctcctgccaatttgcttacacactattctattctacattgagcttaacagtcagacttttgacaggcacttatccaccccagctgctcttgaaggtaaaaactcattgaatggaaaaggcatccccgttttttcttcttaagccagtgatactaagcacattatgttggttttgtttgcttgacatgttgatctgggggattgaaggttgaaaactctacacggttaccacagctcttagtctgaggttttatattcaaccgttgcttagctaagactccacaaagctctgctgaaaagataaaagccttcaccttgtcatcgagtcaaagctaacctaagccaatcgaggtcgaaggaggtagcttcggggtgatgcgctgtggcttactatgcaagagacatggatacatgcaggagacgaagataaaggttacggaagacttgatctgcaagatgtatagatgggaaagtacaatattactgtcgtaatgtatgtagcggtcatgtatatggtttgtggacatgtttgtaatttcatacaaagttatatcccacgattctaaatagaggaataatgccatgcatagacacacactttcgagcctagatcacagaaccactcagtcttcgaagataccttcgagctcccgcttgtgaagttgaatgtatacttgtaatcatttggtatcttgtaaggagtaaaataaatatgagtttgcacattcagatgagtgatatgttttactcttcttg

SEQ ID NO: 9108 - DNA, 2523 bp, Zea Mays
gaaaaaagggaccagagggccggaagcccggaaccaaaacctagacgaaccacacaggcagtcaggcacagcgcgggccggggagatagataggcagacaggcaggcaggggggcgacggcacggggcggggctagccaaccagaccaacccaaaccctagctcaccgctcgttccattccaatccatggaggtggcgctatgagccgccgccgggacggcgggacgtggagctggtgcggccggggaagacgagtcgaggatgacggccagatcggacgatcccggcgtctcgccagggacgtcggcggcggctggcggcgagatctggggcacgtgggaggagctcctcctggcgtgtgccgtacggaagcacggtaccgccagctgggactccgtggccatggagatgctgtcccgctgccctcccgccgcggccgacagcctcacgcccgctgggtgccgcctgcggtatcgcctgctccaccgccggttcaccgccgccgccgccgtaaacggtgacgaggagcccgacgcggcctccgccgactgctgcgtggaggagctccgcaagctgcgcgtcgccgagctccgccgcgaggtcgagagatacgacctctcgatcgggtcattgcaatctagagtggaaaggcttaaagaggagagagcgaggagcatctccggcgaggccaatccagtaccggcggtgaaggaggacggcgaggaggagccggcggaggggaggaaagaatctctggaggaggagggcgacgatgccggcggcggggaggaggatcgtgtctccggcggcgagtccgggcggtcgtgcaaggagtccaactcgtcagatctgaagcggccgcggccagcgcgagacgccggggacggcgacgcggcggcgaggagggaggacgagggggcaggagacgccgcccgcgagtcgtcggctgtgaagcgcgagcaggtctccggtgagtcggtggttgggtccaaggacacggtggcggcggctgacacggagaaggagagcagcgacgtgcagagctcggccagcccgtcccgtcgccgcgagcgggagatcggcgccggcgaggacgcggatgtggcctcagcgccgccgccgccagcgcccgcagcggcggtcctccccgctgcggaggccgaggcgttgcgcgcgttcctcgaggtggtgcgaaccagcaagccgggctccgtgttcgagcgccggctcgagagccaggacgacgcgaaatacaggtgcaccatcaggcgccacgtggacctggagacggtgaggtccaggctggacggtgggtccggcagctacgcctcggcgaccgagttctaccgcgacctgctcctgctgtgcgccaacgcgctggtcttctacccgcgcggctcgcccgagcgttccgccgcggcgcggacgcgcgcgctcgtcgccaagcacatgtccaaggaccagccggggccctcggggaaggctgtcgcggggccggcggcgtccaagaaggccaaggcggaggccgacgttgggtcgctgctggagaagacggcgcccatcatcgtgtgccggaagcggagctctatcgccaaggccgccgcggcggccaccgccaaagaggagagatcggagaaggcggagtccgacaaggagggcgagaagcagcaggaggcggtgggcaagaggaaggcggcggccgccgccaaggacagggcggcgtggggcccgagaacgaacaagacccgcggcgggcctgctgtccggaaggcgtcggctcagagccacaagggggcgtcggcggcggcggacaacggctcggacagcgacgcaccgcccgaggaggccaagaagcagcctgccgctgacaagaaaggtggtggtggcggcggtgtcgccaagaagcgcaacgccgtcaacttcctcaaccggatgaagcaaggtggctcggcgccgtcgacggagcgggtgtcgctactggagacgctgaagctctcggccgcggcggagcagaagaaggccgggaaaggcgagggcaaggagcccgcgggcgggtccggttccaagaaggccacgccggggaggaggaacgttggcaggccaccgaaacgcgcggctgcccctccatccccgccaccgtccaagagggcaaagggcggcggcggcggcgggaaacgcgggggcaggaagtgaagccaagtgggatggagtgggaagcattaggaagctgtaggcccagtctcagaccgtcccagctcaaccgtgtgtaaatgacgtagggttgtaggagcgttcggtccgagcttttgtaccgtatgccagtggtgtaggggtggtactgttttttgggaggaaaacaggatgagttgacctgcgctcgcgggactgcattgatgaagagatggattgtggaagacgattcgtttagaaactgtcgtcgaggaatacatttttttggctgaaatttgaaacctgtagcgatggaatagatactgtcactgaaatctcaactgtgacttttat

SEQ ID NO: 9109 - DNA, 2572 bp, Zea Mays
gaaaaaagggaccagagggccggaagcccggaaccaaaacctagacgaaccacacaggcagtcaggcacagcgcgggccggggagatagataggcagacaggcaggcaggggggcgacggcacggggcggggctagccaaccagaccaacccaaaccctagctcaccgctcgttccattccaatccatggaggtggcgctatgagccgccgccgggacggcgggacgtggagctggtgcggccggggaagacgagtcgaggatgacggccagatcggacgatcccggcgtctcgccagggacgtcggcggcggctggcggcgagatctggggcacgtgggaggagctcctcctggcgtgtgccgtacggaagcacggtaccgccagctgggactccgtggccatggagatgctgtcccgctgccctcccgccgcggccgacagcctcacgcccgctgggtgccgcctgcggtatcgcctgctccaccgccggttcaccgccgccgccgccgtaaacggtgacgaggagcccgacgcggcctccgccgactgctgcgtggaggagctccgcaagctgcgcgtcgccgagctccgccgcgaggtcattgcaatctagagtggaaaggcttaaagaggagagagcgaggagcatctccggcgaggccaatccagtaccggcggtgaaggaggacggcgaggaggagccggcggaggggaggaaagaatctctggaggaggagggcgacgatgccggcggcggggaggaggatcgtgtctccggcggcgagtccgggcggtcgtgcaaggagtccaactcgtcagatctgaagcggccgcggccagcgcgagacgccggggacggcgacgcggcggcgaggagggaggacgagggggcaggagacgccgcccgcgagtcgtcggctgtgaagcgcgagcaggtctccggtgagtcggtggttgggtccaaggacacggtggcggcggctgacacggagaaggagagcagcgacgtgcagagctcggccagcccgtcccgtcgccgcgagcgggagatcggcgccggcgaggacgcggatgtggcctcagcgccgccgccgccagcgcccgcagcggcggtcctccccgctgcggaggccgaggcgttgcgcgcgttcctcgaggtggtgcgaaccagcaagccgggctccgtgttcgagcgccggctcgagagccaggatattttttcttttccactttgtcggttctttcgctgctccactgaccgctgggcccaaaaatgccgctcgcaggacgacgcgaaatacaggtgcaccatcaggcgccacgtggacctggagacggtgaggtccaggctggacggtgggtccggcagctacgcctcggcgaccgagttctaccgcgacctgctcctgctgtgcgccaacgcgctggtcttctacccgcgcggctcgcccgagcgttccgccgcggcgcggacgcgcgcgctcgtcgccaagcacatgtccaaggaccagccggggccctcggggaaggctgtcgcggggccggcggcgtccaagaaggccaaggcggaggccgacgttgggtcgctgctggagaagacggcgcccatcatcgtgtgccggaagcggagctctatcgccaaggccgccgcggcggccaccgccaaagaggagagatcggagaaggcggagtccgacaaggagggcgagaagcagcaggaggcggtgggcaagaggaaggcggcggccgccgccaaggacagggcggcgtggggcccgagaacgaacaagacccgcggcgggcctgctgtccggaaggcgtcggctcagagccacaagggggcgtcggcggcggcggacaacggctcggacagcgacgcaccgcccgaggaggccaagaagcagcctgccgctgacaagaaaggtggtggtggcggcggtgtcgccaagaagcgcaacgccgtcaacttcctcaaccggatgaagcaaggtggctcggcgccgtcgacggagcgggtgtcgctactggagacgctgaagctctcggccgcggcggagcagaagaaggccgggaaaggcgagggcaaggagcccgcgggcgggtccggttccaagaaggccacgccggggaggaggaacgttggcaggccaccgaaacgcgcggctgcccctccatccccgccaccgtccaagagggcaaagggcggcggcggcggcgggaaacgcgggggcaggaagtgaagccaagtgggatggagtgggaagcattaggaagctgtaggcccagtctcagaccgtcccagctcaaccgtgtgtaaatgacgtagggttgtaggagcgttcggtccgagcttttgtaccgtatgccagtggtgtaggggtggtactgttttttgggaggaaaacaggatgagttgacctgcgctcgcgggactgcattgatgaagagatggattgtggaagacgattcgtttagaaactgtcgtcgaggaatacatttttttggctgaaatttgaaacctgtagcgatggaatagatactgtcactgaaatctcaactgtgacttttat

SEQ ID NO: 9110 - DNA, 1476 bp, Zea Mays
ctccattgccatttgtcgatgatgcgggacattattccacacgactagcgtgtactctcaatcatcagctccgagggaggcattggaggccgcacaatgggaggtggggaggctatgggtagaaatggcccgctcggaggagagagatcgggaactttccggcctccgagccagaaccgagtgccttgaggccgaggccacgtgccttcggtcaggacgtgaagaggcgcgcaaggatgccaagtgcctccacggggaaaggacgcggcttcagcaggatctgcgcgaggtgacctcacgggcggaagaaaccgagtcaaccctacgggcggcgaatgttcgcttgggggaagctaacatggaccttcagcgagagcgagaggtggccagagaaccgaatgtaagtgaaatacaaaagaaggaaaaacaacaaatttgtcctctggctgaattgaaagaatcgaaagtggaagatgtggacgtgcctacaaacaattagaagacaattctagcaggttagatatttagaggtttaggaccacaatagctgttctgttgcccaaagggaatatagcgaggttgagagagagaaaaactggagaaaaaggaaaaaaacagaatttgcacatgttagatcagatagcagagaggaatcaaatgcggaatccattggctcaatggaaatgtagcgatttttttattgcaacatggttgacaaaaaaaaatctggagaaaaacaaaaacaaaatatgcacatcttagattgaatagcagggaggaatcgaatgcggtatttccaaataaagttgactgaaccataaacgtgcagttccacgttgcaaatcaagatgcagaagcctccgttgctgtagggaaaaacctaaacaaatatagtagtgccaagactttttacctcatacattagagcgcagggaggatcttgctgaccgggacaacgctccacgaactatagtgatcttgctgatcgggaggatcttgctgaccggcgtagcaccaaccattctgcagcgagcaagttgtctctatggctggagatggttggtgcgacgccgacgcagaagaggaggcggaggtgagcacgcccggatctagcgtgaggtcggcgttcgtcgtcacgtcgggcgagaaagaggtggtggagatggacgcgtccagctccgacgttgtctcggcactcgtcgccatggcgagctggagcgtgtcgtgctgggcaccagtgtgctgtcgggtgaccgcaaagaaggagcgagaagcgtcagaatgtgaagtttcaaatggaactctcgagaagactcttctcgtccatttttttccttttttaatcgtcactgatgcagcgacagacaataatcgttcatttgtgatcgaacggcacagagaaaaaatactgacgtggaccgtctagctaggctgttttgcgttcgcgcttaatatatagaaagaatgaccgctcca

SEQ ID NO: 9111 - DNA, 1960 bp, Zea Mays
atggaggtgcaagaatggcatctgatcaaagcgactgccgaccacactgacatgagcctcgagtcggtggagcgcttcctttgcaacttcgctccgagggaggcattggaggccgcacaatgggaggtggggaggctatgggtagaaatggcccgctcggaggagagagatcgggaactttccggcctccgagccagaaccgagtgccttgaggccgaggccacgtgccttcggtcaggacgtgaagaggcgcgcaaggatgccaagtgcctccacggggaaaggacgcggcttcagcaggatctgcgcgaggtgacctcacgggcggaagaaaccgagtcaaccctacgggcggcgaatgttcgcttgggggaagctaacatggaccttcagcgagagcgagaggtggccagaggtaggtcttcttcatcttgggtgtttcttctgggttccgttgttatttactagtcactaacgcgcgcctagcgcgcgatacgttgtataattttattaaaatgtgtatagcatgtattcgtaagagaaaaaagattaagtagttatcagaaaataagtaactatgttgcggttcataagaaaacaaaaaaggtatcttgtcataagaaaacaaacataaattagttacattgttggtgttgtccttaaggagcagaggtactactaagcatcattccgaaataaatctaaagcgaagaaatcaaaacacaaatttaatcgtttatgtactattaacatgctaaatctagaagacatgttcgcacggaagattcgacaatgcggagaaaatgattcttcctgtgcttatctttctttgttaatgaggtggttgtcaccttttttttgctactttgtttgcagaaccgaatgtaagtgaaatacaaaagaaggaaaaacaacaaatttgtcctctggctgaattgaaagaatcgaaagtggaagatgtggacgtgcctacaaacaattagaagacaattctagcaggttagatatttagaggtttaggaccacaatagctgttctgttgcccaaagggaatatagcgaggttgagagagagaaaaactggagaaaaaggaaaaaaacagaatttgcacatgttagatcagatagcagagaggaatcaaatgcggaatccattggctcaatggaaatgtagcgatttttttattgcaacatggttgacaaaaaaaaatctggagaaaaacaaaaacaaaatatgcacatcttagattgaatagcagggaggaatcgaatgcggtatttccaaataaagttgactgaaccataaacgtgcagttccacgttgcaaatcaagatgcagaagcctccgttgctgtagggaaaaacctaaacaaatatagtagtgccaagactttttacctcatacattagagcgcagggaggatcttgctgaccgggacaacgctccacgaactatagtgatcttgctgatcgggaggatcttgctgaccggcgtagcaccaaccattctgcagcgagcaagttgtctctatggctggagatggttggtgcgacgccgacgcagaagaggaggcggaggtgagcacgcccggatctagcgtgaggtcggcgttcgtcgtcacgtcgggcgagaaagaggtggtggagatggacgcgtccagctccgacgttgtctcggcactcgtcgccatggcgagctggagcgtgtcgtgctgggcaccagtgtgctgtcgggtgaccgcaaagaaggagcgagaagcgtcagaatgtgaagtttcaaatggaactctcgagaagactcttctcgtccatttttttccttttttaatcgtcactgatgcagcgacagacaataatcgttcatttgtgatcgaacggcacagagaaaaaatactgacgtggaccgtctagctaggctgttttgcgttcgcgcttaatatatagaaagaatgaccgctcca

SEQ ID NO: 9112 - DNA, 1988 bp, Zea Mays
cggcgatcagcttctgatcgccagaggaccgatcagagcgattagagcgattaatcggacgatcagtccgattaatcggcttctgatcggttgatcagagctcctgatcgtccagggctgggaaaaccgaccagaggagatgacaaccagaaattgaccctcattaagctagctagcatgattgaagtggctgcaaagaaaggcgctcgcgatctcaacctgcaaggcaaactcatgaaccagatcgagtggctccctgattcaattggaaagctcactggacttgtcacccttgacatttcggagaatcggatcttggccttgccggaagcaattgggatgctttcttctttggccaagcttgaccttcacgctaacagaattgctcagcttcccgagtcgattggggatctttccaacctgatatatctcgaccttaggggcaatcagcttgcatcattgccggccagtcttggtaggctggtgaagcttgaggagcttgatgtgagtgcaaaccatcttacctcactccccgactcaataggaagccttacacgcctgaagaagttgatcgccgagacaaacgaccttgatgagctgccatacactatcggcaattgtgtgtcactggtggaactgcgggtaggatacaaccacctcaaggccctcccggaggccgtcggaaagctagagtctctggaggtcctctctgtgcgatacaacactattaggggccttccaacaacaatggcatctctcacaaagctgaaggaggttgatgcaagttttaatgagctcgagtctattcccgagaacttctgcttcgtcacttctcttatcaaactaaacgtcgggaataatttcgctgacctgcaatccctgcctcgttccattggcaaccttgagatgctggaagagttggatataagcaacaatcagattagggtgcttcctgattcttttggaaacctgcagcgtctccgtgtgctccgcgcagaagagaaccctctccaagtgccaccaagagatgtagctttaaagggagctcaggccgctgttcaatacatggctgaatatgttgccaagaaagccacaaggtcacaaccgatgaagacaaagaagacctgggctcagttctgctttttctcccggcctaacaaaagaaagcacgaccgaatagacaccgcgtcgtgattcactgtgagactgatgaacattaagctgctgtttcctcaactctacacttctgaagagaactatcgggtgcatcgccttcgatcgctaccattgtgttgtatgggtcaacaagatgtgatgcccagaagcttttccttggacaatgctgcagcctgcagcttctaacctgtagaaccaagatggtcaggtttcaccgaacctactcactcttgtttccaccaggccaactcaactctgaatgaccgctggaagagtccaagtcttacttcagcttaagaatctagaagtggtttagtctctcggcctttttcgtatgatcgagagcagctgagaagagaactggaagattgctgaagttcggtttgccctgcagtgcaacttgtcaatattatacgtaatatacatgcatccggtgaaactaagaccttggttattactaggatttgctttcagagatcatttttatttctctatatttgagcgtatgttctttgaaacttctaagttagaactaaaatcctgcaagataccagatgtgctggattgaaaacgactgcagtcgaatcctttttgtgtggcttaatatttatttagtgcattctgagaagtttctgttgtaactagtgtactagaatctttctgaagagattcataaaacacagtattttgcatgtttttctctgataaattgtaacgtgggctattacaagcagctactcggagcatttcaggaaatttcttgttttctgtgtatttttgtatgaaaatggactgagtcgcgtggaattcat

SEQ ID NO: 9113 - DNA, 2145 bp, Zea Mays
caaaggttcccggtgccgtccaccgaccaccggtgacacggcgcccatagcaagagttcaggaggagcgcggagccgttgctggtggtagcggtgtccgtgaggcgcggcgagatgtctgtgcggataaaggcggtggtggacaggttcgtgatggagctcaaggaggcactggacgcggacatccaggaccgcgtcatgaaggagcgggagatgcagacctacatcgcggagcgcgagcgcgaggtcgccgagagggaggctgcgtggaaggccgagctctcccgccgcgaggagatgacaaccagaaattgaccctcattaagctagctagcatgattgaagtggctgcaaagaaaggcgctcgcgatctcaacctgcaaggcaaactcatgaaccagatcgagtggctccctgattcaattggaaagctcactggacttgtcacccttgacatttcggagaatcggatcttggccttgccggaagcaattgggatgctttcttctttggccaagcttgaccttcacgctaacagaattgctcagcttcccgagtcgattggggatctttccaacctgatatatctcgaccttaggggcaatcagcttgcatcattgccggccagtcttggtaggctggtgaagcttgaggagcttgatgtgagtgcaaaccatcttacctcactccccgactcaataggaagccttacacgcctgaagaagttgatcgccgagacaaacgaccttgatgagctgccatacactatcggcaattgtgtgtcactggtggaactgcgggtaggatacaaccacctcaaggccctcccggaggccgtcggaaagctagagtctctggaggtcctctctgtgcgatacaacactattaggggccttccaacaacaatggcatctctcacaaagctgaaggaggttgatgcaagttttaatgagctcgagtctattcccgagaacttctgcttcgtcacttctcttatcaaactaaacgtcgggaataatttcgctgacctgcaatccctgcctcgttccattggcaaccttgagatgctggaagagttggatataagcaacaatcagattagggtgcttcctgattcttttggaaacctgcagcgtctccgtgtgctccgcgcagaagagaaccctctccaagtgccaccaagagatgtagctttaaagggagctcaggccgctgttcaatacatggctgaatatgttgccaagaaagccacaaggtcacaaccgatgaagacaaagaagacctgggctcagttctgctttttctcccggcctaacaaaagaaagcacgaccgaatagacaccgcgtcgtgattcactgtgagactgatgaacattaagctgctgtttcctcaactctacacttctgaagagaactatcgggtgcatcgccttcgatcgctaccattgtgttgtatgggtcaacaagatgtgatgcccagaagcttttccttggacaatgctgcagcctgcagcttctaacctgtagaaccaagatggtcaggtttcaccgaacctactcactcttgtttccaccaggccaactcaactctgaatgaccgctggaagagtccaagtcttacttcagcttaagaatctagaagtggtttagtctctcggcctttttcgtatgatcgagagcagctgagaagagaactggaagattgctgaagttcggtttgccctgcagtgcaacttgtcaatattatacgtaatatacatgcatccggtgaaactaagaccttggttattactaggatttgctttcagagatcatttttatttctctatatttgagcgtatgttctttgaaacttctaagttagaactaaaatcctgcaagataccagatgtgctggattgaaaacgactgcagtcgaatcctttttgtgtggcttaatatttatttagtgcattctgagaagtttctgttgtaactagtgtactagaatctttctgaagagattcataaaacacagtattttgcatgtttttctctgataaattgtaacgtgggctattacaagcagctactcggagcatttcaggaaatttcttgttttctgtgtatttttgtatgaaaatggactgagtcgcgtggaattcat

SEQ ID NO: 9114 - DNA, 4806 bp, Zea Mays
gcgcctccctcgcgggttctgctgtaatacgtgtgatgaactccttgttcaaacgcctccctcgcaagcgcgttgccgccactcgccggagcagccgccgcgtccacgcgcaaccgcgcccgcacccttccctcactacgttctcccgcctctgcgtagaggggccgctcccagccgcgctcgcgctgctctccgagctcgccgcggcggggctccgcgcggaccccgtctccctcacccgcctcgtcaagctctgcgtgcgccacggcacggcagaccacggccggctcattcaccgccacgtcgaggcgcacgggccgctgccccacgacggcgccggcggcctctttgtctccaactcgctcgcctcgatgtacgccaagttcggcctgctcgacgacgcgctcaggatgttcgacggaatgccggtgaggaacgtcgtcacctggacgaccgtcgtcgcggcgctggcgagcgcggacgggaggaagcaggaggcgctcaggttcctcgtggccatgcggagggacggggtggcgcccaacgcctacacgttctcgagcgtcctcggcgcgtgcaccacgccggggatgctcacggcggtgcacgcgagcaccgtcaaggcagggctggactcggacgtgttcgtgcggagctcgttgatcgacgcatacgtgaagctcggggacttggacggcgggaggcgtgtgtttgacgagatggtgaccagagatttggtcgtttggaactcgatcatcgctggttttgcgcagagcggagatggggtcggtgcgatcgagctgttcatgaggatgaaggatgccggattctcgtctaaccagggcaccttgaccagcgtcctgcgggcgtgcacggggatggtcatgcttgaagcggggaggcaggtgcatgcccatgtgctcaagtatgacagggacttgatcctgcacaatgcgctcctagacatgtactgcaagtgcgggagcttggaggatgcggatgccttgttccacaggatgccacagagggatgtgatctcatggagcaccatggtatctggtttggcgcagaatgggaaaagcgtggaggcattgagggtttttgacctgatgaaatctcaaggtgtggcaccgaaccacgtaacgatggttggagtactctttgcctgcagccatgctggtctggtggaagatggctggcactactttaggtccatgaagaggctctttggcattcaacctgagagagagcaccacaactgcatggtcgatctccttggccgagctgggaagctcgatgaagccgtggaattcatccatggtatgagcctcgagccagattcagtcatctggagaacgctcctaggagcttgcaggatgcataaaaacgccagtcttgcagcatacgcagccagagaaatacttaaactggagcctgacgaccaaggcgctcgtgtgctgttgtcgaatacatatgcagatctgcggcagtggacagatgctgagaagccatggaaagcgatgagggaccgaggcatgaggaaagagccagggcgaagctggatcgagctggagaaacgtgtccatgtgttcatcgctggggacctatcacacccgtgctccgacaccataattcaggagctgaaccggttgatcggaaggatcaagtctcttggttatgttccccagacagaatttgtgctgcaggacctcccgaccgagcagaaagaagacctgctgaagtatcacagcgagaagatggcgatagtgtttgggacgatgcatgcggtggatgggaagcctatcaggatcatgaagaacctgaggatctgtggcgactgccacgcgttcgcgaagcttgtctccaagagcgaaggcagggtgatcgtcatcagggaccctgttcggttccaccatttccaggatggagcttgctcatgtggtgactactggtagccaggcacaaacgccccgaaacaaacgacaccaaaggttcccggtgccgtccaccgaccaccggtgacacggcgcccatagcaagagttcaggaggagcgcggagccgttgctggtggtagcggtgtccgtgaggcgcggcgagatgtctgtgcggataaaggcggtggtggacaggttcgtgatggagctcaaggaggcactggacgcggacatccaggaccgcgtcatgaaggagcgggagatgcagacctacatcgcggagcgcgagcgcgaggtcgccgagagggaggctgcgtggaaggccgagctctcccgccgcgaggtaacgtgtacccgacccatccttccctcctgctcaattctctgttccatacatcccgcatcttgtcctgcactgccagctgttccgtggtcacgaacacggaacctattgatgctgaaactgcttgggatttgtttcttgtggtctgtggaccgtattgatgatctgatcgctgacgcatttccaattctcgctggaaatatggttgagatgacactgaacctgcatctgcactgcagagtttctttcatgaattgatggcaatgcccttcattttcttctgatgctgaacaagcacattgcacaggagacttcctatccacccctatcccactctatttcaaactacactgcaaaacagtgttttacacggcgatatacaagctctgctaagccgtaagagttattccttgcctttcactctagttgtcaccgaaggcagcgaggggaataaagctggcgtgtttcagttccgtacagagtatagaaaccatagaaaggtgataggccgggtgaagataagaatatataagagttcccacttgtctgcaaagcacatgcactgattcctttgggtagtgctaacccatactacacaaaatgttacattaaatatccactggcttatatttcaaaatttgaatatccattttgacttcttaacacatgaacaatagtacaatatggatatgcaacttcttcatgacttgaggcaataagcaaattcgactgcaagactcaacctttgagcgtagatgcaagtcagccttaattatccgatggtcgatgatgccatttaaaagtgattagtgatgctgtgttgttaaacaccccccccccccccccccccccaacacacacacacacgaagggtctacatcagtgctggaaatagagctgtaggttgtcctaactgtttagctgttcacccattaatgtgaatgaaacaacgcaaggcaagaaagtgacctgtgaccctgtatcgtgcagtagaggaaacaactcccacatggatgatggataacagtaggcgtgggctggaactaggaagagtttcttcgactcctgtattggccaggttggcggattggatgagaaagtatatagagatgagtgtttggggctttgggccctgctaggtagggaacagggatacaacaatcttgttttgcgtggagtctctacattacatgcacccatactgattcgttgctctgtttccagcttataaggatgttgttgcgtagtgtgtgctgatacattggagactaaagtactgggaaaggtgaaagtgcctttagctgagttagttagatggtctgattagtctcttcaggtcctgagtttgattctccgtgggagcgaatttcaggctattgtttgaaaaaaatctcttcatctgtcccagtcaaaacacaagtctaatgtctagttttgatcgcggtcgtttctcacatggactatagtgtcgttgtgtatgggtgcttcttgctataatgaccaggggctatcttatcccttatgtcgagttctttttaagcaacgaaaggggtagtgaattagagccaatcaatttgtcgtggtgacactgattgcaaaacagcatatgctgccagattgtggtcaacaaactatatattagtctatacattggatgagcagcaatcaaatgagcaagatggatgtcataatcatcaacagaccagatttacgtttggaagctaaacctaatcttcctgcactcatgacgacaccgagttactgctatcatgcaaaaaggccacgatggactggtgtggtgttcgcttagcaaatggagatctttatcatgcactgtaatcaagctgtccacttcctccgacacagcaacatccttacctgaatccatcaatcctctaggtaaagtgaagaaagaaaatcgatgcaggctgagatcgcgaggcaggaggcgaggctgaaggtggagagggagaacctggagaaagagaagagcgtcctcatggggacggcttcgagccaggatagccaagacggagcgctggagatcaccgtcagcggcgagaagtacaggtgcctccggttctcgaaggcgaagaagtgagaggttgaaccaggacgacacagtcactcagggtcaggggggggtagtggtacaccgaaatctcagtttggaggctagtgtaagagtatctgtcaatctggcacacaggctgtcgctgtacgtgctggtttgatgctcactgcgtcgtgcgtcctcattgatgatttaacgatagggtcattgaaccagcgcacaacctgagaaaatggttgcgctgtccgtcctggggtcacggtagcatgaacctcagaactgataacctctgtttcggacggatacaatcgggttgaatgggagcctttcgtgtgcatgtggaaggtaaaatcctgcggtctctgtgtctggaacatgcttgttgccttgttggaacgaaaaggggagtttcggcttcactgcactggcaacaatacggtgcatgggactggg

SEQ ID NO: 9115 - DNA, 2879 bp, Zea Mays
gcgcctccctcgcgggttctgctgtaatacgtgtgatgaactccttgttcaaacgcctccctcgcaagcgcgttgccgccactcgccggagcagccgccgcgtccacgcgcaaccgcgcccgcacccttccctcactacgttctcccgcctctgcgtagaggggccgctcccagccgcgctcgcgctgctctccgagctcgccgcggcggggctccgcgcggaccccgtctccctcacccgcctcgtcaagctctgcgtgcgccacggcacggcagaccacggccggctcattcaccgccacgtcgaggcgcacgggccgctgccccacgacggcgccggcggcctctttgtctccaactcgctcgcctcgatgtacgccaagttcggcctgctcgacgacgcgctcaggatgttcgacggaatgccggtgaggaacgtcgtcacctggacgaccgtcgtcgcggcgctggcgagcgcggacgggaggaagcaggaggcgctcaggttcctcgtggccatgcggagggacggggtggcgcccaacgcctacacgttctcgagcgtcctcggcgcgtgcaccacgccggggatgctcacggcggtgcacgcgagcaccgtcaaggcagggctggactcggacgtgttcgtgcggagctcgttgatcgacgcatacgtgaagctcggggacttggacggcgggaggcgtgtgtttgacgagatggtgaccagagatttggtcgtttggaactcgatcatcgctggttttgcgcagagcggagatggggtcggtgcgatcgagctgttcatgaggatgaaggatgccggattctcgtctaaccagggcaccttgaccagcgtcctgcgggcgtgcacggggatggtcatgcttgaagcggggaggcaggtgcatgcccatgtgctcaagtatgacagggacttgatcctgcacaatgcgctcctagacatgtactgcaagtgcgggagcttggaggatgcggatgccttgttccacaggatgccacagagggatgtgatctcatggagcaccatggtatctggtttggcgcagaatgggaaaagcgtggaggcattgagggtttttgacctgatgaaatctcaaggtgtggcaccgaaccacgtaacgatggttggagtactctttgcctgcagccatgctggtctggtggaagatggctggcactactttaggtccatgaagaggctctttggcattcaacctgagagagagcaccacaactgcatggtcgatctccttggccgagctgggaagctcgatgaagccgtggaattcatccatggtatgagcctcgagccagattcagtcatctggagaacgctcctaggagcttgcaggatgcataaaaacgccagtcttgcagcatacgcagccagagaaatacttaaactggagcctgacgaccaaggcgctcgtgtgctgttgtcgaatacatatgcagatctgcggcagtggacagatgctgagaagccatggaaagcgatgagggaccgaggcatgaggaaagagccagggcgaagctggatcgagctggagaaacgtgtccatgtgttcatcgctggggacctatcacacccgtgctccgacaccataattcaggagctgaaccggttgatcggaaggatcaagtctcttggttatgttccccagacagaatttgtgctgcaggacctcccgaccgagcagaaagaagacctgctgaagtatcacagcgagaagatggcgatagtgtttgggacgatgcatgcggtggatgggaagcctatcaggatcatgaagaacctgaggatctgtggcgactgccacgcgttcgcgaagcttgtctccaagagcgaaggcagggtgatcgtcatcagggaccctgttcggttccaccatttccaggatggagcttgctcatgtggtgactactggtagccaggcacaaacgccccgaaacaaacgacaccaaaggttcccggtgccgtccaccgaccaccggtgacacggcgcccatagcaagagttcaggaggagcgcggagccgttgctggtggtagcggtgtccgtgaggcgcggcgagatgtctgtgcggataaaggcggtggtggacaggttcgtgatggagctcaaggaggcactggacgcggacatccaggaccgcgtcatgaaggagcgggagatgcagacctacatcgcggagcgcgagcgcgaggtcgccgagagggaggctgcgtggaaggccgagctctcccgccgcgaggctgagatcgcgaggcaggaggcgaggctgaaggtggagagggagaacctggagaaagagaagagcgtcctcatggggacggcttcgagccaggatagccaagacggagcgctggagatcaccgtcagcggcgagaagtacaggtgcctccggttctcgaaggcgaagaagtgagaggttgaaccaggacgacacagtcactcagggtcaggggggggtagtggtacaccgaaatctcagtttggaggctagtgtaagagtatctgtcaatctggcacacaggctgtcgctgtacgtgctggtttgatgctcactgcgtcgtgcgtcctcattgatgatttaacgatagggtcattgaaccagcgcacaacctgagaaaatggttgcgctgtccgtcctggggtcacggtagcatgaacctcagaactgataacctctgtttcggacggatacaatcgggttgaatgggagcctttcgtgtgcatgtggaaggtaaaatcctgcggtctctgtgtctggaacatgcttgttgccttgttggaacgaaaaggggagtttcggcttcactgcactggcaacaatacggtgcatgggactggg

SEQ ID NO: 9116 - DNA, 4822 bp, Zea Mays
gtaaattcaggggacccggttctgatgaccaactcgttgttcaagcgcctccctcgcgggttctgctgtaatacgtgtgatgaactccttgttcaaacgcctccctcgcaagcgcgttgccgccactcgccggagcagccgccgcgtccacgcgcaaccgcgcccgcacccttccctcactacgttctcccgcctctgcgtagaggggccgctcccagccgcgctcgcgctgctctccgagctcgccgcggcggggctccgcgcggaccccgtctccctcacccgcctcgtcaagctctgcgtgcgccacggcacggcagaccacggccggctcattcaccgccacgtcgaggcgcacgggccgctgccccacgacggcgccggcggcctctttgtctccaactcgctcgcctcgatgtacgccaagttcggcctgctcgacgacgcgctcaggatgttcgacggaatgccggtgaggaacgtcgtcacctggacgaccgtcgtcgcggcgctggcgagcgcggacgggaggaagcaggaggcgctcaggttcctcgtggccatgcggagggacggggtggcgcccaacgcctacacgttctcgagcgtcctcggcgcgtgcaccacgccggggatgctcacggcggtgcacgcgagcaccgtcaaggcagggctggactcggacgtgttcgtgcggagctcgttgatcgacgcatacgtgaagctcggggacttggacggcgggaggcgtgtgtttgacgagatggtgaccagagatttggtcgtttggaactcgatcatcgctggttttgcgcagagcggagatggggtcggtgcgatcgagctgttcatgaggatgaaggatgccggattctcgtctaaccagggcaccttgaccagcgtcctgcgggcgtgcacggggatggtcatgcttgaagcggggaggcaggtgcatgcccatgtgctcaagtatgacagggacttgatcctgcacaatgcgctcctagacatgtactgcaagtgcgggagcttggaggatgcggatgccttgttccacaggatgccacagagggatgtgatctcatggagcaccatggtatctggtttggcgcagaatgggaaaagcgtggaggcattgagggtttttgacctgatgaaatctcaaggtgtggcaccgaaccacgtaacgatggttggagtactctttgcctgcagccatgctggtctggtggaagatggctggcactactttaggtccatgaagaggctctttggcattcaacctgagagagagcaccacaactgcatggtcgatctccttggccgagctgggaagctcgatgaagccgtggaattcatccatggtatgagcctcgagccagattcagtcatctggagaacgctcctaggagcttgcaggatgcataaaaacgccagtcttgcagcatacgcagccagagaaatacttaaactggagcctgacgaccaaggcgctcgtgtgctgttgtcgaatacatatgcagatctgcggcagtggacagatgctgagaagccatggaaagcgatgagggaccgaggcatgaggaaagagccagggcgaagctggatcgagctggagaaacgtgtccatgtgttcatcgctggggacctatcacacccgtgctccgacaccataattcaggagctgaaccggttgatcggaaggatcaagtctcttggttatgttccccagacagaatttgtgctgcaggacctcccgaccgagcagaaagaagacctgctgaagtatcacagcgagaagatggcgatagtgtttgggacgatgcatgcggtggatgggaagcctatcaggatcatgaagaacctgaggatctgtggcgactgccacgcgttcgcgaagcttgtctccaagagcgaaggcagggtgatcgtcatcagggaccctgttcggttccaccatttccaggatggagcttgctcatgtggtgactactggtagccaggcacaaacgccccgaaacaaacgacaccaaaggttcccggtgccgtccaccgaccaccggtgacacggcgcccatagcaagagttcaggaggagcgcggagccgttgctggtggtagcggtgtccgtgaggcgcggcgagatgtctgtgcggataaaggcggtggtggacaggttcgtgatggagctcaaggaggcactggacgcggacatccaggaccgcgtcatgaaggagcgggagatgcagacctacatcgcggagcgcgagcgcgaggtcgccgagagggaggctgcgtggaaggccgagctctcccgccgcgaggtaacgtgtacccgacccatccttccctcctgctcaattctctgttccatacatcccgcatcttgtcctgcactgccagctgttccgtggtcacgaacacggaacctattgatgctgaaactgcttgggatttgtttcttgtggtctgtggaccgtattgatgatctgatcgctgacgcatttccaattctcgctggaaatatggttgagatgacactgaacctgcatctgcactgcagagtttctttcatgaattgatggcaatgcccttcattttcttctgatgctgaacaagcacattgcacaggagacttcctatccacccctatcccactctatttcaaactacactgcaaaacagtgttttacacggcgatatacaagctctgctaagccgtaagagttattccttgcctttcactctagttgtcaccgaaggcagcgaggggaataaagctggcgtgtttcagttccgtacagagtatagaaaccatagaaaggtgataggccgggtgaagataagaatatataagagttcccacttgtctgcaaagcacatgcactgattcctttgggtagtgctaacccatactacacaaaatgttacattaaatatccactggcttatatttcaaaatttgaatatccattttgacttcttaacacatgaacaatagtacaatatggatatgcaacttcttcatgacttgaggcaataagcaaattcgactgcaagactcaacctttgagcgtagatgcaagtcagccttaattatccgatggtcgatgatgccatttaaaagtgattagtgatgctgtgttgttaaacaccccccccccccccccccccccaacacacacacacacgaagggtctacatcagtgctggaaatagagctgtaggttgtcctaactgtttagctgttcacccattaatgtgaatgaaacaacgcaaggcaagaaagtgacctgtgaccctgtatcgtgcagtagaggaaacaactcccacatggatgatggataacagtaggcgtgggctggaactaggaagagtttcttcgactcctgtattggccaggttggcggattggatgagaaagtatatagagatgagtgtttggggctttgggccctgctaggtagggaacagggatacaacaatcttgttttgcgtggagtctctacattacatgcacccatactgattcgttgctctgtttccagcttataaggatgttgttgcgtagtgtgtgctgatacattggagactaaagtactgggaaaggtgaaagtgcctttagctgagttagttagatggtctgattagtctcttcaggtcctgagtttgattctccgtgggagcgaatttcaggctattgtttgaaaaaaatctcttcatctgtcccagtcaaaacacaagtctaatgtctagttttgatcgcggtcgtttctcacatggactatagtgtcgttgtgtatgggtgcttcttgctataatgaccaggggctatcttatcccttatgtcgagttctttttaagcaacgaaaggggtagtgaattagagccaatcaatttgtcgtggtgacactgattgcaaaacagcatatgctgccagattgtggtcaacaaactatatattagtctatacattggatgagcagcaatcaaatgagcaagatggatgtcataatcatcaacagaccagatttacgtttggaagctaaacctaatcttcctgcactcatgacgacaccgagttactgctatcatgcaaaaaggccacgatggactggtgtggtgttcgcttagcaaatggagatctttatcatgcactgtaatcaagctgtccacttcctccgacacagcaacatccttacctgaatccatcaatcctctaggctgagatcgcgaggcaggaggcgaggctgaaggtggagagggagaacctggagaaagagaagagcgtcctcatggggacggcttcgagccaggatagccaagacggagcgctggagatcaccgtcagcggcgagaagtacaggtgcctccggttctcgaaggcgaagaagtgagaggttgaaccaggacgacacagtcactcagggtcaggggggggtagtggtacaccgaaatctcagtttggaggctagtgtaagagtatctgtcaatctggcacacaggctgtcgctgtacgtgctggtttgatgctcactgcgtcgtgcgtcctcattgatgatttaacgatagggtcattgaaccagcgcacaacctgagaaaatggttgcgctgtccgtcctggggtcacggtagcatgaacctcagaactgataacctctgtttcggacggatacaatcgggttgaatgggagcctttcgtgtgcatgtggaaggtaaaatcctgcggtctctgtgtctggaacatgcttgttgccttgttggaacgaaaaggggagtttcggcttcactgcactggcaacaatacggtgcatgggactggg

SEQ ID NO: 9117 - DNA, 1914 bp, Zea Mays
accaccctgcattcccatccagccgtcgccactcgccgccgctaacccagccccgtctcatcgccatttgaaccaggaatcttacgcggaaccgccccgcttccatggcgacggcatccactacgctgctcctctcccttgccttcctcgccttcgcctgggcggcgtcgccgtcgccgtcgccggatgcggaggcgatctcccggttccaggagtacctccgcatcgacacggcgcagccggcgccagactacgccgcggccgtggccttcctccggaaacaggccgccgatgctggactcgaggcgcgcacgcttgagctcgtcgccgggaagcccctgctgctgctgcggtggcccggtcggcggccgtcgctcccctccatactcctcaactcccacactgacgtggtgccgtcggagccgaacaagtgggaccacccgcccttttccgccgccctcgatgagccatccggtcgcatctacgcgcgaggctcccagtaccttgaagccattcgccgtctccgttctgcaggatttgttccagatcgaaatatctatataacatttgttcctgacgaggagattggtgggcatggcggtgttgaaccatttgtttcatccaaggagttcaaagatatgaacgtggcattagtccttgatgaagggcttgcctctccaggggaggagtaccgtgtgttctatgcagagcgtagcccttggtggcttactataaaagcaacaggcgcaccagggcacggtgcgaagttgtatgatggtagtgcaatggagaatttgatgaagagcgtggaggctattaggagattcaggacatcacagtttgatctagtgaaatctggagagaaggctgaaggagatgttgtatcggtgaattttgcgtacctgaaggctggcacacctacaccaacgggttttgtcatgaatcttcaaccatctgaagcagaggtaggtcttgacatccggatccctcctagtgcccatgtggaagcactggagaggcgccttgttgaagaatgggcaccaccttcacgcaacctgaccttcgagtttaaacagaagatgtctgtcctggacaactttgggaagccagccatgacagcagcagacagcacaaacccatggtggacgttgctcgaagaagctgtgaagagcgctgacggcaaactcggcaaggcggagatattcccagcctctactgacgctcgctacttccggaaaatcggattaccagcatttggcttttcacctatggcgaacaccccgatactgctccatgaccataacgagtttctgagcaaagacgagtacctcaagggaatcgggatatacgagtccatcatcagggcactggccactcatgaagatggcggcaaagatgacgaatccagggcagagctgtgagcctgtgactgaggagaaccttgaaccttacctcgcttttgccgcagaccaaatggagcactggaagtcatgtttcggcattatgcagctgcctgtgcttctgctgcggcgtcggagcgatagaaccacaaacatcatctttgtacattctcgcaagagggcttatgcgcttaataattgatgaaattgagatatgtagttcgtctgcgcagttcagggctcacccagttcctacttgatgctgctttggtattggttgttgtatcaaaacttatattcacgtcgcttcgtgcttcattgcttttgtgcctttgttttcatttcatatggtagcatgacagtcgattatgcacaaaatcctcggaggggctcgtttagaaactcattcttttgtgatgctctttcatttactaaggtgagcaatcccaaagatatcattgaatctatctatactattatataggaattatataggaggtgtttggtttctaat

SEQ ID NO: 9118 - DNA, 1929 bp, Zea Mays
accaccctgcattcccatccagccgtcgccactcgccgccgctaacccagccccgtctcatcgccatttgaaccaggaatcttacgcggaaccgccccgcttccatggcgacggcatccactacgctgctcctctcccttgccttcctcgccttcgcctgggcggcgtcgccgtcgccgtcgccggatgcggaggcgatctcccggttccaggagtacctccgcatcgacacggcgcagccggcgccagactacgccgcggccgtggccttcctccggaaacaggccgccgatgctggactcgaggcgcgcacgcttgagctcgtcgccgggaagcccctgctgctgctgcggtggcccggtcggcggccgtcgctcccctccatactcctcaactcccacactgacgtggtgccgtcggagccgaacaagtgggaccacccgcccttttccgccgccctcgatgagccatccggtcgcatctacgcgcgaggctcccagtgtgtggggatgcagtaccttgaagccattcgccgtctccgttctgcaggatttgttccagatcgaaatatctatataacatttgttcctgacgaggagattggtgggcatggcggtgttgaaccatttgtttcatccaaggagttcaaagatatgaacgtggcattagtccttgatgaagggcttgcctctccaggggaggagtaccgtgtgttctatgcagagcgtagcccttggtggcttactataaaagcaacaggcgcaccagggcacggtgcgaagttgtatgatggtagtgcaatggagaatttgatgaagagcgtggaggctattaggagattcaggacatcacagtttgatctagtgaaatctggagagaaggctgaaggagatgttgtatcggtgaattttgcgtacctgaaggctggcacacctacaccaacgggttttgtcatgaatcttcaaccatctgaagcagaggtaggtcttgacatccggatccctcctagtgcccatgtggaagcactggagaggcgccttgttgaagaatgggcaccaccttcacgcaacctgaccttcgagtttaaacagaagatgtctgtcctggacaactttgggaagccagccatgacagcagcagacagcacaaacccatggtggacgttgctcgaagaagctgtgaagagcgctgacggcaaactcggcaaggcggagatattcccagcctctactgacgctcgctacttccggaaaatcggattaccagcatttggcttttcacctatggcgaacaccccgatactgctccatgaccataacgagtttctgagcaaagacgagtacctcaagggaatcgggatatacgagtccatcatcagggcactggccactcatgaagatggcggcaaagatgacgaatccagggcagagctgtgagcctgtgactgaggagaaccttgaaccttacctcgcttttgccgcagaccaaatggagcactggaagtcatgtttcggcattatgcagctgcctgtgcttctgctgcggcgtcggagcgatagaaccacaaacatcatctttgtacattctcgcaagagggcttatgcgcttaataattgatgaaattgagatatgtagttcgtctgcgcagttcagggctcacccagttcctacttgatgctgctttggtattggttgttgtatcaaaacttatattcacgtcgcttcgtgcttcattgcttttgtgcctttgttttcatttcatatggtagcatgacagtcgattatgcacaaaatcctcggaggggctcgtttagaaactcattcttttgtgatgctctttcatttactaaggtgagcaatcccaaagatatcattgaatctatctatactattatataggaattatataggaggtgtttggtttctaat

SEQ ID NO: 9119 - DNA, 1763 bp, Zea Mays
atagcacaagcgttggggtcaaatgagaatcttttttgttaattgcgaaaacgaaagagcccgtgtgaaccggagaggtgaggaaaagaggaaaagggagacataaattggaggccattatcaagaaaccatgagttctaggttcgcaatccctaatcctgatctcacttaagcgctcgtgagctctctccagtggctaaagattgcagatttgagttatagtccaagaaacgggtggtggtccgccatggaggtgaggtccgagcaagggctgatggcggggagggatctattcggtatgccaaagagcccgccggcgccggtttccgggccgccggcgtccgccgccatgcagagcgtgcgcatggcgtacacctcggacggcaccgctgtgttcgctccgatgagatcctcggccgcgacgccgtcttaccagccgcagggtgcagcccacggcgctagcatgtccgcggcgacaatcattggaggcaatggcgcggcagctgcgccgagcatgggggagccggtgcccaagaagaagcgcgggcgaccaaggaagtatgggcccgacgggtccatggcgctggcattggtgcctgtgtcggcggctacggggtcgccgacgacagggcagggttcttctgggccgttctcaccggctgggtcaaatctgacgaactctctgttggtagcctcgccggacgggttcaagaagcggggccggcctaagggttctaccaacaagccgcgcatggatgctgctggatcgtcaggagctggatttacacctcatgttatcacagttcaagctggggaggacgtgtcatcaaagatcatgtcgttttctcagcacggaccgcgtgcagtctgtgttctctcagcaaacggtgccatatcaaatgtgacgcttcgtcagactgctacatcaggcggaactgtaacatatgagggtcggttcgagatactgtcactgtcggggtcattcctcttggtggaggatggtggtcaacgcagtcgaactggagggctcagtgtgtcgttggctggtcccgacggtcgtgtgctgggcggtggagttgcagggctcctcgtagcagcttcgccagttcagatagtactgggaagtttcaattctggaggcaaaaaagaggcaaaaaagcatgctccttcaggacccacaccagcgccactgaaggtcgctcctccgacaacaaccaggatgggacccaacagcagcagccctccttcaagaggaggtacattgagcgagtcatccggtggcgccggaagcccaccaccgccgctgcatcaaggcatggctgctagcagtagcaacgaccagccgccgttcctgtccagcatcatgccatggaaatgatcctcttatgtagtagtataagtcagaagctttgagtagggaggtaaatttgtagctctactgtaggtttaaacctgaattcctgtgctacttaggtgtattgagctgtaacggatgtgatcatttgagagctaccaagtgttgtttagttaaatgttttaccaaggcatgtcgatctgagccagaagattcttgctatgaatttgttgtttgcgcttgacctttttttctgctgtagagaaggttgtggagccaaaggttctgcacaagaatacgttgaaagcatttggcatccttgatggcatgccgaaccattgaaggttccgtgacagacagatggcgtggctaagtttgtttatcatttgtaaaaaaagcaaacaaaaaa

SEQ ID NO: 9120 - DNA, 613 bp, Zea Mays
atgacatcgcatctttcatgtcagcctgaacgatccaacagccttctctatctgaggcctgtacttctccgagtcatcgtcgtcgatgtactggcccgtcacagtgtagaggcggttgtaccagccgttgaaggccatcccgatggccgagacgatgtggcgccgtcgctcgccggggttctgcagcgtgtactccaggtagtacaggccgtagtaccgtttgccgccctggagtcgatgagcttggcggcgagccccggcggcctctgccagctcctgtccaggccgttcaccagaccctcggcgaaggcatcgacgtcgccgaaggacttgaggctggtgaagtccggcccgatcccggtgatggcgacgctgacattggagtcggtggcggcctgctcggggtagaacgccgtgacagacttgatgccgctggcctcgccggcgccgaccagccagccttgcggaacttgaatgctgaacttgttggcctcatcctcgtacgtagtgaagccctcctgcgactcggcggtggcctcgtccgccagagcgccggcaggggcgagcagcggcggcgtcgcggcggagaagacgatgccgagcaataaggcgt

SEQ ID NO: 9121 - DNA, 688 bp, Zea Mays
ttcgggcacaacatgttgctggacctctccgcatacatatttagggtttatgtaccgtgggcggctgctgctgctggtgctggatgacatcgcatctttcatgtcagcctgaacgatccaacagccttctctatctgaggcctgtacttctccgagtcatcgtcgtcgatgtactggcccgtcacagtgtagaggcggttgtaccagccgttgaaggccatcccgatggccgagacgatgtggcgccgtcgctcgccggggttctgcagcgtgtactccaggtagtacaggccgtttgccgccctggagtcgatgagcttggcggcgagccccggcggcctctgccagctcctgtccaggccgttcaccagaccctcggcgaaggcatcgacgtcgccgaaggacttgaggctggtgaagtccggcccgatcccggtgatggcgacgctgacattggagtcggtggcggcctgctcggggtagaacgccgtgacagacttgatgccgctggcctcgccggcgccgaccagccagccttgcggaacttgaatgctgaacttgttggcctcatcctcgtacgtagtgaagccctcctgcgactcggcggtggcctcgtccgccagagcgccggcaggggcgagcagcggcggcgtcgcggcggagaagacgatgccgagcaataaggcgt

SEQ ID NO: 9122 - DNA, 2126 bp, Zea Mays
ggcggcgatggcgtcccgggacgacgggtggggaggcggcgaagacggcagctcgctcttcgagggcatggtcctcttcgcgccagagcccaccgccgccgaggactcggtccctgcccctgcccctgcccccgcccccgccgaggactcggtccctgtccccgccgctgtccctgagctgccatccgccgcccgccacgacgccgacgcggcctcgtccgtgccaccaccgctggacgaggatctcttctccgatctcaccctcttcgccccgccgcaggagccgctctcgctggagcagacacccccgcccctgctcccgcaaggcgaggatcggagccacgcggcacttgcccccgcgccgctagcccctactccggggctctctcggcagccgtccacctcgtcgctgcgcaagaagaagagggccgtgcgcatcgggatgcaaatgaacatgctatttcagagagcaaacaagcacaagaattatcgtcgaaagaaatagaagggtggcaaacatcaatggagttactagaaacaaagaagttggaaatggaggttgaaacacagttggttttagaagcacgttctgggttggaagggtcaatagagcatttggttgaagaagacaaactagaggaaggtacacttagtataaaaggagaagtcctcaccaaggagttagctgaccttctagagttggtgaggttgaaagaagcagagatagctgagaacaatgcccggatccatgaagttcaagaaagaataagtgcagtggtctccagattccatggctctcagtcagatgttgatttgaagctcaattccttgaaggaagcccaatgtaaactggatctagagactgaagcacttgtgttgaaaaaaaatgaaattgataatttcatttctttaacagagcaaaaagattcagagttgagggaaattattggtgcttgtttctctgaagcaaaaacttgccaacaatcagttgaaataagaagaaagcttgcatcatcgattttgaagtcaagagaggatagaattgggttgctaaaaatggaggaggaaattttgcaagacattcaaatgcttaggcaaaaaattacagatgcaagaactactcttcaggaggtatcttcaaggagaacaagtatacaacaagaaatggattcatttaagcagaaattgagcttcattgacaaaaggggccctgaactagaggctgaaaagaaagttgcggctgctgcaagaaactttaaggaagcaggaaggatagctgcagaggcaaaagctcttaattccgaaaagaacgaactgcgtggcaagttggagaaagctgctactgatctagagttaatagaaaaggacattgcagcaactacagacaagatacaagaatgcgaagggcttgttgtactgaaagaaaaggactcagcattgacaagttacaaaagactgcggttggattgtgctgctgccagagcagaactgactgctgcaactgaaatacatgataatgaagaagttgagatactacgcaaagaagctgaaactgccgattctaaagcaatggagctcaaaacatgctatgaccttcaggtggaggacaatgacttcatgtttcagcctgtagttcctatagcattcataacaaattcaacaggacagcacttggtagaaattgcttcttcatttggcctatctcctcagaagtgacattggacagtggatttgcacactaccaggtctgcccgttgcactgtgatccaagttgtacctgtcatattgaggggaagagctgtgctagtgtgaaactttctccttccaggatatcctcctcaacgacctctctttaaatcccagcatttggaatctactccaaactagagtaggaaggaagcatagggatgatcaaatgtacaacatacattttgcatgctctgtaggaatttagcttccctatgcattttttgtgtacattaagactgtaattcttttgttgtgccagttttgattcaattgcagtgacatgccatcatggaccagtatgtagacagatttttgtttcgagaaaaaggatgtaaccagaataaaatgtccaggaatggaactccttttgcattgcc

SEQ ID NO: 9123 - DNA, 2648 bp, Zea Mays
ggcggcgatggcgtcccgggacgacgggtggggaggcggcgaagacggcagctcgctcttcgagggcatggtcctcttcgcgccagagcccaccgccgccgaggactcggtccctgcccctgcccctgcccccgcccccgccgaggactcggtccctgtccccgccgctgtccctgagctgccatccgccgcccgccacgacgccgacgcggcctcgtccgtgccaccaccgctggacgaggatctcttctccgatctcaccctcttcgccccgccgcaggagccgctctcgctggagcagacacccccgcccctgctcccgcaaggcgaggatcggagccacgcggcacttgcccccgcgccgctagcccctactccggggctctctcggcagccgtccacctcgtcgctgcgcaagaagaagagggccgtgcgcatcgggtacgcccgctcgccgcaacccgcgccgccttcccctcctgccacggttcccgcctccgcagctgctgctgcgatctccgctagtactatagccttcctggacgcttcgccgtatccggccgctactcgtaccctcgaccagctccctgatcggcaactcgatgtccatgtcaacggctacgaggcgcacgcggaggcggtggatgttgataccaattcaccgcatgtggtggaggcggtggatgtggataccaattcgccgcgtgtggaggaggaggaggcaaaggaggacgatgacgggaaagaggatgaagatgctggagtggcagccttgggggtcaaggagaggctaggtctcctcagatctcaaatctcgggcaagctcgactccatccagcagagggctgctgctgtggctgccaagaggaggcttctggctggccggcggaggaaggtggcggaggaggcgacctccgtggcatccaggcacaaggatttggagagggagctggaggtggcctgcgaggctgaggactttgagagggcagagagtatcagcgactccctcgctgccctcgagaaggagaaggatgggctgttgacggcgctgcgtgatgctgagcttgactacgattcagtggattcggagttgcaggaggtgcttgagtcccgtattgctgccgaggaggaagctgctatccttctggagcaatttgcaaaggatgcaaatgaacatgctatttcagagagcaaacaagcacaagaattatcgtcgaaagaaatagaagggtggcaaacatcaatggagttactagaaacaaagaagttggaaatggaggttgaaacacagttggttttagaagcacgttctgggttggaagggtcaatagagcatttggttgaagaagacaaactagaggaaggtacacttagtataaaaggagaagtcctcaccaaggagttagctgaccttctagagttggtgaggttgaaagaagcagagatagctgagaacaatgcccggatccatgaagttcaagaaagaataagtgcagtggtctccagattccatggctctcagtcagatgttgatttgaagctcaattccttgaaggaagcccaatgtaaactggatctagagactgaagcacttgtgttgaaaaaaaatgaaattgataatttcatttctttaacagagcaaaaagattcagagttgagggaaattattggtgcttgtttctctgaagcaaaaacttgccaacaatcagttgaaataagaagaaagcttgcatcatcgattttgaagtcaagagaggatagaattgggttgctaaaaatggaggaggaaattttgcaagacattcaaatgcttaggcaaaaaattacagatgcaagaactactcttcaggaggtatcttcaaggagaacaagtatacaacaagaaatggattcatttaagcagaaattgagcttcattgacaaaaggggccctgaactagaggctgaaaagaaagttgcggctgctgcaagaaactttaaggaagcaggaaggatagctgcagagcagaactgactgctgcaactgaaatacatgataatgaagaagttgagatactacgcaaagaagctgaaactgccgattctaaagcaatggagctcaaaacatgctatgaccttcaggtggaggacaatgacttcatgtttcagcctgtagttcctatagcattcataacaaattcaacaggacagcacttggtagaaattgcttcttcatttggcctatctcctcagaagtgacattggacagtggatttgcacactaccaggtctgcccgttgcactgtgatccaagttgtacctgtcatattgaggggaagagctgtgctagtgtgaaactttctccttccaggatatcctcctcaacgacctctctttaaatcccagcatttggaatctactccaaactagagtaggaaggaagcatagggatgatcaaatgtacaacatacattttgcatgctctgtaggaatttagcttccctatgcattttttgtgtacattaagactgtaattcttttgttgtgccagttttgattcaattgcagtgacatgccatcatggaccagtatgtagacagatttttgtttcgagaaaaaggatgtaaccagaataaaatgtccaggaatggaactccttttgcattgcc

SEQ ID NO: 9124 - DNA, 1713 bp, Zea Mays
ctgaaaaatttagaaaaagtctagacgacgcgcttgtgtgcgtggccggacctgaaaagccggttcctcccccgaccccggcgccccaccgcagccgccggctcccaccgcccggcgcaccccgtcacctctccaccaaccggatacccggacggatccgctcccacctggatcctgatccggggaagtcaaaggggagatcgaagcttgagcagagggagccaaaatggtgaaggacacgcggtactacgacgtgctgggcgtggacccgtccgccaccgagtccgagatcaagaaggcgtactacgtcaaggcgaggctggtccaccccgataagaacccgaatgatccgcaggccgcggagaagttccagggaggggattattgatcctgcaacaatttttgcaattctgtttggtagtgagctttttgaggaatatattggtcaactggcaatggcatcaatggcttcacttgataattttggtgaagatgagcagattgatgcaagaaagctgcaagagagaatgcaggctgttcaaaaggatcgggaagaaaaacttgcagagacactgaaaaaccggctacacatctatgtgcaaggaaataaggcagaattcatccagcatgctgaagcagaggtgtccaaacttagaaatgcagcatatggagttgttatgttgaacactattggctatgtatattcaaggcaagctgcaaaagaacttgcaaagaaagtgatgtttttgggtgttccatttattgccgaatggtttagggacaaaggacattttatcaaatcccaagtaacagctgccacaggtgcaatagctcttatgcagttgcaagataacttgacgaagtatatgagtgctgagggccagtacacagaggaggaacttgaaatgtacatggaaaaccataagaaagtcatggttgattctctgtggaagcttaacgttgctgacatagaagccacattatcccatgtctgtcaaatggtacttcaagacagtagtgccagaaaggaggaattgcgcctccgtgctaaaggcttaaaaactttaggaagaattttccagggggctaaggtcaaccctagcgagggggaaacatcacaaacgaagaatatagacaacatggatggcaatgacggcagctcccctgactcgtccccaaatagagaggcacagttcactcctaatcagcctcctgtcccgagcccgtatgtggaggcgcctcatgttaacggagtctattgtccgttcccgatgccagcagctccgcctggcgcaaggagggatcgaatcccttgagtccagataaaacctgcttgtaaaatgggctctgtttaacattgcctataatactagatcatttgcatgatgaacctggagcagaggggaacacaggagtctgtcaggtgttctctgcacctccctgttattttggtcgcgtatgcttggtagcagccgtgtcttgtgtacaggtgtgttttgctattgttgatcgatgaagctgtaggtgtacatgttatgatgcccattatattattctgttgtcggcctgctgtattttagcataaacagtggatacatttgcatccatgggaaatgaaatgttctagtcattgtttcccatcattcaggagtttggtgttaatggggctaagttttttatgaaacaagtctgctcaggctttcgtacaaatgc

SEQ ID NO: 9125 - DNA, 1802 bp, Zea Mays
aaaattctccctgaaaaatttagaaaaagtctagacgacgcgcttgtgtgcgtggccggacctgaaaagccggttcctcccccgaccccggcgccccaccgcagccgccggctcccaccgcccggcgcaccccgtcacctctccaccaaccggatacccggacggatccgctcccacctggatcctgatccggggaagtcaaaggggagatcgaagcttgagcagagggagccaaaatggtgaaggacacgcggtactacgacgtgctgggcgtggacccgtccgccaccgagtccgagatcaagaaggcgtactacgtcaaggcgaggctggtccaccccgataagaacccgaatgatccgcaggccgcggagaagttccaggaactaggagaagcataccaagttctcagtgaccctacacagcgccaagcttatgactcacatgggaaagacggcatctcaacggaggggattattgatcctgcaacaatttttgcaattctgtttggtagtgagctttttgaggaatatattggtcaactggcaatggcatcaatggcttcacttgataattttggtgaagatgagcagattgatgcaagaaagctgcaagagagaatgcaggctgttcaaaaggatcgggaagaaaaacttgcagagacactgaaaaaccggctacacatctatgtgcaaggaaataaggcagaattcatccagcatgctgaagcagaggtgtccaaacttagaaatcatatggagttgttatgttgaacactattggctatgtatattcaaggcaagctgcaaaagaacttgcaaagaaagtgatgtttttgggtgttccatttattgccgaatggtttagggacaaaggacattttatcaaatcccaagtaacagctgccacaggtgcaatagctcttatgcagttgcaagataacttgacgaagtatatgagtgctgagggccagtacacagaggaggaacttgaaatgtacatggaaaaccataagaaagtcatggttgattctctgtggaagcttaacgttgctgacatagaagccacattatcccatgtctgtcaaatggtacttcaagacagtagtgccagaaaggaggaattgcgcctccgtgctaaaggcttaaaaactttaggaagaattttccagggggctaaggtcaaccctagcgagggggaaacatcacaaacgaagaatatagacaacatggatggcaatgacggcagctcccctgactcgtccccaaatagagaggcacagttcactcctaatcagcctcctgtcccgagcccgtatgtggaggcgcctcatgttaacggagtctattgtccgttcccgatgccagcagctccgcctggcgcaaggagggatcgaatcccttgagtccagataaaacctgcttgtaaaatgggctctgtttaacattgcctataatactagatcatttgcatgatgaacctggagcagaggggaacacaggagtctgtcaggtgttctctgcacctccctgttattttggtcgcgtatgcttggtagcagccgtgtcttgtgtacaggtgtgttttgctattgttgatcgatgaagctgtaggtgtacatgttatgatgcccattatattattctgttgtcggcctgctgtattttagcataaacagtggatacatttgcatccatgggaaatgaaatgttctagtcattgtttcccatcattcaggagtttggtgttaatggggctaagttttttatgaaacaagtctgctcaggctttcgtacaaatgc

SEQ ID NO: 9126 - DNA, 1437 bp, Zea Mays
atctcccacgaattgccaaaacaccaggggaacgctcccccgagccgcgaccccgggcaggtttccccacggacggggcatccgaccgcgacgacctcccgccgccgccgcgacgaatctctggcctcccactaccgccgcgacgtccagctttgttctactccaaggtccagctctggcttgccgtcctccgcccgtactccacgctactggatctctagcttgctcgtacgggatctctgtactccacgctactggcttgagccatggcaaagaatgtttctagggcagcttggaacactgtgtatgagaaaggtctggttgatgtgctccttgaacataaggacaacccaaagttcaaaagtcaaaatggttggactgctgagggatggaacaatatcacaaacaagttcaatgagaggcagtaagagattcaaggaaagaaagtggggtgggttggaatgattccctatgtatgatagtggctgagccagaactttgggaaaagctcatccttgctcacccaaaggtagcgaagtaccaaaagaagccatttccattgtactactctttggaagccctccacgaaggtagtgtggccacaggagatttgaatttcacatacactcagcaaatgccacctccttctttcattcctgttcgtcctcttaatgcccctcctggtggccctcttgctgcccctcctagtggccctcttgctacagctttcggttctgctactgctcattcgaacaggagtacctctgaacaaagccactctcccttgcaccccaacacaaacccattctccatggatttccaagaaatatcaaatgaagctcaatcaggacatgtagaaggtggaaatgggagaaagcgcaagcaaagccaaattggagcagccattgaaagttttgtggattttaagaggagcgccacatccaaaacgctcgaaggtattgaagaagtgtctatggaaaagtgtctagacaagttggatagaattgatgggttcacagatgaggatagatcatatgcaatggaggtctttgaatctgcgataaaccgagaggtgtttatgaagtcaaaaaaccacaatgctagattactttggttgaagaggaaaattagtgtgttaagtggaagcaacacatgaagcagatatggagaaggaagctggcatgaaactaaaacgcattaagttgacacgtggtgtgcatgttttagatgtcttattctactgccaaacttcctaatactctatttttatattataatgtctatctgtacgtgtgaatggagataatgatattatgtgatgtgatgatggatggattagcttcgttgaatattacatgatattatgtgatggtgatattaagtggacattgcagtgttgatacatgcttcatatttctggatttttagtgatgtttt

SEQ ID NO: 9127 - DNA, 1322 bp, Zea Mays
cggaagcctgcatgcggtcaatcaagtcagttcttgcaaatcaaactttgcgacacttcagccatggcaaagaatgtttctagggcagcttggaacactgtgtatgagaaaggtctggttgatgtgctccttgaacataaggacaacccaaagttcaaaagtcaaaatggttggactgctgagggatggaacaatatcacaaacaagttcaatgagaggtatcctcttgcccattactccaaacagcaaatgcaagacaaagataaggagcttaaatctcattacaaggcagtaagagattcaaggaaagaaagtggggtgggttggaatgattccctatgtatgatagtggctgagccagaactttgggaaaagctcatccttgctcacccaaaggtagcgaagtaccaaaagaagccatttccattgtactactctttggaagccctccacgaaggtagtgtggccacaggagatttgaatttcacatacactcagcaaatgccacctccttctttcattcctgttcgtcctcttaatgcccctcctggtggccctcttgctgcccctcctagtggccctcttgctacagctttcggttctgctactgctcattcgaacaggagtacctctgaacaaagccactctcccttgcaccccaacacaaacccattctccatggatttccaagaaatatcaaatgaagctcaatcaggacatgtagaaggtggaaatgggagaaagcgcaagcaaagccaaattggagcagccattgaaagttttgtggattttaagaggagcgccacatccaaaacgctcgaaggtattgaagaagtgtctatggaaaagtgtctagacaagttggatagaattgatgggttcacagatgaggatagatcatatgcaatggaggtctttgaatctgcgataaaccgagaggtgtttatgaagtcaaaaaaccacaatgctagattactttggttgaagaggaaaattagtgcttgtagagcgctcactactatcatgtgatgtgaggtgaatgtggcgatgaagagataggcttacaggaattcactgaataaaacaatacgcttgttcttgcacaagaatgccaatatgtttcttatcttattgtaatgaaaaggtcgttttgatattattgagctgttcaagtttttgaaaaggaactgtatgagcttaagaaatgattgtctaggttacattgaaacatagaactgtatggctggtacaaacgaaatgtgtggctggtacaagtttctaaagtcttgttcctggtgctgacaaattaatgaagtatttgc

SEQ ID NO: 9128 - DNA, 759 bp, Zea Mays
atggcgtcagagagcgttaggcttacttccactccactcgctgtcgctgggtttattatccacgaaaggagaaggagcggtggagaagaggagaaggtaccgcagccgcacaggcacagctcctgcggcatggcgcagtggagcagcgtggccgcgagcctggaccggtggattgggcttgggcttgggccatgccgctgcggctcaccgccggcaccgtcccgggcggcgatgccacggcgcgggcgtgcgaggaggaacggcggcaaggtcgtcggatgcgcgtccgtcccgcgggagcaggccgagctgccgccgcttgccgtcgacggcaccgagaaggcgtaggcgggtgcggagcgtgcggcggcgcggggtgggtgctctgcgacttctgccagggcaagaagaacaacgtcaagtcggagaccggcagccgggtgtaccgccgctgccccacctgcaaggctgcgggcttcatcctgtgcccaagatgcagggtgtacaagtgcgtcaccttcccagagagcactgaatcgtgagcgtgtcatggtggtcgcacgtgtttgttccaaatccatgtatgagtctgcagaagagatctgtgtgaattactactattatcttctgaagatatttaaaggagaattattatattctgaccgtgtttacagtagaacacctgtctgtgcacgtatacagttttaatttcacacgcagagatgctcgctcttccttcagacatgcttggtgcctgtt

SEQ ID NO: 9129 - DNA, 2572 bp, Zea Mays
aggctctaggttctttgaacattttaagttgttcactccaagtgtgaaaccaggtccctatttggacctgaagtgaagcattttaaagttgaaggacccagattctcacttcgagagtttatgaacctagatgagaatctaaggtaagttaggacccaagcgcatcttttgttgtttttttaatgtaacaggcacatcttttgtaatgattatggaaatacagaatatgttatgcaagactttctatttctcagttctgtttgtacatatcattttgtttttcatcaacatgtgatgcttggaagttggaagtctccaattacttcaaaagctgcttggctttaagattagctgatgaataaagtgttagatgtcttcagtggtactaattacatgtgccagttgttgatggcttcagtctttgtaaaatgagtgccatttgtgagatgtccttctgatttgagtgcatgtgcagtgttagtattacagttatgaaaacacctgcagtactagagtgagcatttgaaacatgtagtgtttagtactgtcacaagtatctgtgggatccattccttttagtttatattctactgatcaatatttttcattgctagtctctgtctccatacataacttttttcccttctattattgcaaaaaagcatcagagttctatcacaatatccaccattcacttcatgtcattgttagttactcatccctgtctcttatttcaaactccactctgtaaacaatacaaaacagtgttttgcacagccatatgcacgatttggtggtcatagccttagaggggtatattttcgtaatcgctatgtcattccgagggggaaagtagctatgatatgaaacagtgacctcttttatgtacttagtcatttctgttagtctgctaatgatactgtggggctggtgatgcagcgcaagcaacttaaaacttagtttctcgtgtgattcttgatatcatctagcttaatgtgagcaactacatctatcattattgattattgcttccagtaacttctctctccaaacatgtaggctctggaagttatggaacttgaccagaaaatagatctagttcatgagcttgatggtcatattatgcgatgtgtccgtgatcaaaatggaaatcacgttatacagaagtgcattgagtgtgtccccacagaacatattggttttgtagtgtctgcttttcagggacaagttactagcctttcaatgcatccatatggctgccgtgtaattcagagaatcttggagcactgcggtggtaactcacaaggccagtgcataatagacgagatattacagtgggtgtgcatccttgcgcaggatcagtatggcaactatgttacacagcatgttctagaaagaggaaaagctcatgagaggagccaaattattactaaattggccgggcaggttgttaccatgagccaaaataaatatgcatcaaatgtgatagagaagtgttttcaacatggtgatattgcggagcgggatcttctgatcagacggattgtggagcagacagagggcaacaacaatttattggtctgtttggtagtgtagtaaaagtgttccctccattatcccttcctctctttgccaaacgggtcggggttctggaaggtagggctaggacatggggacctgatctcagttcggtacagccaatcagataacaccatgagtatctcagttctgctattccagctttctgggagctgcgaatcctatggattaccaagacatgggatctctgtaaacttatttcttcctgtgttgatgttagtttatatttcctaatcaccttttatattcaatcaggcaatgatgaaggaccagtatgctaattacgtggtccagaagatacttgaaacttgcaacgaggatcagcgggagcttctgctcagccgcgtaaaggatcatatgcaagcattgaggaagtacacatacggcaagcacatcgtaagccgagtcgagcagctctgtggcgacggaactgccgagtcaggttcttgaaacgaaccgccgcctaattcttcataggctggagggtgtcctgctcttttgctcattccgtcagtgacgaagaaagcaaaacggatcaagtctaactctggcgcttcagaacagactaacaaagctgtcgtcgaagattgtataggtgtgactctgttcagggatagtcttcaggttctagaacagaagggtagtggtgtgcatcagtgtatctgtttactggataatagtggttggttaggtgtgtgcagaaaaagtttagtgctatgctttgtatgtgatacatattaactatgccttggaatgttcatatgttgtcctgattacgtgtgatatctctcgttcagttcaagttgcgttttctacatggccatgggaccatctgccgatttgatgaaaaaggaaaggttgtgcacctttgtaagcgggcatggagatgagctgcgctattttttttttttacaaaatgtctgctgggattgaactgtctattttataaaaatatcatattttcttttaatgt

SEQ ID NO: 9130 - DNA, 1671 bp, Zea Mays
aggctctaggttctttgaacattttaagttgttcactccaagtgtgaaaccaggtccctatttggacctgaagtgaagcattttaaagttgaaggacccagattctcacttcgagagtttatgaacctagatgagaatctaaggctctggaagttatggaacttgaccagaaaatagatctagttcatgagcttgatggtcatattatgcgatgtgtccgtgatcaaaatggaaatcacgttatacagaagtgcattgagtgtgtccccacagaacatattggttttgtagtgtctgcttttcagggacaagttactagcctttcaatgcatccatatggctgccgtgtaattcagagaatcttggagcactgcggtggtaactcacaaggccagtgcataatagacgagatattacagtgggtgtgcatccttgcgcaggatcagtatggcaactatgttacacagcatgttctagaaagaggaaaagctcatgagaggagccaaattattactaaattggccgggcaggttgttaccatgagccaaaataaatatgcatcaaatgtgatagagaagtgttttcaacatggtgatattgcggagcgggatcttctgatcagacggattgtggagcagacagagggcaacaacaatttattggtctgtttggtagtgtagtaaaagtgttccctccattatcccttcctctctttgccaaacgggtcggggttctggaaggtagggctaggacatggggacctgatctcagttcggtacagccaatcagataacaccatgagtatctcagttctgctattccagctttctgggagctgcgaatcctatggattaccaagacatgggatctctgtaaacttatttcttcctgtgttgatgttagtttatatttcctaatcaccttttatattcaatcaggcaatgatgaaggaccagtatgctaattacgtggtccagaagatacttgaaacttgcaacgaggatcagcgggagcttctgctcagccgcgtaaaggatcatatgcaagcattgaggaagtacacatacggcaagcacatcgtaagccgagtcgagcagctctgtggcgacgttgtcaccctttcaggaactgccgagtcaggttcttgaaacgaaccgccgcctaattcttcataggctggagggtgtcctgctcttttgctcattccgtcagtgacgaagaaagcaaaacggatcaagtctaactctggcgcttcagaacagactaacaaagctgtcgtcgaagattgtataggtgtgactctgttcagggatagtcttcaggttctagaacagaagggtagtggtgtgcatcagtgtatctgtttactggataatagtggttggttaggtgtgtgcagaaaaagtttagtgctatgctttgtatgtgatacatattaactatgccttggaatgttcatatgttgtcctgattacgtgtgatatctctcgttcagttcaagttgcgttttctacatggccatgggaccatctgccgatttgatgaaaaaggaaaggttgtgcacctttgtaagcgggcatggagatgagctgcgctattttttttttttacaaaatgtctgctgggattgaactgtctattttataaaaatatcatattttcttttaatgt

SEQ ID NO: 9131 - DNA, 1779 bp, Zea Mays
tactcttcaatctttgtttaatataattaaatcagatgtgactaattcgtaataagagcaaagcacacctaggttcttaaaacttttcaggattctcacctaagttcacaaacttttgaagtgaggctctaggttctttgaacattttaagttgttcactccaagtgtgaaaccaggtccctatttggacctgaagtgaagcattttaaagttgaaggacccagattctcacttcgagagtttatgaacctagatgagaatctaaggctctggaagttatggaacttgaccagaaaatagatctagttcatgagcttgatggtcatattatgcgatgtgtccgtgatcaaaatggaaatcacgttatacagaagtgcattgagtgtgtccccacagaacatattggttttgtagtgtctgcttttcagggacaagttactagcctttcaatgcatccatatggctgccgtgtaattcagagaatcttggagcactgcggtggtaactcacaaggccagtgcataatagacgagatattacagtgggtgtgcatccttgcgcaggatcagtatggcaactatgttacacagcatgttctagaaagaggaaaagctcatgagaggagccaaattattactaaattggccgggcaggttgttaccatgagccaaaataaatatgcatcaaatgtgatagagaagtgttttcaacatggtgatattgcggagcgggatcttctgatcagacggattgtggagcagacagagggcaacaacaatttattggtctgtttggtagtgtagtaaaagtgttccctccattatcccttcctctctttgccaaacgggtcggggttctggaaggtagggctaggacatggggacctgatctcagttcggtacagccaatcagataacaccatgagtatctcagttctgctattccagctttctgggagctgcgaatcctatggattaccaagacatgggatctctgtaaacttatttcttcctgtgttgatgttagtttatatttcctaatcaccttttatattcaatcaggcaatgatgaaggaccagtatgctaattacgtggtccagaagatacttgaaacttgcaacgaggatcagcgggagcttctgctcagccgcgtaaaggatcatatgcaagcattgaggaagtacacatacggcaagcacatcgtaagccgagtcgagcagctctgtggcgacggaactgccgagtcaggttcttgaaacgaaccgccgcctaattcttcataggctggagggtgtcctgctcttttgctcattccgtcagtgacgaagaaagcaaaacggatcaagtctaactctggcgcttcagaacagactaacaaagctgtcgtcgaagattgtataggtgtgactctgttcagggatagtcttcaggttctagaacagaagggtagtggtgtgcatcagtgtatctgtttactggataatagtggttggttaggtgtgtgcagaaaaagtttagtgctatgctttgtatgtgatacatattaactatgccttggaatgttcatatgttgtcctgattacgtgtgatatctctcgttcagttcaagttgcgttttctacatggccatgggaccatctgccgatttgatgaaaaaggaaaggttgtgcacctttgtaagcgggcatggagatgagctgcgctattttttttttttacaaaatgtctgctgggattgaactgtctattttataaaaatatcatattttcttttaatgt

SEQ ID NO: 9132 - DNA, 3847 bp, Zea Mays
gtcactggtgcttggtcgcctagggtttcgggccagccggctggcttggacgcgccaagtctaatggctactgagagtgctttccgattgattggtgggacgggggctagggactggagtaagggatttggtgcatttggctcttcagcaggtgccttatcaggggaagacttgggatttgtggataatgacactggggtttatgggggctggaacaaatctgttccaaatcgtagtggaagcgcaccgcctagcatggaaggatctcttgctgctcttggccatctcattgatcagcagagtgggagctttgaagctagtttgacaaccttggataacataactgacagttccaaatctgaggagcaactacgtgctgatccagcatattttgagtattatggctccaaggtgaatctgaatccaaggctccctccgccacttatttcaagggagagtcgccgattaatgaaccgtgttggcaaggctaaagagtggaggatggtctcccaagataacagcagcaaaggctcaatatacgttcctcgatctatgttgtcaactcacaaagaagaacctgaggatgataaatctccaagattggattcaagttcagtggaggatgcccagattgtctccagtgcatccaactttcagagccaggattttatgctggagaggtttcaacagagtgttgcttcttcgcctgatagttcatcttctaatccttcaaatagcaacactggtgattctatgcctgtatattctgacataaatttgttaaagagtttgtcatttgatgctttgaagcaatcggatttgaactcttggacaccaaaaggcccactgaaaagtaatgttaacaatgacctttcatcgccacccctttccagttcatcatatcctggtagcaaaactggtacgcaaacttttgagcaagaaaaggctgctgctgacaccaaacatggaaatgttgtgcttggcagtggcgcagctgttactgaagttgataatgtggactccattatgaagaatttgaagttaagtttggatgtccatacatcctcacctgccaagcagaggtggcaggacaatgtcttgcagcagtatggttcctttttaccagcccaaggtgatcctattcaattgactactcaaggaccccatcctcctcatgtaccttttgttgataacttgtctcatgctcagctcaagttgcctgacatccaccaaaatttaccacaacctagtatgacaacacctttctatacaccaaattcttttgggaacccttattatcagaatttgcaccctgctaatgcttttccaacctcaattggaactgggggttatgctgtaagtggttctattttgccaccgtttatggctggctatgctccccaaggtcctcttgctacacctcttgacagttctatgactccaagctttagtggcaggccatctggatttcttccagcagggaatcttacagggggaacagattttatgcagtcatgtaaagtatacggacaatttgagcctggtatgcagccatccattcccgatccgaacttcattcatttctttcagcatccctctttatttcagtatactggaggaaatcaatacaatacaatgggtccaagatttactgttgttgggaatttagctgaaagctttgattcacaaaacacgatacctcaagctgcatctgcatatccatctgatcagaggcttccactgccaataactggctttcctaattctcctacagccagaagaggagggactgttccaaattatcaaggcatttcatcctacattggagtgccaatgacttatcctactagtccagtgtttcagggacaaacattgcctggagtattgcctcctgttaggagaaacgactctgctggatttctgcccccctcaagaaacatcactggtagccctggaattcaagggcagcgagcaagacagaagtttgatgaatcaaagacctgctctttcttagaagagttgaagtccaacagagcgcgcatggttgagctttctgacatcacaggccgtgtagttgaatacagtgctgaccaacatggtagccgattcatccagcagaagttggaaaactgcaccgccgaagagaagacatctgtgtttgccgagattcttcctcatgcttcagcattaatgactgacgtttttgggaattatgtgatccaaaagttttttgaacatggaactcgtgagcaaaggagggatcttgccaccaagcttgttggtcacgttttgcctttgagtcttcagatgtatggctgccgtgtaatccagaaggctctggaagttatggaacttgaccagaaaatagatctagttcatgagcttgatggtcatattatgcgatgtgtccgtgatcaaaatggaaatcacgttatacagaagtgcattgagtgtgtccccacagaacatattggttttgtagtgtctgcttttcagggacaagttactagcctttcaatgcatccatatggctgccgtgtaattcagagaatcttggagcactgcggtggtaactcacaaggccagtgcataatagacgagatattacagtgggtgtgcatccttgcgcaggatcagtatggcaactatgttacacagcatgttctagaaagaggaaaagctcatgagaggagccaaattattactaaattggccgggcaggttgttaccatgagccaaaataaatatgcatcaaatgtgatagagaagtgttttcaacatggtgatattgcggagcgggatcttctgatcagacggattgtggagcagacagagggcaacaacaatttattggtctgtttggtagtgtagtaaaagtgttccctccattatcccttcctctctttgccaaacgggtcggggttctggaaggtagggctaggacatggggacctgatctcagttcggtacagccaatcagataacaccatgagtatctcagttctgctattccagctttctgggagctgcgaatcctatggattaccaagacatgggatctctgtaaacttatttcttcctgtgttgatgttagtttatatttcctaatcaccttttatattcaatcaggcaatgatgaaggaccagtatgctaattacgtggtccagaagatacttgaaacttgcaacgaggatcagcgggagcttctgctcagccgcgtaaaggatcatatgcaagcattgaggaagtacacatacggcaagcacatcgtaagccgagtcgagcagctctgtggcgacggaactgccgagtcaggttcttgaaacgaaccgccgcctaattcttcataggctggagggtgtcctgctcttttgctcattccgtcagtgacgaagaaagcaaaacggatcaagtctaactctggcgcttcagaacagactaacaaagctgtcgtcgaagattgtataggtgtgactctgttcagggatagtcttcaggttctagaacagaagggtagtggtgtgcatcagtgtatctgtttactggataatagtggttggttaggtgtgtgcagaaaaagtttagtgctatgctttgtatgtgatacatattaactatgccttggaatgttcatatgttgtcctgattacgtgtgatatctctcgttcagttcaagttgcgttttctacatggccatgggaccatctgccgatttgatgaaaaaggaaaggttgtgcacctttgtaagcgggcatggagatgagctgcgctattttttttttttacaaaatgtctgctgggattgaactgtctattttataaaaatatcatattttcttttaatgt

SEQ ID NO: 9133 - DNA, 4765 bp, Zea Mays
tcctggcagagagatggcggataaggccaaggtggttggtgcccatggagaaagggatgatgtttttttgtggggagagcttcagcacgatgactgcagatcaggtgaccaactaggaggtgtcaaattgctgagtctaatggctactgagagtgctttccgattgattggtgggacgggggctagggactggagtaagggatttggtgcatttggctcttcagcaggtgccttatcaggggaagacttgggatttgtggataatgacactggggtttatgggggctggaacaaatctgttccaaatcgtagtggaagcgcaccgcctagcatggaaggatctcttgctgctcttggccatctcattgatcagcagagtgggagctttgaagctagtttgacaaccttggataacataactgacagttccaaatctgaggagcaactacgtgctgatccagcatattttgagtattatggctccaaggtgaatctgaatccaaggctccctccgccacttatttcaagggagagtcgccgattaatgaaccgtgttggcaaggctaaagagtggaggatggtctcccaagataacagcagcaaaggctcaatatacgttcctcgatctatgttgtcaactcacaaagaagaacctgaggatgataaatctccaagattggattcaagttcagtggaggatgcccagattgtctccagtgcatccaactttcagagccaggattttatgctggagaggtttcaacagagtgttgcttcttcgcctgatagttcatcttctaatccttcaaatagcaacactggtgattctatgcctgtatattctgacataaatttgttaaagagtttgtcatttgatgctttgaagcaatcggatttgaactcttggacaccaaaaggcccactgaaaagtaatgttaacaatgacctttcatcgccacccctttccagttcatcatatcctggtagcaaaactggtacgcaaacttttgagcaagaaaaggctgctgctgacaccaaacatggaaatgttgtgcttggcagtggcgcagctgttactgaagttgataatgtggactccattatgaagaatttgaagttaagtttggatgtccatacatcctcacctgccaagcagaggtggcaggacaatgtcttgcagcagtatggttcctttttaccagcccaaggtgatcctattcaattgactactcaaggaccccatcctcctcatgtaccttttgttgataacttgtctcatgctcagctcaagttgcctgacatccaccaaaatttaccacaacctagtatgacaacacctttctatacaccaaattcttttgggaacccttattatcagaatttgcaccctgctaatgcttttccaacctcaattggaactgggggttatgctgtaagtggttctattttgccaccgtttatggctggctatgctccccaaggtcctcttgctacacctcttgacagttctatgactccaagctttagtggcaggccatctggatttcttccagcagggaatcttacagggggaacagattttatgcagtcatgtaaagtatacggacaatttgagcctggtatgcagccatccattcccgatccgaacttcattcatttctttcagcatccctctttatttcagtatactggaggaaatcaatacaatacaatgggtccaagatttactgttgttgggaatttagctgaaagctttgattcacaaaacacgatacctcaagctgcatctgcatatccatctgatcagaggcttccactgccaataactggctttcctaattctcctacagccagaagaggagggactgttccaaattatcaaggcatttcatcctacattggagtgccaatgacttatcctactagtccagtgtttcagggacaaacattgcctggagtattgcctcctgttaggagaaacgactctgctggatttctgcccccctcaagaaacatcactggtagccctggaattcaagggcagcgagcaagacagaagtttgatgaatcaaagacctgctctttcttagaagagttgaagtccaacagagcgcgcatggttgagctttctgacatcacaggccgtgtagttgaatacagtgctgaccaacatggtagccgattcatccagcagaagttggaaaactgcaccgccgaagagaagacatctgtgtttgccgagattcttcctcatgcttcagcattaatgactgacgtttttgggaattatgtgatccaaaagttttttgaacatggaactcgtgagcaaaggagggatcttgccaccaagcttgttggtcacgttttgcctttgagtcttcagatgtatggctgccgtgtaatccagaagcctcgcaaaccctatcgcctatccctctcgcggtcttgcctcggtctctggcggcggcaccgccgttttacactcctcctccttcgacaacccgtcgcagtagcgtccgtctctggtgtccggctgtccggctctggactcccgacctcgacatcaggatctgcgcctcccgaccggtatgtgggggctctgaagaaggtgcagaaggatctgggcgcgtcggtgttcgagccgctggtgcaggcgtacgccgccgtcgggaagttccctgggatgtggcagcggctgaagatcgagaacgtggaggtcggggaggggacggcccagctgcttgactctatctgcgccgatcaatagcccaagcacgtcctagaggcggcgacagaaatgagttgctggcaagtttgacaaaacaagcagacatggtcttggtggctcagcaggaattaatcacccaaaaaaacagttacaagttgggttcatgcatgtcttacgtcaaggattgtactccccgttaaactgttggttcgggccagtggccggcccggtacgttcaggcccaccgggcgaacgggccggcccggcacgatttatccctgtgcgtgccgggtttgggcatgtcgctaggcacgtgggccagcacgacccggcccgaagcatcaacgggccgtgcctggcccggccctatccgtaccgggccgaaacgggttcggaccgggtccgtgccgggtggcccgtttggacatctataggtccctatttggacctgaagtgaagcattttaaagttgaaggacccagattctcacttcgagagtttatgaacctagatgagaatctaaggctctggaagttatggaacttgaccagaaaatagatctagttcatgagcttgatggtcatattatgcgatgtgtccgtgatcaaaatggaaatcacgttatacagaagtgcattgagtgtgtccccacagaacatattggttttgtagtgtctgcttttcagggacaagttactagcctttcaatgcatccatatggctgccgtgtaattcagagaatcttggagcactgcggtggtaactcacaaggccagtgcataatagacgagatattacagtgggtgtgcatccttgcgcaggatcagtatggcaactatgttacacagcatgttctagaaagaggaaaagctcatgagaggagccaaattattactaaattggccgggcaggttgttaccatgagccaaaataaatatgcatcaaatgtgatagagaagtgttttcaacatggtgatattgcggagcgggatcttctgatcagacggattgtggagcagacagagggcaacaacaatttattggtctgtttggtagtgtagtaaaagtgttccctccattatcccttcctctctttgccaaacgggtcggggttctggaaggtagggctaggacatggggacctgatctcagttcggtacagccaatcagataacaccatgagtatctcagttctgctattccagctttctgggagctgcgaatcctatggattaccaagacatgggatctctgtaaacttatttcttcctgtgttgatgttagtttatatttcctaatcaccttttatattcaatcaggcaatgatgaaggaccagtatgctaattacgtggtccagaagatacttgaaacttgcaacgaggatcagcgggagcttctgctcagccgcgtaaaggatcatatgcaagcattgaggaagtacacatacggcaagcacatcgtaagccgagtcgagcagctctgtggcgacggaactgccgagtcaggttcttgaaacgaaccgccgcctaattcttcataggctggagggtgtcctgctcttttgctcattccgtcagtgacgaagaaagcaaaacggatcaagtctaactctggcgcttcagaacagactaacaaagctgtcgtcgaagattgtataggtgtgactctgttcagggatagtcttcaggttctagaacagaagggtagtggtgtgcatcagtgtatctgtttactggataatagtggttggttaggtgtgtgcagaaaaagtttagtgctatgctttgtatgtgatacatattaactatgccttggaatgttcatatgttgtcctgattacgtgtgatatctctcgttcagttcaagttgcgttttctacatggccatgggaccatctgccgatttgatgaaaaaggaaaggttgtgcacctttgtaagcgggcatggagatgagctgcgctattttttttttttacaaaatgtctgctgggattgaactgtctattttataaaaatatcatattttcttttaatgt

SEQ ID NO: 9134 - DNA, 4038 bp, Zea Mays
gtcaaacatgcctgcacagccattttgaggcttctataagtgaccgatccgccctctggtccatcgtcgtctgcagcaagtagaaaaaagggaaaaaaagtaaagcggtggtggcggtggagcaaaggaaacctcctggcagagagatggcggataaggccaaggtggttggtgcccatggagaaagggatgatgtttttttgtggggagagcttcagcacgatgactgcagatcaggtgaccaactaggaggtgtcaaattgctgagtctaatggctactgagagtgctttccgattgattggtgggacgggggctagggactggagtaagggatttggtgcatttggctcttcagcaggtgccttatcaggggaagacttgggatttgtggataatgacactggggtttatgggggctggaacaaatctgttccaaatcgtagtggaagcgcaccgcctagcatggaaggatctcttgctgctcttggccatctcattgatcagcagagtgggagctttgaagctagtttgacaaccttggataacataactgacagttccaaatctgaggagcaactacgtgctgatccagcatattttgagtattatggctccaaggtgaatctgaatccaaggctccctccgccacttatttcaagggagagtcgccgattaatgaaccgtgttggcaaggctaaagagtggaggatggtctcccaagataacagcagcaaaggctcaatatacgttcctcgatctatgttgtcaactcacaaagaagaacctgaggatgataaatctccaagattggattcaagttcagtggaggatgcccagattgtctccagtgcatccaactttcagagccaggattttatgctggagaggtttcaacagagtgttgcttcttcgcctgatagttcatcttctaatccttcaaatagcaacactggtgattctatgcctgtatattctgacataaatttgttaaagagtttgtcatttgatgctttgaagcaatcggatttgaactcttggacaccaaaaggcccactgaaaagtaatgttaacaatgacctttcatcgccacccctttccagttcatcatatcctggtagcaaaactggtacgcaaacttttgagcaagaaaaggctgctgctgacaccaaacatggaaatgttgtgcttggcagtggcgcagctgttactgaagttgataatgtggactccattatgaagaatttgaagttaagtttggatgtccatacatcctcacctgccaagcagaggtggcaggacaatgtcttgcagcagtatggttcctttttaccagcccaaggtgatcctattcaattgactactcaaggaccccatcctcctcatgtaccttttgttgataacttgtctcatgctcagctcaagttgcctgacatccaccaaaatttaccacaacctagtatgacaacacctttctatacaccaaattcttttgggaacccttattatcagaatttgcaccctgctaatgcttttccaacctcaattggaactgggggttatgctgtaagtggttctattttgccaccgtttatggctggctatgctccccaaggtcctcttgctacacctcttgacagttctatgactccaagctttagtggcaggccatctggatttcttccagcagggaatcttacagggggaacagattttatgcagtcatgtaaagtatacggacaatttgagcctggtatgcagccatccattcccgatccgaacttcattcatttctttcagcatccctctttatttcagtatactggaggaaatcaatacaatacaatgggtccaagatttactgttgttgggaatttagctgaaagctttgattcacaaaacacgatacctcaagctgcatctgcatatccatctgatcagaggcttccactgccaataactggctttcctaattctcctacagccagaagaggagggactgttccaaattatcaaggcatttcatcctacattggagtgccaatgacttatcctactagtccagtgtttcagggacaaacattgcctggagtattgcctcctgttaggagaaacgactctgctggatttctgcccccctcaagaaacatcactggtagccctggaattcaagggcagcgagcaagacagaagtttgatgaatcaaagacctgctctttcttagaagagttgaagtccaacagagcgcgcatggttgagctttctgacatcacaggccgtgtagttgaatacagccgattcatccagcagaagttggaaaactgcaccgccgaagagaagacatctgtgtttgccgagattcttcctcatgcttcagcattaatgactgacgtttttgggaattatgtgatccaaaagttttttgaacatggaactcgtgagcaaaggagggatcttgccaccaagcttgttggtcacgttttgcctttgagtcttcagatgtatggctgccgtgtaatccagaaggctctggaagttatggaacttgaccagaaaatagatctagttcatgagcttgatggtcatattatgcgatgtgtccgtgatcaaaatggaaatcacgttatacagaagtgcattgagtgtgtccccacagaacatattggttttgtagtgtctgcttttcagggacaagttactagcctttcaatgcatccatatggctgccgtgtaattcagagaatcttggagcactgcggtggtaactcacaaggccagtgcataatagacgagatattacagtgggtgtgcatccttgcgcaggatcagtatggcaactatgttacacagcatgttctagaaagaggaaaagctcatgagaggagccaaattattactaaattggccgggcaggttgttaccatgagccaaaataaatatgcatcaaatgtgatagagaagtgttttcaacatggtgatattgcggagcgggatcttctgatcagacggattgtggagcagacagagggcaacaacaatttattggtctgtttggtagtgtagtaaaagtgttccctccattatcccttcctctctttgccaaacgggtcggggttctggaaggtagggctaggacatggggacctgatctcagttcggtacagccaatcagataacaccatgagtatctcagttctgctattccagctttctgggagctgcgaatcctatggattaccaagacatgggatctctgtaaacttatttcttcctgtgttgatgttagtttatatttcctaatcaccttttatattcaatcaggcaatgatgaaggaccagtatgctaattacgtggtccagaagatacttgaaacttgcaacgaggatcagcgggagcttctgctcagccgcgtaaaggatcatatgcaagcattgaggaagtacacatacggcaagcacatcgtaagccgagtcgagcagctctgtggcgacggaactgccgagtcaggttcttgaaacgaaccgccgcctaattcttcataggctggagggtgtcctgctcttttgctcattccgtcagtgacgaagaaagcaaaacggatcaagtctaactctggcgcttcagaacagactaacaaagctgtcgtcgaagattgtataggtgtgactctgttcagggatagtcttcaggttctagaacagaagggtagtggtgtgcatcagtgtatctgtttactggataatagtggttggttaggtgtgtgcagaaaaagtttagtgctatgctttgtatgtgatacatattaactatgccttggaatgttcatatgttgtcctgattacgtgtgatatctctcgttcagttcaagttgcgttttctacatggccatgggaccatctgccgatttgatgaaaaaggaaaggttgtgcacctttgtaagcgggcatggagatgagctgcgctattttttttttttacaaaatgtctgctgggattgaactgtctattttataaaaatatcatattttcttttaatgt

SEQ ID NO: 9135 - DNA, 4205 bp, Zea Mays
ggaacactttttatttttcaaaggaaaggttaaattgcaccccaatctctgcatacgcaactgacgctttatgatcctgtctattccatccctgccgcacatcgcctcttgcaccaaatccccaaagcacgctgctgtggtcatatccagtcaaacatgcctgcacagccattttgaggcttctataagtgaccgatccgccctctggtccatcgtcgtctgcagcaagtagaaaaaagggaaaaaaagtaaagcggtggtggcggtggagcaaaggaaacctcctggcagagagatggcggataaggccaaggtggttggtgcccatggagaaagggatgatgtttttttgtggggagagcttcagcacgatgactgcagatcaggtgaccaactaggaggtgtcaaattgctgagtctaatggctactgagagtgctttccgattgattggtgggacgggggctagggactggagtaagggatttggtgcatttggctcttcagcaggtgccttatcaggggaagacttgggatttgtggataatgacactggggtttatgggggctggaacaaatctgttccaaatcgtagtggaagcgcaccgcctagcatggaaggatctcttgctgctcttggccatctcattgatcagcagagtgggagctttgaagctagtttgacaaccttggataacataactgacagttccaaatctgaggagcaactacgtgctgatccagcatattttgagtattatggctccaaggtgaatctgaatccaaggctccctccgccacttatttcaagggagagtcgccgattaatgaaccgtgttggcaaggctaaagagtggaggatggtctcccaagataacagcagcaaaggctcaatatacgttcctcgatctatgttgtcaactcacaaagaagaacctgaggatgataaatctccaagattggattcaagttcagtggaggatgcccagattgtctccagtgcatccaactttcagagccaggattttatgctggagaggtttcaacagagtgttgcttcttcgcctgatagttcatcttctaatccttcaaatagcaacactggtgattctatgcctgtatattctgacataaatttgttaaagagtttgtcatttgatgctttgaagcaatcggatttgaactcttggacaccaaaaggcccactgaaaagtaatgttaacaatgacctttcatcgccacccctttccagttcatcatatcctggtagcaaaactggtacgcaaacttttgagcaagaaaaggctgctgctgacaccaaacatggaaatgttgtgcttggcagtggcgcagctgttactgaagttgataatgtggactccattatgaagaatttgaagttaagtttggatgtccatacatcctcacctgccaagcagaggtggcaggacaatgtcttgcagcagtatggttcctttttaccagcccaaggtgatcctattcaattgactactcaaggaccccatcctcctcatgtaccttttgttgataacttgtctcatgctcagctcaagttgcctgacatccaccaaaatttaccacaacctagtatgacaacacctttctatacaccaaattcttttgggaacccttattatcagaatttgcaccctgctaatgcttttccaacctcaattggaactgggggttatgctgtaagtggttctattttgccaccgtttatggctggctatgctccccaaggtcctcttgctacacctcttgacagttctatgactccaagctttagtggcaggccatctggatttcttccagcagggaatcttacagggggaacagattttatgcagtcatgtaaagtatacggacaatttgagcctggtatgcagccatccattcccgatccgaacttcattcatttctttcagcatccctctttatttcagtatactggaggaaatcaatacaatacaatgggtccaagatttactgttgttgggaatttagctgaaagctttgattcacaaaacacgatacctcaagctgcatctgcatatccatctgatcagaggcttccactgccaataactggctttcctaattctcctacagccagaagaggagggactgttccaaattatcaaggcatttcatcctacattggagtgccaatgacttatcctactagtccagtgtttcagggacaaacattgcctggagtattgcctcctgttaggagaaacgactctgctggatttctgcccccctcaagaaacatcactggtagccctggaattcaagggcagcgagcaagacagaagtttgatgaatcaaagacctgctctttcttagaagagttgaagtccaacagagcgcgcatggttgagctttctgacatcacaggccgtgtagttgaatacagtgctgaccaacatggtagccgattcatccagcagaagttggaaaactgcaccgccgaagagaagacatctgtgtttgccgagattcttcctcatgcttcagcattaatgactgacgtttttgggaattatgtgatccaaaagttttttgaacatggaactcgtgagcaaaggagggatcttgccaccaagcttgttggtcacgttttgcctttgagtcttcagatgtatggctgccgtgtaatccagaaggctctggaagttatggaacttgaccagaaaatagatctagttcatgagcttgatggtcatattatgcgatgtgtccgtgatcaaaatggaaatcacgttatacagaagtgcattgagtgtgtccccacagaacatattggttttgtagtgtctgcttttcagggacaagttactagcctttcaatgcatccatatggctgccgtgtaattcagagaatcttggagcactgcggtggtaactcacaaggccagtgcataatagacgagatattacagtgggtgtgcatccttgcgcaggatcagtatggcaactatgttacacagcatgttctagaaagaggaaaagctcatgagaggagccaaattattactaaattggccgggcaggttgttaccatgagccaaaataaatatgcatcaaatgtgatagagaagtgttttcaacatggtgatattgcggagcgggatcttctgatcagacggattgtggagcagacagagggcaacaacaatttattggtctgtttggtagtgtagtaaaagtgttccctccattatcccttcctctctttgccaaacgggtcggggttctggaaggtagggctaggacatggggacctgatctcagttcggtacagccaatcagataacaccatgagtatctcagttctgctattccagctttctgggagctgcgaatcctatggattaccaagacatgggatctctgtaaacttatttcttcctgtgttgatgttagtttatatttcctaatcaccttttatattcaatcaggcaatgatgaaggaccagtatgctaattacgtggtccagaagatacttgaaacttgcaacgaggatcagcgggagcttctgctcagccgcgtaaaggatcatatgcaagcattgaggaagtacacatacggcaagcacatcgtaagccgagtcgagcagctctgtggcgacggaactgccgagtcaggttcttgaaacgaaccgccgcctaattcttcataggctggagggtgtcctgctcttttgctcattccgtcagtgacgaagaaagcaaaacggatcaagtctaactctggcgcttcagaacagactaacaaagctgtcgtcgaagattgtataggtgtgactctgttcagggatagtcttcaggttctagaacagaagggtagtggtgtgcatcagtgtatctgtttactggataatagtggttggttaggtgtgtgcagaaaaagtttagtgctatgctttgtatgtgatacatattaactatgccttggaatgttcatatgttgtcctgattacgtgtgatatctctcgttcagttcaagttgcgttttctacatggccatgggaccatctgccgatttgatgaaaaaggaaaggttgtgcacctttgtaagcgggcatggagatgagctgcgctattttttttttttacaaaatgtctgctgggattgaactgtctattttataaaaatatcatattttcttttaatgt

SEQ ID NO: 9136 - DNA, 4094 bp, Zea Mays
aaaaatgtttttccctccactatattgtgtggaggggaatgagaggtgttgtattgctgaggtaggcaggggacgaggccggtgttcaattcgatggatatgtgcatgattgattacactccaaaatcttgttgttttactgccttatctcagatgtaactgcagttgtggcgctagatgctatgtcaaatggctggctcactttggcagcttgtccatttgtcagttgcatacaccaattgagattctactgctatgtttctacattgttctgaggtcctgagccattaaaatttggcgaatatgtctaatggctactgagagtgctttccgattgattggtgggacgggggctagggactggagtaagggatttggtgcatttggctcttcagcaggtgccttatcaggggaagacttgggatttgtggataatgacactggggtttatgggggctggaacaaatctgttccaaatcgtagtggaagcgcaccgcctagcatggaaggatctcttgctgctcttggccatctcattgatcagcagagtgggagctttgaagctagtttgacaaccttggataacataactgacagttccaaatctgaggagcaactacgtgctgatccagcatattttgagtattatggctccaaggtgaatctgaatccaaggctccctccgccacttatttcaagggagagtcgccgattaatgaaccgtgttggcaaggctaaagagtggaggatggtctcccaagataacagcagcaaaggctcaatatacgttcctcgatctatgttgtcaactcacaaagaagaacctgaggatgataaatctccaagattggattcaagttcagtggaggatgcccagattgtctccagtgcatccaactttcagagccaggattttatgctggagaggtttcaacagagtgttgcttcttcgcctgatagttcatcttctaatccttcaaatagcaacactggtgattctatgcctgtatattctgacataaatttgttaaagagtttgtcatttgatgctttgaagcaatcggatttgaactcttggacaccaaaaggcccactgaaaagtaatgttaacaatgacctttcatcgccacccctttccagttcatcatatcctggtagcaaaactggtacgcaaacttttgagcaagaaaaggctgctgctgacaccaaacatggaaatgttgtgcttggcagtggcgcagctgttactgaagttgataatgtggactccattatgaagaatttgaagttaagtttggatgtccatacatcctcacctgccaagcagaggtggcaggacaatgtcttgcagcagtatggttcctttttaccagcccaaggtgatcctattcaattgactactcaaggaccccatcctcctcatgtaccttttgttgataacttgtctcatgctcagctcaagttgcctgacatccaccaaaatttaccacaacctagtatgacaacacctttctatacaccaaattcttttgggaacccttattatcagaatttgcaccctgctaatgcttttccaacctcaattggaactgggggttatgctgtaagtggttctattttgccaccgtttatggctggctatgctccccaaggtcctcttgctacacctcttgacagttctatgactccaagctttagtggcaggccatctggatttcttccagcagggaatcttacagggggaacagattttatgcagtcatgtaaagtatacggacaatttgagcctggtatgcagccatccattcccgatccgaacttcattcatttctttcagcatccctctttatttcagtatactggaggaaatcaatacaatacaatgggtccaagatttactgttgttgggaatttagctgaaagctttgattcacaaaacacgatacctcaagctgcatctgcatatccatctgatcagaggcttccactgccaataactggctttcctaattctcctacagccagaagaggagggactgttccaaattatcaaggcatttcatcctacattggagtgccaatgacttatcctactagtccagtgtttcagggacaaacattgcctggagtattgcctcctgttaggagaaacgactctgctggatttctgcccccctcaagaaacatcactggtagccctggaattcaagggcagcgagcaagacagaagtttgatgaatcaaagacctgctctttcttagaagagttgaagtccaacagagcgcgcatggttgagctttctgacatcacaggccgtgtagttgaatacagtgctgaccaacatggtagccgattcatccagcagaagttggaaaactgcaccgccgaagagaagacatctgtgtttgccgagattcttcctcatgcttcagcattaatgactgacgtttttgggaattatgtgatccaaaagttttttgaacatggaactcgtgagcaaaggagggatcttgccaccaagcttgttggtcacgttttgcctttgagtcttcagatgtatggctgccgtgtaatccagaaggctctggaagttatggaacttgaccagaaaatagatctagttcatgagcttgatggtcatattatgcgatgtgtccgtgatcaaaatggaaatcacgttatacagaagtgcattgagtgtgtccccacagaacatattggttttgtagtgtctgcttttcagggacaagttactagcctttcaatgcatccatatggctgccgtgtaattcagagaatcttggagcactgcggtggtaactcacaaggccagtgcataatagacgagatattacagtgggtgtgcatccttgcgcaggatcagtatggcaactatgttacacagcatgttctagaaagaggaaaagctcatgagaggagccaaattattactaaattggccgggcaggttgttaccatgagccaaaataaatatgcatcaaatgtgatagagaagtgttttcaacatggtgatattgcggagcgggatcttctgatcagacggattgtggagcagacagagggcaacaacaatttattggtctgtttggtagtgtagtaaaagtgttccctccattatcccttcctctctttgccaaacgggtcggggttctggaaggtagggctaggacatggggacctgatctcagttcggtacagccaatcagataacaccatgagtatctcagttctgctattccagctttctgggagctgcgaatcctatggattaccaagacatgggatctctgtaaacttatttcttcctgtgttgatgttagtttatatttcctaatcaccttttatattcaatcaggcaatgatgaaggaccagtatgctaattacgtggtccagaagatacttgaaacttgcaacgaggatcagcgggagcttctgctcagccgcgtaaaggatcatatgcaagcattgaggaagtacacatacggcaagcacatcgtaagccgagtcgagcagctctgtggcgacggaactgccgagtcaggttcttgaaacgaaccgccgcctaattcttcataggctggagggtgtcctgctcttttgctcattccgtcagtgacgaagaaagcaaaacggatcaagtctaactctggcgcttcagaacagactaacaaagctgtcgtcgaagattgtataggtgtgactctgttcagggatagtcttcaggttctagaacagaagggtagtggtgtgcatcagtgtatctgtttactggataatagtggttggttaggtgtgtgcagaaaaagtttagtgctatgctttgtatgtgatacatattaactatgccttggaatgttcatatgttgtcctgattacgtgtgatatctctcgttcagttcaagttgcgttttctacatggccatgggaccatctgccgatttgatgaaaaaggaaaggttgtgcacctttgtaagcgggcatggagatgagctgcgctattttttttttttacaaaatgtctgctgggattgaactgtctattttataaaaatatcatattttcttttaatgt

SEQ ID NO: 9137 - DNA, 4259 bp, Zea Mays
ggcagagcgacgccgcctcgcctccatccccgccgcacatcgccacccggcacgaaccccaaagcacgccgcggcggtcgcccacagcccagcagcaggcagcagggcggtccgaggccgagggttttagaaaccaccacccgatcggtacggccgcacgcacccattcaaccgtccgtcgccatcgtcttctccaccgagtcgccattcgccaaaagaaaaagggaaaaacgtccgcgggggagaggtggaagagaggtgggagcgaaggaaaagcttcccgagtgaagaagtgtttcccaaaggtgtggataaggccgacgcccgacgcggttggaggctccggctcccgagaaagtggggggctttgtcgcgggcctagctccggcggaggaggacgaggcctgctggtggacttgctcgcccgcctagggttttgggctgccggccggcttgctcggaggccgcaagtctaatggctactgagagtgctttccgattgattggtgggacgggggctagggactggagtaagggatttggtgcatttggctcttcagcaggtgccttatcaggggaagacttgggatttgtggataatgacactggggtttatgggggctggaacaaatctgttccaaatcgtagtggaagcgcaccgcctagcatggaaggatctcttgctgctcttggccatctcattgatcagcagagtgggagctttgaagctagtttgacaaccttggataacataactgacagttccaaatctgaggagcaactacgtgctgatccagcatattttgagtattatggctccaaggtgaatctgaatccaaggctccctccgccacttatttcaagggagagtcgccgattaatgaaccgtgttggcaaggctaaagagtggaggatggtctcccaagataacagcagcaaaggctcaatatacgttcctcgatctatgttgtcaactcacaaagaagaacctgaggatgataaatctccaagattggattcaagttcagtggaggatgcccagattgtctccagtgcatccaactttcagagccaggattttatgctggagaggtttcaacagagtgttgcttcttcgcctgatagttcatcttctaatccttcaaatagcaacactggtgattctatgcctgtatattctgacataaatttgttaaagagtttgtcatttgatgctttgaagcaatcggatttgaactcttggacaccaaaaggcccactgaaaagtaatgttaacaatgacctttcatcgccacccctttccagttcatcatatcctggtagcaaaactggtacgcaaacttttgagcaagaaaaggctgctgctgacaccaaacatggaaatgttgtgcttggcagtggcgcagctgttactgaagttgataatgtggactccattatgaagaatttgaagttaagtttggatgtccatacatcctcacctgccaagcagaggtggcaggacaatgtcttgcagcagtatggttcctttttaccagcccaaggtgatcctattcaattgactactcaaggaccccatcctcctcatgtaccttttgttgataacttgtctcatgctcagctcaagttgcctgacatccaccaaaatttaccacaacctagtatgacaacacctttctatacaccaaattcttttgggaacccttattatcagaatttgcaccctgctaatgcttttccaacctcaattggaactgggggttatgctgtaagtggttctattttgccaccgtttatggctggctatgctccccaaggtcctcttgctacacctcttgacagttctatgactccaagctttagtggcaggccatctggatttcttccagcagggaatcttacagggggaacagattttatgcagtcatgtaaagtatacggacaatttgagcctggtatgcagccatccattcccgatccgaacttcattcatttctttcagcatccctctttatttcagtatactggaggaaatcaatacaatacaatgggtccaagatttactgttgttgggaatttagctgaaagctttgattcacaaaacacgatacctcaagctgcatctgcatatccatctgatcagaggcttccactgccaataactggctttcctaattctcctacagccagaagaggagggactgttccaaattatcaaggcatttcatcctacattggagtgccaatgacttatcctactagtccagtgtttcagggacaaacattgcctggagtattgcctcctgttaggagaaacgactctgctggatttctgcccccctcaagaaacatcactggtagccctggaattcaagggcagcgagcaagacagaagtttgatgaatcaaagacctgctctttcttagaagagttgaagtccaacagagcgcgcatggttgagctttctgacatcacaggccgtgtagttgaatacagtgctgaccaacatggtagccgattcatccagcagaagttggaaaactgcaccgccgaagagaagacatctgtgtttgccgagattcttcctcatgcttcagcattaatgactgacgtttttgggaattatgtgatccaaaagttttttgaacatggaactcgtgagcaaaggagggatcttgccaccaagcttgttggtcacgttttgcctttgagtcttcagatgtatggctgccgtgtaatccagaaggctctggaagttatggaacttgaccagaaaatagatctagttcatgagcttgatggtcatattatgcgatgtgtccgtgatcaaaatggaaatcacgttatacagaagtgcattgagtgtgtccccacagaacatattggttttgtagtgtctgcttttcagggacaagttactagcctttcaatgcatccatatggctgccgtgtaattcagagaatcttggagcactgcggtggtaactcacaaggccagtgcataatagacgagatattacagtgggtgtgcatccttgcgcaggatcagtatggcaactatgttacacagcatgttctagaaagaggaaaagctcatgagaggagccaaattattactaaattggccgggcaggttgttaccatgagccaaaataaatatgcatcaaatgtgatagagaagtgttttcaacatggtgatattgcggagcgggatcttctgatcagacggattgtggagcagacagagggcaacaacaatttattggtctgtttggtagtgtagtaaaagtgttccctccattatcccttcctctctttgccaaacgggtcggggttctggaaggtagggctaggacatggggacctgatctcagttcggtacagccaatcagataacaccatgagtatctcagttctgctattccagctttctgggagctgcgaatcctatggattaccaagacatgggatctctgtaaacttatttcttcctgtgttgatgttagtttatatttcctaatcaccttttatattcaatcaggcaatgatgaaggaccagtatgctaattacgtggtccagaagatacttgaaacttgcaacgaggatcagcgggagcttctgctcagccgcgtaaaggatcatatgcaagcattgaggaagtacacatacggcaagcacatcgtaagccgagtcgagcagctctgtggcgacggaactgccgagtcaggttcttgaaacgaaccgccgcctaattcttcataggctggagggtgtcctgctcttttgctcattccgtcagtgacgaagaaagcaaaacggatcaagtctaactctggcgcttcagaacagactaacaaagctgtcgtcgaagattgtataggtgtgactctgttcagggatagtcttcaggttctagaacagaagggtagtggtgtgcatcagtgtatctgtttactggataatagtggttggttaggtgtgtgcagaaaaagtttagtgctatgctttgtatgtgatacatattaactatgccttggaatgttcatatgttgtcctgattacgtgtgatatctctcgttcagttcaagttgcgttttctacatggccatgggaccatctgccgatttgatgaaaaaggaaaggttgtgcacctttgtaagcgggcatggagatgagctgcgctattttttttttttacaaaatgtctgctgggattgaactgtctattttataaaaatatcatattttcttttaatgt

SEQ ID NO: 9138 - DNA, 3670 bp, Zea Mays
ctctgaaacaccccacctcagcgcaaagataatgccaaaaggccaagccacctagccaatcactcactagtcatcgccatctcccatccctaaccactctctcctttccagccagtagagaacaaaatccatgaccttcttctagatcccatatatttttttcttctaaaataaacgggaaaaaaaccgagcaagaaataataataggaataggatagaggagactccattcctggccttccccttcctccctgttcggcttgctcgtccagtccacccacgataagccaagtcatccaccccactccctgcctaccaggagccaagtcatccaccccctcccccgacgaggcaggcagggacagggcaccacgccattctcgcgcgaggagagggcacaggaaagaaaaagaaaaaaatcacctccttcaacctctccccctcctccaccgaaatcatcctccagaatctcccgatctttactccgcccaaagatcctatacacgcgcggctatttgtagcgtctgccctgccctgcccggcctcgtggaaaggcgctccgctcttggctctccccacctgcgggcgggggctgttggttcgggggggaggcagtcaaatccgcctgcggctgaatcgggggagagggcccgcatggcggaggaggacaggcagcggcggtggcggcggcggcggttcgcgaacctgcgcagcgtccggtggcggatcgatctcggcatcctgccggcgtcgcccggggcctccgtcgacgagctccgccgcgccgccgcggattcgcggaggaggtatgttagtttgaggcgccgccttatggtagacccgcatcttccaaaggaggaggacagatcatccaaccttgttgttgacaacccgctctctcagaacccagatagcagctggggccgcttctttagaggggctgagttggagaagacagttgaccaagacctgtctcgattatatccagaagatggtagttactttcaaacgcctagttgccaggccatgctcaggagaatactgttgatgtggtgccttcagcacccagagtgtggatatcgccaaggaatgcacgaactactagctcctctagtgtatgttcttcaagttgacattgataaactatctcaagtaaggaagctccatgaggattgcttcaatgatgattttgatggagtggctttcccagatacagatatgcttttcagttataaacctagaaaggactcaaactggcattccagggctgacaatggcgatgattctgaaagcgcttccagagttaacactcttgatgagcttgacctggatacgaaggaaataatttcacttagtgatgcatatggagccgagggtgaactaggcattgtattgtctgaaaggttcatggaacatgatgcttattcaatgtttgatggtttgatggacggaggtagtggagtggtctgcatggcagagtttttctctacatccaaggttggatctagctcaagtctagcacctgtcattgaagcctcagcatctttatttcatttgctttccattgttgagccatctcttcatagccatttcattgagctggatgtagaaccgcagtatttcgctcttcgttggctgcgagtcttgtttggacgagagttctgcctcgacgatcttttagttgtatgggatgaagtttttgcttgctccaatgatatgctacttagagaaaatgaagaatgcaactttaagatattgtgctcatctagaggggcattcatcgcagccatggcggtctctatgattcttcaccttagatcatctctactagccactgaaatcaatacgttatgtcttcagaggttattgaattttccaaacaacgttgatgtgcataagttaattgagaaagctaaatctctacagtctactgctattgatgcgaatacattatccccatctcttttatcaaagaaggatagctgtgattatgatagagtttatagtaatcttgctacttcaactcctccaaggactccgttgcatccattagctgagagttactgggaagagcagtggagaaacctgcataatgacggaactgctcttaaggagagtgataataagggtctttcttataagagatcattaaagcaatctttgagtcagaggcttggtttatctaggacagagtcagatccttctccagttaaggtagtcagtgtgaataatgacgcgaggaattcagtgagacggtgtcttctaaactcttattcagataaagtagtacaatccaatgaagttattggaaaatttgagcaagataaatttcctatcgtgtcgattcacaaggagactattttgagttctgaaaggtcttcacagctaaagctaaaggcggctagtgagaatttaacagtaagtccaccaccaagtgtggcgaagttcaatccacttatagattcaccggtgaagcctgctgacgagagttcagcgaaaaggacagaagattgttccagtggtgaaaattctccagtgttttatacagctagggctggtaatgaacatgagaattgtcatgataatgattccgagaagagcagtattacttcaaattcatgcgccggtgatgattatagagacgaagtcttgccagacgagtcgtccagctgtaactgcgaggataaaaccgtctcagaagcaatagagtctggagcaaatgtaggtcaaactagacccttggagaaaaccatggtacctaatgaaagaaagccatttattaacaagctgcagtggctgttgaggtttggcagaccatcagctgaaggcaatgtggtggagaagggcagtggtcaggcatcatcggatggtaaacatgacgcggttcctccctgcccttcacctgctgatgcgagttcagataactcttgcagcggcataaatttggcttatggcgataataagaaggtgatgggcacgctgaagaatatcgggcagaacatgctcgaaaacatccaggtgatcgaaacggcgttccagcaggaccgcgcgcagcccagcgccatggagaacttgtcgaacaacatcctgggaggcaaagggcaggtcaccgcgatggctgccctgacagagctccgcaagatcagcaacctgctgcgcgagatgtgacccatccaaggcgtgtgcaggctcctcctcccccattctcaccccccccccccccccccccccacaaatcattagctcctcagaatcagataagcaaggcctccgtagttgaagcccaggcacctagccaccccccaaaccccccttgtatatatagaccccattcgattattccattgagcctctgctcggcagcatggatccttatgcccatgcgatgtggccatgtgcaccaatcagtgcagagaatgatttggttgtctttggcgatgtgagcaaaaaggatgctctaaacccagtcggccaggtgcattgctttctcttgttgtggcctagccaggccagtgcagtgtgtgtgtttgtgtgttctgaagagacgaggtcagggttcgtctgagctgagggatgtgcagcagtatggacatgttttctgatttggttgccgtgtttggttagctgatggggcctttgatggtttccttgacttcgacgcatgttttcc

SEQ ID NO: 9139 - DNA, 859 bp, Zea Mays
cccgagccgctgcggcggcggcggcggtggcggtccttgcgaggggagagacctctgaggcgcgggcgcggtggaaaccctatcgcgagaccgcggcttccagaggaagcctgcttcgcccggcttttggtttcatgtgacgcgcgcggcttctgtgcgaagcgcggccgtgagaagctgcccagaatctgggcgtttggccgtggcttctgcttctggcggccagaagccgcccagaatcttaaccaaacaggcaccatgtcgtctttctccgctatataggcgcacacacccaaagacacaaaaaccctagcctccaccccatccggcagcagccaaaccctacataggcgccgccgcaggcggcccccccgcatcgtcgccaaagatgcagatctttgtgaagactctgacggggaagaccatcactttggaggtggagtcctcggacaccatcgacaatgtgaaggccaagatccaggacaaggagggcatccccccggaccagcagcggctcatcttcgccggcaagcagctcgaggacggtcgcaccctcgccgactacaacatccagaaggagtccacactccacctggtgctccgcctccgcggcggcgccaagaagcgtaagaagaagacgtacaccaagcccaagaagatcaaacacaagcacaagaaggttaagctctccgtgctgcagttctataaggtggacgacaccactagcaaggtgacccgcctccgcaaggagtgccccaacacagagtgcggcgcgggcgtcttcatggccaaccacttcgaccgccactactgcgtcatgtaatgcaagatgttctttgcgattgttctctgctgttgc

SEQ ID NO: 9140 - DNA, 524 bp, Zea Mays
gggccaacaccaccaaacaccaacagcaacaccaacaacggcggagctgccaaagaaagcaaaccagaggagagaagagaggaggggttggctggctggccctggccgtcgtccgccggtagctcgtggtcgctcgctcgctccatcattcctccctctccgccggcgtgcccgcccgcccacatgaaaagcctgtgactgaggatcctggtgagcagcaaacagaagtagctgagcatgagctcattgaaggcaagttgtgcccttgaccacttttgttacccaataatattctttattatcaccattcaatgcataggtttaattttgatgggacccaataggtcaccctagtttgtttatccattttgccttgtttacccctgaatcatatgggtagctttgctattgctttacatggtttcgggataatatttcattatatccatgttccagttattttgttattctatttatgttcatgtcaagatcattaaatctttaattggaacatggagcttaac

SEQ ID NO: 9141 - DNA, 684 bp, Zea Mays
gggccaacaccaccaaacaccaacagcaacaccaacaacggcggagctgccaaagaaagcaaaccagaggagagaagagaggaggggttggctggctggccctggccgtcgtccgccggtagctcgtggtcgctcgctcgctccatcattcctccctctccgccggcgtgcccgcccgcccacatgcatggtgaggagggcgtcagaggctggggaaccgcaagcaagggcggcagtggtggactgcatcaaacattgtgacatcaggatgaatgtattatgttggttgctttcttttgccatagacttctttgccacaaatcctaatgttgaagttatatgttgcaaggcccaatcatggaccaaagcagtaggcatagtacagaagtagcggacatgtctagatccgaattcacaaaaatgttgtagtttgacttaatggaattccttcaaagacctgcgaaaaaaatctaaggtgctcaaaagtctccattgttttgcatcctgtatgtatagaatctttttccattgttacatgcatataaagcaacagttagcccttcgtgaatcttcagagtaatcatatataccacaatacatccacacttttatcttcaaacagaagcattacatctaaattttagatgtcttctgcaacagtaatttcagcaagcagacttaaag

SEQ ID NO: 9142 - DNA, 1926 bp, Zea Mays
gggccaacaccaccaaacaccaacagcaacaccaacaacggcggagctgccaaagaaagcaaaccagaggagagaagagaggaggggttggctggctggccctggccgtcgtccgccggtagctcgtggtcgctcgctcgctccatcattcctccctctccgccggcgtgcccgcccgcccacatgacggagtcagagggcgaggcggaggcggcgcgcgcggccgtgctgacgccgccgctgtcgctgggggccggcgggctcgcgggggagctccgcccggccaacctcggccagcgggtgctcagcctgttccgcaacgtccgcccgggctccgacctctcccacttccaggtacctgcgttgcgttgcgttgcgtgcgtgcgagcgccactgcccactgcccaccaccagcttacgctgactcttgtgtggctcaactcaaccatctggaacgacacagctgccggcgacgttcaacctgcccaagtcgcagctgcagctgtacggcgaggccgtgtactgcggcggcgaggacatgctggcgcggtgcgcgcgcggcgccgacagcctgcagcgcatgtgcgccgtggtggcgtggagcatctccaccacgcggccccccatcttcggcttcgcgccctacaacccggtgctcggggagacgcaccacgtctccacgtccgccggcctcaacgtgctcctggagcaggtctcgcaccggccgcccgtgacggcgctgcacgcgacgcacgcgcgtggggaggtggagctggtgtggtgccagagccccgcgccgcggttccacggcgccagcgtggaggccgcggtgcggggcgcgcgggagctgcggctgccgcgccacgccgagacgtacgccgtcgggtgcccgggcctcgtgatccgcctgctgccgtcgccgggctgcgagtgggccggcgacgtccgcgtctcctgcgccgagtccgggctcgaggccacgctcagctaccgccgcagccgccgctccttcctcggcctcggcggcggcgacgcgcgctgcgtcaggggcagggtcttccgctccgccgcgcccgacgacacgctgtgcgaggtggacgggttctgggaccgccaggtctcgctcagggacgtcgccaccggcgaggtctccgtgctctacgacgcacggcaaaccatcgctgacctggccacgcccgtcgtgcaagacagaaagggcgtgtccgcctcggagtccgccgtggtctgggccgaggtcagcgccgcgatcctgaacaaggactgggaggcggccaggcaggcgaagcggcgggtggaggagacggcgaggcggctcgccaaggagaggaacgagcggggggaggtgtggactcccagccacttctcgctgtggcagaacaagcacggcgactgggagtgctggccgctggaggactccgtgccgccggctcctattgtcgtcccctctcctttgtgactccaagtccactagcagcagatctttgttcactgataacatacgacgaacgaacgtgaacgtcgaatacatctttcttctagcttcgtcgccttgagaatgctgttatgcatgcatagtaagaaaaaaaattagtgcagccctgctcaaacagtctggtttgcagctcctcacaaaaaataaaaatagacctcacacgcagcagcagtaataacacaactaaaacgttatctggtggacctatagatggggtctatctttcttttttaagaggctgcaaacagtatggtttgcagtagggctgcaccaaatttttttcgcatagttagccacggtttctaatgacagatcggcggcaaatgagcactcagtgaaggaaacaaagtgggctctcagaccaagagaaacaaaaacaatactgtatgaatccacggtccacactaaaaagc

SEQ ID NO: 9143 - DNA, 449 bp, Zea Mays
aagagtctccaaggtggctggtgagatgatgtaccagggcgagaagatctgcctcaacatgcacttctagctgttgtgggtcaagaactgtccgaggtgcagcctcacgcacacgttgtgccttggcctcacgcagtggctggcgtaggaggcccgattctggtggacttgggcatggagaaacacaactgcacaatgatgatgaggtggctccgaccaaggcttctgcctctactgctcctgatttgtatggtaaaccaagaacctgcgatttttacaaccacaatcctcgattatactacatggaaagctagatgagtgaccaaatattgaaaaggttgaggctgctacgaccaaatattgaaaaagacgaggttgtacaagagatgaggtgccaaacaaaactgctaaactatgtgaccaagctgtgcagaggatggccccaagat

SEQ ID NO: 9144 - DNA, 748 bp, Zea Mays
acctcgagttaccgtatgcgatgctgtgagctgtcgtgccgaggttcttgtggatgatatataactcaaagagaagagttgcaccgaagggcagcggtggcatcgacagctttggttggtcttcattcgtgaagcgaagtgtcctcgagtcgctctacgtgacgaatgatggatggttcgtcgttgtgggagcagtcaaggttgtgcaggaggaggatcccctcgacttgccaccctccaacatcgggagccatctcggcctcctgctggactccacggccggttccgacgttacgttcgttgtcgacggcgagaggttcgctgcccaccgggccatgctcgccgcccgctcgccggtcttcaaggcgcagctcttgggctccatggcggacgccaccatgtcgtccataccattgcatggaatcagcgcagcgacgttcagagctatgctccgcttcatgtacaccgatgcttgtcctgaagaagccgatgactccgactccgactcctccccggctgaaaaggaagtgccttggtttcttcggcgaggggaaggacttcaagacaaaggctgtgttaacggatggttttgctcggctggcaatggaattcccatggattcttgatgagctgagggagaaggctggagcatagaggtcagtcaggtcagcagcatgtatgtgcatataataatgtacatatatgcatgctagtagtcaatggatgtagtaccagctttattcatggt

SEQ ID NO: 9145 - DNA, 992 bp, Zea Mays
ctccaaaggacaaagccacagagtcttttctccatgccgctttcctactccctctccctgctgatctcgcggcgaccgtcttggctcctcctagcccccagtgtcgaccgcccctgctcctctccatccatggctgtgctcggcctccacctcaagccgtgccctaggatcgtcttccagcacccccttcacacccttgcctccagctcgccagcaccctccgttcggccggccatggccacctcgccgaggccccagccacgacgtcatcccccgctagctatcgaagtcgtgcctcgcataccgcctattcgatgaaatgcccaaacctgtggactgtcgacaccacatctgctccctctcctaacaccctgtcgcaatttcgtgtgttgccggtacgttaattgatcacatgctatggaagacgagtggaattgatctccaagtgatgctgatggacgaagctaaaatggatgaatcaaccaagtgccaggatagaagatgctcaccaagtggtcgtcaattaacaacactaacttagtgttatcccaggcaagccccggtgcatttgtcacctccttgttgttataaaacttttatcacttatatgttgcattaggtgataggagttgagtgatgaaacaattgatgcattgccattccttggaatttgattactattccttgattcttgtttataaaagagaactaaagatgcttagccctgcttagataattaaaagttgtttcttttaaaaagatgatgtgttacacgggatatgggaaattgttgtgaaaaagaaattgggatggtgaatccatatggccatgatggattcaacatccagaaaaaatacctctgtcaggtaccaaggattgggaaatggtttaactaaaatgagaccagacgttgagcaggaaaggtcgcccgtttgtgtcgattaaggaccgttctgattgttggcctgctgatctaggaccctttaactggc

SEQ ID NO: 9146 - DNA, 1224 bp, Zea Mays
aaccaaatcccttcacgtcattttctccaaaggacaaagccacagagtcttttctccatgccgctttcctactccctctccctgctgatctcgcggcgaccgtcttggctcctcctagcccccagtgtcgaccgcccctgctcctctccatccatggctgtgctcggcctccacctcaagccgtgccctaggatcgtcttccagcacccccttcacacccttgcctccagctcgccagcaccctccgttcggccggccatggccacctcgccgaggccccagccacgacgtcatcccccgctatcgaagtcgtgcctcgcataccgcctattcgatgaaatgcccaaacctgtggactgtcgacaccacatctgctccctctcctaacaccctgtcgcaatttcgtgtgttgccggtgagacatcggttttcttctattcaattagttctttgcttggtgtcaatggttaactgcggtttatgtttgtgtactggtgtgtggtttggaggagaggaatcccatatgtgtgaggacaggcaatccgtgcaatagttgtttgatgtttggggttatgcaaatcggaaatcgtcatcattatcccaaatattgatttggtttatgatatggtacgttaattgatcacatgctatggaagacgagtggaattgatctccaagtgatgctgatggacgaagctaaaatggatgaatcaaccaagtgccaggatagaagatgctcaccaagtggtcgtcaattaacaacactaacttagtgttatcccaggcaagccccggtgcatttgtcacctccttgttgttataaaacttttatcacttatatgttgcattaggtgataggagttgagtgatgaaacaattgatgcattgccattccttggaatttgattactattccttgattcttgtttataaaagagaactaaagatgcttagccctgcttagataattaaaagttgtttcttttaaaaagatgatgtgttacacgggatatgggaaattgttgtgaaaaagaaattgggatggtgaatccatatggccatgatggattcaacatccagaaaaaatacctctgtcaggtaccaaggattgggaaatggtttaactaaaatgagaccagacgttgagcaggaaaggtcgcccgtttgtgtcgattaaggaccgttctgattgttggcctgctgatctaggaccctttaactggc

SEQ ID NO: 9147 - DNA, 897 bp, Zea Mays
aaccaaatcccttcacgtcattttctccaaaggacaaagccacagagtcttttctccatgccgctttcctactccctctccctgctgatctcgcggcgaccgtcttggctcctcctagcccccagtgtcgaccgcccctgctcctctccatccatggctgtgctcggcctccacctcaagccgtgccctaggatcgtcttccagcacccccttcacacccttgcctccagctcgccagcaccctccgttcggccggccatggccacctcgccgaggccccagccacgacgtcatcccccggtacgttaattgatcacatgctatggaagacgagtggaattgatctccaagtgatgctgatggacgaagctaaaatggatgaatcaaccaagtgccaggatagaagatgctcaccaagtggtcgtcaattaacaacactaacttagtgttatcccaggcaagccccggtgcatttgtcacctccttgttgttataaaacttttatcacttatatgttgcattaggtgataggagttgagtgatgaaacaattgatgcattgccattccttggaatttgattactattccttgattcttgtttataaaagagaactaaagatgcttagccctgcttagataattaaaagttgtttcttttaaaaagatgatgtgttacacgggatatgggaaattgttgtgaaaaagaaattgggatggtgaatccatatggccatgatggattcaacatccagaaaaaatacctctgtcaggtaccaaggattgggaaatggtttaactaaaatgagaccagacgttgagcaggaaaggtcgcccgtttgtgtcgattaaggaccgttctgattgttggcctgctgatctaggaccctttaactggc

SEQ ID NO: 9148 - DNA, 1355 bp, Zea Mays
ctctaatcaaggctgataattgtatttttgtttatgcttttggattaagaaaaaggtgtaagaatcccgtttttcttttactctccacgcgtctgtatctccttagccttatcgcattggtcacaggaaccaaatcccttcacgtcattttctccaaaggacaaagccacagagtcttttctccatgccgctttcctactccctctccctgctgatctcgcggcgaccgtcttggctcctcctagcccccagtgtcgaccgcccctgctcctctccatccatggctgtgctcggcctccacctcaagccgtgccctaggatcgtcttccagcacccccttcacacccttgcctccagctcgccagcaccctccgttcggccggccatggccacctcgccgaggccccagccacgacgtcatcccccgctagctatcgaagtcgtgcctcgcataccgcctattcgatgaaatgcccaaacctgtggactgtcgacaccacatctgctccctctcctaacaccctgtcgcaatttcgtgtgttgccggtgagacatcggttttcttctattcaattagttctttgcttggtgtcaatggttaactgcggtttatgtttgtgtactggtgtgtggtttggaggagaggaatcccatatgtgtgaggacaggcaatccgtgcaatagttgtttgatgtttggggttatgcaaatcggaaatcgtcatcattatcccaaatattgatttggtttatgatatggtacgttaattgatcacatgctatggaagacgagtggaattgatctccaagtgatgctgatggacgaagctaaaatggatgaatcaaccaagtgccaggatagaagatgctcaccaagtggtcgtcaattaacaacactaacttagtgttatcccaggcaagccccggtgcatttgtcacctccttgttgttataaaacttttatcacttatatgttgcattaggtgataggagttgagtgatgaaacaattgatgcattgccattccttggaatttgattactattccttgattcttgtttataaaagagaactaaagatgcttagccctgcttagataattaaaagttgtttcttttaaaaagatgatgtgttacacgggatatgggaaattgttgtgaaaaagaaattgggatggtgaatccatatggccatgatggattcaacatccagaaaaaatacctctgtcaggtaccaaggattgggaaatggtttaactaaaatgagaccagacgttgagcaggaaaggtcgcccgtttgtgtcgattaaggaccgttctgattgttggcctgctgatctaggaccctttaactggc

SEQ ID NO: 9149 - DNA, 1965 bp, Zea Mays
cacacccgcaccagcctcttcagcgccctgcgcccaagctccagctccgatccgtaacccaaacaaacgacaccttgggcttggagcctactgtgccaccggcccgcccacgagaccccgcggccatgtccatcccgcggctcctcctcctcgccgtcctcgccgccgccgctgcgtgcgcgcccgcgcacgccgccggcgccggcgcctgcgcggcggagaagttctcgggcaaccgcgcgttcgcggcgtgcgccgacctggcccgcctgggcgcgtcgctgcactggtcctacgacgccgcggcggcgtccctgtccgtggcgttcctggcggccccgccttccgcgggcggctgggtcgcctggggcctcaaccccagggcgcagagcatggacggcacgcaggcgctggtcgccgtccccagctccggcggcggcggcgcgtacgaggtgcagacctacagcatctccgggacctcgctcggcgccccgggcccgctctccgcctaccggacgtcgggcctcgccgccgaggtcggcggcgacggccgcgtccgcgtgttcgcgaccctcgtgctccccaacggcacgggcgccgaggtcaaccacgtctggcaggtcgggccctactccggcgggatccagatacacgacaccaagggcgacaacatgaacgccaaggggacgctcaaccttctaaccggcgccactgccgccgccagcggagggggcagcatcatcaggaagaaaaatggcagttcttcgatacagccaagacaatcagctggcatattttattccacaagatataaaccctctcgctctaacagtagtgtgccagccatgtgacctgtgacaaactgatgaagaagtctccgttcccattaagaatgccattgttgtcatctagctaccatctgttaaccaccggtttcgctctgggcgtacactgtccagtatttttctggtctcttatcaaaccatccgttcttcctgtagactcatgggatcctgaatgcggtgagctgggggcttctgctgcccatgggagccatcttcgcgagatacctcaagacgttcaggtcggctgacccggcgtggttctacctgcacgtcgcttgccagctgctcgggtacggcgtcggggtgtccggctgggcgaccggcatccatctcggaaacctgtccaaggggatcacctactcgctccacaggaacatcgggatcacagtcttcgctctcggcactctgcagatcttcgcgctcttcctgaggccgaagaaggaccacaagtaccgggtgtactggaacgcctaccaccactcggtcggctacaccgtcatcgtgctgggcgtcgtcaacatcttcaagggcatggccatcctcgacgtggagcagaggtggaagacgggctacatcgccgccatctccgtcctcggcgccgtcgccgtggccctggaggccgtcacgtggggcgtcgttctgaggcggaggaaggaggaaagcaagagctacaacggcacctctaacggcggccgcttgccgctgtctatgtagctcgtcgccatgtatctccatcatctggagaggcagcaaacagccgtgcgactggctggcgctggcgcgcttctttcccatcgtgttttcgttacacatacatgcatgctaatctagaccggtagtagttcacatagtacttcgttacatgtatacagtttacttcaagatttagagagagagagagagagagagagagagagagagctgattatgatgacgtgcacctttacagacgatgatgttcctgtacatttatcatgacgtggaaactagctccacaagtctcactttccatacggtcgtaggaacatcccttgtgatctcctgccaattcaaacctttttttttgtattctttcaaattccaaaaacttttcgtcatctccaacattgttttgttttgt

SEQ ID NO: 9150 - DNA, 659 bp, Zea Mays
tcattattgcactctgaaagttatgcatacatgactcatggtacaattatataggttcgcactattaaagtggaaaagaggatcaatgagattgtgaaccgcttgaataagacaaaggtggaacggaaacctgatttaaaggctgaaagagaggctattagtgctgctgaaaaggcagaaagaaaggcacagcttagggacaagaaacgtagggaagagatggagaggcttgacaaagagaagcaggctgatatcaggagctacaagggtctaatggtccaagagaagatgacttccaacaagcaaatcgcttctggcagcaagaccctgcaggaacttgaagaagacttcatgtgaggggtggacattataaatgccatgctgaagatttccttgaactgcttctgtcgaagacagaaggggtaccacaggcttgtgagatactggatctaaatgactcatgggcaggccatggtctgttattatctcctcttgctgttgtggtctatgtaaaccttgtttacttgctgaaaaaacaacggttcatgctccgtgtgttcaaataatattgtagtgttaagtaactgctccgtgttgatgatttgctggtgtttcgtgattgctgcagacatagaaatcgtatatagttcaaatgattt

SEQ ID NO: 9151 - DNA, 431 bp, Zea Mays
cgccgaagcgccgcaggcctggaacatctgggttttggttgccagaggcagcgccatgtgagcgtgggcaggttgctcaggtccagtgggttgacggttgcgagcttcatggagaggaactggggccggcaaaacaaaccaagaaacaaacaaacagtgaaatcagtaagaatttcgaacggtgaaggtgaatgaaccccatgccgtttgcagcggatggtttgaagggggggtgtaacgggctgtgctgcttacctcgacctgccgttgcagcgactgcacgtagtttatgatctcgtcgagcatcagcgccttgccgatcacctgaacaagcagcattttgggaaataaaaaagagatgagttcctggtctcccctctcccctgttcgtcgttcaggaaccgaaccagcgatggttacctaccttgttg

SEQ ID NO: 9152 - DNA, 377 bp, Zea Mays
aaagtgagcgtgggcaggttgctcaggtccagtgggttgacggttgcgagcttcatggagaggaactggggccggcaaaacaaaccaagaaacaaacaaacagtgaaatcagtaagaatttcgaacggtgaaggtgaatgaaccccatgccgtttgcagcggatggtttgaagggggggtgtaacgggctgtgctgcttacctcgacctgccgttgcagcgactgcacgtagtttatgatctcgtcgagcatcagcgccttgccgatcacctgaacaagcagcattttgggaaataaaaaagagatgagttcctggtctcccctctcccctgttcgtcgttcaggaaccgaaccagcgatggttacctaccttgttg

SEQ ID NO: 9153 - DNA, 122 bp, Zea Mays
gttgaagctgacctgtatcaggcgctgaggccccgtgctcctggctctgcccgttgtcgtcgatgtggaacacgctctgcaggtttgtgccggccgttccgtcctggaaaccgaactgcccg

SEQ ID NO: 9154 - DNA, 672 bp, Zea Mays
ccactggtctcccactcatcccgtctcgtttcgtctcggtctcgcacctctcacgacggcaccaccccagcgcggcgcgagtggagacgccgctgctccgtgcttcgccgcgcctacctaacccaagacctgctagacctgagtggctgagtgttcgtgttcggtcaaaacccaccgcgcgagcgcctccagagtccaaacccgctacaaatctcgcgctgcgcattctccccgtacgatacggcggcacggcccacgagccaggcggtggcggcagctagctagctgcggagtagcaccagccaccggagggaagtgggcggcgcgatgggggacgagccggacggggaggcggaggagtacctcttcaaggtggtgatcctgggcgacatccgccaggtgcccgtggaggaaggcaaggcgctggccgaggccgagggcctcttcttcatggagacgtcggccctggacgccaccaacgtgaggacggccttcgagatcgtgatcagggagatctacagcaacgtgagccgcaaggtcctgaactcggactcgtacaaggccgagctgtccctcaacagggtgagcatcgacggcgactcaaaagacgagcagaagcaggggagccggttcgggtgctgctagaagtggttcggggggtagcggtacatt

SEQ ID NO: 9155 - DNA, 3435 bp, Zea Mays
ggcgcctccgtcgccttcgtcttctccaatctccacacacactcccactgcgcaaagcgagcgggcgggcgggcaaccaaccaaccaaccccactcgcctccctctccctcgccgttgccgccgagcaccgcgccgcggggtccccgtcgccatggagagcgcccacaagagcggaggcggaagcgcgcccggagcgggagccggaggggagggcgtcctgtgccacgcgtgcgggtaccagtacccgaacgggcacccgagcgccaagcagcggcgcgcgcaccggaagcactgcggcaagccggcgtccgccgcggcggcggcggagggctccggggagcacgaggccagcgagctgcttctaggtgaggtcggagccggcgcggcggaatgcggcggcggttcgcctggatctgcgcacgagcacggggacgcggcggagggaggggacagcgcaggtaatggtgctgggcatcgagtcgttggagacacatctgctgaagattgcctcatcagtggcagtagcgttctttctgaaatcacatctgagtccagcaggactgatgatggtactctgactacagtggctacacagtactctgaaaaaggatcatctactgaggatggggatccatctgatccagcagttggttctgaacagatccaggacgttcctacgtctgttgttccagcagagcctgaagaccgtgctaaattcagttctgaaatctctgaatctgaaatacagaacccgagtattgtgcgtccggaatcagacgcagctggaggtggaacttctgaactgacggatgatgtagccagacagcaggatgaggttgccgtgactggggaagatgctgtgttcgacgccatagatggaagcaaatctagtgaaaggaattctgtgcaaggtgatgagcttaatctctcctgtcaagatatactacaaacggagactggtggggggcacagtagcactgtagtggaggaagattcaggtagcaaggatcctactgcaagtgacggccaagaaatcctgatcgaagaaactgaaccaaatcagcagagcaagcatgcgttaactggctcatttgagaaagtccctgacattgagtctgttgggtcttctgctgagaaatctgtcggtacaggtgatgacttgcttcaatctggtaaaggtgcttgccactcagaaataccagtcgatatcatagctcagctgcaacttgaccctacctctggaacggcagatcatccggcaatctccaaaggggcagacaattttgaaggacaacattatcatacaacagatgaaagcatcggagcaataccaagtacatttgaacctgctgttggtgccaaagttgtatcagttgatgtcactgctgaccttacagaggatgtttgttcgtctgacataacaatagatgacggcatgcaggaaaatgtgacaagtggtactattgtaccatctcaagttgatatactggattcgagtccttccgctacagcacatgaagtcaacattgtcggtagcataaacgatgatgacgaaaagagtcaggatggaaaaagcagtgcagatcttgcttcatacgaggtaaaagagatggttgtcaaggataactttgaagaaaagcagcagaccaaagaggtcattgtagatcccactccacatgaagccaacaactttcccagtaccgataatcacgaggaaaatgagcagaacaaagaaattgttgcagacaccacttcacacaagataagtgctgtacaaagcatgggtagtactgaagaaaaggaacatattgaagatttcattgcgaaactggcttctgaagagatcatttttacaagtaacagagatattgtcgagcagcaggatgagactgatatgaaaacaaactatgaaatagacagggcacgcaacttagaagctactgaagaaattgctgctggtggtgagagtaacacgggaaccatcacagatgttgttgaagacaaattccctaatgaagaaattactttaggcactatctctcttaacatggcagacagcagcgttaaggaggaaaagatgcatgacgaagaagtgaacgaggatctagattctcgtgatgatattatggtacatggtcctgataatgtcaaagagaagatgtgtgaggagaccatgtcaggtcccaccttagacaagttcagtttgcctacatctactgacagtcctgaagagggtaataaggacgaaagcacgcgtgcagaccctatgtcgcacgagaccaatgtggcgcaaaccagcgatggtgctgatgaagagaagaagatcagggagcttgctgttgaccctacttccagcattggtaccatgggcaacataggcaacgctgaagacaagaagccgagtgaagaaactacaacagatcctagacctgttgagaacaccacaacacaaggcacagaggacgcgacagatcctaaacctgttgagaacaccacaccacaaggcacagaagacgcggatagcagcaagcagaatgaaaacactgcgagcgtaggtggcgttgaaggcaagaagcagggtgaagaaactacagcggatcctagatccgtcgaaaacaccacagttgaaggcaagaagcagggtgaagaaactacagcggatcctagatccgtcgaaaacaccacagcacagggcacagaggatgcagaaagcagcaagcagaatgagaacacaaatgtcatggaagaagaaagggtgacggtggaagatacaacctcaagggagatcagcgccatagaaagcacagatgacctgaagggcaaggctaccaacgagaacgaagagatagccgacaaggaaatggtcaccgactcagacaagaaccatgtctcgctgaaggtcctcctcgcggacaagaacgtggaagcgaaagagaaggagaagaaggcgactagcgccaaggaccgggtgctgtcgttcaggcgccgggtatccaaggacaacgtgtcgccgccggtgaagccaggctcgccaaccaaagacaaagatggctcagggcagcaggactggaactccccggccaggttgcccgtcgagaagaaacccaaggggaggaaacagcaatgggtaccgtttatttgctgctcgtcggtacagtaatccgtttgccagcatcagcttggggcatccattgttgtgtttgtacttgtacgctgatggtagtagattgagtaggaccttcgttccaggattggaccttggcagctttgctactctacttggattgtgaacccggctctgccgtttttgtatgttataaatatctgccttgatggaggggaggagggtatgccccaaactctggtaaagtaggaaggttatgataggactgacgagttaacttttaaacctagctattttaattaaaatgaaa

SEQ ID NO: 9156 - DNA, 3466 bp, Zea Mays
ggcgcctccgtcgccttcgtcttctccaatctccacacacactcccactgcgcaaagcgagcgggcgggcgggcaaccaaccaaccaaccccactcgcctccctctccctcgccgttgccgccgagcaccgcgccgcggggtccccgtcgccatggagagcgcccacaagagcggaggcggaagcgcgcccggagcgggagccggaggggagggcgtcctgtgccacgcgtgcgggtaccagtacccgaacgggcacccgagcgccaagcagcggcgcgcgcaccggaagcactgcggcaagccggcgtccgccgcggcggcggcggagggctccggggagcacgaggccagcgagctgcttctaggtgaggtcggagccggcgcggcggaatgcggcggcggttcgcctggatctgcgcacgagcacggggacgcggcggagggaggggacagcgcaggtgcatgttcgttatgaatctcctcccccttctctgaatctcttaatcctgctgttcttcgtttccttttgttcgtttctgaagccgggaaatgtcgtcgatccttcaggtaatggtgctgggcatcgagtcgttggagacacatctgctgaagattgcctcatcagtggcagtagcgttctttctgaaatcacatctgagtccagcaggactgatgatggtactctgactacagtggctacacagtactctgaaaaaggatcatctactgaggatggggatccatctgatccagcagttggttctgaacagatccaggacgttcctacgtctgttgttccagcagagcctgaagaccgtgctaaattcagttctgaaatctctgaatctgaaatacagaacccgagtattgtgcgtccggaatcagacgcagctggaggtggaacttctgaactgacggatgatgtagccagacagcaggatgaggttgccgtgactggggaagatgctgtgttcgacgccatagatggaagcaaatctagtgaaaggaattctgtgcaaggtgatgagcttaatctctcctgtcaagatatactacaaacggagactggtggggggcacagtagcactgtagtggaggaagattcaggtagcaaggatcctactgcaagtgacggccaagaaatcctgatcgaagaaactgaaccaaatcagcagagcaagcatgcgttaactggctcatttgagaaagtccctgacattgagtctgttgggtcttctgctgagaaatctgtcggtacaggtgatgacttgcttcaatctgatcatccggcaatctccaaaggggcagacaattttgaaggacaacattatcatacaacagatgaaagcatcggagcaataccaagtacatttgaacctgctgttggtgccaaagttgtatcagttgatgtcactgctgaccttacagaggatgtttgttcgtctgacataacaatagatgacggcatgcaggaaaatgtgacaagtggtactattgtaccatctcaagttgatatactggattcgagtccttccgctacagcacatgaagtcaacattgtcggtagcataaacgatgatgacgaaaagagtcaggatggaaaaagcagtgcagatcttgcttcatacgaggtaaaagagatggttgtcaaggataactttgaagaaaagcagcagaccaaagaggtcattgtagatcccactccacatgaagccaacaactttcccagtaccgataatcacgaggaaaatgagcagaacaaagaaattgttgcagacaccacttcacacaagataagtgctgtacaaagcatgggtagtactgaagaaaaggaacatattgaagatttcattgcgaaactggcttctgaagagatcatttttacaagtaacagagatattgtcgagcagcaggatgagactgatatgaaaacaaactatgaaatagacagggcacgcaacttagaagctactgaagaaattgctgctggtggtgagagtaacacgggaaccatcacagatgttgttgaagacaaattccctaatgaagaaattactttaggcactatctctcttaacatggcagacagcagcgttaaggaggaaaagatgcatgacgaagaagtgaacgaggatctagattctcgtgatgatattatggtacatggtcctgataatgtcaaagagaagatgtgtgaggagaccatgtcaggtcccaccttagacaagttcagtttgcctacatctactgacagtcctgaagagggtaataaggacgaaagcacgcgtgcagaccctatgtcgcacgagaccaatgtggcgcaaaccagcgatggtgctgatgaagagaagaagatcagggagcttgctgttgaccctacttccagcattggtaccatgggcaacataggcaacgctgaagacaagaagccgagtgaagaaactacaacagatcctagacctgttgagaacaccacaacacaaggcacagaggacgcgacagatcctaaacctgttgagaacaccacaccacaaggcacagaagacgcggatagcagcaagcagaatgaaaacactgcgagcgtaggtggcgttgaaggcaagaagcagggtgaagaaactacagcggatcctagatccgtcgaaaacaccacagttgaaggcaagaagcagggtgaagaaactacagcggatcctagatccgtcgaaaacaccacagcacagggcacagaggatgcagaaagcagcaagcagaatgagaacacaaatgtcatggaagaagaaagggtgacggtggaagatacaacctcaagggagatcagcgccatagaaagcacagatgacctgaagggcaaggctaccaacgagaacgaagagatagccgacaaggaaatggtcaccgactcagacaagaaccatgtctcgctgaaggtcctcctcgcggacaagaacgtggaagcgaaagagaaggagaagaaggcgactagcgccaaggaccgggtgctgtcgttcaggcgccgggtatccaaggacaacgtgtcgccgccggtgaagccaggctcgccaaccaaagacaaagatggctcagggcagcaggactggaactccccggccaggttgcccgtcgagaagaaacccaaggggaggaaacagcaatgggtaccgtttatttgctgctcgtcggtacagtaatccgtttgccagcatcagcttggggcatccattgttgtgtttgtacttgtacgctgatggtagtagattgagtaggaccttcgttccaggattggaccttggcagctttgctactctacttggattgtgaacccggctctgccgtttttgtatgttataaatatctgccttgatggaggggaggagggtatgccccaaactctggtaaagtaggaaggttatgataggactgacgagttaacttttaaacctagctattttaattaaaatgaaa

SEQ ID NO: 9157 - DNA, 3351 bp, Zea Mays
ggcgcctccgtcgccttcgtcttctccaatctccacacacactcccactgcgcaaagcgagcgggcgggcgggcaaccaaccaaccaaccccactcgcctccctctccctcgccgttgccgccgagcaccgcgccgcggggtccccgtcgccatggagagcgcccacaagagcggaggcggaagcgcgcccggagcgggagccggaggggagggcgtcctgtgccacgcgtgcgggtaccagtacccgaacgggcacccgagcgccaagcagcggcgcgcgcaccggaagcactgcggcaagccggcgtccgccgcggcggcggcggagggctccggggagcacgaggccagcgagctgcttctagatccttcaggtaatggtgctgggcatcgagtcgttggagacacatctgctgaagattgcctcatcagtggcagtagcgttctttctgaaatcacatctgagtccagcaggactgatgatggtactctgactacagtggctacacagtactctgaaaaaggatcatctactgaggatggggatccatctgatccagcagttggttctgaacagatccaggacgttcctacgtctgttgttccagcagagcctgaagaccgtgctaaattcagttctgaaatctctgaatctgaaatacagaacccgagtattgtgcgtccggaatcagacgcagctggaggtggaacttctgaactgacggatgatgtagccagacagcaggatgaggttgccgtgactggggaagatgctgtgttcgacgccatagatggaagcaaatctagtgaaaggaattctgtgcaaggtgatgagcttaatctctcctgtcaagatatactacaaacggagactggtggggggcacagtagcactgtagtggaggaagattcaggtagcaaggatcctactgcaagtgacggccaagaaatcctgatcgaagaaactgaaccaaatcagcagagcaagcatgcgttaactggctcatttgagaaagtccctgacattgagtctgttgggtcttctgctgagaaatctgtcggtacaggtgatgacttgcttcaatctggtaaaggtgcttgccactcagaaataccagtcgatatcatagctcagctgcaacttgaccctacctctggaacggcagatcatccggcaatctccaaaggggcagacaattttgaaggacaacattatcatacaacagatgaaagcatcggagcaataccaagtacatttgaacctgctgttggtgccaaagttgtatcagttgatgtcactgctgaccttacagaggatgtttgttcgtctgacataacaatagatgacggcatgcaggaaaatgtgacaagtggtactattgtaccatctcaagttgatatactggattcgagtccttccgctacagcacatgaagtcaacattgtcggtagcataaacgatgatgacgaaaagagtcaggatggaaaaagcagtgcagatcttgcttcatacgaggtaaaagagatggttgtcaaggataactttgaagaaaagcagcagaccaaagaggtcattgtagatcccactccacatgaagccaacaactttcccagtaccgataatcacgaggaaaatgagcagaacaaagaaattgttgcagacaccacttcacacaagataagtgctgtacaaagcatgggtagtactgaagaaaaggaacatattgaagatttcattgcgaaactggcttctgaagagatcatttttacaagtaacagagatattgtcgagcagcaggatgagactgatatgaaaacaaactatgaaatagacagggcacgcaacttagaagctactgaagaaattgctgctggtggtgagagtaacacgggaaccatcacagatgttgttgaagacaaattccctaatgaagaaattactttaggcactatctctcttaacatggcagacagcagcgttaaggaggaaaagatgcatgacgaagaagtgaacgaggatctagattctcgtgatgatattatggtacatggtcctgataatgtcaaagagaagatgtgtgaggagaccatgtcaggtcccaccttagacaagttcagtttgcctacatctactgacagtcctgaagagggtaataaggacgaaagcacgcgtgcagaccctatgtcgcacgagaccaatgtggcgcaaaccagcgatggtgctgatgaagagaagaagatcagggagcttgctgttgaccctacttccagcattggtaccatgggcaacataggcaacgctgaagacaagaagccgagtgaagaaactacaacagatcctagacctgttgagaacaccacaacacaaggcacagaggacgcgacagatcctaaacctgttgagaacaccacaccacaaggcacagaagacgcggatagcagcaagcagaatgaaaacactgcgagcgtaggtggcgttgaaggcaagaagcagggtgaagaaactacagcggatcctagatccgtcgaaaacaccacagttgaaggcaagaagcagggtgaagaaactacagcggatcctagatccgtcgaaaacaccacagcacagggcacagaggatgcagaaagcagcaagcagaatgagaacacaaatgtcatggaagaagaaagggtgacggtggaagatacaacctcaagggagatcagcgccatagaaagcacagatgacctgaagggcaaggctaccaacgagaacgaagagatagccgacaaggaaatggtcaccgactcagacaagaaccatgtctcgctgaaggtcctcctcgcggacaagaacgtggaagcgaaagagaaggagaagaaggcgactagcgccaaggaccgggtgctgtcgttcaggcgccgggtatccaaggacaacgtgtcgccgccggtgaagccaggctcgccaaccaaagacaaagatggctcagggcagcaggactggaactccccggccaggttgcccgtcgagaagaaacccaaggggaggaaacagcaatgggtaccgtttatttgctgctcgtcggtacagtaatccgtttgccagcatcagcttggggcatccattgttgtgtttgtacttgtacgctgatggtagtagattgagtaggaccttcgttccaggattggaccttggcagctttgctactctacttggattgtgaacccggctctgccgtttttgtatgttataaatatctgccttgatggaggggaggagggtatgccccaaactctggtaaagtaggaaggttatgataggactgacgagttaacttttaaacctagctattttaattaaaatgaaa

SEQ ID NO: 9158 - DNA, 3493 bp, Zea Mays
cggctattatgataagcgcggttgtcattatcctcggcgtgagcgtgagggcgcctccgtcgccttcgtcttctccaatctccacacacactcccactgcgcaaagcgagcgggcgggcgggcaaccaaccaaccaaccccactcgcctccctctccctcgccgttgccgccgagcaccgcgccgcggggtccccgtcgccatggagagcgcccacaagagcggaggcggaagcgcgcccggagcgggagccggaggggagggcgtcctgtgccacgcgtgcgggtaccagtacccgaacgggcacccgagcgccaagcagcggcgcgcgcaccggaagcactgcggcaagccggcgtccgccgcggcggcggcggagggctccggggagcacgaggccagcgagctgcttctaggtgaggtcggagccggcgcggcggaatgcggcggcggttcgcctggatctgcgcacgagcacggggacgcggcggagggaggggacagcgcagatccttcaggtaatggtgctgggcatcgagtcgttggagacacatctgctgaagattgcctcatcagtggcagtagcgttctttctgaaatcacatctgagtccagcaggactgatgatggtactctgactacagtggctacacagtactctgaaaaaggatcatctactgaggatggggatccatctgatccagcagttggttctgaacagatccaggacgttcctacgtctgttgttccagcagagcctgaagaccgtgctaaattcagttctgaaatctctgaatctgaaatacagaacccgagtattgtgcgtccggaatcagacgcagctggaggtggaacttctgaactgacggatgatgtagccagacagcaggatgaggttgccgtgactggggaagatgctgtgttcgacgccatagatggaagcaaatctagtgaaaggaattctgtgcaaggtgatgagcttaatctctcctgtcaagatatactacaaacggagactggtggggggcacagtagcactgtagtggaggaagattcaggtagcaaggatcctactgcaagtgacggccaagaaatcctgatcgaagaaactgaaccaaatcagcagagcaagcatgcgttaactggctcatttgagaaagtccctgacattgagtctgttgggtcttctgctgagaaatctgtcggtacaggtgatgacttgcttcaatctggtaaaggtgcttgccactcagaaataccagtcgatatcatagctcagctgcaacttgaccctacctctggaacggcagatcatccggcaatctccaaaggggcagacaattttgaaggacaacattatcatacaacagatgaaagcatcggagcaataccaagtacatttgaacctgctgttggtgccaaagttgtatcagttgatgtcactgctgaccttacagaggatgtttgttcgtctgacataacaatagatgacggcatgcaggaaaatgtgacaagtggtactattgtaccatctcaagttgatatactggattcgagtccttccgctacagcacatgaagtcaacattgtcggtagcataaacgatgatgacgaaaagagtcaggatggaaaaagcagtgcagatcttgcttcatacgaggtaaaagagatggttgtcaaggataactttgaagaaaagcagcagaccaaagaggtcattgtagatcccactccacatgaagccaacaactttcccagtaccgataatcacgaggaaaatgagcagaacaaagaaattgttgcagacaccacttcacacaagataagtgctgtacaaagcatgggtagtactgaagaaaaggaacatattgaagatttcattgcgaaactggcttctgaagagatcatttttacaagtaacagagatattgtcgagcagcaggatgagactgatatgaaaacaaactatgaaatagacagggcacgcaacttagaagctactgaagaaattgctgctggtggtgagagtaacacgggaaccatcacagatgttgttgaagacaaattccctaatgaagaaattactttaggcactatctctcttaacatggcagacagcagcgttaaggaggaaaagatgcatgacgaagaagtgaacgaggatctagattctcgtgatgatattatggtacatggtcctgataatgtcaaagagaagatgtgtgaggagaccatgtcaggtcccaccttagacaagttcagtttgcctacatctactgacagtcctgaagagggtaataaggacgaaagcacgcgtgcagaccctatgtcgcacgagaccaatgtggcgcaaaccagcgatggtgctgatgaagagaagaagatcagggagcttgctgttgaccctacttccagcattggtaccatgggcaacataggcaacgctgaagacaagaagccgagtgaagaaactacaacagatcctagacctgttgagaacaccacaacacaaggcacagaggacgcgacagatcctaaacctgttgagaacaccacaccacaaggcacagaagacgcggatagcagcaagcagaatgaaaacactgcgagcgtaggtggcgttgaaggcaagaagcagggtgaagaaactacagcggatcctagatccgtcgaaaacaccacagttgaaggcaagaagcagggtgaagaaactacagcggatcctagatccgtcgaaaacaccacagcacagggcacagaggatgcagaaagcagcaagcagaatgagaacacaaatgtcatggaagaagaaagggtgacggtggaagatacaacctcaagggagatcagcgccatagaaagcacagatgacctgaagggcaaggctaccaacgagaacgaagagatagccgacaaggaaatggtcaccgactcagacaagaaccatgtctcgctgaaggtcctcctcgcggacaagaacgtggaagcgaaagagaaggagaagaaggcgactagcgccaaggaccgggtgctgtcgttcaggcgccgggtatccaaggacaacgtgtcgccgccggtgaagccaggctcgccaaccaaagacaaagatggctcagggcagcaggactggaactccccggccaggttgcccgtcgagaagaaacccaaggggaggaaacagcaatgggtaccgtttatttgctgctcgtcggtacagtaatccgtttgccagcatcagcttggggcatccattgttgtgtttgtacttgtacgctgatggtagtagattgagtaggaccttcgttccaggattggaccttggcagctttgctactctacttggattgtgaacccggctctgccgtttttgtatgttataaatatctgccttgatggaggggaggagggtatgccccaaactctggtaaagtaggaaggttatgataggactgacgagttaacttttaaacctagctattttaattaaaatgaaa
